United States Patent Application Publication US 2008/0113342 A1 - sequence listing, part 7

SEQ ID NO: 22422 - DNA, 3130 bp, Arabidopsis thaliana
gactcagatagtctccccttttccgcccataattcggttgtgattcacttccacaacttccgattcatcgtccctttggtcatccccttttaggaccaccggatctgctacaacggccttggtcaatgtggctagttgcgccatcattcccttcatcaaatcccactgttcttgggccgttggagtattattccggttatccgtgatgtcccttgcaccactactctccggtgcttcctcatttatggacttcttcccggcctcaggtccggccgagtctgtcccatcgaacatcgtcccgactctggttttctcgttgatcatcgtttcctcctcaaccaaagtctcctcgacaatgcccttgtccttcttactctttcccgttttgctgctcttacccatctgcgaaacctctaaagttaatccacataactcctagtaaaatcgcaaaagagtaaagaacaactaccgcgagattctcaagccgacgagtggtgataccccttaacccaaacacctagtcctagaaccaagcatgctctgataccaacttgaaaggccccgatccggactgcctaaagtccgggcgagttctctcgacccaagccactaagtgcctcggccctatccgtttatgaggttctttcctagtctaatccgtttcatatgattccgagattcaatatatgagacgaatagagtaaacaaacaatcggatactttattaattaagcaaaggattcgatacaacctatgagtttgcatataagctattacaagtcatataatcgatccctagactatccgaactatcaccacccatcatcccggccttgagtctctcgcgcctaagccaagtccttcccacgatcaccattcgttcctgaaagtcacagagccataagtaatcttatttacttaatcatatgcaagtctatgcaatgctctatatgccatacactactcggatccgtggagagaattcagagaggggaagatcgcgcatcagtccggccgattctcggcaggtcagttaagacccgccggtcctccgccgagccgcgtccccgcctcagccgatccctacccggactgagtcttgtgtaggatgcacatgacccggattctactcagccctctagtcggtcctttcaaggatccgacttctaactcacatcctagaacccttagactcaaagtctaggatcccttaccttccttctcgaggttaggtcgatccgaccctccttctttattgccgccacagcccggctaccgaatcctaagactatttattctcccaagagggagagagttttaatggtgagtttcttgtgttttcggtgtgttgtggtgggtggaatggtcctgggcgcccttccttatatagggggcgaatggatgcttcccgaatcaacacatccgttccttgcacctttccgaagagttgcacctttccgaagagttgcgcccttccgaagagttgcacctttccgaagagttgtatctcttcgcccataaccgcccagttcgtccgtcactcgtccagctacctcgagctcgtccgtcactcgcccagctacctcgagctcaaccgtcactcgtccagccgcctcgagctcgtccgtcactcgtccagctacctcgagctcaaccgtcactcgtccagctgcccgagctggactgtcactcgacctgagtaaccgtcactccttccagctgggcttaagctttgggcgagctgacccaagtgatttctttacgatcctagcttagcctgcatgatttcccctttgtccgagcttatggccagctccttctcacttgtccgagactccaccttcttctctcggaccaagtcctagccaacgatcctattgaggatcgcgggcgttacaaaagccgctgtaaatgggtttggttaagcagattttatcgaacttgttcaggtcaggcacggcccacattctttagaacggctactttatatgtaatttttagaaccccatacatgtcaaattttggttagccgaagagtgtaactgttaagaaaccacagagctaaagacgtcgactttcctttactcagtgactcaaaacagatcctagaacaaaacgacttcagagatgagtgatgtacttcagaaactggttcaagagtgtttgtaagaagaacaagactttggaagaaatagagaaacaaaacagagaacacacacgagactttaatacccagttcactcccaaagggtagctacgtctgggccgagactctcctcggaatccactagaatctgatagtgtttacaacaagagtctacaagcaatacacctaatacccttcactagtacttaggattgctctgcactactctgttatcccacaaagaacagttaatacaagtttatactatgaatagctttctctcttaacacctcccaaactctctaaaatgtctcgcacactctctcaatgacttaagcacctatttatacttcaaagtagattagggcttcacctcagcaaataacaagccgcagcctacgctccttaaaacgccaaaactgccagcttgaaagcgattgttgtctccttctttaacctcctctctttgcacacacaaatggacaaactgtccttaaagcaaaccgatgccattgcgaggcaagctccttcatagccgtttgctttgttgtggtcccaaaagtagactaaccaaggttgagttactttaccttgggttaagtcttaaggttaaggccaaacatttgaatatcaccttgtgcttcaagctatcagtcttcacaaatctccactagatagcataagccacaaacattcaaactgtttagagttacaagagagagaaagagtacctgattctagcctctggattctagtctcggattctccgagtttactactcagacttgacacggagcaagttcaaagctatttgaaacttactcactgccaaaactttggtgaatatatcctctgggttcttctctgtagttatcttcaacacctcaacagttccatctgatatgatctctcggatgtaatggaacttaacatcaatgtgcttggttcttcgatgatgcacattgttcttcgagagtggaatag

SEQ ID NO: 22423 - DNA, 2049 bp, Arabidopsis thaliana
ccacgtgtacattatcatttatcgtgtacgtagatatttattattttattattttaatgatgtctcatattagagtactttgagctagtaagtttgaatcaattacaaagtggtaattttattaaaaacaaacttccattactgataatcaacgtaaaaagctcacatattgttgcatggaaaacttataaatatgacaggatcgtggcgaatgtgagctctacaggatctggctaattcgtttagcacacaaccagatgtaacattggttgcaaagattattgaagagtctcgatctaatgtaacacacatccgcgcattcaggagtgcttacgtcaccacattccgggtacgaaaaactgttagcgtatgtgtattttaaagtattaccatatttctttatatcttctagcacctcctcacaaatgtcacgtgcctcctccgattccaaagcatagtggttgcttccaaagagccgaagtacgacaccacccatgtgagcattaccagcacatatgtaaagaattgcgcatgtaaaggttgcagcggcgttccttggggcaattcgctctaagtgtaggatagctccctgaatgtcagactcatgtgtaacgagacgcagtcctgtcatggtaaatagtcgtgcggttaccagcttgtaagcaccgtttgaagaagggtctatagtgatcttcggagttgatgtcatttggatcgtggcctgccgcgtagaagtcgtcgggatcgtcgcacatgctgaaaatgtttgcatctttgaggacatccggacggtagacaatgtctcttccacgaggaccggatttcaacataggtccgaggtaccaccaacatttgtcagccattttcttggctatcctcgcaagcaaatcatcaggaatatttgggtttggcatatttaggagtaagatatttcaacaaaatgaaattccaacacttaaataagcatcattgaagatatggttgggtaagttatggttgtatttattgcaaaggtattaagagatgatgtgtattcatattgtcaaatcaacgtaatagtattccatatataatttgttattgttgttatgagcaacctctttttaataacagcttaaaactagacgtgtacgtcttagtgtacgttttagtgtacgtccacatttacatttctacatttgcccaacaaacagtgtacgttttagtgtacgtccacatttatatttctacatttacccaacaaacagtgtacgctgtagtgtactatcagtgtacgtccattcataaatatcaccatttatgagacaaaccaaagacctcatatgtttgaatgtgttattttttagtgtacgttagagttgatatctcatgctagtgtacgtacatatctagttttccgagacaaacaaaaaacctttaagtattatttggtagatgcacgtgtacgtagttgtggacgcttagattttaatatccaaatttacatttacttcgggaactaaatatcatatgcgaatttggctgaaaaatattcaactttagattttaactatagcatttgactaacacgcctggcacacgatcagaggtaacagcggttgcaaacgttttggaaagctcctgataccatgtaacaatataaggcgcaaggaggcatactaattccatggctggtaggataagagaacgtaggaccatatgtattgttgtatgcagggtcaaacttctttatttccttgaagaaactcatcacccaaattcgagtggcaaccgagtccaatggataatggttgcgggtgaagagctgtagaaacaagtcgcccatataatcatacccagcacatatgaatacaatggcgcatgtaactgttgcatttgctcgtactggagcatgacgctgtaagagcctgatggctccattgatgtttcgttcatgcgttagaacacgaataccttcgtaatacactgccgtgggattattagctgcaaaacaccgtaaaaaaaatggtcgatgtcggcgttcatcagcggatctggaggattgtggcc

SEQ ID NO: 22424 - DNA, 399 bp, Arabidopsis thaliana columbia
ttctggtaaaacttgagagtagcaggaaatgcaaaaacaatattgtctttgtcttacccgtttgattattactgactgatgatcttgatcaggttatggaggaaggaacaatcactcagtcaggaaaatatgaggagctcttaatgatggggactgcattccaacagctggtaaatgctcataatgatgcagtaactgtattacctttagcgagtaacgaaagcctcggagatcttaggaaagagggcaaggacagagagataagaaacatgacggttgtcgaaaaaatcgaagaagagatcgaaaaaacggatattccaggggtacaacttacacaagaagaagaaaaagagagcggttatgttgggatgaaactttcttggactatatcggtgtctc

SEQ ID NO: 22425 - DNA, 559 bp, Arabidopsis thaliana columbia
  unsure (1)..(559): unsure at all n locations
ggtattcctttaactcctgcttcttcaatggcttcacgagaagcagcttcaagaacagtctcatcatcttcccatcctccctgataataatatacacaacaaattaacatgagcaattacaaatgatagtacagaggatgatttttcaattcaaaaaaagacctttgggaagacaagatcatgacgattaggagatgaaaccataagaacttcaagtttgtttacaaagtcaacacctgagtcttcttcagtttcgtcagctttcatcagcctataaggaatgcatctgttcataatgtatagagaaacaaacaacaagaaaatcaacaattttgttttctgatttttggggtttcttgaaaattttcaagatttgcaagaaacaaaaaaacaaaacaaaatgattttttgttgtgtaagttgttggtacccagaaacgagacggaagttgttgtcgtaacgttgacgatctcgtcctgtccgagaagaaagaaccgacatttgatgaatctgccaacacaanaaaaatcanaagggattgtagacacagaaacagaga

SEQ ID NO: 22426 - DNA, 466 bp, Arabidopsis thaliana columbia
tcaaaaaaaaaaaattgttaatggaaaatatcaactcccttgcacttagtcttttgcaaaaagagtttatgaacaagtggaaatgttaacggttagaaatatacagacttcgaaaagaaatatgcacatagaattatagaaaacgcaaaagttagtgtaagacaaaaaaacactttaaatagcatgtgaaataatcgaaacatctcttaaaagaagagtaattaagaagacaatgaacctcaaggatgggtaagaggcgagattcaagctctttggaatgcccatgaatggaagcactcagaatagcatggtgaccaccacaatcttccatctggcacatgattctcatagacccaactccaactcctacagagtataaatactaattagtacttgggatcgccatcaagataagtcctacaactgatggtaatgacgtaatcaagagtggccaagtaccgttaag

SEQ ID NO: 22427 - DNA, 508 bp, Arabidopsis thaliana columbia
ttattgatcaacagtgcatacgctgctgcaaaagagtctcaaactgttacgaacgaggtaatagccattggattacaatcttctttaatattcttcacaatcttctcaaatcgatatcgtattttttgaacaggctaaagacataatgtatcatttatacaaagctacaaagagcagtcttagaagcatcacaccgaaagagatcaaacttttaaagtacttactcaacataacagaccccgaagaacgattctctgccctagctacagcattctctcctggtgatgaccacgaagctaaggaccctaaagcattatacacgtaagtaacataaagatgcacactttagtgtttcatctttaaccacaaccattgattctaaccaagctgatgacacaggacgccaaaggagctgcataagtggataaagataatgcttgatgcttaccatctccacaaagaagaaacagacattaaagaagctaaacagatgagcaacctatcgtta

SEQ ID NO: 22428 - DNA, 546 bp, Arabidopsis thaliana columbia
caacaacaaccatttacttatttcaaagaaacagaacagaacacgattgggatttctagatttcttgcgcaagaagatcggtcgctgctttacctacgagatcctttatattcatcggagagacgacatgtttgtctccggaataaaacagattagcaacttcttcatcggttttctcggtgttgtgacgcccgtcgaagaacaaaaatgatttctggtagctgcagagcttagcatgcacgttactataaccgcacccgtatgcatttctcgatccagttccgcagcaagaagtcgttgtatcagtatatcctaaccaccataaacatgagcattaactaaaacaaccgaatccacatgtttaaaaaagagttgtttcatctttctataatttaattaccatggagtgatggttcattgatcctccggagaatttcaccattgaaatcaaagaggctgtaccggaagccacggtacagtaacggtacggttatcgcaacgagcaaacgactaagcctttcattgtgtgttttcacatgaagttac

SEQ ID NO: 22429 - DNA, 607 bp, Arabidopsis thaliana columbia
  unsure (1)..(607): unsure at all n locations
tatcaccagcttgagaaggggtactaaaacatctttgctattaataccataagtgaacggaaatgagagatgtgaaaccagaagccctctttgagaacacgcttgaaattgtacagataattgccttttggaaccgtggcagtgattctgttgcactgttaattagcaaaaggaacacaatatattatagcagataaaaacttggagaatattccatagtttctggaaaataacttatgataaataactataattcatatgaaacaaaccttatcatcaatcaaaatcattgttgtaacatcaccatacatagttggaggatgatcgcagatacagaggactttcacgtaaacactccatcgactcgagtacacgttcaaatcggagattttctgaaccggcgccataagttaccctctgtttttttcttgtgtcttcgatttgctaagttttagggttgatagacaactaaaggttaagtgtatatataaggtgagtaatactcaaaagatgcaatgtatttcaggttttcactgaaaggaaatacgaatcgtttcagtgttnagactacaatttaaattataacttttaagtaaaaatgatgata

SEQ ID NO: 22430 - DNA, 530 bp, Arabidopsis thaliana columbia
acaagttttcgtgattatcctcataaaactctctagtaataatcgaaggaaaaagaagaacgatgaggtcttttcaccttcaggtgagaactggtctcatcaaagatttttatgacacataaaaatgatgatacgttattacccagagaaaggctcttctctatttaacatcctttgttgaaaatacgactgtgtgtggccaggccaatgcaaaagcttttcagcggcgctttagttaaccacgtcaagaaccagcttgcgggacttgagaaccgaccattttagtcgcctgtagtaagcagcttggagaagagcgagagagagtaggaatatccatttgaaacccatctgcaaatagtgaaccaacattaaccgccatgtaaaatgtaacctcaaaaaaaagtcaattctttgtatcggtctggaagctgaggtttgtgtctgcaaaacgagtcaaacttgtgttcacagcatatctaaatgttattatcttagtagcagaccaagaactagtagcacttcacacttgg

SEQ ID NO: 22431 - DNA, 543 bp, Arabidopsis thaliana columbia
ttttctctaaagaactacacgaaaatatgcttaaactctaaactcatctgtaggatcatgcaaagtcagtatggggagacgaagatcttccttgtatatctcttgcaaccggtgcatccgcaatgcacaaactccggtaaaaatagtctttatttctcatgttcctggtccagtctctgtctgccaaaatagtgcccttccttcctcatttgatctctgacgtacaggccacaaccatcatgggaccggacctgcacggctgcagcagcaattggactcctatctgagcttagccttctcccacagttaagcagctacgagttagacaaacaagctgatgcagtcgaggaagctttggtcatactactggactcactaacaggtcgccgcttaagaatgggcaggtcaataactcgtaaaggcagaaacaccatcagcatgtgctaacaacagaaccagttgggattctattgtcacaactcacaactatgtaatgaacgcatcatcaatgaggatcaacggaagcaaagaggtagctgagat

SEQ ID NO: 22432 - DNA, 465 bp, Arabidopsis thaliana columbia
ttttctagacttacttttgtaatggtgagagccgaccacaatatatagagtttttaggaacggaattctcagatgagtcaatgtcaatctctggattaaccacactcaagtatagttcttggccaagataccatgaggctagattgtctattcgaagtgtccacatgccagcattgtccaaagaaaccaagacggccgtccatgcaccaggaaacacctgtaaacaaattagccgtttaaaaccacatagaaacacatgtaacatttcggtttcaggtgttaagtcataaaacctgcgtagtagatcgagcaactgcatcacgccttgttgtatgtgcttctgctattgtcggtccacagaccaaagtccatccttcaagacaaacatcattctttaactttacaatcacattgtccattatctgtcaacgtctggtcatgtaaatggctctaatatagctaatg

SEQ ID NO: 22433 - DNA, 531 bp, Arabidopsis thaliana columbia
tgaggaatctgattcagagaaggagactatactgctgatgaaaaggaggcttactttgaggaaagatccaatgagtactctactctccagctatctagagaaaatgcagagtatgattcagactttgaggattcagcaagtgaagatgaggagttctcagttcctctcttcaatctcttctctacctaaaacattctgagagtcaagcttagtgactttaaacaagctcacttggtaggaagtcccatgtctatccttgtatatattgttttcttgttatttttgatgtttttgtttaagtgtttcaggaaaaaggacctttgacaattttcgggccccactcgaccgaaccactcggctacagggcgagtgtgggcttcaattgattaaagcccagacatgaaccatactcggcccatagtcgagtatgagcctcactgttcaagcccaaaaagatgcaccacgtcggcagaagccgagtaagaaagaagtccactaagccaacattgtactcgcacgcgcgccgagtat

SEQ ID NO: 22434 - DNA, 632 bp, Arabidopsis thaliana columbia
gcattcatcattataaggctgaggatcctgagaagtgttcaaatccatttgcggttctgtagcagctggtgcagacgaattaacgcattccacgtgaacatccagcatgcatggaccgcacttgtaccgccagacaagattgcgcctcggcaaaccatgcacgtgttgctcgctccacactgactcagctctaagagatgagcaggatgaggcacgtagctcacgtgctgatgatgttgtgtgcagagtggatggacatcgaaaccacaagtctcgcagtggtaataaaccccctcgaccaatctgtggcagatgttgcacatattttctgatccattgacaaatagccggagctcatgttgtggatgcataaagcttatgagggtaaagggacaggtggcacaatggtcatgaagaacatagtcgcacggggcacatcgataggtcttccaaagccgtagttttacagcaccgcatgtgaactcgcatattcgcaaccttcgttagtggatgggtatgggaaaatgttggactcttgttgttctaactcgacgaagacatctcgttgtttgtttgttttcgttgagagtggttagctttgagagatgaatggtggtataaagaaactgtgt

SEQ ID NO: 22435 - DNA, 978 bp, Arabidopsis thaliana
agagactcaagatgtttatccctgatgtggtgcaagggaatcaggtgggtttcattaagggtcgcctcttatgtgaaaacgtccttttggcttcggagctagtcgaaaattttcttggtcagaggaatttttggactcttaactctacaacttcagacagctggatttggaggaggttgtgtaagctcagagaagtggctaggccttttgttgtttgtgatgttgggtctggggtcactgcgaagttttggcatgacaattggactggacacggtcctcttattgatttagttggtccgttagggccgcaaacggtgggtctgcctattgatgctgtggttagagatgcgttaaggaacaggtcctgatggatcgaatctagtcgcagtagaagcccgatcatcaatcagcttcaaaatcttcttccagtcgcggagggattgattgattgtcagcatgacgactcatttatctggaaaacggaccttcatgctccttcgaacattttctctacagcgaagacttcgcttgctctccacccgcagaatcacattgtcccttggtataaggcggtctggtttaagaatcatgttccaaaacatgctttcatttgttgggtcgtggcttggaatagactgcacactcgggatcgattacggagctgggggctctcgattcctgcagtttgtctcctttgtaactctcatgatgagtccagagctcatctcttctttgagtgtcctttctgtggagccgtgtggcggttcttcacgggtagggctaatctatttcctcctgcgcagctcatgtattgtctaatctggcttctcaatccctcgagggataagaacactactctcattatcaggctagcttttcaggcttatgtttatgctatttggcgtgaaaggaatctgtgtcttcacaccggagtcgctcgcgtctttgattcggtcctgaaggacatccagcttacta

SEQ ID NO: 22436 - DNA, 800 bp, Arabidopsis thaliana
agtctgtactagtctcactccgacgagcggaggcggagatatcaaagcggagatgacacgtgtcacgtttctcgtctttaaaccggagatttcaaaattcccggctataatatccaactctgacgccattgggccttttatttctcggtctgcctgacgttatcttgtgagagccacgtggggaaggagaacggcgaacagttcaaacggcagactccgacacgtgtggaaaagcagaacacgtgtcaaaagaacgctgttctgtttcacaatcttctccttacttgttgttgaagagagaagtattaacagagaaagagagaagcaacaagtgaagaaagaaagaaaaaaatggagaagagtggaggaagaattgtaatggatgagataagaagctttgagaaggcacacttgttcgatcttggtcatcctcttcttaaccgtatcgcagattccttcgttaaagccgccggagtaagttttcatccatatctcttcgtttccctgtcgtatatgcatgtaacatatatgtagtaacatagcttaatatggattaactatgaaggtgggagctttacaagccgtgtcaagggaagcttactttaccgtggttgacggtaagaaactccggcgggtttcttcttacttatgatttatatgtataagaaatgagtatgtaatgtaagagtgaaaatgaataaatagagaacgtactttagtttgattatacattttaggggcaggttttgactcgaacaacgtgggtccaccgtcggagattacagggaacaagaaacata

SEQ ID NO: 22437 - DNA, 520 bp, Arabidopsis thaliana
actcctccctcttccttcttcttcttccctcaatccggagacctccgccgtccaccgccgccaccaactcctcctccttctcctcctctccgagaagccctccctctcctcagcctcagccccgccaacaaacaacaagaccaccatcacaaccatgaccaccttattcaagaaccaccttcaacctccatggatgtcgactacgatcatcaccatcaagatgatcatcataacctcgatgacgatgaccatgacgtcaccgttgctcttcacataggccttccaagccctagtgctcaagagatggcctctttgctcatgatgtcttcttcttcctcttcctcgaggaccactcatcatcacgaggacatgaatcacaagaaagacctcgaccatgagtacagccacggagctgtcggaggaggagaagatgacgatgaagattcagtcggcggagacggcggctgtagaatcagcagactcaacaagggtcaatattggatcctacaccttctcagat

SEQ ID NO: 22438 - DNA, 569 bp, Arabidopsis thaliana columbia
taaagaacttaagaatcctaacttttcggtaactgatttacaatgagaaggaatgaaacaaaccgcggtattgagcattgttgacgatcaatgttggcaagattgtgacatctccgcggtcaccttgtcctacctataagtaacaaagaaaaaaaatctcagtgaatcggtttaaaaagacggtaaaatatagacgcatttaagaagagagccaagacctgaagtgcttgctcagctttcaaaacttcattctccacattagcatcaggatcaccaatacatttcttgatcttgtcaagtggcaaacctgagaataagagaaaactcaagacgctgaatgtgaagaaagggtactaaaaattattgtgatgtcccttacctagagattcaacaactctctctgcacattctttgctatacttcttctccttcattgaacatctaatgtgaaaatcagtcacatagtcccaccaaacccaagaccggttattctctttagctactttatgaacacacaactgtctcaagttctcgaagacaatgtctttaccatcgtatccatcaccaaa

SEQ ID NO: 22439 - DNA, 995 bp, Arabidopsis thaliana
tttacaagaatgtcaacgaatcaaactttagagaattttctaacaagcgtttcaaagcacttcgtctgtcgctcatgatatttcagatggacatatctcagtgttcaatgatgtggaagatgctatctgctatcgaaactcgtatggtcagaaccatcagatccgtaaagctgttctgagtgctgtcctcggtagcaaaaagaatgaccactgttatttctctagtgttagtcttaatgttgctaaattcctttcttggacagacatggcaggatattatgttgtcgaagaaaatcttgtttatcctgattcccctgttctcaaagctcctgagttagcaactgaagtaagcaattggaaaaaagcagatcaagcaatcaaggaaactgactcgcctgagtattacaggatcttgcatgaggatcctgcgagctgctctatacttagaagagcaaactttccgacgctcattgctgtcgcagagaagttgaagaatagagtgcttggtggcagcaacaaggtagtgaatgcagagatatctgacaaagtagactactattttgatatgcatgtcaagtagtacgcttctggccgagtgtgcgaacgcaccgagcgtattgtcgactactttgaggaaaattctgagtcattagcgaacgttttctgtagttagggtctgattctacatggcgtcctgttttttttttgtttttttttttcttgtgcaccacatgtgtttaatcagatattttagtatgttgctttgatttttatttgctgtcttaaacttcattaaaaaagaattcaaggaagagattcaaaaacagaaatacaaagcatgacagttcaaaacagagcacaattgctccgaatatgtaaaacatagttgagactaagtaacagttagcccaaagaatttcttcactacacgtattgtttatgaattctaagatttcttaaacctaaacaaccctttcttgggggaaaatagtata

SEQ ID NO: 22440 - DNA, 841 bp, Arabidopsis thaliana
  unsure (1)..(841): unsure at all n locations
catcctctttcaacttgtcatattagttgtttgctcttccttaggtttccatggtctctaggctgaagcatgaaaatctcattcaattgcttggtttttgtgttgatggaaacctccgcgtccttgcatatgagtttgcaacaatgggatcgttgcatgacatcttgcatggtaagattagctttttggactttaagattctctgctcagttctctaactaaataaaccccctgttttgaccaaaagtattcatatcggtgccaaacgataatttgtccatgtaaggttgcttattgtgcgattacaggtaggaagggagttcaaggagcacaaccaggtccaacacttgactggataacgagggtgaagatagcggttgaggcagctaggggtttggaatacctccatgagaagtctcagcctcctgtaatccatagggacataagatctagcaatgtccttctttttgaagactacaaagcaaagattgctgatttcaatctctcgaatcaagcacctgataatgctgcccgtcttcactcaacaagagtcttggggacttttggttatcatgctccagagtaatgtttcttaagcccttattgttttgtattcgtatgaatgtctaataaacagctaaaatgttaatccgccctcttatgcagatatgcaatgactggacagttaactcagaagagtgatgtgtacagctttggtgttgtacttctagaacttcttacagggaggaaaccggtggatcataccatgcctagaggtcaacagagtcttgtaacctgggtgagtatacatacgttctggactataatgtntcgtattaat

SEQ ID NO: 22441 - DNA, 545 bp, Arabidopsis thaliana
gagtctattgttcattgtcttttcccaaattttgatttgttgtcttcttgtgtgtttctctctggatagtggatacaacttggttgcgttaagatgcttaaactctttctatgtctcagattgtgtggaaactttaattagctcacaataatctttatgaaccaatgcatctctcaacttcagatccttgagaacattaaaaaccaaaacaacttcatagcttcttgattcagctctataaatgttgcttctctgcttttgtatttgtaggtacgattactccgggtatggacaatctactggaaaggtttgtcattttgagaatcgacaagtagagatatcgataatgattttacccgattcgagtgaaaaactaaataaccgaacttgttttcgtgtgactgcagccaagtgagcaccatacatatgctgatatcgaagctgcttataaatgtcttgaggaaacctatggagcaaaacaggaagacataatcctttatggccaatccgttggaagtggacctacattagatcttgctgctcgg

SEQ ID NO: 22442 - DNA, 548 bp, Arabidopsis thaliana
ccaggtctactctccagtagtatcgatgtattcatcatcaccctttctttgatttaacttaaaagatttttttattcatcttggttcgtaccaagcagagaactcaacacaccagagcccctgtctttctcactttttccaacttcaatggttcttgtttgcgagattacattgcttcctgatctcacccttagagccagtcaaggggttgttctcggataagatctggattgccctagtgaactccttgaagaagtaggcctggtccttagccatcttcttaacgattggtctggttcgtttgtcgtgtgcgagctgatggtccacaaggagcaaacccttgttgtctaggatgttacggtagtaattgttgtctagcaccatgggggtgccacggtcgttacgcacgtactggaccgcctttgggtcagggatcgagtcaggacacttgtgtagcatgtgagggacgtggtccgggtttaaggacgggtccactcagggtacaaacgatggaccagcttgacacagtgagttctcccacgctgtgt

SEQ ID NO: 22443 - DNA, 4356 bp, Arabidopsis thaliana
ggttgacgacttccacaggttcaggtttgagcactctatagagaggagagctagcatccttctccctagccctgaggttacacagataatagagggagataacattgattttaggcctgaggttggacgcctctactatgagaacgctccgccattggatgaggatgatcttcttgaagaagctgcttcggatgggatggatgaagatagggcggtggagttcgacactagcatgtatcactttggtgaacatgtacctccagcgaggcagagcaagagcttgactgaagctcataagaataacagtaaattgcagaagtggtgcaagaagcaggacaagctgatcgccaagtgtttcaagcttctgacagataagctaagttgctcttcctccaccactgctattccacaggtacatcctcctctggagatgccatcgaggagaattgatgcacctgcgcacaggcctgagcttagcgagcagagagtcccacatgtccaggctaggcattcgtcattcgaaatccgggaacacaagagagaaaggaagacaacactcactcgatctagcagcagatcacgcctcattcactcgaggagatcactcgaccgcggtgctggccgcagcagaaggagagaggtcaagtttcctcagagcggtgctggcgccacagagctgatgaggtcgagtacccacctgctggaggtgatacagaacaaggtggttcgtctatagcttgcgagcaatcgcaggcagccattgacgagcaactacgttcattcttcgactgaggtaagcgcctcacttcaccattgtattataccatctgttatgatttgtttcttcattttttgtttctgtgattggatttgtcctgagtactctcttccaagtttattcgcacagtggactgtgtgatttatgtttgggggagggcttcggaagtgtgtgttgcattgtgtatatttttgagtctgcattcatctaaggcatagaaaaaccaaaaaaaatttgaaaaattcagaaaatgatttcacaaaaaaaaaaaaagagtgttcatgtacctgcattacatttagtatcgagtcttgagtgtttcatttaggattgttgcatatgcataggggatgatgatgagatagccttgtaagcattttgattcaccggataaactcaatgccctcattgctagttgtctgttgcatagtcaatgaatttgaaaaaaaaaactgaaccatgcctagattgctctactagaccacactgtcatgaactgataccattccctatcaatttgaacctgaatctgatctttaattatcatgtctgcatcaaatttgaactcatggataccttaaaatacttggattctcttattcattttgatcactcttgttaatccaagtagctgactctctttattagagcagttaacccaaacccaaacctagactttctttcaagccctatatcacctgtgagtgtttgtgagatcttattccgattaagcttggtagaaagtgttaggttcgtaacgacagagatagtgtctcatgtagttctagttcacatttttcggactagataggactaggtgggcgtttatactttgggttgggatgtgtttaaaaaaaaaaaaaaaaaaaaaagggggttgattcaatgataagaaaaggtagaagactctaggtgaagtaagctaaagaaacagaaaaagtctagtaaaggttttgggatttgaaaagaaaagaaagagttcttgttagctattgaagatgggcgaaaccttgagttttaaaatgttaaaaacaggaaccttagttgttaaagaaatccaaatccgctagatgtatcaaagtgttgagaaagcttctcctagagttaagacaaaagaaaagaatgattagaaaaagggcttaaaagattcatgaatgcaaagggtagaatttagttcttgtattgggattggagatgggattactattagagcttcatttgatgtactctaggtagatgggatcttatctctgtatgcatagcttgggacttacctttagcattcaactaaagcttaatttttttttgagagatccctgttactgaagcctattctgtaagggaccatctttgtctcttgaccttttaccttagccgaatgagttctttgatgatgcattgcttgattcacgttccagaactaatgaatgttaaaggggttggtagatttgaaaacttgtgcaggtcgagcatatgagtcggattgattgatgatgaggcatggctaacgtttttaagtagaattcgatcttgcagcttagaactttcaacttggacattgatttcgtatggtttatctggtgctttggctctgagtccccgctttcaaacctcacctccagcttgttcttgattgtttgcttgagggcaagcaaagactaagtttgggggagttgataagtgtgtattttgcatgttttgagcatccattttacatcactttagcatcatttctcatcatttgtcatcactttacatgtttaggatagatctgcatgcatgttgcatatttgcgttgatttcaggtgatttggagctgttgacgagctatctggaagaagcgggcctgatcatgtcaaaccattcgaccccgaggtcgagtagaagcttcaagatcttaacagatcactcgaccccctggtcgagtagaggacatcactacttcaccacatcactcgaccctgaggtcgagtatcttcatcccatcacctgacaatcacacaatcacatcactcgaccccgaggccgagtgtctttaccttcattgccagaacactactcgacctcttcactctacctggaagtcgagtatcaccatcagcagcactcgactgcatactcgatgacaagcttcagagccttcttcattccgcactcaaccagacactcgagcacaaggaagaaaagaagactccagctattcactcgaccactcactcgaccacatgggtcgagtacagttcttaatccgtcccaatactgcgtcgttttaagtattagggtttcggaatatttggctataagcagcatgtacttcacattttcgcagacaagttttatctagttttattccgcagaccttgtgttctagacctttttgtaatccggatttctatttatctattcagtattcagtatacagcttttgttcttgatttcgtttactgttgttcattctgttatcatcttgttgttatactgttgttatcatgttttcaacttgttcaacgtttatgctttctgttatgatgtctgagtagtgaataggtttctgaggatgggttagagtagtgtagaattctcagtatgctaggtgattgagtattggttgatagatcccttctgaattagttgttcttaatgcctattgctttctgatcaactggaatttgagcccagacatttccgcgcccaaaaggtgttcgatgaaatgtctgaaccactaattccagagattcgtgaccctgtaccaaggtattggttgcagggagcgttttggctttaacttgttgattcgtaatgcctgttaggttagctctcgtcaatggtgattgagtctgggactaggttaacttgagagtctctgttgcggtggcacttagatttggttaatgaacttgttgtctagggttaatttattgagcacgtcaatcaccagtaaactgaggaaacgaaactactcaattaccccatcctcgggaattctttatctgattgaattctttgtttactctactgttgtttactacatcttgttatctgtcgcttaatttctgcagttctttcttgttactcgacctcatactcgaccaccgcagttgtctggcaacagactgtgcagtcgtgtgactgagttttattttctgtctgttactcgacctgtcactcgacctcacccagtgctctgcaaagagctgtgttggtcgagtgttttattgtttctgcttgaatttctgttttctgcatgttcacttagaactgctagaacacaccaaaacctgttattgcttggcttgacttagtgacttctgatcacatcttgattgttagcatcacacccatttggattgacaaccttcagtactacaacgacatgatagtgctttaggattaattgatcttaaaaacctattatcaaaaacattgatagaagtagaaatatctttaaatagatcgattgagaggaaaactaaacgagagacatatgaaatcaaagtacaagagtagttatccttgatcgactcgagcatgtaacgaatcatataacattccatagatctctttgatttgggttttga

SEQ ID NO: 22444 - DNA, 482 bp, Arabidopsis thaliana
taagctctaaaaactgtctttttccttgatgaagaagtaacactggtggcttagttaactggttttgttttgtgtttcagtctgtaccggtttatttatcagaaatggctcctccgaatctaagaggagctttcaacaacgggtttcaagtagcgattatctttggtattgtggttgcaacgatcatcaattacttcaccgcacagatgaaaggaaacatcggatggagaatctctctcggattagcttgtgtccctgcagtgatgatcatgatcggagctctgatccttcccgacactcccaactctctcatcgaacgtggctacaccgaagaggccaaggaaatgcttcagtccatccgaggaaccaatgaagtcgatgaagagtttcaagatctcattgatgcaagtgaggagtcaagcaagtgaacacccatggaagaacatcatgcttcctcgttacagaccacaattgatcatgac

SEQ ID NO: 22445 - DNA, 2638 bp, Arabidopsis thaliana
tcggcttcttgttcgtgaattcagtagagccttccaacttcagagaagttactcgacctctaggtttcacgattcactccgtctccacgattcactcgaccgattgtagcattccaactcgaccactgagaagatactcgatccagttcgtctaagctcaggaacagctcaggttactcgagtacaaaattgtactcgaccaattcaatctatttcattgcctattgacaataattttggtttcattgctatctttgagactaacctattgacatttgagctttgagttctaaatctctacaggagaatcatgagcaattacagtggcagttcttctgttgatcctgactacaacatggatgagacagagtcgtcatcttcaaggccagagagagaacagagagaatacgaaagcttcagaaggaaagctgagatagcccgaggaaagagagcgatgaaagagaggtatgagcttatagacgaagatctggaagacgagtacatgcctgaacagactcgcagagctaccaaacttctgcacaagcccgacgtattgccaggtgaggaatatgttaggcttttcaagctgaatgagttctgtagcacgaggtatccttgctcgacctcacttgtacaactcggattgttagaagatgtttagcacctgtaccaaagttgtcatctggacactctaatggcttatccgtatgtagcgtatgaagatgagacaatacaattcctctccacgctgcaagtagagctctaccaaggtatgacctctgatgagttggattgtgaaggattgggattcttgcgattttctgtgtatggtcataagtataggttatcaatcaagcgattagaaggattgtttggcttccccagtggaacgggatctaagccaaagtatgaaagagaagagttgaaagacttgtggatcaccattggcagctctgtaccgttgaatgcttccaggtcaaagagcaatcagatacgcagccctgtcatcaggtacttccagcgttctatagccaatgtactctactcccgagagatcacagggactgttactaactctgatatggagatgatcgcaatggccctcaagggaactcttcgccaaactaagaatggtatgtccctccagggtgaaatcaatgacacacctctctctgtacttcttctgatccatgtgtgtggatacaagagctgggctgtcagcaataaccgcaagagagcacgaggcgctctgtgcataggtggcgttgtgacaccgattcttatagtttgtggagtcccaatcatttctgctggactcgagccgcgagcaatggatatcgagcacctacgtcactgcgaattcttggagtttgcaatggttgacgatttccacagattcaagtttgagcactctacagacaagagagctaacatccttctccctagccttgaggttacacggataatagagggagataacattgattttaggcctgaggttggacgcctctactatgagaacgctccgccattggatgaggatgatcttcttgaaaaagctgcttcggatgggatggatgaagatagggcagtggcgttcgacactagcatgtatcacgtgggtgaacatgtacctccagcgaggcagagcaagagcttgactaaagcttataagaataacagtaaattgcagaagtggtgcaagaagcaggacaagctgatcgccaagtgtttcaagcttctgacagataagctgagttgctcttcctccaccactgctattccacaggtacagcctcctctggagatgccatcgagaagatttaatgacacacctacgcacaggcctgagcttagcgagcagagagtcccacatgtccagggtaggcattcgtcattcaaatcccgggagcacaacagaagaaggaaggctacactcactcgatctagcagcagatcacgcctcattcactcgaggagatcactcgaccgcggtgctggccgcaacagaaggagagaggtcgagtatcctcatagcggtgctggccgccaaagagttgatgaggtcgagtacccacctgctggagctgatacagaacaaggtggttcgtctatggcctgggagcaatcacaggcagccattgacgagcaactacgttcattcttcgactgaggtaagcgcctcacttcaccattgtattatatcatccgttgtgatttgtttcttcattttgtttctgtgattggatttgtcctgagcactctcttccaagtttattcgcacagtggactgtctgatttaagtttgggggagggctcaggaagtgtgtgttgcattgtatatattcttgagtctgcattcatctaaggcatagaaaaaccaaaaaaaaattgaaaaatttcagaaaatgatttcacaaaaaaagagtgttcatgtagttgcattacatttaggatcgagtctagagtgtttcatttaggattgttgcatatgcataggggataatgatgagatagccttgtaagcattttggttcactggataaactcagttccctcgttgctagttgtctgttgcgtagtcaatgaatttgaaataaaactgaaccatgcctaaattgctctactcgaccacact

SEQ ID NO: 22446 - DNA, 1276 bp, Arabidopsis thaliana
ggtgcagttctggcattggagaagaattttgacagaaaagccttcttacaatcatcccaggtggtgattgagtcatggggcagattcttctcccagatatgtgctttgtcacccaaggaaaatgggaacaaacggagcttgaatccatcttcactgacaccattgatcttcgttaggttgcagagcctatcgaattcatcaaggtggtcgagtggatcctccattggcaaaccatggaatttgttcccctgaatcatcgagatgagaccactcttaatctcgaagttgttattctggatagcaggaggtgcgattcccttcctctgacgatgatcacgtggtgcatctccggcaccaatgttggcatggccattttgctgattctgttcttcagccataacgagtggttgctgaggtacagggttgactgtggttctcctttttctgatttcgcgggctgtgcggttgatattgtcgttgaaaaggaggttctggttgcctgttgatcgagttcgcatacagtagaggtgtacctggatcaagaagacaacaagaaaaacacacagttagtaactaaaaagaaaattgaaaaagaacttgatctaagcaagtctgaaatctcaaatgtaacaaacaaacacccaattggcaacggcgccaaattgataataggtttttcagtcaattatcctaaaacaccaatcatgtcgttgtagtattttaggttgtcaatccaaatgggtgtgatgctaacaatcaagatgtgatcagaagtcactaagtcaagccaagcaataacaggttttggtgtgttctagcaatcctaagtgaacaagcaggaaacagaaaatcaaacagaaacagtaaaacactcgaccaacacagctctttgcagagccctgggtgaggtcgagtgacaggtcgagtaacagacagaaaatgaaacaaagatactcgactgcacagtctgttgccagacaactgggtggtcgagtatcaggtcgagtaacagtaaagaattgtagaaactaagcaacaggtgacaggatgcagtaaacagtagtagagtaaacaataaaatcaatcagacaaagaattcctaaggatggggtaattgagtagtttcgtttcctcagtttacaggtgattgacatgctcaacaaattaaccctagacaacaagttcgttaaccaaatctaagtgccaccgcaacagagactctcaagctaacctagtcccagactcaatcaccattgacgagagctaacctaacagg

SEQ ID NO: 22447 - DNA, 3169 bp, Arabidopsis thaliana
agaatgatgaaagtctcgccattatttatgccaggcaccaatccgttaaaaaagcaataatggcagtttatcctaagtctagccggggaatctgtacataccacttgtaatagaatatattagttcgctttaaaggtcaggatgcatttggtttggtaaagaaggcagcaaacgcttacagattagtcgattttgaaaggatatttgatcagattttagctttgaatcctgctattcatgcttaccttcaaagagctgatctacgtttgtggacttgtgtgcatttccctggtgataagtacaacttgcttacaagtaactttgtggagtcaatgaataaggtcatgtcaccagcaagaagccttcctattgtacaactgttagaagaaattagatccatgatgacgagatggttttcagacagaagaaatgatgcattgaatttgtctacatatcttactcatggagtagagaagatcttgcaggtttcatttctaatacaaacataatttatacacgtccgtatattggtgattatagctaactaatgacaatgtattttttgtagagtcgtgtagagtacgccaaattgctaagtgaggcttttcgaccagttactgtccgagcagggacttgaatttgaagtagacatcggtcaggtcaagacatagatgcaaatcaagtacaagttacgtttggagcatctctgcatgttgttaatttgaaggacaagaaatgttcttgtcgcaggtttgacctagaaaagatcccatgtgcccacgcgcttgcagctgctgaaaaacgaaaactttctcggatatcattgtgtcatccttactttcagaagaattatttatgcaagtcctatgctaatgccatcatgcccaggaactttgatatacctgttcccgagaatgtcgtgtcgaagatatgtttaccaccggaagctcgtcaacaaccaggtagaccaaagaaatcgagaattaagtctgcactagagattgctatggagaagaagaagcctagaagacaacacacttgtggcaattgcaagcaaattggacacaatcgtaagacatgcaaggcttaatgtcttttatgacttttttctttttatgttcatttctatgattctgttctaagacaataaatcccaacgattcccgtttgctgtttacattgcatatgtctgaaaccaagggaaaaaaaatacaacgaattcattaagcagccttctcctaaacgtccacaaagctttcactaatgcattcaatcaacagatgtatcccaatgaaaaccaaaaaatctgatttgcaaatttttgatgcttatataaaccaaaaaatcaaaagaacgacttaaaccgcgcattaaagacccgaattgaagattcgtaacgtacgacgttaataacgcgagatccgcggcgtgaagtcagcaagtattttaatacgtttgattcgatgtattgagtataaataggattcgatgacatttgtaaaggggacgatggaagataggcatttttacctacttccagtttcgccatgaggtcaatattgttcacctcgagttcctggacccgtagctcggcgtctttcatccgcttcagcaccctgctggccctcttcaccgtatgagcgttctcgtcttcatttcgcctaaagctgtcaagttcgctatccttgtcggagtttgctgtcttcaagggtccccgacatcacgaccctgtcagacaagatcctggccttttcttgattagctctttccctctcacgcttcttttcagctcggtacgatggtccagacatctcagctttgcaaaatatacgaggagaaaagggaggtgaagagatagcgaggtcaggacgagtccgaagtcatttaccagatgctcggattcggtccgaggtaagagcttcccaaccaaggtcttgaccgcagaagttagagaagtgagatgcaaatgcgcgattatcgcgggattccgcccgtctcaagtagctcgtcagctcgtccgtctcaagtagctcgtcagctcgcccttcccaagaagcttgttagctcgctcctcttcgtcaagctattcagctcgcctttaagctcttcaagctcctcggctcgtcctcaagctcctcagctcgtcttcaagctcttcccatcactcagcgaccatctcctcgcctagctgtcagctagtcagctcgtccaactccacgtctagctatcagctcatccctcgactgcaaaactcatctacctcactcgtagcggcagttcgtccattgactgcatggtctacctatctcgtcccccagctcgtctacaccttcagcaaacaactcggtttgtccaactcgtctctcttccacggttcatccagctcgtcgcacatttgccggctcgtcaactacctgccgacctacctccaatgacggcctagctcacttattctaatatgaactacgtgtggcttgatccctttctaagggtacgtaggcaaccttttacaaggttcagctataaaacgaataaactctattcttcctcggacatcaagttcgtcttccggcctcaagctcacctttcatctacaatcagctcgttcttactccatctatgctcgttgaagaaatcatcctttgtaatccgtccaattcgcctaagtcgcaggctcgtctttaatagaaagattcttcttccttccctagaggtcccattttcgtacttgtgtgattcgtgcatcaacaacagtgactgtgatattaattacaccaacttccttttatcttgttttagtctttaaaaatattgatccttattccttcgtaaatgcatgtgatgcttttggcattaaatcgtgactaacaatatgaccaatgatcggaaccaatgatcggaaccaaagctagaggttcagcttccaaagttgtcagtttaagtaaatgcatgtgatgtttttctttgtcaaattggttgtaagttgtagattgtaacataaaatcaattcttatttgacgcatgatacaaaacctaaatggcgcttgaaaattctgacggttaactgtaacaaaagctcaagaggtgaaagagaatctgtattcttaatttccatatccatattgtataagattcgagaagaatattttagtttattcgtctgcactgg

SEQ ID NO: 22448 - DNA, 3552 bp, Arabidopsis thaliana
ctcatcctcacttcctaacgacatggttcctcacattgacggacagtttatcagagatgtcgaagccgtgctcaccgctcctgatcgggcgaatctcccagttttaaaccctggattgggtacatgggttgacaaaaccattgttacgtggttcacattcaatcaccaactatttgtcgcgattgcagatatactccaacgcaactttcaccatgcgtggccgacgtaccggatgattcctgttgttttcaaggcaagatgtttttttctcctcacggtaagcatcgagtttttatataaagcacttcctgtaaaccgtagactaaattcttactatttgctctctttgtagtgtatgtaaacctgagattcaaggcacacactaacggtgtggacgcagtttaatttgttggctagaacgttgtaccgggacaatatgcgggcgctgaaacggggatgagcgcgtggtttagataagtcgtggtggatgacgacaacagtttggaatgatttggtggacatgattactgaatttggcccagatgatgtcggtttcatgtgttgaatgcttttgtgtctcttacttctcttccctttatctcattcctatgaactcagtatattactctcttcttttttttggtaatggctttatatctcctattatctacgatcgccttctcagtaaagtcagttgttatcgcttgaggtcacttgttaaattttatcataattcaggcctaactcaaaattaactcatccatatcaattgattaactcagccacaacattataataactcagtcgtatcaatagattaacgcagacacaacaaagaataactcagtcatagcgttttattaactcagtcacaacattaccagtataactcagtcaacgcgttgtaaaaatctcagctataatattagcttaactcagcaataacattatattaactcagccacaacattggattagcttgaccgaacacaaagttccatttcattgcaagctaatatttgaaccaaaaaaacgaattaaccctagacgctgagataaacatcaatgacataatggattccaaaagcaaacaattcatccaaacatcaaacaaactagtagccaagaagaagcctctgttccttggtttttgggaacattaagataccaagtacaatgacaatgataataaagccaagacaaaagcagcaaagtttgatcatcaatttccatttctggttttccctttcgctcctcatcacttcttccttcagttctttcaccatcgcctgtaacgcttctagctcgacagcaacctcggacttggccgcgcttaactcactatccatggcggacaatttaggccaactgtctacaaccacttcgtatgtaccatcttcgacccatttaaacaaatggtccagtatattcaatcacatccgcaattaacaacgaaaccaataaaaccctcaaatcaattatatacttacatctttacgcataggacaacggaaatatggtcttccagggttctttgctgatgtcattgtacagatgaccacgtctaatccgcaatgacacttcgatggtaacccagtcccaaacggctgacggattgcgtactcgcaatcgagttctcggaattgctactcatttatttattttttagctgggaaattcgtagacgaaaagcaagaaggagctccggatctgaaatcagaaattggaattttataacttagggtttcgttttggggatttataagtgtgtccatgttcatttggtttttgtcacaacgacgacgtatctggtcaataacggagactctgtaacaaactcacgtcgtatctggtcaatagcggagaatatttttctctgcaatctaacattactcagccacaataaaggaataactaagccatcactttgttataactcggccaaaccctgaaagtgcttttcttgagccaacagttgtgaaaatcaagtaattaacatatcataactacattccaactagtggaaccgtgaagctagatcatatcctataaactttatccaacagcctactttgtccaacatcatactatatccaacaacatacttcctagaggttttgacagaccatgttttgtcaatcgacacttgctgaaaataaaagttattttctgttttcaaattgcacatcttgacgctactaatataaccaacaatttggtggctggtttgatatatcataataacatatggtatctcataactcggccaaaatacgaaatcttattgcataactcggccgtaacgttataatattccacgtcgaaacagaaaatttgattattggagggtttagttaaggaataatttcgaactcgtttgaattatcatctgttgatgtgttcgtgcatctatgaaaccaatcattattcgcggttccctattaagactttttttttaatctcgagaataacataataattgtttctcgataaactcagcaaaagcaaaacacatcaatattctgactgatttgaggacatcaatcgaaccaacaataatgcttgtattcaaatctcataataacatttggttttcttgtatgtagttcgaacaatcgaaatcttcgaacataactcagccacatcacatgcataactcagccatcactttgttacaactcggccaaaccctgaaagtgcttttcttgagccaacaattgtgaaaattaagtaattaacacatcataaccaaattccaactagtggaaccgtgaaactagttcatatactataaactttatccaacatcctactttgtccaacatcatactatatccaacaacatacttcctagaggttttgaaagaccatgttttgtcaatcgacacttgctgaaaataaaagttattttctgttttcaaattgcacatcttgacgctactaatataaccaacaatttggtggctggtttgatatatcataataacatatggtatctcataactcggccaaaacacgaaatcttattttataactcagccgtaacgttatttgattattggagggtttagttaaggaataattttgacctcgtttgaattattttgaatattaattacgggcgtgtatacctgtgcatgtggaccaaatcattactggcggttccccataaagttgctgtttgttatctcgataatgatataataaataatctcgatacatccaacctaaagcagcacgctaagtagtaacatactgtatgacgacataactcagccacaaatcagtgaaaacccagccgcaatgctatgacaagtcagccacttctaaatttattctgccaatacaaagacgccgtcgtttgattagtaaattttgtggcagacacgactatatagaaccagtgctttagtaccatactaattgcagtgaagatgatggctcagagatctcttttccaaggcgaatctagtgatgatgaggtatttatcccacatttgaatagtcaaatcgttcccatctaacgtcgagtatacatgtttgtgtaatgta

SEQ ID NO: 22449 - DNA, 2236 bp, Arabidopsis thaliana
aaatcttcctctttggaattacagccaacagaaagcgctggagtgtccacatcatgagaaacgcgagtcagccttgaagactttctcgttcccgtgcttccttttgtagacatccttctcgatggcttcttcgcagtaaccggtgccttatccatagaagtaggtggtttccgcgaatcatgggaaggtatggtttgttctggccttttgccttttggatcaagggcagcacgtatctgctcacggacaaagtctcatatcttcttgcatttgatacatttggtcttccagctccttgaaagacctcctcatttcaaaaataaacctcttaggcacaggctctccaaaacaatcctcaacattttcttcattatcacagtccatttcagatttctgttttttcatagcaggttctttagggctcggacccggtgcatttcgtttcctcttaacatctacaatagaccagttgctgctattaattggttttcttctggatgcaataccaaaaaaatttgtaaacaacctttatacttatacttacctgtctcttctagttatggtgggcgcaactgctttggtactctagcatagcctccaacccattcatcctcctgccactggtgcccatctatcaacagtgcctcaatgtaatcaacccttggatcatcaacttcatcatcccatgaaagagatggaggacaaacattatcagctggtttcacaatatagttgacctcaacctacacaaataagtatgttaaccatagataatgtacatttacttattatgtacgtacatacacaatttaacacacctcatcagcagtctcacactccaaaatgcgagatgtccggattgctcgcagagaggcaagacgatggatagacctctcagcaaatgtcctgttaggtacatcatcaggtcctagcttagcaattgatgggattgtttcgaaagttaaaagctggagagctaatgggaagccatggagtgcataagaccctacaagtaaaccccttattagttgttgagcatcgtaaggagtttggaaatttgttatcctccccaaagtacgggtaaaggacacccttccccatgggtatttgcagaagaactccaggttcttagtcatctcgacagtcttcgaagtaggcctgttggggttactgtgggccgctaccacaccgtcaaccaaaataataagagatagtgccagttgcttccacccctccatgctttcctcctcctgcagccagctcaccaaatcagcaattgttggaaccgtgtccccaaacctctcatcaaacagagtcttccaaacactctcacactcaggtttcacactgataacatcatcaacgtctttcttcttgggatacttcccacattccagcccagttaggataataaattctcttaatccaaatctaattggatgaccgccgaatacaatccacatctcattcaccttctttgtcactaactgacggcatattagtccaaggacaagcttagcattgaaagatgccttgtttttgggtattttaaaaagttccccaaatggagaatcgagaagaaactgcatctctggtttcccctttagtacatttgctatgtcaaaaatgtacttcagtttagagtacgcgttcatcttcgtctcggaaggataccggtctagagcaaagagtcttggtggtaactcttcaactgtaagatcttcagtcggagcaacacttggactacctgcaattaaaagtcatatattgttaagcaaaccgaagtagtgtacgtacacagacattttccagattataactcaaaatcatatttttggcggaaacagagatttccaattctacttctcaatttttcatcctaaagatatgctaaattccgacaaattctaaccctttaatcaaacaagctttacacttctgctacacccaacgacaacaaacggtaaattagagattctaagccagttcctccgttgcctttgtcgcagagcgttttctctgcggggaaactcttaatacccgcttctccttcccttgaccatgctgcttcctcgggacttcgtcgttagctttattcccagccatatctaaagatgctatctcgccggaggttcaaatttcgccggaataaacaataactttctcttcgtcgccgggaaaaacagtaactttcacttcacccggatgtgggagttcagtggctcaattcaacggg

SEQ ID NO: 22450 - DNA, 2315 bp, Arabidopsis thaliana
ccgctcaacctcgcttcctggtctcgtagaggcactcgaccgacgccgtcctagccgacttcaagaaatcactcgacctcctgaaagcactcgacccctgcaataatctactcggcttcttgttcgtgaattcagtagagccttccaacttcagagaagctactcgaccactagctttcacgattcactctatctctacgtttcactcgacctgctgaagcacccaactcgacctctgagaagatactcgattcatttcatctaagctcaggaacagctcaggttactcgaggacggaattgtactcgacctattcaatctgtttcattgcctattgacaataattttggtttcattgctatctttgagactaacctattgacatttgagctttgagttctaaatccctacaggagaatcatgagcaattacagtggcagttcttctgttgatcctgactacaacatggatgagacagaatcgtcatcttcaaggccagagagagaacagagagaatacgaaagtttcagaaggaaagctgagatagcccgaggaaagagagcgatgacagagaggtatgagcttatagacgaagatctggaggacgagtacatgcctgaacagactcgcagagctaccaaacttctgcacaagcccgacatattgcctactgaggaatatgttaagcttttcaagctgaatgagttctgtagcacgaggtatccttgctcgacctcacttgcacaactcggattgttggaagatgttcagcacctgtaccaaagttgtcatctggacactttgatggcttatccgtatgtagcatatgaagatgagacaatacaattcctcttcacactgcaagtaaagctctaccaaggtatgacctctgatgagttggattgtgaaggtttgggattcttgcgattttctgtgcatggtcatgagtacaggttatcaatcaagcgattggaaggattgtttggcttccccagtggaacgggatctaagccaaagtatgaaagagaagacttgtggatcaccattggcagctccgtaccgttgaatgcttccaggtcaaagagcaatcagatacgcagccctgtcatcaggtacttccagcgttctgtagccaacgtactctactcccgagagattacagggactgtcactaactctgatatggagatgatcgcaatggccctcaagggaactcttcgccaaactaaaaatggcatgtccctccagggtaaagtcaataacacacctctctctatacttcttctgatccatctgtgtggatacaaaagctgggcggtcagcaataaccgcaagagagcacgaggcgctctgtgcataggtggcgttgtgacaccgattctgatagcttgtggagtcccactcatttctgctggactcgagccgtgagcaatggatatcgagcacctacgtcactgcgaattcctggagtttgcaatggttgacgatttccacaggttcaggtttgagcactctatagacaggagagctaacatccttctccctagccctgaggtcacactgataatcgagggtgataacattgattttaagcctgagattggatgtctctactatgagaacgctccaccattagatgaggatgatcttcttgaagaagctgcttcggatgggatggatgaagatagagcagtgaagttcgacactagcatgtatcactttgctgaacatgtacctccagcgaggcagagcaagagcttgactgaagctcataagaataacagtaaattgcagaagtggtgcaagaagcaggacaagctgatcgccaagtgtttcaagcttctgacagataagctgagttgctcttcctccaccactgctattccacaggtacagcctcctctggagatgccatcgaggagatttaatgaacccgcgcacagacctgagcttagcgagcagagagtcccacatgtccaggctaggcattcgtcattcgaatcccgggaacacaagagaagaaggaaggctacactcactcgatctagcagcagatcacgcctcattcactcgaggagatcactcgaccgcggtgctggccgcagcagaaggagagaggtcgagtttcttcagagcggtgctggccgccacagagctgatgaggtcgagtacccacctactggagctgatacagaacaaggcggttcgtctatggcctgggagcaatcgcaggcagccattgacgagcaactacgttcattcttcgactgaggtaagcgcctcacttcaccattgtactataccgtatgttgtga

SEQ ID NO: 22451 - DNA, 2143 bp, Arabidopsis thaliana
catatgatataattaatttggaatttctttcttttaatgttagtggatcgatcccatctttaaagtgatggtgtttgtgtatgattttgcaagttggtgtttatgcaacgtcgtaaattggtgcaactaaccaaatctccaaaaaatctgagggtttgtttaatcctgcaaaaaggtagtctcttatctaactatattttctattttatcatggatttagtttttttttttttttttctggctgctataaaccctagcgttcgaattgattcacacagatcatataaacacaaacattgtatgtaagtcattgattttgtttatagtttgttcgagtttttttgtttatcattggttttgagaagaaatatgcatgaaagtttgtcaatttagctgaaggaacgttattttgttgtatatgtgcagtcttagacattgatgcggtaggaacattgttacagggaaacctgcgattcacaagaacaatccaaatctccaattatcattcgaaaccaacaatcaatcgatgttcataaaacaccaaatgattcagctagctctcgatgtgagagaaatctagcacttacaaagattctagagaattctgaagattacagattattcgataatgaaagcatgagcataacatgttgctcttatacaaaaaggtaaagaaagtaaacgttaaccacgttaataacgatcgccgttaacgtccattgcattgccagctcgccagctcacaagtactttgcctaacatccgacttcacattgccagctcgccagctcgtcagctcaccagctcaccacacgttaatcctgtatcaaatctcccccctttcacaaaaccttgacctcaaggttctatgcttcaaactcaggaaatgttttctgcaaatcgaagaggaactcccatgtagcttcttccaaaggttcattgctccatttcaccaacactttagtgacagcttttccctgacgattgaccattttcctttccaccactttctcaggtactttctcaaagacatcttgcatcactgaaggcaaatgaactgttgtagagacattgcccactagcacctttagctgcgaaacatggaacacaggatgcacttgagagtaagaaggaagagccaacttataagccacttcaccacaacgatcaatgatcttatatgggccaaaatacttcggtgacagcttctgattagcacgcatcaccacagattgttggcggtaaggttgcagcttcacatagacataatccccaatctcaaattcacgttcagttcgatgctggtctgcaaattgtttcattcggtgttgagcgcgcatcaaatgaaacttcaagaacaggcaacatatcttccctctcctgcaaagacctagccacaaccgccacttttgattccccaggcagataaggtaaatggactggaggtacctgcccatacactatctcaaatggcgtcatcctgctagaagagtggtaattggtgttgtaccaatactctgccaatgcaagccatttactccacaactgaggtctgtcatggcacatacaacgcaagtaggtctccaaacatctgttcacaacttcagtttgtccgtcactctggggatggtaagcactcgtcaacttcaatgcaactccctgtaacgtgaagaactctctccaaaattcacttgtaaacacaacatctctgtcactgacaatcgaagtggggcagccatgtaacttaaaaacgttgtccaagtaagcatgtgctactgtcaatgcactataaggatgtgataatgcaatgaagtgagcagccttactcaagcgatccacaacaaccatgatgactgttttgcctcctgaaactggtagcccctcaataaaatccattgacacttcactccaaatggtatcagggattggtaatggctggagtaaccccggtgaagctgcaggatcagacttacattgttgacatgtaccacagctgcgaatataagcttggatgtccttaatcatgcctttccagtaaaacagtcctttaacacgctgatgagtcacgtccctgcctgaatgtgctcctacaccgacccatgtaccagagcaatattgtattcttaatgttgtcatttgctgg

SEQ ID NO: 22452 - DNA, 612 bp, Arabidopsis thaliana columbia
cgcttgctccctcaatcacttcaaatgtttttgcaggatttatggcaagggattgctttttctcagtctaaagcagaagctcgtgttgatgtaagtttctaaccattactcctatatgcatgtttcttcagttctaatacttttttggttgagttttttatgacttcaatgattatatttcagggttcaaccggtgttaaattcgctgatgttgcagggattgatgaagcagttgatgaacttcaagaggtatcgcttgaccaaatttctcgtgcaattactttagtatgcttgcgccagttcttccctgagtatggatctcttgttttattatgtgcattcttggttagcttagcctctaaaacccttaccattagggcttcactgctaccccatcaagtataaagttgcatgacattatttcgttgaatcttggaagctcgagagaaaccgggatctgaagcttactaacctcttagtctcattacgattatctcattttcttgatagcttgtaaagtacttgaagaatccgacctgtttgataaaatgggaattaaactccccatggagttcttctggagggtcacctggttgtggcaaggtatgtgta

SEQ ID NO: 22453 - DNA, 507 bp, Arabidopsis thaliana columbia
agaggatcccctatttcacttagctaaaatatgaataatcatggtttagtaaaagttattgaatgatttaaagtagaatgaagcgcaagaactctattagaatatagttgcagccctccacaactaaagcttatggatccattgttttacgtcagggacttgctcttagtacgttccaagtagtgttggttcctagcataattggaggtaagtatggtgctacgtgtttccggaaaaatgaattggtgcttatatatccttagtgactaatgtctttttctgcattgtgtgcagttctggcagatgagttctttcctaagtttacgtctaagatcataacagtgacgcctctaatcggggtcattctgactactctgctcggtgccagccctgtaagtgcatatatctagttttatgtatttttattattgaattttgagactgtggattggtattgattctagctttagctcttctgaaaagattggacaatttgcagatgttttt

SEQ ID NO: 22454 - DNA, 492 bp, Arabidopsis thaliana columbia
actatttggcttcctaacatatatatcaatttgctacttacaggagctccatagctcctttacttgtcccacctcatctctttcttcctcctcttctgtccacgtacttccctgagaagctcttgaagttcttcacaaagaggttctggagtaagctgaatgatctcatcatcatcaccatcactatcctcctctggctccgtctccttctcctttggatcctctggctcggtctccttctcctctggatccgtttcctcctcaggatccgtctcctcctcatcaattagccatccacaatgaagattctccacacctaatcaattattttgaccgcagtaaaagaatgtgtcatttcttatgttgagattggtatggatatgagtaaaaaagcttttattacctcgaacagaactttgtgcataatctgatgatgcttccccaaatgaatagctgctggtgatgggtcattgactgcttcgctattgattg

SEQ ID NO: 22455 - DNA, 492 bp, Arabidopsis thaliana columbia
tcgtgtccatacacctctcaacaaaatggcagattggaacgcatgatacgaacccatcaacaatgctttttgcactatgctgcttcaagctcatcttcccaatacgttttgggtagaagctctaagggcatctccaatagtaatctctatattttcctctatttatagagatgactctattttagaggtgaccactggagcacaatgcgtctaaaatagagttccctctaaaatagagaaaaatatagaggtgatcattggagatggtctaaataatgcagttcacattctcaatctccttccatccacttctatcgataacaaaattcatttctcagtgttattcaacaaaacaccatcttactctcatcttagagtttttggttctctttgttatcctcacacaaataatcaaaacaaacttgatccaaggtcatcaccatcagctttcctaagttatcctctacttgactcagggtatagatgttttga

SEQ ID NO: 22456 - DNA, 690 bp, Arabidopsis thaliana
aggttactcatcaatgacggaatctctcctgtgatgagattattgtcgatctctaaatgcgtcacgttcgtgcaattcgttagctcttcagggattgttcctgagatctggtttacactcagctgaagctcttgtagattctcaagttttccgaagctccttgggatggtcccggtgaggagattctcggaaaaatcgataagccagagctcgggacagttcccaagctcggttgggattttcccaacgagattgttctgccataaaagtagactctgcagcttctttaaacctccaatggtggtagggatcgatcctgagattgaattctgatacaagtagaggttttggagctctgtgcagtatccaatctcatccggaattggaccagacaagagtgacgtgtaaattgctattgtctgaacacgtttcaggtttccaatcgacgccggaagtttcccggagagactagtctcagcgagaccaagcattacaagattctcgcagttacctatctcccaaggaagctcacctcttagattcttgttcccaccagcacgtaagacttgtagattcttgagctctccgatactccttgggatctctccggatagcttgttgtcgaaaagcataagctctacgagacccgaaagattcccaatctccatcggaatatgaccttctagattg

SEQ ID NO: 22457 - DNA, 583 bp, Arabidopsis thaliana columbia
aaccgaaatcgaaaccggtacagatgacaaaacaaaaccggttgagaagagtcaacagacctacctcgttgagactgatggctcctctagtaccactacttgtagtactaaccaaaacaacaacactgatcatctttataccggaaatttcggttttcaacggttaagtctagaaaacggttcaagaatcgcagccggttctgacctcggtatctggattccccaaaccggaagaaaccatcatcatcatgtcgatgaaaccatccctagtgcagtggtactacccggttcaatgttctcatccggtttaaccggttatagatcctccaatctcggtttaattgaattggaaaactcattctcaaccgggccaatgatgacagagcatcagcaaattcaagagagtaactacaacaattcaacattctttggaaatgggaatctgaattggggattacaatggaggaaaacaaaatccattcacaatatcgaatcattcaaattcgtccttatacagtgatataaaatcagagaccaatttttttggcacagaggctacaaatgttggtatgtggccatgtac

SEQ ID NO: 22458 - DNA, 381 bp, Arabidopsis thaliana columbia
tgtttaggactataataaagtggctaagtaaaaccaaatccagagaaaatggattttgacaaataacaaacctattgagatctgttgtacaatagctggaacaactataccggcgtaagaatctccgccgacatagatagggtttgagacaaactgtggattctccactagccactgcaagtaattcaaaaagattatatgctacatacatatacttagattctcaacgaaaactctgaaaaatgctttcaaaaaagcaagaccttttggagaaactcataggtctgttttgcttctcctgtgtcactaggcttataagaaagaggagttgttgagtaggagtagccagtcccacaggctgatcaagaatattatgctagc

SEQ ID NO: 22459 - DNA, 535 bp, Arabidopsis thaliana columbia
aaggtatcagacatcaatactcagcgttaaggacaccacaacagaatggagttatagaaaggaaaaatagaacactacaagagatggccagagccatgatacacagaaatgatatgtatgaaggtttctgagcagaagctgtcagcagagcatgtcacatcatcaacaaggtttatgtaaaacctggaacaaagaccaccccatatgaaatctggaaaggaaaaagccataatttaagtcattttagggtttttggttgtgtgtgctatattcttaatgacaaggagcagctacggaagtttgcgtctagaagtggttaaggtatcttcttaggctactccacaaacagctcagcatacagagtttacaacaagagaaccaagaccatcagtgattcagtaaatgttgtgtttgacgacaaagccagatttgtattcctcctgtgtcagacgaacgaccagtaaaagctgcatccaaaccaattgaaacacctgttgcaccagtagctgaggaaacagaaaacgaacaacctgat

SEQ ID NO: 22460 - DNA, 2306 bp, Arabidopsis thaliana
gtcatctcatttcggtctcaaaggaggagacttgtcacatattagcaccccatccacaatgataattaaggcgagactaatttcttccatgcaggcatgtcagtttcagaaatcaatctatcccttaattcttcaactgttggattagctttatcatctccaaacagagtagcccaaactgtattttcaccttcctcccgctgcataacactttctacatccttatctttaggataggttccacattccaaaccagttataagtgcccattctcttaatccgagcctaataggatgaccagcgaataccatccacatctcataacgtttctttgtaactaactaacggcatattaatccaagaacaagtttaccagaaaaggatgccttgttagtagggatcctaaagaggtcaccaaatggagaatctagaaggaacgtcatttctggtgtgtccttaagcgcactgctatttgaccaatgtactccgctctggagtacacatttatctttgccttgctagggtagtgatcgagtgcaaacaacctctgtggtaattcacccggatcattagaagtacttcctgaaagttgagcaagacgaagaagttcttaacacgtacactatatccaaataccaactaacataaactcgattttcatatacacgtacaccgaaaccttttatactcaatcaactgtttttggcggaaaaaaacaaaatccctttgtcaattgaaaatttctgagttgaaatctctaaaattaacctagattttgaatcaatcattctccaaacgaagttagggaaaactaacccagatttgtcgtcgccgccgatgcctcatcaatatccgaaactcctcgccgccgactactcttcctcgtcgccgccattagagctcttctatgaacagttaatcgataaacccaaaaagcgtattattgttccacactttaacacgaactctatcgaaattttctccactttagcaacgactagaactcgaacagagcctcaatcggaattgtgattcagttttgtcggaatttctctggttcttcgaaaccactcttcgtttcgacggaactgttctgctttctcgaagaagacagtttttgatttattttcagttttaaaattaataattttaaatatttaaattattttgaaaccagaaaacggttaaggaaactgaaccggttccacgaaacgaaaccgcctccgtcagtttctcgttggagggcaaattcggccattttgggcctaatggctaaaacgtggttgacccagcccactttgcctatttgtgaaagaaaaagtgacaagggtgttataacgtgaaattttcttttgatttaataccacctcttcttcgattctttttctctttcttcttctgtttttcaataaaaaaattttgtttaacaaaaatatattataagacattaaagagagagaaaacaaaaaactgaaaccaaaagtaaccagtttcagcagttctcgtttaagggcaaattcgtctaattttgctcaaatggctaaatgctggaaggcctaacccactttgctaattcatggaagaaaaactcaaataggtgttcgccgtgaaaataatttcttaataaaatacaaattattatagtcagttatattagagctagtttaataattttaccaaaccaacagttactaagcgtttcgactaacatcagaattttgatggtattataaaactatcaaatgaatacacaaaaatttgcataaaacatcctttgaaaatctaattttcttatggaaaacaagtctcaggtagtttaaagaaaaaaaaagaaactgaaaacctaacctctctgaagtcttatctaaacatctttagtgtccttttttgttttcagtggcataccttgaagcaaataacctaaaatagagaagattcgcgacttgaatgccggctattatgaaaaagtaattctcaagcctgttcttgttcaagtctttgtctcctaaccaagatttcccttccttgcgcgtcacggcatcaatcacatttataagaagtgtgcatatgtaactcgcaatcgacgagctcaagaagaagatcgctccagcaaccgctctcatatgctcaggcatcctaaccgtcagaaactccatcagagccaccgcggaaaacgcttcggttaaaccggcaagagcgaactgaggaaggagcattacaatagaaaccggcgacacgaatgagccattctttagagcggatctcttcgcttcttctcttggaaaccgcgacaatcatacaaatga

SEQ ID NO: 22461 - DNA, 589 bp, Arabidopsis thaliana columbia
  unsure (1)..(589): unsure at all n locations
nnnnnnnnnnnnnnnnnnnnctaaagcaaaccgtttacctcacgcgaaagcaccggaaagtcggcccgcactttgtcgacggaaaaaatcatcttgcacctcctggcagccgttgaccgattcgggccagcacctgctgtttaagcccctcatcacgcagtgcttccgtcagttcggcagcgaaggcgtaaatgatcatctgctgggcatcctgctgattgatcccgcgcgagcacgatagaatatctgttcatcatcaatacgccccaccgtcgcgccgtggctgcatttcacatcatctgcatagatttccagctgcggtttcgtatccacttccgccagtttgcccatcagcagattgttgttggtcatctgaccatccgttttgatggcgtgctgcgcgacgttgatcaaaccgttaaataccgcgcggcctttgtcgctgacgatagttttgtgcaactgtcggctgttacaaaaacctttattgtgtccagccaggtacgggtatccacacctcgtttttcacggcatcgcaggctattgatccgcacgtgctgttttcgcattgagttgcgactggtgttgt

SEQ ID NO: 22462 - DNA, 505 bp, Arabidopsis thaliana columbia
agatcttcatgaaattcagagtccaaatatgtttatgagtgacacaatataggaagaagtaaggtaaccactgataacaaaaaaatacctttccaataatgcggataatttgtttatctctaacttgttttgaatcgtaaatatcctggccctgcacccaatagagtatcagtcaacatgtttatacggacaatttcaaaagagctaaaactagcgagtgacaaggcctgacatgttgttagagaagtaatataaggttaaacctaccctaagagcaggattagcatcaggatgaaagatggaaagcgcactcattgcactcacaagaactcccattgggtgtgcatcatgaggcatagactgtataatatcctgcacaaaagttatcaagtaagtggagttagatatgagaaatatatagctttgagtacagcacacaatcctcagaacaacatgtatagaacagtcttgacaaattattgttcgccagacaagaaaataggct

SEQ ID NO: 22463 - DNA, 343 bp, Arabidopsis thaliana columbia
  unsure (1)..(343): unsure at all n locations
accattaccgctaactcacaaaaacagttgtaccaacgtatggatacaagtatcaacgttcacagaaatcacaggttactccatatttaactaaaacagtggccaagaaacttttcaaagtcatattggcgccaacctaaagcaatgattcagtgtgataaagacttgtanaatgaatgaacctacctctgctccatccccggttccttcatgcttgaatggttgccatgatggattcttaaggttctcctgccatgtagagcaaagggtggcagcttcgaccgcagcttcatttgcagaatatctcagcttgcgaacatccaggaaaggtttctcatcaagt

SEQ ID NO: 22464 - DNA, 602 bp, Arabidopsis thaliana columbia
tttctgtcatgttattggtctgcttctaaacatggaaatttattgtgatgaggcaactattatgttttagcttctgtatttattcaaaactttcaaggattagtatacgtgctatggcttcatattcatggaaagcaatatatttggaatgtgcattgtcatgtgaaaaactgaatagttatgatgtttggcttaagggttcccattatatggttacgacaatctgaaataagaaagtggctttgagttttaatcatatgagctctaatgcaggtggtgacaacatttctgttacaaaaggtgttgtgtctcgagttgaaccgacacaatatgttcacggtgccacccagctaatggctatacaaatagatgctgctattaaccccggaaatagtggtggcccagctatcatgggaaacaaagtagctggtgtcgcatttcaaaatctttcaggtgctgagaatatagggtaagtcagaggttaattattttagctctagtgcagtaaaggattaggaaaaggagttaacgaagtttatatcttgatatcttaacttatgtaagtaacatgagtttatttgtcctctcggaatgatgtatga

SEQ ID NO: 22465 - DNA, 531 bp, Arabidopsis thaliana columbia
  unsure (1)..(531): unsure at all n locations
nnnnnnnnnnnnnnnnnnnnctaaagaaactcatcttttgaccgcccaagggtatattgcccgccagagttaacctttgtggcggagtcctgacccaggttttgcattgccccacccttgccaaccgtggagtcgcgagcttcggtacctgctaataccaataaattaccgccattttccagcaacatattggtcgctaaattgccggaaatggaaaaagtaccgtactgatgagtaccgctgatttcaataccgttagccgtgctcgtctggagagcggcaccgctgttctggacgatatctgtcgctttgccattatcgttgactgtcagcgtaccgccttcattgatctttgtttttattgcctctccgttagctgaaactgtttgtattccgccgtcgttaattgttgtctcattcgccacaccctcgacaatttgttcaccgccggtgagcgtcgtgcctgtcgcagtggcttttgttttgacgatctcccgtccgcccatattgacctgtgttttgtagaagagg

SEQ ID NO: 22466 - DNA, 543 bp, Arabidopsis thaliana columbia
gaggctaacgtcgtgagagaggccaactatgtgaagggtatggaggcggttaagggagagaaagaagggcatggagggttttattggtataggcaggttcaaggtccacggggaccgggggagaggaggaggaagacgggtttaaggtctccggtggggctgagttttgtgtgtggtagaaaggatgagaagggtaatggaggaaggagggtgggtgggaggaggaaggaaagtggtgagggtggagagagatgaaccaatcagggtttgtagaagagatggtaggaatatgaatggtaacaatgatagaaattggaggagatttgggtgttatgtgttggtggagagttttgggctgagaagagcagatggagttttgttggttaaatgtgtatttagacatactaatagattgagatgtaactgggagtgacacttcatcttatgttataaaatttattacttctatatatatatatatatactaaaatcgcctaagcctatgcttatggattatgtgttataaactgtagtacttcttta

SEQ ID NO: 22467 - DNA, 317 bp, Arabidopsis thaliana columbia
gcaggtcgagacgataccgtcatgtggcatattatatgttttgggtatttattttcttggtgttatgatctcccgtaatgtggttttttggtaaatacttgtttaaaaactcttatgttggtccaggatgccagttaggaactacaaggagtctgcggtgtttgaggtcgagagagactcttcagctggatgtgacgtccgtgaaccatcgtcatgcgagatgattaagtctctattctgcatagaggtcgtggtgtgttgcgtccccaggaagtgtgttatgatgactgtgaatcgcctaaagctcataaccctgc

SEQ ID NO: 22468 - DNA, 477 bp, Arabidopsis thaliana
cctgcacatcaatcgatttcataattgctgcaaaactctcatattgttttgtctcctcttttgggttccatggcaatatgatacttttcaagttcgacaagtctcatcatgtttcgcttatatcgacggttttctgaactgctttgtcttctccttttgcatcctggaggttgcttgattttcactaaacttggaacataaggacacacatatagccaactatcttggtgggcaggttctccgagatcaacatctcggacttgtccagcctctccaatgatgaaaactttgtcgcgtttcaacggttgcccgaaaatcacggcgactttgttcacctcgtcaatgaagaaactccctgtacaagaataaatcatcgggcagtcacgcacaccaaaggtcaaaaacttgctccacgacaccttatcgaattcagtcgtagtcgtaatcatacgtcaacaacaacatcgcgacaaaata

SEQ ID NO: 22469 - DNA, 593 bp, Arabidopsis thaliana columbia
cctgacttttgatgatggttgaacagtcaaatccatattttgccttactgccattctgcgtttcgttgtatgttagtcacactaaattttgctcattgctaatatgcgaaacatttactgtctcagcgtgctgaagatcatattggagaaacatcatcccaaatcttgaaaaacatgtgtataatccaaagttgaagaagattggagatgctatggttaaacggtcttacggaggttaatctctctgacatagaattaagaatagagtgactacaacttgaatcacatgtttatgtttttatcgattctaagcttttcactagcttgacgtctgtaaattagagaaccgttctttgtaatcttttttcaccaaagaatgatgttcgtcggagattccaactcatgttatctccaaaacaatttgcgacacttacggtaagaacaaatttactttgtaaattcatctttggttatcacagtaaatcaatcttttgaaattctagaatttctgaacttgaaattgacgatgacagagctgtacattaattagtcgcacactaatcaaattgcttaccggtacaaattatttaccg

SEQ ID NO: 22470 - DNA, 507 bp, Arabidopsis thaliana
ttttgtatttgtttttggagatgttaaaattttatttacacgctcttacttcctccaagttcttgaaaaggcaaaggtacagacttgaaggctctgtatttccccacgttgttcaaatgctcattctccaacctgattacaaaaaaacaaagatcattaaaattcatcatccgatctttattttcgataataataacctgaaatcgagttttaagttagactcgaacctgaaaaagttccaaatgccacgacgaacaatctctaaacttgcaacaacagcaaccaaagctcttttgtgtaaaaatggagcttctttaatcccaagaacagtctgcatccatgccagcctcagcaccacattcgccacctttatttcaaatcaccactctagttattaaaaaacccgcgaaaacgcaacaattcaaacccgaaaaagtgtctttaatttctttatttttttggtttacatgacaatgaagtagatgcttttgtaaggtactaagagtt

SEQ ID NO: 22471 - DNA, 639 bp, Arabidopsis thaliana
atccccatcttgatgcaaatcgggtttctaaaaggtttctatatctttctctgttacttaggaaccagaaattggtcatattttgggagaaatagtgcacaaaaaagctatgactacaccgattgattatgtattttgcagtggttacttcttggagaaggtaaagcttacattactgaatcagaatttagatttgatctgtttggctttctgatgcaaatgggtcaatatttgttgcaggacgaagacatctatacattcttcgaatcagaaatcttgtcgcccaagttatctcatgaaacaagatcgaagtcttcttcaagtaaccactccctagagaagaaggtttcattgaacgttcttgacctcaagcaagagaattacttctctacagccataggacaagctcgcacaaaagctcgctatgtcgttgactcatctcacaatgttgtgaatttactcacaagcttgcagtagcaaatacaacaacaacaagtgtcaagaagccaaacgtttaagtatgttgactaagttgctttgaccaagtctttcgtttaattttgtttatttgttttgtacataataagaaaagagtcactgctctgaaatgcatgttatatgtaaccttattaggcttga

SEQ ID NO: 22472 - DNA, 555 bp, Arabidopsis thaliana
cttctttaagtttcttgacagtcttaaaattcgttttagatgcacatttgttagtgattttatttctaacttttttggcatttgaaatcgttaataatgataagccaaatcctaactttcaaaatcatattaagaaatgagtctcagtttttcttgttactgtttctcttaagtgtatgaatgtattacctaaaatgataatccaaatcctaacttttaaagtcctaaaagaaaatgagtctcgtttcttcatttaactgtttctcttaagcccaaaaattactcattctgagtttttttatatatcctaggctgggattgtaaagtttccatagaaccagttctgcgccaatgaaatggtgtctacattgaaactcattgaaagtgtgcaaccccttgcttacgtattaacataatgttaatgacaggtggcaacatttattgttcaaaagatactgttggatgatgtggggatggattacatctgcacaacagcagagcggttttttgcagttggtcgagtgtctgggaaatatggttcagtcacttgtggag

SEQ ID NO: 22473 - DNA, 583 bp, Arabidopsis thaliana columbia
cggcgtgaggaacgggagagaggattattgcttgagagttgtgtgggagattgattgctggagctcggatcggacgatagtttggtggtggtgacatctctgggaatgaagctagtggtggtggtgcttctgaaatcgttggtccgccgcagtttgtgcagcatccggaaggaggaaaggcggaggatatggtggctggagcatcggagattgatttctccggcgtgttttgttgttcctttggaggttccattttctcagtgatttacagagacgtaacgaacgatagtgagagcaaatgagaaataaagggttaataaaaaaaagttccaaaggaataattatggatcactgataataagcccaaagatggttttgtgacccaataataagcccaaagatggttttgtacccaataataagccaaagaatgtaaatagtgagttcttcatggactaattcaagttttattgtatgtggtgttgctgcgtgggctacgatgcttttctacatacccttaacaagattacggcaatattgtgttatattttgtggatctttcgaagctgacatgatctattga

SEQ ID NO: 22474 - DNA, 338 bp, Arabidopsis thaliana
cagaaattactaacgcgaccatcgtttttcagttcactctttatacaacaaatcatcaagcaaagggataaaaaaactcagaaatctcaaaacacaaaagtattaaagaggaaagaaataaaatgaagaaaaaaaaacgaaaaagagacatatattgcacttcagaaatatcaatcccagaaagggataaaggtgatgtggcatttgcagaggcgttggatcggtcatagtcaacatttagggcaatctgagggtggaggcaggagcttccgatttggacggtcaccgtccagaacaacccaagccatggtcagaccccaactcaaatgagtcccaat

SEQ ID NO: 22475 - DNA, 580 bp, Arabidopsis thaliana columbia
atgtagtgaacaccatttttgttctatactagacaacagaaacaaaataattaagaaaaataactggtagttctgtttcccttttattgctctaacgtgacggctacgcgaggaatattcttgtaattttatgcacttacagatggagcaagcgcaagtagcttggaagaagcaccaccagtggttggcctaataaaatgataaaattatagttaactgatggagtgtctttcataattagttcttaaatgaattgagtattgatgatgaaaacttacaatccagctaaaactttgacagcatcatagataacccactgcgctccagtgagtgttcctatcatgaaaatgcgaagaggaaggccacgggttaacataccccataaccctagcctctttactgcctgtagcacatgaaagaatcaaaccaagtcagtagatcatataaaaagctctgtgttgtgtaccacaagtttgatgttgtggtgaagagtatggagcttttttacttcatcagcaacgggtgctcgtttagagttattgaggaaagacacgaaatgatctgcaggatgtgagatgat

SEQ ID NO: 22476 - DNA, 584 bp, Arabidopsis thaliana columbia
cccgaaacggtggaaggcatcagaaaggcagctgctttggcttaccagtgcctgagccacaaccctaagtcacgaccaactatgaccactgtggttaaaaccctagagcctattctagacctcaaagatatccaaaacggaccgtttgtgtacattgttccagtagcaggtgtaagtgaagttcatgagatcaaatgtaaggatgatgtcaaagtcgtaaaagaggaaacagagaaggacgcaaaagtcttcccacgacaccgagcaggtcgaaggaacagacgtaaacacaaggcaatgaggtctcgtgcagtatattcagacactgctctatacaagagtctaggaaccagtttatataatccagccaactaaattgatgcacaaaaagcaaaattatttaatttttatacaggtatagtatagatattaggatacgttagtatacagggaatatacgaagaagttgtgttagagaaatgaagataccataaggtttcataaaattctgcacatgttgtgatagaaacgtagcttaaaaagtgagctacatagatatttagcaatcaattttcaattttgta

SEQ ID NO: 22477 - DNA, 490 bp, Arabidopsis thaliana columbia
gaattgagactcataaattgtttaagcatggtggagcttccctcttccattgggaatgcaactaatttactggaattggatcttattgattgctcaagtctgcgtgaaactcccctcctctattgggaatctcacaaatctacaaaagttgtatctcaatagatgtacgagtttggtgaaactcgctacctctattggtgatgtcactagtctcaaggagttaaatctcagtggatgttcaagtcttctggagatcccctctaccatcgggaatattgttaacctcaagaaagtatatgctgatggatgttcaagtctggtgcaactgccttcctctattggaaataacactaatctcaaggaattgcatctactgaattgctcgagtttgatggaatgccttcttctatgttaaatttaactcgtctcgaagatttgaatctcagtggatgcttaagtctggtgaagctctctctattgggaatgttat

SEQ ID NO: 22478 - DNA, 508 bp, Arabidopsis thaliana columbia
gtttggaatttttgtgtccgtagacattgatgaatgcagagatccacatctaaataaatgtggaaagagaaagtgtgtgaatgttctcggatcatatagatgtgagaaaacttggccagccattttaagtaagttatataatgtttctgcataagcctttttagattgaaagtgaaaagatcaacttacaatgcaggtggaactctaagctctggattgttgctcctgatctttggtatgtggttgctatgcaaggctaatagaaagcggaaagtagccaagcagaagaggaagttcttccaaagaaatggaggtttgttgttgcagcaacaaacatccttccttcacggaagtgtaaatagaaccaaagttttcagctccaatgacctggagaatgcaacagatagattcaatgcgagcagaatactggggcaaggcgggcagggtacagtttataaaggaatgttggaagatgggatgatcgtcgctgtcaagaagtccagagcat

SEQ ID NO: 22479 - DNA, 395 bp, Arabidopsis thaliana columbia
agaaattaattacccgaaacaacaacacttcactatttctcctttctcagctgctttcaccattttctctttttctcctccatcaatctttctcacggttttctagggttttatatatgctttcctcttcatccatgtcatcgtcttcgttatctgctagattttgcttcaaccacgaatgttttgagttcaaactcgaccattgccgtcctggttggcgtctccgttctggcgatttcgtcgacctctgtgatcgttgcgcgtaacgaaccttttccgtacttcttttcttcgcttatttttactctccctgttccatttttttgagttgatcatttttttttttttcaagtgtgcttgtctttgattttggaaaacttacttggttggttttt

SEQ ID NO: 22480 - DNA, 522 bp, Arabidopsis thaliana columbia
ttttcgcgtgttcggagatttggaatttccggcggatatcgccgccgtgtgatcaccatggccgccggaactgatcactactcgactttgaatgtgaaccgcaatgtcatcttgcaggagatcaagagctcgtatagaaaactcgctcgcaaggttactactcttcgagattcaagtttgtttttgttttttctttcttcccattttcggtttctctcgaattgaattgaagcttagggtttgtaatggtgtaacagtatcacccagatatgaacaagaaccctggtgcagaagataagttcaaacagataagtgctgcttacgaggtaacacaagttctgtcatctatcttttttgaaatttctagttttgattgatgaagttttgttgcttataacacctgggaatgaagcatttgtgtaggtattatctgatgaggagaagagatctgcctatgatcggttcggcgaggctggtttagaaggtgattttaatggatcacaggatacttcaccaggggta

SEQ ID NO: 22481 - DNA, 524 bp, Arabidopsis thaliana columbia
caaaattgtaggtcgttggttatcttggacgtgagcttcaaccgtctcacctacttaccgaccaacatcggtcctgagctagtgaatctagaaaagctcctggttcagtataacaagatccgatccttcccgaccagtataggcgaaatgagatccctaaaacacctcgacgcccacttcaacgaacttaacggccttcctgattctttcgtgttgctcacaaatctcgagtacttaaacctaagcagcaacttcagtgatctcaaggatctcccattctcattcggcgaactcataagcctccaagaactcgacttgagtaacaaccaaatccatgccctccctgacacttttggcacacttgatagcctgaccaaactgaatgtggatcagaacccgctcgtcgtcccacccgaggaagtggtgaaggaaggtgttgaagctgtgaagacgtacatgggtcagagaaggatcagtatgttggaagaagaagagaagaagaaaatggaggaagagatggagca

SEQ ID NO: 22482 - DNA, 556 bp, Arabidopsis thaliana columbia
  unsure (1)..(556): unsure at all n locations
nnnnnnnnnnnnnnnnnnnnctaaagcaactttattgagcggccagagaaccgtcagcaccgaaagcgccgccaccagcagcgtggttttcggccagtgcagtactttcagcaacagcggatgataaacacgaatcaaaaagcgattgagcgggttactgctttccggcggaattttgccacggatccagtagcccatcaggatcgggatcactacgatcgccagcagcgccgcacccgccatcgcatacgttttggtgaacgccaacgggccaaacagacgcccttcctgcccttccagggtgaagatcgggataaacgacaacgtgataatcagcagactgataaatagcgccggccccacttcaacagacgcatcggtgatcacctgccagcgcgttttattatccagcgtggcgtcaggatgctggtgctgccactcttccagccgtttatgcgcattctcgatcatgacgatagcagcatcgaccatcgccccgacggcaatcgcaatgccacccaacgacataatattggcattcagtcctggaagtgca

SEQ ID NO: 22483 - DNA, 1431 bp, Arabidopsis thaliana
ctcttcgaaatggctcgaatttactgttaggtcgccaaaagatgtacaacaagtcacatagcatttacctttctcttcatctcggctgatctttttagtatctggtttttcaattgctcactgctcagtgtcgagacatgctttaaacggcacactgatattctcaccttaaaatgggattagacacagccatgtgcttttgatgaaaggattccgaaactgcatgttttgggcttgaagcatctgacgctgagtcatcaacatgttcttctctttcaaaataacatagcacagcttctgaagatcatcccatgactcgagacgcaattttgaagctttccaacctcgacttataacacaccaaaatatatagacaaatgttcttaaaagacctcatcatcaaaacaaaacaatccttaattccaacactacagtttccaaactttttccatagcgaaaccaaaaagaaaaaagcttaagggacaagagttacagttatatgaacaaagtataaaaagaaaccataaaacattcagaaaacttaaaaagcaattggtaacagaataaccacattacatgaaccataaacaccaggtttgtcttcgtcttggcttctgttgaactgaaagaactcttcgagaggattttttggcgttcgaattcttgaggcacaagtggactccaatctcgtggtcgtcaatgcagccgtcaataattgttttttccacatccacaatgaccactaccgctcaagctctcattttgttcacatgaaggacttacgatagttggcgtaacccgcattctccaatcttccagtggttaccgttctcgaccttgaactcaaagacaagctcgctggaagtcaccttctcttcgatttcgaatgtgtacagatgctctgttaagcctgaatatataatgtgccccaatgttgtagacctaacaccgaaagcaacatgtaaccatttgtctctatcatgagcgccatagtcaccaatacgaactagcaagatgcaagccttatatctcatagatgtaggaagaggcctctcattcaacttaattgtcaatgaacccccactcgctcggtgagtgaagtatgcaggcacctctctaccaggtaagactgcttgtttagtcggtgtctggatgattaggtctcttgcttcttgattaagtttaaagcacttaccaaagaagagagtaatctctggattgtgaaaggagcaatctagtctctccaaggactcacaatcttcagcatcaatccattttaaagaatctggaatctgtgggagtgatccacctttctgtacccttgagtatgagtgtctgaagacgagatattctcttgatcagtggaggacctcttgtatttctttaccgctcaagtccagatttgtgatgatgtcaagaacatgagggaat

SEQ ID NO: 22484 - DNA, 579 bp, Arabidopsis thaliana columbia
gaattcctagtaagcgcgagtcatcagctcgctgttgactacgtccctgccctgttgtacacaccgcccgtcgctcctaccgattgaatgatccggtgaagtgttcggatcgcggcgacgtgggtggttcgccgcccgcgacgtcgcgagaagtccactaaaccttatcatttagaggaaggagaagtcgtaacaaggtttccgtaggtgaacctgcggaaggatcattgtcgatacctgtccaaaacagaacgacccgcgaaccaaagatcaccactctcgctgggacggacagccagagagtaaggatgcttacagggagacctttcacttctgatctgataaggacattttcttcatctactttctcaacccaacccttcaagtttttcagatcccccttgataacaataactgcatcacccttcatgaaatgacctttctttctgtttgcaaataatgttgacagaccaccaaagtcgccctctccattttcacttggtttattgaattttcaagttcgcaaaagttggtgtacattctgaacagtgatggcttcaatgatacttgtttgtaatg

SEQ ID NO: 22485 - DNA, 553 bp, Arabidopsis thaliana
cgccgaatgggattagggcatatggttatcacacgaccactcttaaattttaaatactcatttttgacatggttaacgacacgaaaccggttaacgacggggaacagaatgatcaaatgacaagttggagtagacatatcttgtattttctgtagtgagcaggtagaagaccgagaacacctattctttacatgtggatatgctaacgagatttggttagggctaagcaagaaggttatgggtcataattaaattctcaacaagatggaatgatattcaaacagtcctcatagacatgtctttggggatgcattgcctattcttaacatggtacaactttcagctctattcaatttggagagaacgaaacagttagagtgaagaagtattgatctatatgctaagtataagagactctctaagtgtttcagaaggtttcagggtcaactggttgacgagctaaggagatcgtgacacgtggagcgatccaatccgtttactctcaacggcattttcttatcctttactcgtcttattctagtttcctctcagt

SEQ ID NO: 22486 - DNA, 633 bp, Arabidopsis thaliana
  unsure (1)..(633): unsure at all n locations
tcagatttaattcaacaaaagtatataaattcgtcttcaaaatcagccttttgacttattatatatacgtacgttccaaccaaatcaaatcaaattttggatttaggaccactacattaaaattataaattgattacactatagatgcatgatacatacccttgtgggtgcatgatccaacgcaatcctggccctcgttataataccgaattgacccaaacctcctaaaactccatagaacaattcagggtttaactttggagagcaagtcatcatttcaccttttcctgaaatttagtattgtgaacaaactccggagttatttataatcacaaattatagcataactactgttaatgaaggatatgtatttctgaccaaaacgtgatttttggagttttatactggttatggcgtgtgagttttaccttgagaatcaaatttgtaactaaaacattatatattatcatcaataatacacatgcatgtgatatatatatcgctgatgttactacaattaaagcttgcagacaaaaaaagagcatctagaagatcatagatactgtttcattcttaattaagagttgagcagtacaaatttatattccaanaaattaaaattgtacgagatag

SEQ ID NO: 22487 - DNA, 942 bp, Arabidopsis thaliana
tcgaacctgacagaagtatcaggttaggtccaagacacggagatcagtttcttgtttggtccaaggcagatcaagaaaattaccagggcattcatggcgccacgtttcttgtggtgttgaaaaccaggacgcttctcacgggacacgtacacaagccgaggaagctcatgcccttcgacatcaaatcctccgctgtggccgaggaagacttggatcataccggggtggtccttggtgttgttccctggccacggtgttccatcttgcatgatccaaccttctagaggaacctttgaggccttcgccacttgagcgttgatcctgaccttgaactcctcatattctctctgtcatatgtcaatttcacttatgaagtttagattatagtgaaaagatgggtggtggtataactagatcaggtgatatacactgaccttcatggctcgacgttccttaacaaatgttgggtggactttgtcctggagataatcaactttcaacgtgaagtacatctccggtgcccgtggctctatggagaatttcttacagaagggaacccattttcctgtcaaactcagcagtttccgagagagattcgaatgtaagcattgaagcaccgtcgtcagagacatagcaggagattttctcaactgggtagtccatggccaagattgacagcacagtgttggatgtgacgaggggaggctccttcaatgggtccaccgtactgacaaagacatctacaggggcaagcatatttggttcacttctctctcgtacctgtataaacaaaaaatatttacatccaaactccaacgtcatagattttaagacttctacttgagaatctgtggattttacctgagggaaaccgatctagataggtctcacgtcaatagggaacacttggggaactgataagaaccaagagcagcgaccaga

SEQ ID NO: 22488 - DNA, 307 bp, Arabidopsis thaliana columbia
cttcccacatatgctttcggctagggaaactcaacgttctattaagtttggtgacggtgtctggtcagggtgtttgtacgatcctgacatttacaccgacggtaagatttcgattcatggggttggtggcgttctctgtcctcgagaggcggagatcggtggatgtgtttgtctctgcttgatatccctaattaagttagggttagtctactaagtatatgaagtctcatgtatcttgcgatgtaccctgtgacctgtgatgatgcatcttgctgttaaacgcaaactcctctgatatgagagaaga

SEQ ID NO: 22489 - DNA, 586 bp, Arabidopsis thaliana
cagaagtttttcaggttgttagctgtttgtcacacggcgatacctgaaaccgatgaagctacagggagtgtctcttatgaggctgagtctcctgatgaagctgcgtttgttgttgcggctcgagaattcgggtttgagttctttagccggacgcaaaacgggatatctttccgtgaattggatcttgcttcagggaaaacagttgaaaggttggtcatgtttttcttcttcttggaatttaacctccatggaatttcttgaggttaaaactaacattcctctgttttcttacagagtatatcggttgttaaacgttcttgagtttaacagcgcgagaaagagaatgtcggttattgtgcgcgacgaagatgggagacttctgttactgtccaaaggagctgataagtaagttaactgaaaattttgagagattatatatacattttgaggccttcttgttgatatgtattgaatttgtggaatcttgcttttttttgtgtgcagtgtgatgtttgaaagactagccaaaaacgggagaaagttcgaagagaagactcgagaacatgtaaatgaatatgcagatgca

SEQ ID NO: 22490 - DNA, 513 bp, Arabidopsis thaliana columbia
gattaaagattggttaaaccctgattgatctgcccaggaaccctagttgattcctatttatgtgtatatgcgttaccattgtttcagcactttatgtgatccatacttgaacattttccggggattcataccgcctcttggaggattagatttgtctcccattttggcgttccttgttctcaacgccttcaccagctcggctatggcacttccttgcgaactcccgtcagctgatggagccgtttctccagcttctagtgagacaaagtgggtgagaaggagaaggttgagcagccacaaagaccacagaccgagctcagcttctatgacctgaacctgtctaaaatatctactcttttctgcgcttcaaatgtaaaatctacctttcgagtaattttattactctgtatctttggatttctgagttctgtataaattttctttagaaaatggataaaagagttgtgttcctgacatacagaaatattgtaaaaattttgcaagagatgagct

SEQ ID NO: 22491 - DNA, 140 bp, Arabidopsis thaliana columbia
gagtctagcgcgtctggcagctatgggaacagccgcagaacaccacagagagggaattatgagccagtttttttatattcatcctgataacccacagcaacgtctgatcaaccaggcggtggagatcgtgcgtaaaggcg

SEQ ID NO: 22492 - DNA, 362 bp, Arabidopsis thaliana columbia
ggactgccaacagaagcaagttgctcacagatagacttaatctctttcaaataatcactcatggatctgtcacgcttttcaatggtttgtaactttctttgtagttcaaacaagcgtgaagaagaaacacgattgaaatgttttgctagagctagccatacctcctgagacgtggttgtgttgacgacttcagagagaatgtcttcagacagagatccaagaagccatgaccggaccacttgatcagatttcacccaagagagatacgcagggttcactgtctccacagctgcagcttcagcggtgagtggagtcgcaagaacaggatctggtggtttgagagcgccggtgacgaaacccag

SEQ ID NO: 22493 - DNA, 858 bp, Arabidopsis thaliana
gtagcggccgccagtgtgctctaaaggccaccgatgaacgctggcgcgaggcaattgtcacccgcagcccgctgatgctgcgtttgctggaacaggcgcggctggtggcgcaatcagacgtcagcgttttgattaacggtcagagcggcaccgggaaagagattttcgcccaggctatccacaacgccagcccgcgcaacagcaaaccatttattgctattaactgtggcgcattgcccgagcaattgctggagtcggagctgtttggtcatgcgcgtggcggtttactggcgctgtcagcaatcgcgaaggtttattccaggcggcggaaggcggaaccgtatttctcgatgaaattggcgatatgcctgcgccgttacaggtcaaactgctgcgcgtgttgcaggagcgtaaagtgcgcccgctggcgagtaaccgcgatattgatatcaatgtgcggattatttctgccactcaccgtgatctgccaaaagcgatggcgcgcggggaattccgcgaagatctctattaccgcctcaacgttgtcagcctgaaaattccggcactggcggacgcacagaagacattccgctactggcaaatcacctgttgcgccaggcggcagagcgacataaaccgtttgtccgcgcgttctctaccgatgcgatgaaacgcctgatgaccgcgagctggccgggtaatgtgcgccagttggtcaacgtgattgaacagtgcgtggcgctgacctcatctccggtgattagtgatgcgctggtggagcatgcgctggagggtgaaaatacggcgctgccaacctttgttgaggcacgtaatcagtttgaactcaactatttgcgt

SEQ ID NO: 22494 - DNA, 668 bp, Arabidopsis thaliana
tgtcaaccctgaagagagatgaagacgcaacaggaggaccggcactggttcttagggttctagagagtttagatgcatctagcgaagaatcatctttgaaacacagaaatcgtggagcactgcagatacagcacataaaaacagccatggcgcaacagagagtcttaccggaaacactcaagcaacaaatgtccaatgtttgatctttaaccataataacatttcagagaaagatagctgcatttcttagctatcttcattttaaacacaaattcaggacaggaacatggagattgattgattgatgatgtttcaaatacattttgaaaaatatgttacatttgttttcacactcctttcctatgcaacaaatttctgacaacgagtatccttgtgaatattttgacaacgaatagaacaaaacctcatcccacataaacaacaattgtaacctgcaatgtaaccacaaaccgagcaaaaatagcgacgagaagacgaactcggaggtccaactgctgctttcaagtaagtcggtacatgcgacggtaaagactccaaatttgcctaaaacaaacgattcttagaaccaaacttctaatgccttagcctagccgcaaaatagttagttagtaagtacctcttgcaatagctcaaggaaggatttagga

SEQ ID NO: 22495 - DNA, 798 bp, Arabidopsis thaliana
tttcttgacgataaaacaataacttatcaacgatacacaaacacatcaaaaactaagataatatcttctttcattaaaaactctctcatattagattctccttatcgagaatctcttaggaaccaaaaccggacgctgtttcaatccactcaccatctcatgatcatcgcacttggctacactttcctgctcttcattggagatacaaacctcatagctagtctcgatggcgaaaatgacctcctgaactttgcagccgttgacagcttctgcgacttgttgcacaccctagttggagaaatcgaagctttgggtgacttcttacaaaagttaccatttcttgttggagaaagaaatgcttgaagtgtgactcttttcggagaaatagacgacttacgagccaagttactgccatttctcgtaggagtaaatgatcttctgagcttagcagcagttgatagctttggagacctctttcccgtatttctaataggagaaatcgacgctgacttctttcctaagttaacagttcttgtcggagacctggagcctctaggtgacttccgaaccgagttactgccatttcttgtaggagaaaccaagaccttaggtgggctcctgatcttgacctgaaacttagatgctgatgtgggaggagatttgattaagaacttgtaaggcgtttctttattgttcttgatgctggatatctcatttctggctatgaccggagacattgttctactgaactttgcttgttgtgtagcggaccggaaataaatagagggttcgaaaaag

SEQ ID NO: 22496 - DNA, 559 bp, Arabidopsis thaliana columbia
  unsure (1)..(559): unsure at all n locations
nnnnnnnnnnnnnnnnnnnnnnttaaagatgcacaatcagcgtttgcgacagtaagcccaccacaaaccatcccgactggaacagcgtttgcgtttccggcgtgttggcatggaatacccaccacatcaggcaaaacgtcaaaatatcgaagatcgagctgatcggtccgaagaagatcataaagcgccccagatccgccggattccaacgctgcggcttttgaatttgctcgtcgtcgacgttatcaaacgggatcgccacctgtgacacatcgtacagcaggttctgaataagcaagtgtaacggcaacatcggcaggaagggcaagaaagcactcgctaccagcacgctgaacacattaccgaagttagagctcgccgtcattttgatgtatttcagcatgttggcgaaagtgcgacgtccctcaataaccccctcttccagcaccatcaggctttttccagcaggatgatatcagccgcttcacgggcaatatctaccgcgccgtccacagaaatgccgatatccgcagcgcgtaaggcgggcgcatcattaata

SEQ ID NO: 22497 - DNA, 589 bp, Arabidopsis thaliana columbia
tttcttctatttgagttacataaatgatgcagacaggatctggaaagacatacactatggggactggtattaaagatggtacaaaaaatgggctgattcctcaagttatgagtgctttgttcaacaaaattgattcagtaaagcaccaaatggggttccagttacatgtctctttcatcgaggttggttgctagattaatttgtctagatttatagttgtatggatattaactgaaatcttaatctgtagattttaaaagaagaagttctggatttgctggatagtagtgtgccgtttaacagactagccaatggaacccctgggaaggttgttcttagtaagtcaccggtgcagattcgtgaatcaccaaacggggttataacactatccggtgcaactgaagttcccatagctactaaagaagaaatggcttcctgcctagagcaaggatctctaaccagggcaactgggagcaccaatatgaataatgagtcgaggtgtgtatctctatcccatgctccataagaagcaagacatagctttaaagttacattaatgatgcttagccagtagtaaaatgtagttata

SEQ ID NO: 22498 - DNA, 766 bp, Arabidopsis thaliana
ccggtaaaggacagagtggaaagcgttgcattgtgaaggctaaccatttctttgctgaactgcctgataaggatttgcaccattatgatgtgagttttgtgttcccttagtattagctaccatacatctaatgtctatttataaatttacctgaccaactgtgttctttctgttaggttaccattactccggaagttacatcaaggggtgtcaatcgtgctgtgatgaaacaacttgttgataattatcgtgattctcaccttggaagtcgtcttccagcgtatgatggtcgaaaaagtctttacactgctggtccacttccctttaactccaaggagttcagaatcaatcttcttgacgaagaagtaggggctggaggtcaaaggtctagttcttatggtttcttgttgatttttttaataaggaagtttcagaataataacatctttcctattttacagacgagaaagggaatttaaagttgtgatcaagctagttgcacgtgctgatctgcatcacctaggaatgtttttggaggggaaacaatcagatgccccacaggaagctctgcaggttcttgacattgttcttcgtgagctgccgacctctaggtactggttactcatcctatggatgtttgcttctttactaccatgcttgtaagtctcagctggtttagttttgctaacatgttagaatcaggtatattccggtgggccggtccttttattcccctgatataggaaaaaaacaatcattgggggat

SEQ ID NO: 22499 - DNA, 454 bp, Arabidopsis thaliana columbia
  unsure (1)..(454): unsure at all n locations
ggagttaagcttttgtgagaactgtgttatgggaaaatctaagaagctgagttttaatgttggaaagcacatcacagatgaggttttaggatacattcatgctgacttatgagggttgaccaaatgttactccatcactatcaggaaaacagtattttctctccatcatagatgataaatccagaaaagtttggcttatgttcctgaaaacaaaggatgagacatttgaaaggttctgtgaatggaaagagcttgttgagaatcaagtaaacaagaaggttaagatactgcgaactgataatggtcttgagttctgcaatctcaagttcgatgagttttgcaagcagaatggaattgagaggcatagaacgtgtacctacactcctcaacaaaatggtgttngctaaagaatgaatagaaccttaatnggaaaggtaaggtgcttgttgaatga

SEQ ID NO: 22500 - DNA, 1020 bp, Arabidopsis thaliana
ctccttgtcttctccactagtcctgtcttatcttcctctccttcaacgatcttcttcttcttctccttcttttcctcaccttcttcatcgctcgactgttaggtattcaaatttcaagaaccatgagtatgattattggttcaatcaaaagatctataaaactaatctaaatcttatatatatatcatgatctcttatcaaccatttcgatcaaacaaaatttcataaatttttacttacagaggaagaagagctgttggatcggtgaagcttttcgatgacactaggcttgttctcctcatcttcctcggtcttttcttgaagctcctctagcagagtaatcttgttctccttcacttcctcgtgctccgcagctaactccggttcagagatctgagccttatgatcgaactcagactcgagcgtcgttgtctcttgaggtttcacttcctcttccttcttccccaagaaatcaaacaatccacgatccgtaacctctgttgtcgtcgctggtgattcctctgttgcgaccgttggtgtctcgtgctcgggaacgttgttcttgtactcctcagccatagttaatcttgatttgattaaaagtttatatagtaaatagaaaatatgagaaaatttcaagacttgtgtagttgctttaagatggttttgtgaatgagtaatgtttgtgatgagataagagagagtggggtttttatagtgtcaagagaagggtccaggccaacgcggaggtaacgctgtaaagatttaattatttttaaaatgatccaaaaagatggatatttatttcttgaattgtataatgacccctcttatttcttgaagtcggtagatgaatatcatgatatcagtatcaccacttttttcttaatttaaacgatatatgtttttaatatatagatgaagagttaaactaatattagataatcgcatagtcatgtacttttatcaacagaagctgtatcgaactatggtctatggttttgttttggattaacaatg

SEQ ID NO: 22501 - DNA, 2006 bp, Arabidopsis thaliana
tccaatcttaagacagagagacatgtgttttagaactacaataacatcgcacgagtaagaaaatggtaacctcgttgactcaaaccaatcaaatctccgatcactttttatcttcaccgaaaagtagacggagacgagaagcaaagacgccggaagagtcaatcgatgcttgatgaagaagatcgcttttgattttactcatacgatccgtcaaactatcttgttccttcttgagaacagcagtgtcttcctccagatcgtgaattcggtacttctgacttaccgatcggaaactcagaagcaaaatcccagtcatggcggcgaactggaagaagctttgcttgtttttcttcacattctcgaagaatccagaagcaacagcggttaaagccttcgccggatctttcccggtgagaggatcaacagatccctgtggcgcagacgaagccattttcggtgtctaatgaacaaaagaggaaacaagctgagagtgagagctagagaaaagggtttcgaaaaggcttgggcttttgatgttatcaagtgaagcccaataagttatttctattgtttaagagtagtgatttgatacagcctctgatgtacttggaaggttataaaatgcaaagtgcaaacagacaaaaatttaggttaaaaaaaattatgatgagatgaatgaaattcatggaagaacaaaactgttatagcataaaaatcatataatcaagcatttagaattaacataatacaatgtttaaagcaacattcatctatgatttaacattaaaccaatgggtttcttttttttgtcttatttatttgtattgttttattaaaacgtattttcccgttgttcattatcagtgtttaatcttgatgatgatgggttcatcttgtttgaaaataatgtttggatatatatgtcaacaaatcctaagaagccagatggcgaaatattgaaatattcgtattattgtgataaacattatctgctggttttagtatttgcccactttctcttcctcttatgcatgtcatcatttgaaacttttttgacaattcgaggtgatcatgtgaataacgtaatcaccaaacgtaagagtgagtatacgatgagtgttatgggataaccaaatgaaatcctcctacacacacaacttacacaaactcgaaaacatttaagtataaaccatatgcaaactttatataaaagatagaatgaaattacaaaataaaggatcaaatgcaatcaacgaaagccacaataacaacttaaaagagaaagataatgatcacaaaacacagcgaatgtcccactcccacatcattattcattctttaaccattttgcttaatcatcagacactttttctttcttctcttcctctccagtggtcttggcgtgataacctggaagcttctctttgatcttgtccataaatcccttcttctcctccgggatgtcagcaatcggtgttgctgtttcaaccagcggtgtggtgttgacgacttgtgaatcctctggtttcttgctgtggcctggaagcttctccttgatcttatccataaaccctttcttctcttcttcctctggtttgtgatcctctaccgaatgtggtgctggcatggtggtgacgactggtacatcatcaccccctggtttctcctccgagtggaaacttctccttaatcctgtccattactccttgattctcttcttccactgttttcacatgatctccttcaacaatcttcttctttttctccttcttcttcttctcaccgtcttcaccttcttcatcactcgactgttcatgaatattcaaaatttcaaaaccatgagtttgttttcaagatttaaccaagaaaaactacaaactagtcaaacttttacttacagaggaagaagagctgttggatcggtggagtttgtcgaggagacttggcttgttttcttcttcctcctcgtgcttctggtgaagctgctcgagaagagtaggcttatg

SEQ ID NO: 22502 - DNA, 461 bp, Arabidopsis thaliana columbia
tcaaaggttttggttacatttaatatacctgggcaggatttttgttgaaaatgggcgcaaacctctgccgacaatactcactaaaaagtaacgtgagaagaattaacggtatggtgaaaccgaagcaactgttgatagctttaatccgaaaaaccccaaagctataatctgtgtcaagatcagtgaaaagattgttgtgttgtggaaaataggccagtattgtccaccgctttcgtacttcgtaatatacacgttgagtatctgcaaatagaaacaattctgttgagcatctacaaagggttgtctttaaaaatatatatcaagagttctttttactcaatgcatgagcttggcactactaatggctcttatcacattgtacatgactataaacattgcagaagcaaaattccggaaagcacagaatcaattttccatctaaaacatgcaggtcacaaagt

SEQ ID NO: 22503 - DNA, 529 bp, Arabidopsis thaliana columbia
cgccagtgtgctctaaagggcttgtctggaagaacggcgacttttgattcctgggcgacgttcaatgttagggcgcaaattgcttaactggtttaactcccagggattaaacgtagaaatcctcggcgagtttgatgatgccgctttgatgaaagcttttggtgcgatgccaatgcaatcttcgttgcgccaacgctttatgcatatgacttttatgccgataaaactgtcgtagaaattggtcgcgtcgagaatgtgatggaagagtaccatgctatttttgctgagcggatgattcagcacccggcggtacagcgaatctgcaatacggattattctgcgctttttagtccagcggtgcgttaatcggcagctcccccaaagttaaggtgggggagatagattagttgtacattaccacgattttgactcggctcattatttgcccgcttgagacattgttccatatgtcacgggcgaataaatagaggaacgtgattacttccttcatggggatgctgcaaagagt

SEQ ID NO: 22504 - DNA, 1582 bp, Arabidopsis thaliana
caaacatttctcagcaatttccatgaatttcttcaacgaattcgtctcaatttgacctatcaaactcggatctaagatctcatcgattgtaccttttgatttgcagaacatcacccattccgatagattcacttcttcgtgaggaagataaggatctatagctggtctcgcgaacagtacctcgaggaggacgactccgaatgcgtaaacatctgatttctctgttaatttatgtgtttggagatattctggatccaagtaaccgaatgttcctttgatgtttatgctgatattgctttcatcttgattatgaattttcgataatccgaaatctgcgacttttgctatattgtgctcgtctagtaatatgtttgttgatttgacgtctctgtgaatgattgctccttctgagccactactgtggagataatctaaacctctagctgctccaatgcatatctctagtctttgtttccatgttaatgaaggtagattcgagccgtatagatgttctttgagtgtacctttctccataaactcgtagacgaggatcatttcggagttttcttcgcagtatcccgttagcgagacgaggtgtctatgtcggattcttgagaggacttgaatctcggtttgaaactctaagatcccttgtcctgagccggttttgcctcgtttgatagcggctttggttccatcgggaagaatagctttgtaaacgtagccaaacccgcctttcccgatcaacaactgctcgtcgaagttgtttgtagcgcttagaatgtctgtgaagggaatcgttaagcctaagtgtaggttgcgtaatggggagttgtggtattgagagataggtctattgtctgaactcccacctctgtgcaatggcaaaggagaccatacagtgccctcaacctctggcttagtcttcttcgatctcctccgcttcaagaataccataaacagcaaactgaagaccaaagctgatgcagcagcagcagcaacagcacaaccagtgatgatgtgaacccgggaactgcttctatttgaataatcagaaccagatttactcaaaacctccatcatctccagaccattcagaaaaccagcatccttattggcctccttggtacctatactgatattcaagagtccagataacatcagagacattcacgacatccttaaaaaacggactcgccaacctaggctgctctgaaggctttacatctactcgccaatacccatttacaaagagatagaaatcggagtcggagtttgataagttgctcaaaatatcagaaaaatgaatcctgatgaagtgtctatggttacttttgaccttgaacgaccatgtaacattcatcaacatccccacctgctcattcgagctacggttcattgctttagctgtcttgtagacgaaatcaggagcagtggagtccgtggctgaacttaaccctcccacgtagttaggcgtttgtgttgaattaatgttcctcgctgaatcttttcggtagagaaagtcatcatcgtcaggcagccaagttcgtcccaaggtatcattatccggagtgattttctc

SEQ ID NO: 22505 - DNA, 514 bp, Arabidopsis thaliana columbia
tcgactctatccccgttgaataggaagttctaattcccttgtgaccgtgtacgacatgaaacgggaagactatgatgatatcggtgatgcctcacaatctttctttaatgagcgtcgccgtcgacgacgttgatccatccgtagagtttaaaggtcagcttagttttctttgtaatcaagtcagtatacataaagttatccattgtgagggtttgttgttatgcttcttgaaagaccatactagggttgtggtttggaatccgtattccgggcaaacaaggtgggtcaaactcagatatccccaccctccaagtccaagcaaatgggattggttcagatatgcccttggatacgaggataaaggatcttgtcgtagcgttaaattcttaaggtttttagattatttacctgaagaaccagaaaaccaaaatgtttgctatgaaatctatgattttgactctgatttatggacaactcttgatggtacttcacactcgtggatatgttattctag

SEQ ID NO: 22506 - DNA, 607 bp, Arabidopsis thaliana columbia
cggctgatgagtagtttccggcttgagggactttgttattagatggatcacctgtaccggtataactgtgataatctcccaagtattctccattgttttgccattgaacgggtggtgttgagttgagcaaaccggtgaaagtggtttggtcagtgtttaggtcgttttgaagctgttggtttggttggtatgattcggtctgaacgttgttgagagaggcagtgagatgattcaagatatcaggattaatatttgaagtagtgagatcaaatggagtattcatcggttgtgacatagatttaaacaatgatgaggtaagaaacgaagagagctggagaagattaatgcggggacaatgagtcaccggatcaatccccattcgtaagagtttctttttaatatgtgtgttccaatagtttttgatttcattatctgttcttcctggtaagtgaatagcaattgcggaccatctatagaagaaaaaatatcgtgttatagattttaagttaaaatcaaaaagagaagtataagttttaacttgttaagatattagctgcagcgagttgaagattgcatgcttagctttagacatttgaccttggtatag

SEQ ID NO: 22507 - DNA, 675 bp, Arabidopsis thaliana
gtaacgtccgccagtgtgctctaaagaacgaggcacaaatctcagcgttcttttcccacacagatgtaacagcaaactgtcctgcggcaaccagcattgccacctcctgtcagagtcgtaaaattcgccaacgacgattattcggcgttacacttatcactcatacaaatcaaatagcaggattttgcagtgttacaacttcttttagcagtttttattggcggtggtacgggaagcgtggcgagatggctgttaagtatgcgatttaacccactgcatcaggcgattccgttggggacgctgacagcaaacctgattggggcattcatcataggaataggattcgcatggttcagcaggatgacgaacattgatccagtgtggaaagtattaatcaccaccggattttgtggcggtctaacaaccttctcaacattttcggcagaagtggtgtttttgttacaagagggccgctttggctgggcattactgaacgttttcgtcaaccttctggggtcttttgccatgaccgcactggcattctggctgttttcggcctcaaccgcacactaaagaccaaaaaaaacccgctgattaagcggttttgaattcttgctgacgtatcttacagagcgattacgtttgcagcagaagggcctttgcgaccgttagtga

SEQ ID NO: 22508 - DNA, 965 bp, Arabidopsis thaliana
taaagcgtcacctccaaggcatcagaatcagtgaccaaggaccagcaatcacccatctcctatttgctgatgactctctcttcttcatgctagtgaatgataaatcctgcaagactatacgcgagatactcagcctttacgagaaggtttcaggtcaagctgtcaacttaaggaaatcatcaatttcttttggtagccgagttaaaccacaagtaaagactcggatgagacgtatcttggggatccacaacgaaggaggtcaaggcaaatatttaggacttccagaagagataaagaagaaaaaagctgaaatgtttcaatatattgtagaacgtgtacggtcaaaaacccagggatggagtaagaagttcctctcggcaggaggaaaagaggtgcttctcaaggttgttgctcttgccgtaccagtttactccatgaacatcttcaagttttcacaatccatttgtgaagaaataaatggtattcttgctaagttttggtggagtagtggtgaagataaaaaagggatgcattgattttcatggaaaagaatgtctttgttgaaaaaaaaggtggaatgggattcaaagattttgagaacttcaatttggctctacttggaaaacagatttggaggatcctaaaaaaccagagtgtctcatgggaaggattgtgaaaagaagatatttcaatgaatcaaatattctcaatgctactcagaaaagaaaggcgtcatttgtttggaagtcactactccagggccgtgatttaatcaaacaaggactccgatttgcaattggtaacggctccaatatcagtgcatggatagacccttggttaccggttcaccctctacgacctccacgggtaaagaatggtcaagaagagaataactgttgtcagaatgaatgcattcaagttcaatgtggaaagaggacgcatcagcgagaaggttcagaagataa

SEQ ID NO: 22509 - DNA, 616 bp, Arabidopsis thaliana
tgaaaatttccaatgacgaagaaactcaatccactggaagatccaccaacggcaacttcaagcgacgaagatgacgtcgagacttccgaagctggtgaagcttcagacgattcctcttcatctgaagaagacgtaccaatcaaaattcgaatcaaatccccttccgccacaaccgccgccgctcctccagctaaatccaccgccgtctccaccgccgctgattcagattctggatccgagactgaaacagattcggattctgaatcaacaaatccaccgaattctggatctgggaagacaatcgctttaaacacagtgaatctaaagaagaaagaggatccaacgtcgtcgtcagctactttagctttaccggcgatgaaatcaggaacaaaacggccagcgagtgaagctgctgctacgacttcaacgaaacgagtgaagaaagatgaagagagtgtgaagaaaccaggaggttttcaaagactatggagtgaagaagacgaaatcttagtgttacaaggaatgattgatttcaaagctgatacagggaagtctccttatgtagatactaatgcgttttacgatttcttgaagaaacgattagctttgaggttag

SEQ ID NO: 22510 - DNA, 983 bp, Arabidopsis thaliana
cttgtacagagattttcccattgatgacaatggcaaagctttgcaatttatcttcagcagcaagcagtacatatcaacgggaggtgtcccggttggaaccgcaaccacaaacgtgtaccgcaaccctaacttcaaagctgggatgaaatctataacgtctccttcctgtagtcccgacgaagttatctttagtcctgatgtccatcaagccttgtattgccatctcttatccggaattctcttcagagatcaagttcaatacgtctttgccgtctttgctcacggtctagttcacgcttttagaacctttgaacaggtttgggaagagattgttaccgatatcaaagatggtgtcttaagcaaccgtattactgtcccatcggtccgtactgcaatgtcgaagctgctcacacctaaccctgagctagctgagacgatccgcaccaaatgtatgagtttgagcaactggtacggattgattcccgcgctcttccccaacgcaaagtatgtttacgggatcatgactggctccatggagccgtatgtgccaaagctgagacattacgcgggtgatctacctcttgtgagccatgactacggtagctcggaaggatggattgctgctaatgttaccccaaggttatctccagaggaagctacatttgctgtgattccgaatctcggttatttcgagtttctccctgtatctgaaacaggggaaggagaggagaaaccggttggtttaactcaagtcaagattggagaagagtatgaagttgtcatcacaaattacgcaggtattaccgttgttttaaggctggaattagcgtagtatcggtctcgtaatggatgcttataattctcatttgatccacattgcacagggttgtatcgataccggcttggagatgtggtaaaggtcattggtttctacaacaacactccccaactaaaattcatatgcaggagaaacctgatgggga

SEQ ID NO: 22511 - DNA, 438 bp, Arabidopsis thaliana
ataagattataaaacttaacaaataatattctttgagatttagaatcttaatttaatgacaatattaattgtttaactcatagaacaatggaattttaacgggaactgctacattggaaatatgaaacgatttgaataaggaaagcaaatttcgcaattattgtttgagaatatcgaaattgattataaatattccttttcacttatcatcgtttcgtcacaaaccctaagaagcttctcatcttcctcacaaaccctaagaagcttctcatcttctctttctctcgaaaattccgatttgctcttttgaaacttccgatgacgaagaaactcgatccaccaacggcaccttcaagcgacgaagatgacgtcgagacttccgaagatgattcctcttcatctgaagaagacgaaccaatcaaatcccttcccgccaca

SEQ ID NO: 22512 - DNA, 611 bp, Arabidopsis thaliana
gaacatattattgcaaaaatcacagactccacagaggaaggaaacgatttattcccacttctacatattggttgtagctacctgttgtgaaatgaagttaccttataacactgttcctagttttttattttattttttagtttcgtaatgatgttttcaacgaataattaagcaatcctgggatgaagcacatgacaaaagcataaaataggagactgtagcaggacatgagtaagacaccggactatatttcattccatattacgactagactatctaactaactattaagagtgatattacctcagtcgtgcccaggttaagcagtcttggaaggtctcacacttctccttttcaaggcactcaacaatcctctccaatgtgtccctcgcctgagcatcaccagcactcatcattgagttagtgtactcaactgggctagaaagatatgcattcacttcagcgggagtcttctccagcagaccctcaaactcagagcgagcccaagttaaacagtgatcaatgttatgcgggaaggaatgcactgtacacatgggggcatgtttctctggtgggtcgttgaggacagtaatttcagttagatgtgggat

SEQ ID NO: 22513 - DNA, 477 bp, Arabidopsis thaliana
ttcgttatttgtgtaagaagattttaaaaagaaagaaaagacctcacatcatgcttatggaagctgctatcgtgtatccaattgcgataccaaagagattcaagtattgaatcaacccacaaatcttgaacttgaacccacctacaagaaaacagagcatttcaatactcaaaacaaaaagcagagccaaaaacagagtgagaaaaacagagtatttgttaccgagaattgatcgaacggcatccatgtaagtgtagtttctcttgccagacactgcatcgccggttctgtagcagtcgctaagaagtgtggaggagtaaagagtaacaagagagaacaatagcatcacagcagggccagcgatccatccgagctgtgcaatcgcccacgccaatgacaaaacgccggatccgataaccgcagttattatatgagcgctcgcggtccaaacagtccctggagcaaaccgcatttttg

SEQ ID NO: 22514 - DNA, 479 bp, Arabidopsis thaliana
ttcaatattttttttttcctcatctttcatacgtgagacaaacaaaaagcaaatcttacaacttcatctccccgcgcatattaccctaccgaaaacgacgttgtattttcaccttttacatgagcacgtactactcttttttttttttttgatttgatttgatttgatttatacgccttataatccaagcgtgacgggaacattggcttcttgaatccagttaataggacctaaccagttagcaacagtgaagtcattgacctcagctgcagacctggcgatcttaacccagttaactcttcggttagtgatagctcctggtccacggttgttgtactcaacgtacctacatgacttgtggaaactttccccatcccaaatcttccaaccttctggtctaatcacatctcctatctcggagttgataatcacggtggtagagaatttcttccatggccttcccaagtatgactccacga

SEQ ID NO: 22515 - DNA, 186 bp, Arabidopsis thaliana
gaggatcgacgttcttcgagaaatttccatgaacattaaacgtttaatggatttaggctgctaccgcggtcttcgtcatcgtcgcagcttgcctgttcgcggacaacgcaccaaaactaacgcacgtacccgtaaaggtccgcgcaaaccgattaaaaagtaagatttctggaagctaaaagatgg

SEQ ID NO: 22516 - DNA, 539 bp, Arabidopsis thaliana
catcaatcgcgttgtataaatcgtcgtgacaaatccttgaagtgtccggtattgtttcagccaattcaacaaacttcgacactgttaagttcacatctctagcaatttcttgaagataagaatcaacaagctttgctactttactcaacaatggaggaggagaagaagaagtagacaaagatcctctaacctcctgtatctcttccaaattgatgttttcttcagaacgagaccttctatgttctgttcttgttcttgttggccttatctcaggactaatatgtgacaaaaactgcttcaccatcatcttcacaacatccacatcgtataacataccagacttatccgataagggtatcaacagctcgctaacggttgccttatccagttgattcccggcttttatcgcgagttccatcttcgaagaatgcgaaacgttcataacattagccattttcagtagctgaagcaagaaactgcaaggaacagaggattttcctctggtagaagtgaaataaccgatccaaaacaagatttga

SEQ ID NO: 22517 - DNA, 767 bp, Arabidopsis thaliana
atacctgagatcactctgccttttattaaacctgaggattcacagtattctacttcatgggacctccgatcagagaccaacttagcaaaccagaggaccatttctttgcctgtttgattcatgtcaaaccgtgaattctttcttgtgtgatctcttcttcagctagctttgaaatgtgaatgtgatttttgggttctgtattattgatgtagtattactattaaacatgcttctggagatacatacaatatgctatctcacctacttttgtctctatatctaagtgtttttctgaactattatttcgatctaaaagatacttctgtattccatgattttacatcagtgatgcgactcttcctctgcttcaaaatctttttctgcagatattttcttcgccagagcctgcttggtccagcgcttcaagtcataagctcttttaaaaggcttcttctccctggtaagtttcctctttgtaatggcaattgcaagatcgtttgggaacaacgtttgccagacaaaggcgtggagaagcgtggagacaaacaaaacgcagaccatcgctgtggaaatgaaggaaagagtgagtgctagagcccggctcgggtaaccaggtactgcctctgcatactttattgttgctacggatgctgtcgtcataggaaaagtatatgaccaccacgccactgagaacctgcaaaaccccgtagtcacttagtatcatcaacatatatcttcaaccaagaatatctagacctgtgatggaa

SEQ ID NO: 22518 - DNA, 616 bp, Arabidopsis thaliana
tcacgtgtgaagtacctcgtttgcccatccatcttgagcagcgccaattgttttcctcggttgtattgaaatgggtgattacgaggacgctgctttcctttttgtttcgatgttgaaacattctcagaaaggtgctttcaagattccgtcttggatcttgggctgcgttttgaaagcttgtgccatgattagagacttcgagttagggaaacaggttcatgccttgtgtcataagctagggtttatagacgaagaagattcatatctatcgggttctttgatacgtttctacggagaattcaggtgtttggaagacgctaatctcgtgttacaccagctctctaatgctaacactgttgcttgggcagcgaaagttactaacgattacagagaaggagagtttcaagaagtaatccgcgatttcatcgaaatgggtaaccatggaatcaagaagaacgtctcagtgttctctaatgttctaaaagcatgctcatgggtcagtgacggtgggagaagcgggcaacaagtgcatgcgaatcgtataaagctcggatttgagtcagattgtttgatctgatgtcggttaattgagatgtatgggaagtatgggaaggtg

SEQ ID NO: 22519 - DNA, 642 bp, Arabidopsis thaliana columbia
  unsure (1)..(642): unsure at all n locations
tagaggcaaatgggtctatgattcttcatatcctctctatagtgcttttagttgtcccttcatcgattccgaattcaactgccagaaagcgggtcgtccggacactaactatcaacacttccgttggcagcctttctcctgtcctctccctaggtacttttgcacatgtattactattaaccactatagttttaaatagttagttagaagaaaagctaaggtttagattggcttatacactaatttttgcgtttgtgtataaaatatagatatatagtattttctgataaaatactttagcaatatgtaaacacaaacttgttggtgtttgcgttcacaattaacaaatgagttttgtttacagatagtaaagattatgagtttatttgaaaacaatagatagaaactatatataaacgcaaacgcgaacaaacaatccaaaatgtttttggtacaaatgaacgagtatgaaaagtctaactagtatcttgatcatgcagaaaattggttttgaattgggtcgaaagacacataataaagtttataagatatgtttttcgaagaggtatattacaatttaaaatgactatacagatttgatggggcgaatttatgnagagatgagagggaagagatatgatg

SEQ ID NO: 22520 - DNA, 1549 bp, Arabidopsis thaliana
tgcgatattgattctcacaggataacatatgattatccaatatctatagaaatagttagcatttgagtgtttttactttttagtatccaattcactatcattgatatttttaattttgttgtctagctcgatttataacatttggctagttgtaaatcgttatcccaacattgtattccaaaaaaaaaaaccagttagttattcagtggttttgaactgagcccagcccaaatccaatgatgtggttctcgaaactttttgggttggtttaacaaaaaccggttcagatcttttcttttgatccaccaattgattggactaaaccgacttataacagtcgctacactcctatagaaaagcttgaaattgaacacagtcgatgaattttcctctccgcctggaagattgtggagccccagttgttgttaacaacggtctagagattcgtgtctcttgaaattcgatctgagtttcaccttcaaggttcgtcaatgatccgtagcaatttgcttcgttctaaaccctaatttgagatctcaattatgtgattttttcgtttaggttttaatcaggaatgaagcattcaaaggatccgtttgaagcagcgattgaggaagagcaagaggaatcgccaccggaatcacccgttggcggaggaggaggaggtgatggtagtgaagacggacgaattgaaatcgaccagactcaagatgaagatgagagacctgtggatgttcgccgtccgatgaagaaagctaaaacctctgttgttgttactgaagctaagaacaaagataaagatgaagatgatgaagaagaggaagagaatatggatgttgagcttactaaatatccaactagttctgatcctgctaaaatggccaaaatgcagtgagtctttgtagaattttgattgttcttcatgtttctttgatgattgattgtttgttgaattcttcagaaccatattatcgcaattcactgaggatcagatgagtagatatgaatcttttaggagatctgcacttcaaagaccacagatgaagaaggtatatatgttatatgatttgtggttatcaacattcttaattttgtttcattgcaaatatgaaccatttagcttttatgttaatgcagttattgataggtgtcactggtagtcagaagattggtatgccaatgattattgttgcgtgtggtattgcaaagatgttcgttggtgaactcgttgaaacaggtaagccagtgcaaaaatttccaatgattttgtttatgtgccaacaaagctcatttactgaacctcaatacattatctgtagctcgagttgttatggcggaaaggaaagaatcaggacctatcagaccttgtcatatcagggagtcttatcggagactaaagctcgaaggaaaagtgcctaaaagatcagttccacgccttttccgctagtcaacaagagccaaaagagaacttatatcagcctaagactggggaatttccaatgctgctcaaggataagggtctacggcaggtttaagctggcgagatttg

SEQ ID NO: 22521 - DNA, 535 bp, Arabidopsis thaliana columbia
tgacttagtaagtaaaaatctgagggaaaatgtagtatttgaggaaaagaaaaactctcgtctatataaatattaataatcgtaaatcatattttagtagaatcaatatagtgaaactacctacaaggatcataagacgatgagtaaatataaaaaagatatatctgttggaagaaaaggcaaaaagaaaaaaaaacaaaacaaaacagtttaaagtaagcacttgtggaagagtgtgatgttcattgaaggcttaggttctcttgtttggttcaaagacgtatttgagcagtgactctttgatggagagcatctctgggaactccttgcttagtttagatccatccatttcgttgttgcttcgagcagcaacaatgacctttgcttgttcttccactgtgaagttggaccatttaaaacctggctcgatgtaattcttgtacatctccaatatctcgttgtggctcacgaccctgggttggtgaaatccatatgcctcttaggtttctctcgccatctcgatagagattgggag

SEQ ID NO: 22522 - DNA, 416 bp, Arabidopsis thaliana columbia
acctgcattcatacaatttatcgaacatatcaagcgaaaccctgaaatctcacaatcagagttgtgtcaaaggaaatgaaagatttggtcactttacctcgagctgctcggttttctcttttgtcagtagtgcttcatgcatctctcttgagatgactttgccattctgatcaaatcagaaacaaagaaaacaatcagaccaagaaagaaaaagaatagaactttgaagcaaagcagactaacctcctttagataagagagcatatttggtgtaggctcatgataatcaggtcctctgagatccataaccgcattaggatcttgaatgtagttaattgtcgggtaaactggatcccgccccaaactgcaagaaaccgagaatgttagtcgaacgattgaataccatgatgagttag

SEQ ID NO: 22523 - DNA, 590 bp, Arabidopsis thaliana columbia
actctagcaccagtgtgctctaaagatattcagtgcaaacgcgtttatgatccggctgaacagagcgatggttatcgcatactggtcgaccgcctctggcgcgcggtatcaaaaaaaccgatttagcccttgatgagtgggataaagaaatcacgccgtcaacggaactgcgcaaagcctttcacggcgaagtcgtcgattatgcaacctttcgcgagcaatatcttgcagaactggcgcaacacgagcaagaaggaaagcggctggcggacatcgccaaaaaacagccgctgaccctgctctactcagcaaaaaacaccacgcagaaccatgcgctggtgctggccgactggctacgtagcttgtgattttagtacagcatccggcggttatttttcacagccggatggtcacgccgccacaatgcccattcatcaatcgtttcaccgcccggtaatttgcaattgttgctgacccttgcgctgtctgcactggaatgagcgtcccgccttctgctggcaatagaccgacgccggatttgccataccaatctgcggcggtttaggtgcttctggctgagaaggggttga

SEQ ID NO: 22524 - DNA, 497 bp, Arabidopsis thaliana columbia
gatctcctcctcatccgccgccgtgactcgagagacggtgactcggagagctgagtcgacttgggattgactcggaggagaagagagccatctggtgattagagggaaacgaagagcggaaagattccggtggatgtgggcggcggcggagacgagctggtaaggacgaactccggcgaaagatgctgtgcaagagagagagattcgtcgtatgctgagtcacaagccgagtcaaactcgggcgagttagatagaatcgtcgtaactcgctttgaacccgatatccccatttttcttttattttcttctcaccgagaatctattgatcttgttgtcacacgtcaccaaattgaagttaatttctaaccgttggatttagccataaattaatcggacgctttatgactttctttttgtcgtacatgatttatgatcatttggaacacattatttaatatttttttacgcagaacacactaatttactatctactatat

SEQ ID NO: 22525 - DNA, 598 bp, Arabidopsis thaliana columbia
caaaagaagagctttctaattaaccattgtttgatttgcagtgttacgcagagaaacaggctttaggagaagttagctcaacgctattggatacgcaagtgaatccagcggtttgggagatgagtggacacatggtgttgaagaggaaagaagactatgaaggagcgtcagaagagaaggcatggaggttactagctgaagtttctttatcagaggagagattcagagaagttaacactatgatatttgatgccatcggttttagtagtcacgaagaagaagaagaagaggagcttgaagagcagaattcgatgaatggtggcagcttcacaatagtgcattgtccttcagtgaaagaagaggctgtctctaattgaggcgctttataactaaaagcaaaaacataactgtcgtcgtgattttgcataacttgtgtttgacattttagtgtattgtagtttttttcttttcttcttggctttgttacgtctttgttcgaaccttttgaatcaataaaatcgaaatcgcctaattcaaaaaattagttactctagtcttaaagatggacaaagagaagaaacagaagattagaaaaaaa

SEQ ID NO: 22526 - DNA, 796 bp, Arabidopsis thaliana
agtaacgtccgccagtgtgctttaaagcaatagcctcattggctccccgtgtttcttgttcagacattttggttcctctaaatccagctttcaatttagcgtagataaagagacagatcggtacactgtattatctgcctcgactattagtaactcagtttatcttatcgaaactaacgcttacctcaagttgatatcactaataaataaccatcaaaatggtttaaatgacttattaatctcgatttgttagtgttataaactgaaagttaatttattcataaccaattgtttttacgacagttaatcgttgctctcctgtatcatattcgtcggcgtgctaaacagaaaacgggtagcaaaggccaatacgacgatgatcgcgacacaagccaacgtccactctcccatctgagaaaagaatcgctggtaagctgcaattgccataccgctaatttgcgactctgtcgtctgctgtgccacgacgcctgccagccagttggcgaccgcgcctgttgccagcatataaatcccggttaatacgccagacattttcagacgcgtgatttgcgcaatcgccaccgggtcaataaagagttcggcaaagcccattagcgccagctcggatatcatcacgcccattgacgcttgaccgtcagccgctgcatgtcgggcatcaaatgccaacaacataaagccacaagccatcagcagtaagccaaaggtaaacttcagccagacgcgcaatgttgagttgcgcggctttctggcgacgcagccaggccagtctttagag

SEQ ID NO: 22527 - DNA, 578 bp, Arabidopsis thaliana columbia
gattcaaattagcaaattttcttttgatagatattttcgttttgactataatagacgattcttttcttcttagtgtatattgcacatgttccattcgcagaattaagtaactgtttctctacaaagtgaaaataaaataaaaataacaagtgtggttctcttgtctaactctgtcagattcttctttttgagacaaatagtataacttgttccttttcaatctcatctattgcaaaagcttcactgttttccttattatcttattatataatctctactttacttaacagatccggcaagtttgattcagtgacaagaaagcatgagtaactctgtagtgcataacttacttaaccggggtttgaatcgtcctcttaactttgaacatcaaaacaagctcaactcctctgtgtaccaaacttcaacagcaaatccggctcatggcaagattggcagatcaaaactttacgggaaaggtcttaagcaggcaggacgcagtctggtcactgaaacaggaggaagactctctcatttgttcccgagctgtcttgcatggatctcaggttatttcttatgga

SEQ ID NO: 22528 - DNA, 527 bp, Arabidopsis thaliana columbia
gcttacagagcggatatccagactcttgcatttcatcccatacgttcaacagcatcccgcattttccaaatcttgatagccgcttaagcaacagcttatatgcgctttctgatatcctacacccggcttttcttgatttctgatagataaccattgcagcgtgtggtggaccatagctgcaaagaggcttgaggaaagaggtaacaagccctgtggtgggaagaacccctcttgataacatctcttcgaatatctcaagcgcatcagaaaccttacggcctttaatgagcccagaaacaagcttggaataggttccaagttaggttcacattcctcatccagcatccttcggtagtacctcatagactcatcaaaatctcgagcagatatgaaattacagatcatagcattgtaaacatttgcatcaggaacattacccttgtgttttatattatcaaagatctcaacagaatcattgatacgaccagttcttccaacccttcaataagatggctataagacaaaca

SEQ ID NO: 22529 - DNA, 546 bp, Arabidopsis thaliana columbia
acttgcacagcagatgcttcactctcaccgttccatatgtttgaatctatgacatacatgaactgatccgctaattcttcaccacaaccaggaaatgggaatccaaactccccaatgatagcagataaccaggttaggccaagctctccgcctagaagaaacagcattgtaactccaaagctatagacatcaaacttttcggaaactaaacctgttccattatactccggatcaacggataccccataaactactttatcatcatacacagatgattctccctcagggatcgatattctcaaacagaaagaagagagcttcgcagtcccatcttcgtccaagaatatgttttgaggtcttacatccctgttgattatgactcgaggaaaagctgtgtgaagataagctaccgcatttgcaatatccttcccgatctttaaccttgcactccaaggtaacggagtaccgtccatgtcctcgagttttagaggtcctttctctgctaactcacaaaccagaaccggtttataaaactccacacagcaa

SEQ ID NO: 22530 - DNA, 1052 bp, Arabidopsis thaliana
ctaattcaatttaaatcactgtttttttttgtatccatcaacaatcatatgaaccatttgactacattctctggtcaatttgaattggtatttactactactaatagatactcttataccaatttagataaataaacttaatcctgagtacggactaaaggacaaatttgtacagtgagttaaaaatagaaaatttacctaacaatactttttaaatcagtcaaacattttttgactttaataagaaataatatttaatattggccttgtaaaacaagactactctcacaacagtcaacacacacagctaagcatacgcgtcacgttccggtttaaacaaaaaaaaacacaaaccgtaatttggtttccgtttcttcctcttgtaacgaccggttaaataaaatgctgacgtcaccatcttcttctatatatatcctacctggaaccaactctgtatatacgcgtcctcctctctcttcttcctcttgctatcaataaatctctctttctctctacaaacaaaataacgagaacttcaaaaatcaaatgggtctttgtgtatctgttaatcgaaacgagtacgtttcttcgtcgacgacggctaaaatcgtaacaattaacggcgatctccgtgaatacgatgtaccggtgttagcatctcaggttctggaatctgaatcgacgtcttcttcttcatcatcatcatcttcttcttattttctatgtaattccgattctctctactacgacgattttatcccagcgattgaatctgatgagattcttcaagcgaatcagatctatttcgtccttcccatctctaaacgacaataccgtctctctgcctcggatatggcggctctcgctgtaaaagccagcgtcgcgattgagaaagcagcggggaagaaaaatcgccgtcgtagaagcggaagaatctctccggttgtgacgttgaatcaggctaacgataatcggatcgccgccgtgaacaacagaattggaggcgacgaacgaatatgatgatgcaaaaaggaaagttccgaatagaacga

SEQ ID NO: 22531 - DNA, 557 bp, Arabidopsis thaliana columbia
gtaacgtccgccaatgtgctctaaagacatgaccgaagtccaggcaacaacgattggcacgcgatgtgaaaaacagttgggcgctgggggaaagagtggtgtcgaaacaaagatgtagtggtcgataaaaaacaatccgtcatctttgaaaaagccggtaacagcaccgactccgcactggcagcggtatttgtaccgactggctacgatgaatacaccagctcagcctatagctctctgttggggcagatcgtacagccgtggttctacaatcagttgcgtaccgaagaacatttgggctatgcagtgtttgcgtttccaatgagcgtggggcgtcagtggggcatgggcttccttttgcaaagcaatgataaacagccttcattcttgtgggagcgttacaaggcgttttcccaaccgcagaggcaaaattgcgagcgatgaagccagatgagtttgcgcaaatccagcaggcggtaattcccagatgctgcaggaccgcaaacgctcggcgaagaagcatcgaagttaagtaaagatttcgatcgcggcaatat

SEQ ID NO: 22532 - DNA, 502 bp, Arabidopsis thaliana columbia
taaaaacaactgaagtgatcatgatcatggtctcaccatatgcatgacccatcatattagtgtctcttaacccgatagtgaccgccaggcaaagacacatcagcatccagttaacttcagggatatagatttgtccatgtattttgcttgaagtgtgaatgatcttgacccgaggaaagcaatcaagtgcacaacattgacttatgatcgaaaacgttgcggatatgacagcttggcttcccaccacagctgcaaatgtagccacaatgaacactggccagaacacaggctctgcaaacagacttatctgacttaatcccattcaaaagtctcgagttattcgcgtactatacagattacagttaagaatttaccgggtatcgccttgtagaagctttgctgaatatcttcatggtgtttagagagaaacgcagcctcacccatgtatgcaagtatcaacacgggtatacaaagaacgagaaagccacctatatttcagttt

SEQ ID NO: 22533 - DNA, 654 bp, Arabidopsis thaliana
tttcagtcagtaacactcgcataagtaaactacccatttcctttctactctttgttttcttttttagtgggagtaatacttagctgacagtataatcgttatccaatcttacccagtgaaaattttgcgcatcatgtcctccagtgtagttatctgttcatgagtaacagacaaccttttgttgagggagtccacacgagggccgtcagctctcttcttgctttcagcattcaattgtctttgggtggtttctcgctgtgaaccgagtgtgtttgcaacagaaatgaaagatgtgactagttggaggcccattagcgtggcagtttgacggtaaactctgggtggagtactgcaaaaagaaaagacaaacatgaaaagaaaattctatgaggcataaaaccacataagtttgaacacaaaccatgacagtgcgataatgtagtccatgcacttgtcgaacaagactctatcaaacaatggtccggtttggcactcgataatgagattattccagaaggaaacaagattttctttgaagttcttgagttccttctttctggaactctgataatcttcgagttcccctataggccaaccacaatgaaaagagagttgtgaaaatttgcttaggagacaaaatgcaattgaaagaga

SEQ ID NO: 22534 - DNA, 1085 bp, Arabidopsis thaliana
cgggaaatgggttttgtctcttttcctcgtgatgattaccagacaaagacttcgtgtaagagaataaagaaggaataagggatcgcatcgctttgcaaagtttcttccttttcttcatatccaatggaaaggcataatctttctcttctttaatcacattataaaactccacattttcattaccacacaagtgattgattaacattaagatttcaaattaaaaactcttaaccataagaataactctgacattctttagtaataggtttccaaaaacaaacccattacaagagctgtaactttacatatcagcagccacaagatcttctgaacacaaaatttacaactactagactgagttgttatcaaaacttttctccctcttgcgacctcaacttcaagccacagcgagattcaaacttatacagcgaaacagactatcaaaagttatctacctctactattgtctgcaaagatggcttccatttccgctgaaatgaaacgccttgaggattttgttgcagcagctgctcgagctgtttcctagtcagagtgatctttatgcaccgccttgtccctgttttcttctgctcagctgcatcctgaggtgactccttgatcttctctgttgatgcctcatcatccgaccagacatctgtaaccttgtttccatgcttgcagagcaacgtgtgaatgcagtttcccatgattgatagtgatgtgatgatgccatgaatcaaacaaatttatattcagctctcggaccaacgtgcagaccatcatgtacccactaactcttttctttattacggtcagctaatgtaagcagcagttgaaaaacatatcttgttgcacatgcaaatgtcaacctgggtcttaaatatgtaaaataaatagagcaaaagagcatgctttccaggggaaggcaaagtcaaatcaccaccgccccagtattaaagtcaatagaaggatatgcagagaagacgatgaaatgagactaaggagaatgaaacttaatcagttctctaaattggttcacaatgtgtatacccgagtttgctagcattacaaaatctttcctgatc

SEQ ID NO: 22535 - DNA, 574 bp, Arabidopsis thaliana columbia
ctccgcttatgtgtggaagaaaatggtggattctatagagagcggtcataaaacctgcaagatgggatggcttgtcgacggtagaggaagacttgagaccgttacctcgagctacataggaaacgtattgtctatagctgtaggtgaagccagtatcgaaaatctgaagaaaaaccatgtgtcagatatagcaaacatagtgcataaatcgataacagaagtgacaaacgatactcatttcacagatttgatagattggatcgagagtcaccgacctggactgatgttggctcgggtggttctcggacaagaaggaccagctttggtcttgtcttcaggacgacggttccctgtggctgaattggattttggatatggtgctcctttcctaggaactgtatgttcaacggttgagaaaataggagttggttacctgaaccagcgacctagcgcctgcaatgatggctcgtggtcggtttctgctattgtgtggcctgaactcgctacagctttagagtctgactcggtgtttcaccaatgtctgctaaacatcttcacgtccagacctgaaaac

SEQ ID NO: 22536 - DNA, 505 bp, Arabidopsis thaliana columbia
ctgcattgctcaagacttgccggaaaagctttgttggagaaaagcacccaagcttcgtcttcttttaagagctcaatctcgtgctttgtgctcccaattccatatgggaaagaagccacgttcatgtcccgagtagtcatcataacacgacttccataaataccatctggtaaagcaatacttatctccctccatagaccagtggtccatacatcatcaagcacaacaatgtacctcttcgactgcaaatactccacaagtttttccaccaactctctgtagcctaaggagtataattcagctggaatctgtgtatctgcttctttgtaaaactccttgatcatggtcctaaacacatcttcaatcacataagatttcgagattgtaaccaagcgtaagactcaaaatgcctccgcacactttgagacttgaagatattcgctgagagtgtagttttcctgaaccgccatccaaccacgcgacaacaatcgctgaggtcgggact

SEQ ID NO: 22537 - DNA, 536 bp, Arabidopsis thaliana columbia
  unsure (1)..(536): unsure at all n locations
nnnnnnnnnnnnnnnnnnnctaaagattgaaaaaatattgaacataaaggtcatttaaagcgcagtaatggcgataatttagtccactttgtgagattgagcatggaaaatataatgaacaatccggttatcggtgtcgtaatgtgcaggaacaggcttaagggtcatgcgacccagactctgcaagaaaagtacctgaatgccatcatccatgcaggcggcttgcctattgcgctaccacatgcgctggcggaaccgtcattacttgaacaacttttgccgaaactcgatggcatttatcttcctggtagtcccagcaatgtgcagccgcacctatatggtgaaaacggcgatgagctgacgccgatcccgggcgtgatcttctgagcatggcgataattaatgcctgactcgaaaggcgcatccccattttcgccatctgccggggtttacaagaactggtggtggcaacggtggttcgttgcatcgaagctgtcgaacagcttgaattgctggaacatcgggaagatccgaac

SEQ ID NO: 22538 - DNA, 552 bp, Arabidopsis thaliana columbia
ccccaaatactctacgagaccacgcgtcgtacgtaatgaacttatattaccagaaccttggtagaaccaaagaccaatgcactttcaacggttctggctctgaagttactaaagacccaagccatgacgcgtgtattttcatatcttatgattaatgtatgtgtggtagatttttaagccgaatctccaaataagttgaaaatgctatatattgatcaaatatctctaatctctgtataagtttatatgtaactatatattggagtatattctcaacttatagaacatcttcatatttctcaaatgttgttgatgaattaatcatttttagtacatgatcagatcaatacttgtattgatggctaaagacttcataaacgcaagatccaactcataaaatgactttatgtatcttgaaagagcatttcaagttttttgaggtgataatatacattaaacctgatgctaataggaaaggtttttcttgctggactcgtaacaaaaaaaaaaataggctaaaatttcgattaacctatgaaaaagaaggtatgg

SEQ ID NO: 22539 - DNA, 622 bp, Arabidopsis thaliana
tgaagggcttcttacttcccaaacggatcctcctaaattcagtcgtataacttcaatagaagcaagaggacactcgaaaaaaaagacaagttacaagaaagtttgtgaaaacattacaacaatatatgtaaaaaagttttgccaaaaacattaaggacatgttacgataaagaaacacaaggtggctacgcaaaccgcaatttatcatatttggcttcaacgaaataactaccttcacaacaaccattggatcactgcctttggaaccttcaagctcgttgatcgtcaagtccgcaacatcatatccggaagacgacataggaagcgttggcgtctgctcatgctcctttggattagataacttgtatcccactttggctttattgtaatcttgttttttactttctttttttcccaagattactctactttaggtgttgcttctgtaatctcttcactttcatttctaatgatatttacaagcttaccaaaaaaataaaataaagaaacacaactctttggatcatgtgataaaaaaaatattggttttcaacaatgttgagattgttattgattatttgccatagtgtttagagggtaaacaaaagaggaacatttaaac

SEQ ID NO: 22540 - DNA, 1211 bp, Arabidopsis thaliana
gagaaagtgaaggtttattatacaaagtgagtccattttatctaagtctagacctcgaaatcatagcaacttcagagttcacatcctcactctacaccaaatcaggattttaaaatatgtaaggttaagacgcaaatcattaacattaagataggaactttaaccttaaggaatgatatgtccctaactatcggaaatctaagaacaccaaatattagccacatcacatatcgtccaagcaagcaaatctaaaactcttcttcagggaaatcaatttaacattttcattcatgaatctacaatattttgttgcactgcaaagaaccaataagggataacaccaaggagaaagtctaactcaaaaatgacaaacaacattgaatcactaccttttatacctcaatcaatggaagaagcttcttcgacgctcctatctgatttcagtcgaatccgattcaacaagattaacttcacatcattctcattcaaccctacaagattcagaaacaattacattatttcctcaatcacagactatacaacagtaaacaggaagaagtaatccaatcggattcatcaaaaatgttaatacctttcaagcatgttctgagaccttatatgcttctgaagaaacgttacccatccacaaaccagggaaaagaacctgaaaaacgatcatacaacaattcaagccaatattgttaggtcaggtttgagtaaaacaaaggtaagattctgattcaacgtgaaaatcttacatcgagctgcttctgcacgttcttggctctcttctttggtcttctactaggttttgatccagtcaacgcgtagatatcttcatctatctccagctttgagagcgatatcgataacctcggtttcttctcctttctttccgtcgtcgccatcttagcatctacaccgttcctcgatcgtattgactctgttcttaccgttcccagagatttattctccggtaaagcaccgttacagctcttcaataccccaccgccgtgtccaattgaccgcttcttcgtcggcggtggtctcctcggcctcagattccaagtcttcggtccaaactcgtctgcttcctgaccaccaccatcggagatccgttcaccttcagcatcgatcgccggaccagctgaatcatcagtcacttgaacagaggcggcgacggaggtggcgatatcagtcgatacagctgt

SEQ ID NO: 22541 - DNA, 708 bp, Arabidopsis thaliana
tattaataaatttaaatttgacatatgatgatatctcatattttacgtaacatatgtatatatatcggacatatgcgaattagcaactttgtaaccaaatttttatgatactaaaatattagttaaaataaaagtttagccggaaataaaatttttctttccaaaaaaaaaacggaacgaagatttcctttctcaggcgttgtctcttttgaggaagctggttcctcaggccacagtgtttcacatttggaagcagcgcaacaattctctccacaacaaccttctcctgccatttcagtccaccttcaagttgatcgacaaggaagttcgcaactctatttctgctagacgtcatagaaagcattttcgaaacttaatgtttctttggattcggtgacttctttcttttgatgtcaatctgtttgttgccttgttttttattcttttttggcaaggtctcaaaagccataggttttatctacgtagatcctaaacttttcatttctaatgatatttacatttatatcaaaaaaaaaaaaaagatttcctttctttttgtgtgaatagattcggacatcaactgagtaattacgtatacctttttcgagttgctgaacaacctaagactttgaggagagtctaaaagaagaatttagcaacacaaaatataaatttatatttaatataattcatataaataacgaggag

SEQ ID NO: 22542 - DNA, 572 bp, Arabidopsis thaliana
tgatatccgtttttacaggagggagacatttaaccatctagccagctgctagaagaggcaagacagcatgcaagtgaaaatatgacgacaatgctcattgggaataagtgtgatcttgaagataaaaggacactgagtacagaggaaggagaacagtttgctagggagcatggtcttatattcatggaggcctctgctaagactgctcacaatgtcgaggaggtaaaagcccccatgcattcattcaaatgtttaggcttaaacagagatctctacacatgctttctctagtgttccccaacttcttgtatctccaccagtttcttacttgttccactccagtcctaacacactaatagaaagtctaaatcattatgtcgacgtgtttcgtgttttttaatttttggctaggcattcgtcgagacagccgcaacaatatacaaaaggattcaagatggtgtggttgatgaggcaaatgagcctggaataactccagggccgtttggtggaaaagatgcatcctcctcacagcaaagaagagggtgctgcggctgagatgggaacatatgata

SEQ ID NO: 22543 - DNA, 456 bp, Arabidopsis thaliana columbia
  unsure (1)..(456): unsure at all n locations
nnnnnnnnnnnnnnnnnnnnctaaagacgtctctaacctgaacatgggcgacgtgattgacgtttacccgtacaaaggtgaagtgcgtaaccacgaaaccggcgaactgctggcgaccttcgaactgaaaaccgacgtgctgattgatgaagtgcgtgctggtggccgtattccgctgattatcgggcgtggctgaccaccaaagcgcgtgaagcacttggtctgccgcacagtgatgtgttccgtcaggcgaaagatgtcgctgagagcgatcgcggcttctcgctggcgcaaaaaatggtaggccgtgcatgtggcgtgaaaggcattcgtccgggcgcgtactgtgaaccgaaaatgacttctgtaggttccaggacaccacggcccgatgacccgtgatgaactgaaagacctggcgtgcctgggcttctcggctgacctggtgatgcagtc

SEQ ID NO: 22544 - DNA, 507 bp, Arabidopsis thaliana
ttcttaatcctaagctgatgtttatggtttcatatagtgttgttcttgacatgacatttttgtggcgatttaggtcggcatttaccggataaagcaattgatttggttgatgaggcttgtgcgaatgtgagagtccagcttgatagtcaacctgaagagattgataaccttgaaaggaagaggatgcagctggaaattgaacttcacgccttggaaagggagaaggataaagccagcaaagctcgacttatagaggtatgatacagctttcttttctcatcagtagatagcgcttcaaatataagactattgtgcttgttctggaattcttgattgttagcatctgtttttgcgatgagtctttgatataattttctcaaactatgaatctgtaggtgcggaaagagcttgatgacctgagagacaagcttcagcctctcacgatgaaatacagaaaggagaaagagagaattgatgagattcgaaggcttaacagaaaagagaaga

SEQ ID NO: 22545 - DNA, 550 bp, Arabidopsis thaliana
tcatttttacataatgacatagacatatttttcccatctcagccgcagcaccctcctccttgcgaggttgatccatctcttccacctgatggtcctggaattcctccatatccaactttgattccatatgactcatttgacacatcaaacacaccatcttgaatcttcttgtatattgttgcagctgtcttaatgaatgcctagcaaaaaatcacaacaccagtcgaaatcatgttaagtaattgggtaattggcaaatataccacattggaacgtatgggggtttacctcctcaacattctgagcagtcttggcagaggcctccatgaatataagaccgtgctcctttgcaaactgctctccttcctctgtactcactgcccttctgtgagcaagatcacacttattcccaatgagcattatcgtcatatttgcatttgcatgctgccttgcatcttctagccagctagctagatggttaaatgtctcctcctgcaaaaaaaacggaggtaaaaaatatcgtaagtgtcttgactgaaacagttataaa

SEQ ID NO: 22546 - DNA, 659 bp, Arabidopsis thaliana
cttaacccttctcaacgggtctggttcagtgaaccactgttttaaccagtagattacgtatatatctttactaaggaaactgatatttaacatcgttggcacgttgtggacttaggctttctggaactggacgtgggacgagcttgtgagttacgatctgcctgctatgtttgaccatatccatggcctaacaggccaaaagattcactacctcggacactctttggtgggtccaacgttatcaacatattttttctctgatttttttctttttcttatagtaatatatcttctcataatagaatgaaaaatgaaatggaaattgtcaggggacgttaataggatttgcttcgttctcagaaaaagggttggtggatcaagtgagatcggcggcgatgttgagtcccgttgcttatctcagccacatgaccaccgtcatcggcgatatcgccgcaaaaaccttcctcgccgaggtcctagcttctcccttgtaatacccttttttattcttatacaaatatgtgcctacagttatgaaaataacttgtttatcgtctttcaaaaataggccacctctattcttggatggccagagtttaacccgaaaaggtaaatcttcacccttttttcttaaaatatgcttgttattattggcttga

SEQ ID NO: 22547 - DNA, 684 bp, Arabidopsis thaliana
gaagcatgttctcctctatgtatagacatacgaacgcacatgtattgagaaatggatagaaggtggacactcgacatgtccaaaaacacagcaggcgctaacaagcacaaccctcacaccaaactatgttctccgtagtctcatagctcagtggtgcgaggccaacgatattgagcctccaaagcctccgagcagtttaagacccagaaaagtatcgtccttctcatctcccgcagaagcgaacaagattgaagatcttatgtggagacttgcgtacggaaaccccgaggaccaacgatctgcagctggggaaatccgccttcttgcaaaacgaaatgcagacaaccgcgtggccatagccgaagctggagccatacctcttctcgtaggtctcctctcaactcctgattctcgtattcaagaacattcggtaacagctcttctaaacctctccatatgtgagaacaacaaaggagccattgtttcagctggagctattcctggtatagttcaagtgcttaagaaaggaagcatggaggccagagagaatgcggcggctacacttttcagtctatcagtgatcgatgaaaataaagtgactatcggtgccttaggagcaattccgccactcgttgtattacttaatgaaggtacacaaagaggcaagaaagatgctgctactgc

SEQ ID NO: 22548 - DNA, 439 bp, Arabidopsis thaliana
gccagtgtgctctaaaggagtaacggcaacggtttatgcttcaactttgatgcccgtagtccgatgtgtccgtcgatgaagatcacccagaaccggattcattcaccgaaagggcgcgcaacgctggtgcgtgaatggctgcgtttgttggcggatcgcggcgttgatccactcaaactggaacaagaactgcctgaatccggcgtcagtttgcggacgttaattgcccgcacgcgcaatagctggcatgcgaataaaggcgaatatgacttctcacacgaagtcaaagaggcgatgtcgggctgtctggcctgtaaagcgtgttcgacccagtgccccatcaaaattgatgtgccggagtttcgctctcgttttctgcagctctatcacacccgttatttacgcccgctgcgcgaccacctcgtcgctacggtcgaga

SEQ ID NO: 22549 - DNA, 744 bp, Arabidopsis thaliana
tttctccgtttcgtattaatagtcaaactaattacgtgtggatgatatcgtctttgatttcgccagatactataccataattagacaattgttgatccatttcaggattctccttaaaataatacatgttcaattacggtatcttctcttttttttcctgaattaataatatgtataacgaccaccataaatcttagaaattgtttactgcttcaagaaacattgatttattgtaaaaagagattacaaagacagtgagagtagaaaggaaggaaacatgagtttttgggattacaagcattattattatatagacaagaaacaacaacacatgtgattatctttttgacggatttaacgaccaagcgatgatagatcgatgagattgattgtacctcacatagactgagcttatatggagattggcctctagatgcttggcctcacgttcagacggcttgcaagtttctgtcccaaggatcgatcagcctgagagatacagagagataaataatgttttagtttgctgaaacttggtaaaaaggacgtagaaatttgaccgagtgtttttttgttctgacctgagaccagtaagagatccagatgccgcggatctcgtgggtgagacgtggctccgatagaatctccacccatctcttaacaaacctgtcttgcctgtctggtgcccatgatctgtacctgtctccagcctgtttgaagttgttctctttcttgatgacgcac

SEQ ID NO: 22550 - DNA, 731 bp, Arabidopsis thaliana
gaggagattggagagtttataaaacttgtgaaaccaaagagcatgaaaggaattgtggtgtcatcatcatcgtatgttgaccctctttactactttgggcgtatctgtggagccaaccaaccgccacaagtgctgcttatgaggcctgacatcgcagaggaatttcgagctgttaggattaagtcatattctgcaagtgacaagactagaatgttggcaaaagaaaaaaggtggaagcgagatagtcattcaagtttgaagagaaacaagaagagagcacgtatccaagtaaagtgcgcaaagattttagaggttgattagctctacttgcctctgggtggtgtctcacgttgatgtggcggcttctttttcctcaaggttacaatggtgtctatgtgaatggtctaatacacaatccttttctatgggaggagtaagtaaaatttaagataatatatgaattattcagttgaatagaaagtcactatcttttaaaaagtaagcagttgtttgtttatgcttagttaacaaagtcttgatttttaaattcgaaaacacttggtcaatgtttttgtcttttgtatgttatccaaatgattactcaaaccatttttttatagcaatttttgcacattattaaatgatacaatgagtgattaagggaatgagtaagtaacatcgtgacgatggtggtggagtcgtcgtcgtctccgatcatacctggcttgacg

SEQ ID NO: 22551 - DNA, 573 bp, Arabidopsis thaliana columbia
tctgcagtttttgtttgctcctttgtgcatttggtgatgattcaatcaatgattgtctcttacctttgatctaatcgtttccgcaaaattctcttctcgttttttctgatttcaagctcaacaatctcaaaataatcaatttttggtagtgtgttaaatctgagaagggtttttgggttttgggtataaagcttgttactttgatctttattttgtgaattcgaagtggaaatggaatcgttaccatctccatttggcgatccagctcctaatttatccaattcggagctccgagaaactgcttacgagatcttagtcgctgcttgccgtagcactggaagtcgtccgctgacttacatccctcaatcgccgaaatctgatcggagcaacggtctgacgacggcgtcgttatctccgtctccgtcgcttcatagatctctgacttctacagctgcgagtaaggtgaagaaggcgttagggatgaagaaacgaatcggagacggagacggaggagcgggagaatcgtcgagtcaatcggatcggagcaagaaatccgtcatggtgggtgagttg

SEQ ID NO: 22552 - DNA, 492 bp, Arabidopsis thaliana columbia
cattaacctcttatagtttttaatttattatcaatccactattaatattttttttaaaaacttattttgaccaagtgtttctatgttaccgctactgttgcttagcgcctccgcaaaacccgcaaattgtaacacttcttcgccggaaaagttaagcgacttgtcatcatcagtttgctagtcaggaagataacttccttcttattgtgttccttttacttccacatgatcgcgtccttctccagattccaaatctcaatccccgatttgattccgtcttcaccgcgatttcttccgcctagtcaaaaccagttccgtttcagattataccttcaatttccagctcaacctaagaatctctgtcaaatggagtggatgaatcgtcttggaatcggttgctttgcggcgaatcgaagcaaaagagagctgacgacggagatcgacaacggcggagaagactttttcgatgcggatgttatggagtctgcggag

SEQ ID NO: 22553 - DNA, 502 bp, Arabidopsis thaliana columbia
gtaacgtccgccagtgtgctctaaagtagtcgagcgcaccaagtttatcgacaagacaactcggcagcgcctgatgttgaatactcaccgcgccgaccacttcgccgcggcgcagacgttcctgagtgcgggtttcatcttctacctgcaagttgaggcggataggcgaatcagccaacacaggagccagtgcaggaagcaaccacgtcgccagactgtcggcgttgaccgccagtgaaagcagcagcggagtcgaaccggtttgttcatcgcccagccactcttcttccagcaactccacctggcgcacagtgccagcagtttttgcccttgttccgtcgggcgcggcggtacggtacgcaccaacagcggctgcccgaacatattttccagttgcttaatgcgctgtgagacggctgattgtgtaatgcacagcttttgtgccgcgcgctcaaatcctcgttcacgtatcaccgcatccagtgcctgtaatgttctgtag

SEQ ID NO: 22554 - DNA, 627 bp, Arabidopsis thaliana
atctgaccttacccgctcaagtcctgttctaagttcatttgattcagaatcgtgtgctacttaggttgtaacttttatcatctgattttgaaattttcaaaaattctatgtcgacagagatttcaaggatggctagagatttggactcgcgaaagaaaagaaggatctctttagatggaattgctgccttgtgtgagcattccaaagagatcattgattcattgcctatgttgaattctcctgactacttcttgaagccatgtataaacgagctggttgagcgagaaattgaaagccctgattattgcagccgggttcctgattttactattggcaggattggttacggttatattaggtttcttggaaacacggatgttagaaggttggacctggatcacatagttaagtttcataggcacgaggttattgtttatgatgatgagagctccaagccggttgttggtgagggacttaacaaggctgctgaggtgactctggtcgtaaacataccagatctaacttggggaaaacagcaagttaaccatattgcttataaattgaaacagagcacggaaagacaaggagcacatttcatctcatttgatcccgataatggtttatgga

SEQ ID NO: 22555 - DNA, 250 bp, Arabidopsis thaliana columbia
ccacagacgactgcttctgagaagaccaggagataaggttcagacccagataagtgaagtagcctccggttgatcgtcttgtttcaggacaaccagaccagtcactgtcactataagctcgtaatgtgcaatctgacttcttcctgaagtttattcccatagtaactgtacccttaacatatcttaaaatccttttcagcaacaagaaatccagagtagtaggagcatgcatcttttggtaaacatagtt

SEQ ID NO: 22556 - DNA, 1204 bp, Arabidopsis thaliana
ctcgttgacctcacagtacctccaatcacagagagcatacacatcggaagatacatttgctcaaactcgataactttcaaagacgactcgccgataaggattcgtaggaaggccaaacagagtgtgccataagtcgtgaacttcgcgtgcccgtgtcgctacgtaagccaattcatccgtctccatgaatcttacgggcggacgatcatcgggagagaagtttctagatcccatgaatttagcatatgcagctccaaatgtgttttctggtagatcccaagcatgacctacttgctctgacacaactcgaggacgctccaataatatagccttcaaagtaaagataccaccaaagatcaaaacaccattgcttactcaacaatataaccaacatcaagtaaaaatgttaatcaatttaacatcactcattgcttactccagaattactaaatcgaacaatttctaaatcaatcattcttaagcaaaatcaatgatttgatcaacaataagagagaaattgagtgatttgaaaaacgtactcttccttcttcgctcttcttcattctctcaagaaccatttcaaaagctggtttaccggtagtttcgccgagagcagcgattagatccgctctacgaggatcaaccaacgcaccgagagcagatcccatcgccacggccgcttgttgccatcggctcaacggaactcgagctctttcaataatcatcgttccttggtagataatctctctggttaaaaaccaaacggcgattctaagaatcagattaaagtcggtgtggaagacgacgacgacgattttaaatcacacgcgcttatgtcctcgcgtggactttctttctgttctcaagatttgactgaaagtttttgagagagatttcaattggggcctttagtttataactccattgtggcccatcatttaatgttcaaagaaaaagcgaaaataaatgactgaaatataagaacttgggccattgggtaaaaaaaactgagagattcctagtcaaatccaataagaagagcttttggcccataaatattgtaactgatatatagttatatgtagttaataaaattggcaaaagcatccgcggaggatcgaactcgcggcctttcgcttacgaagcgaacgcaataccactatgctacagaggcattgatgcttaataagtatataatgtaata

SEQ ID NO: 22557 - DNA, 503 bp, Arabidopsis thaliana columbia
ccgtcgatcacgagattagtgagtttatcgcatttggatctcaggaataacaatatctcgggagtcataccgcgagatattggtcgtttaaagatggtgagtcgtgtccttttaagcggtaacaaaatctcgggtcaaatacccgattctctgacccggatataccggctcgcggttcttgagctctcgatgaaccgactcaccggtccgattccggcttcgttcggtaaaatgtcggtgctcgcgactctcaatctcgatgggaacttgatctccggtatgattccggggagtctattggcatcatcgatctcgaatttgaatctgagcgggaatcttataaccggaagtatacctaacacgtttggaccgagatcgtacttcacggtgctggatcttgcgaacaatcgtcttcagggaccgattccggcgagtatcacggcggcgtcgtttattggtcaccttgacgtgagccataccatttgtgtgggaagatccgatgg

SEQ ID NO: 22558 - DNA, 645 bp, Arabidopsis thaliana columbia
ggtctttccctgacataagtcggggaagaggttatctgtttagcccttgagggagccaagaccgtgtctgaaagcgtacattgtgaatccgagaggagtggtgatgattgtttgttaggaggtgcagagcttttttccttggagaaagaatcaccaaaacgacgtttccttccgtcatcaacaccggcgtttctagtgacaacaggggaggctgggcgtttgtgggagacagcaccatgaggtcgattcagcttggaagcatgctcagcagggtactgattgagggaagcagggtaaggctgtcggtgggatcgattgcgaccagaccttgaagctaagttgttttcttcccttctgatgactccacgagagtgatatggtcttgaggaaggaggaccattcagcaagggtaagtgatttctctcagatctagaacggttagactctggaaaagattgtagaggaagtcgagcttgagaactatctccatctctaagagagagtcgaaggttacgttgagattcctcagctgagagaacagctttttgttctgcatcgagtaaaggacactgctctagttcgtgacaaatacggcgacaatacgagcaccagcgaaagagcttttcataagaaagtttcactttg

SEQ ID NO: 22559 - DNA, 650 bp, Arabidopsis thaliana
gatcccactgggactcctgccttcccatcattcccagtatacttcccatattggggaagagcatgctgcgggatgatgcgttcatgttctcggaagggagattctcatgaatgctaccaaagagagtgacaagtgggtccatgagggatccgccacgcggtaacatgctgccttgtcgggaagccaatgcgagagaactctgtcctttcactggcttagccatccatgactgtccatcctctggaccatatagttttatctgatctttcctcggcagttcatttccaccctcgttttcctcgttgtctggtccaatcacatattcttctatcgacgtgtcttttcccaccccaagcccttcaaccagcagagcaagctcgcctaaatcataccccgagttagtataagttcaaagatcgataatctagaggtcttagtgttcatcaagacaaacctgaaacatcttctctgccacggagtctctgcagaacctgtctagcttcatccatacggcctttgctgacaagccaccttggagattcaggcaagaagaaagccgcaagtacaaagtaggcaatggacggaattgacaaaacaccaagcatcagcctccagcttggtgattcttgaagcgacatccccaaacacaa

SEQ ID NO: 22560 - DNA, 1288 bp, Arabidopsis thaliana
gtcaaatcaacaatttacgaaacgattaaaaaataaatgttatagtggcacacacaaatttatagtgttcactcttaaagaattgaatctagtttcccatgttgcaaaattttcaaactatgtagtgaaaaactaaaagaacaaaggccacatttataaatcgaacatgctaaaacatttttgaaagttttcaaatatggatttgatcgacaaacatagaagtcatatactccttgatttttccttggggattggtgaatccttcatttacattgtaggcgacggtcatcatgcgtgcaagatcaatggttgccttaagaagaaaatgtggcacgccagttgttgacaagaactcctcatttagtgtcttattggcagctacaactattttataaagctccctaaaagcttcctctttggtaaccccatattgcttcatatagcagtttaccgcgttcgtgacatatcctctactcatgtcatcctactcaatatttgagtaagtgggtaagatttacaagaaagcagttatacgcgagatgtaaagaaacgatttatgtatttgtacctcataacccatcaaatcattcataagacgacctttgatagacaaatattggacgagttttggtctggatttcagccactcaaaagcttcctttgtagccatctttcccatagacatgaaaattcctgccaaggacgcatacactgtgacctccacctcaccaacctccatatactcctcaaagctaggaatgtgatccgcttgtgcccatttttcgagatcaatgttcgctttcgcagctgccttgaactgggcatgttcaaaattatatatccgttaggactacaaaaatgttatttttcagaaacatattccaaaatattgaaacacccacaacttctttctttaaagtcttagttaaaaaaacttttaaagccatgaatatattgccttgattaatgtataaagttgtatacttagaaagtataatttgattggttacctcttctattgtggcattcacactgtaagatctttcttctggcccaagttctcttttaaactcttcaaaagtatccaaaataaagttcaacacaaatctcaaataatcaggttgtttatccattgcttgatcaggagccacctgtacatcatcatcatgatcattgtttatctggagttttgataataaggttgtatactatttttgtgtgtgtttaacgtcgtatagtataccttccaggctgttggcaaggcgttcagcgtcatgaagagacgcat

SEQ ID NO: 22561 - DNA, 471 bp, Arabidopsis thaliana columbia
gaggatcccccatagttcccacccagtataaacaatgacaattaatggaacagaatattgaataatcaatagattgaaaactcacgtttcaaaccagtaactgcttgaagccgaacatcttcatgaaaatatgcagaatgtttgtccataatcttcaatgattcctcgaggtagcttataagttagttaaggaggcataaaaaggtttcttgtaaaaagtccaaagaagaaacaaccgttaaagggaagttgaaggatacggtgcaaaagcagatttagtgtggagtgcaaacaggccaagagcttgagttgcagctgccttttcatctaaaactcctgttctaacgctaatgttcctaactctgggctcatcatcagcatcatcatcagaggatacccaccaaaatcattgacattttcatcatctgactcatcaatgtccactgcagatccatcatcaagattgcacga

SEQ ID NO: 22562 - DNA, 779 bp, Arabidopsis thaliana columbia
atggtcgtgaaggttgccgttctcttggtttcttctgtggcttctctctcttctgaaagcatgaaacagatccaacccgaggccaacattaagaatgttcattcctgccataccagacagagcgagtggtaactccacgcctttcccaaacttgtgtgcgtctttgatcagcttgatagtgatgagaatgtgaggaatgcatctcgcaaacacaaaggctgtccagtttaatacccactccagtttcaccaatgctgtgttgctgtctcggattcctgccattctccttagcttcctcacgtgtagaaagatcgaatgcatctgtttacacatccgaataacagaggtgtcacttttgttcgaacaagtagatgttgtagagttgagtctatatctaactagattgttatatatgaaactagtctagtttaactagagaatgttagcatagattcggtaaagaacagagaaaagccagggcaagttttcaggaagaaaaaagtggaacgtacctcacagatgagagtaagaataaggtagttgatggttacatttcggtatagtgccaatgtgaagcaaacaaggaggactagatggtgaacaagaatagaaggtattaagccgctgtataaccggtactgaagcatatcccactggtcatatgcaaagtagccgcatgagaaacacaaagctggatatgcccatttccaagtcccaccaaccaactcagaatgatcaaacatctcgtctaaacctttggctaagcattgattgagaag

SEQ ID NO: 22563 - DNA, 1011 bp, Arabidopsis thaliana
tttctgaaaatgttgagatttgtttcagacaaaccgaaccacggcaagaatattccctgcggtgctggatgttgagaaccctgagttcaagaggaaactggatagaatggttgtgagctatgagaagctgctggctataggagaaacagatgatgcttccttcatcaagaccctcaagaggattcctttggttacttctttagcctctgagatcttggctgcttatctcatgcctcctgttgagtctggctctgttgatttcgccgagtttgagcctaatcttgtctattagtagctgcaatgtcaagtcttgagtttacggctggttcttgatttcttgtaattgaatgatcgaaactgagaaacatcgtctttttttttttgcaataaacttttactgcatatatttgatcatattgcgcattggacttacttaaatttcagattttattgaactggttgatacagttgagtttgcaacataaaaaaaaaacacattacaaaatctacgaaaatatccctggaaacaatcctaccctctgtgtcttgtgtaaaggagatttatccagagaggattaaatatgaaagctgagctcattcctcattcctcactcagattttggccttaggtttctcttgttcttcggtgagaggcttaaacacaactttgaagaaccaaactgcaagcaacgtagccttcacaggtccaagccaatacacaagtaaatgctctttcgttatatgttcaccgcgtgcataagcccatcccataacctgcaaagattcacacaaaagcaaacattcaaaacaaagatcgctatttgctgaaatcacaatcacaagacttttttttggtacatacagctgcagggttcatgcatccaccggtaagatcagagccaagaatatgaagagttaacttagcaagactaccgatccaagtcttcatgaagaaacttcccgggatttttcttgttagtccattgagagcagtcaatgaagaatgttagt

SEQ ID NO: 22564 - DNA, 952 bp, Arabidopsis thaliana
taaaaaaaaaaaccacccttaaatacattccacattcaccaatattaagatcttcaaacatacacaaacacaatagaataatctcgtatcaattctctcctaaatagttcatttacacgcaccatacatcaatggattccaaactaatccgtttcgctgttgtgattatgctcctgtccatccaaatcttttgcacagcggtaaaaactgatttattgatttattttgttttcatcacaattaacctcacaataataacaacaacaaaaactcaactttatttaatcaatctatgtttaaattaataaaaagcattatctcatggtttgattttctttggatgtaatctggttcagtctaactccgttttttggaaacgattaaatattttaaaccaaacaataaccgagtacggtttgattactatattttgtgtccttctaggtgttgcaggggacatcaccggagattgttacggccggaacggcaacaatctcccaacgccggcagatacagttgctctatacaaaagcaacaacatcgacgcaatccgtatgtacgagcccttcgcagacatgctcgaagcgcttcgtggctcaggtctcttagtcgcgtttggttccacgaaacgaagatatccaatccctagctcacgatccagccgccgcaacaaatttcgtctccacctggattacaccttaccaaaacgacgttgcaattaaatggatcacaattggtaacgaagtcttccccggagaaatcgctcaatttgttgccgccgcgataaaaaacgtcaacgtcgcgctaacgaattccggcgtcacaggaatctctgtcacgacggttttagctatgaccgcgttgaccaatacatatccaccttccgctgcaacattcctcccagatctaaccgagatcatgacggagattacatcgatactctcagagacga

SEQ ID NO: 22565 - DNA, 832 bp, Arabidopsis thaliana
caccaagcatcagcctccagcttggtgattcttgaagcgacatcccaaacacaagacaatacgacaaaaacatcccaccggatccacaaaactgcgggaaagtgttgagtaatcctctgatctcagaaggtgcggtctcagagatgtagattgggacgagagtgacagctaaaccgattccagaaccatcaagaagcctttgcgaaaaggagaacgtagacattgggagaccaaaacataacaatgctactcagaaaatagagaacagaggagagtataagcattgatcgccttcctactttgtcagagacaggaccagagaaagttgtgatcaaagtggctccaatgagagacattgccacgatcagtccttctatctttggttctttctccaaatgaaattctttcttaatgtaaattacagctcctgccaccaagaatcaacatcaaatcatagtgagatttcgttagtatgcaaaggaaaaagaaagagaaatatagaaagagagatacctgcaatggtggcattgtcccagccctgcaacatattccctatcgcagcggctaaagcaacaagcactacactcctcatctttttctcttttacagtgattttactttccacgaatcaataattctgttgatagaacatcatatgtttctttcccttctgcaatgtcccagattcatttcacaaaccaaaaaaacgagttgttaaagatattttagtgattaatcaaagcatgtagcagtttgagaagtggtaataacggtaggagagtgaaaaagagttggtcaagcagagagatataaggagaaagtgacattgtta

SEQ ID NO: 22566 - DNA, 743 bp, Arabidopsis thaliana
tcacaacgcataagaaacttctccatcccctctacatcagatacaaccgaataagcatgcaaccgcgtgttcactgtgaagatgtctggcttcacagtctcatcctccatttcgcgcagcagcttctcaaccattgtgtatttcccagtccggacatagagattcagcatcacattgtagggaagacaacctttaaggaagccaagctctttcatctcctgaaacacttgctcagctttgtgcaacaccttcttgctcgcatagcagttcaagagagcaccgtagagatggtagttcctcctctccataggaatagtttcgaaaaacttctctgcttctcccaaaccaccaactttagcaatcaaatcaagccgaatcgcaacatctccttcagagatctcatgaactctatgctcactcatccaatctgatatctaacatcatcacaataacaacaagaagagaaaagataccatttttaagatttggattcgtattatcacagagtaacaacaacaaaaaagatgaacttttttctgaaagtaagcaacagatggattcctgaaatgagagacctggagagcgtgagagatacggctgaactttcgaagcatcttgatgatgctatggagctccgaagtcttatccagattcccttgatcaagccatccatccatcactttgataatcgacgcagtagggatcttcggatctcgcgacccgacgctgctgagtgtcgtcag

SEQ ID NO: 22567 - DNA, 473 bp, Arabidopsis thaliana
tcgactctaatcccgtaactggtctaatatagagatctttaaagagtggtttcgagccaattttgatggaacgatcaaacgggaatcgtcttcagtccagcggcgattggcatacccaagaaacctatgaagatactgaagatccattgtgttattgtgagtggtgttgtgcttgcaaatgtgcccaagaactcgatgattatgatctgaaagaaaaccgttgcaccgatcacaaccacaaagacgtaattgtccagtattcctttgaaaacatcgatctcttccatctctcgcgagcttatctcgttaaacacctggagttttcagaaccaaagtcatgtcaagaatctatctttatagctcgagtattgttatcagtaatctttgttctttacctgacagaagacgaagcagttgaagataagagtgtttaacatgagagttgagtcaggaccgtcgagaccagacatagc

SEQ ID NO: 22568 - DNA, 2630 bp, Arabidopsis thaliana
cattctcagcatcgaatctccaaacatagccttactttcatcccgtcctttgctttccttggagtagttcggatggcagtggggtagggatgagtcacacgaacaggcctttggtcctcgtgcatgctgcttagagtaagcagttgtggatgactgagagctggtttttggaagccaccaagttgttgctcttcggaggagcaacaagtgcttgaacctgacgagctctggctgccagatgacgaaggtggtgactttggaggcacatggacagtttgggttgggttaatgaaaggaaaagaagaagaagaagaagattgtagttgagggaaacttgagtagaaggaggcgagatggagagagccttgaactccttcaacagagtccatcaccacctgcagttttcgaagagaatgtccaactttcttgatcttcctcgatggccaccttgagattccgttttgtctgcatatcctcttcaaggtcgtcggacatactgcaatatgtaatgccatcatgatcatcatcatcatcataatatgtaaatatcaattcaaattttataaaaactctgacgcaccaccaatgtttttagcggcgtcctttaggctgccagcaaagtgttgtcggagagtgtccaaagtgatatccttttcagcctttgtcttgcgttttcggttctcgagagaggaagcagaagaaaaggaaaacgacacttgtttgcccttgggatcctcttgtgtcaggggtggtgtggctgcgtctctcacttcctctgcaatttggttgtcgtctaccatcagatgtggtgagctctggaagcgtagcttgagttgggaggcgagggtcagactatgagtttggatgtcaagacagtctctcgggaagaagagctcgagaacaaattggacggtgcggttgcctcttgtcaggatagggacggcaagagcagcgtggaggtcgaacatcttggcgtagtgggagagagggtagctccacttgctgaagatggcaacatgtgttgcgaaacactgtttcttggtagcaaaagctcttccagcgagtccttcgcccccgagtagatggtgctctgagcaggcggccaggaagcagcgggtgccgtggtcagcggcgtaagaggccgatattagagccgaaaggcaggatgaggagtcttggtgaccccacgtgacggctagagggagtccgtgtgaactgcagatgccttggagaatagaggccacctctgttcttgaagaagaagaagaagaagaggtgaccttgagagaggctggaacgatggaggtttgtgaagtcctgagatcaaaggcctgcgagagagaaattccgattgtgagtaatatatttagtgtttatataaagtaacggatgttaaccattgaagctcttcaaaggttgcttacgtcaaccaaataactaataataataatgcaaagacatgggaactagtcaatgctgagcagtgttccaacagtgcagtgacaagaatattgccaggtaagtatatttttaccatttcttacatgggaattataaagactcaatcaggctgactttattcatcaatgtaatctttttttttttcttttcatcaatgtaatcttatttacgttattaatcatcaaccaagagtaagagttaggttaagattcaaaaatgacctcaagggcatggcagatggtgctgagttgggaggcatactccaagttgcggtgagtggtgaccatctccatcacggccacgcagttcccggacgttccttggaagagtgggagggcgagggtggctcgaacctggtacctgcgggcgtatccaatgcgagggtactcctccttcctgaaaaaccgaacgtctggggtccactcaggcattctcctcaggaacacacgcccaggcagccccaccagctgctccgacccaacttctgctgcgaactgtagccagctgaggcgtctcggtagagggccaggctctggctctgggagaaggtgttgatagagtaaggctgctcctccgtgctcagcactcggccgctccttgtctcaacaggcacccacagctggatcagcaactccctctctcccatcacctcttgcaggtgccccatggcgcaacagccctctccttcagccctgatggtgatgataatgcctggtcatgctgcgttgcctcttcttcccagcactcctcccacaagagctggtccataaagttgtcaggaaaatccacaacggccgagttgttgctttcttccatgggagaaaagggatttgatgaaccaaactgatcagacaaatagagaaagaagaaggaaagcttggcctcctatagaaagtaattatgaggcagagttggctaaaagagatgatgcaagcatgtggtttgataggctctccttccttggttgttcaatatcaaacgccaacgactccctccctttttattatattatgtcaaacagaagagctgccaaaatgggataagtcagcagctaaaataaaaacccaattgcccacaaggtcaaaccccatagcttgttttttttataaatgtttgatggatggatttggagcccgactcatctgaatctatctaatccattacatata

SEQ ID NO: 22569 - DNA, 708 bp, Arabidopsis thaliana
cttctgtgacataacaacttgcttgtgtgttttgtaaaggccctacgaagaaaaagactcttgattgggacacacggcttaagatagcatatggtgcagcacaaggtttagcttatctacaccatgactgtagtccaaggatcattcacagagacgtgaagtcgtccaacattctcttggacaaagacttagaggctcgtttgacagattttggaatagcgaaaagcttgtgtgtgtcaaagtcacatacttcaacttacgtgatgggcacgataggttacatagaccccgagtatgctcgcacttcacggctcactgagaaatccgatgtctacagttatggaatagtccttcttgagttgttaacccgaaggaaagccgttgatgacgaatccaatctccaccatctggtttgttctttcttgcctatctctctcagctgctctgtttaggtcaagtccgtaatcttgttttcattgattcacttacatcagataatgtcaaagacggggaacaatgaagtgatggaaatggcagatccagacatcacatcgacgtgtaaagatctcggtgtggtgaagaaagttttccaactggcactcctatgcaccaaaagacagccgaatgatcgacccacaatgcaccaggtgactcgtgttctcggcagttttatgctatcggaacaaccacctgctgcgaacactggcg

SEQ ID NO: 22570 - DNA, 1036 bp, Arabidopsis thaliana
aattcaacatttactatctataaaggaaataataaaaacactaatctataaaattaaacctgataatatttgagaagattgttcctccgattcttgagcgtcgcagtcactaagtctctctctacgtcgaaaggttttgtctccactgtcaccgctttgatgtactcaaactttcttagctatatttctcacatccatgaatatttcttttagtatttattttagaataaaattgaagaattttgattcagacaaagtcaaacaaaccttgttcttttctgccgtggacttcagttctgaaatgatgtgttcttttagttccgggaaagaacagagttcttcgaatggtttagtaaaaccgagatctttagcccacctgttgacggtttgtgggttgggaacaacaccgcgacaagcatagatttgaagctgtctccataaagccatatctgaaaaacaagcattaaggatagtcagacaacaactaaatgataattaaggagaaaccctaaaaaggattgtttgcttgcttggcaggaaatcatgattgatagttgaaaagcttacatcttggacaacagagttttgcccgaagatgttttccaaatgctcgagagcaacatattctccttgagaaagtttgatcagattctttttacgatcgatgatcttgagtactccgtttggaagaatctcacctatatctcctgtgtggaaccatccatctttcatgacttcttcagtgagttcagggttcttgtaataccctgaaaacatacattgtcctcttatacagatctctcctgccggattttctccgagcgggtcatagcccatttcagacacctcttcaagccgtatctcgttgtaaaccgctggaataccgactgtccctagcatacacatctcgtccgggaaacccaaagccgttcctccaagtgtctccgttagacctagtccaaacaatcaaagcaaactttccttggcaaatacgaaacagggagaagaaccctagaatgtagaggagatgtaaagg

SEQ ID NO: 22571 - DNA, 466 bp, Arabidopsis thaliana
attagatggtgtcctcaatattggaaccaacaatagtattctttccatccaatacctttccctgggttgtttcttgggtttgggaaccaaaaagagtcttctctgctctttgcaaagcaatctctgcatcattcacacgttgagtagcctcaagctcaaatgccacagcttgttcggccaaaaccatgatatttgcaacatcctcctcggctttcaatgcgctgatctgcgctctctcggcagcctcattcaatctatctacttccttctgcagctcgtccttcttaacttgcaaacgcctgagttgttcctcacagcttgctaaattttcttggcattcttttatgtcagccttagcagataaaagggcttcctctttatctttaacaccatctctaacctcactctcttcagaagtattgtacccttctgcttctagtgattcaagtgcaacctgcagccttgc

SEQ ID NO: 22572 - DNA, 1024 bp, Arabidopsis thaliana
ttgatctctagacttggttttgtgatgatgattttcttgttgttgcagtgttgtctgcgcatagtgatccaaagtatgtgatgaagggagttactcatggtgcttgtgattatctactgaagccggttcgtattgaggagttgaagaacatatggcaacatgtcgtgagaagtagatttgataagaaccgtgggagtaataataatggtgataagagagatggatcaggtaatgaaggtgttgggaattctgatcagaacaatgggaaaggtaatagaaaacgtaaagatcagtataatgaagatgaggatgaggatagagatgataatgatgattcgtgtgctcaaaagaagcaacgtgttgtttggactgttgagctgcataagaaatttgttgcagctgttaaccaattgggatatgagagtaagcttatcaatatgtcacttgatatgagagtaagcttatcagtatgtcacttaagttctgttttgtgtgtgttgttttgattgcagaggctatgcctaaaaagattttggatctgatgaatgttgagaagctcactagagaaaatgtggccagtcatcttcaggttacaaagaatctttcatgtttttaacttgcgtaacccgaagatttgttttttaacacctcggaagcttatgactttgttcgctgtggtttgcagaaattccgcctttacttgaagaggatcagtggtgtggctaatcagcaagctattatggcaaactctgagttacattttatgcaaatgaatggacttgatggtttccacaccgcccaatccctgttggatctggtcagtaccatggtggggctcctgcaatgagatctttccctccaaacgggattcttggcagactcaatactccttcggggatcggtgtccgcagcctttcttctcctcctgcaggaatgttcttgcaaaaccagaccgatatcggaaagtttcacatgtctcatcacttcctcttaaccacagtgatggaggaacatactcaagggt

SEQ ID NO: 22573 - DNA, 629 bp, Arabidopsis thaliana
aaagacgggtattttcttcaagccagcagcgatcggcatacccaagaagccaacgaaaatgctgaagaaccattgaactattgtaagaggtgtggtgcttgcaaatgtgcccaagaactcaatgattatgatctgaaagaaaactgttgcaccaataacaaccacgaaaacatagttgtcgagtatgcctttgaaaacatcgatctcttccatctcccgcgagcttacttcattgaaaacctgaaacattaagaacaaaccacccaaaagttagtcataccataaaatctacaagtgtaggttaacacttttaagtgttttgagtataacttatgattgttataaattacctggcagaatacaaagcagttgaagataagtgtgttcaatacgagagtagagtcagaaccaacaagaccaaacatggacttccctttggcctgtagaatccatatgataataaattgatacacagcttgtcctaagatgtttcccacatcgcattggtaatgaaatccctcttcttccaacaggcatacgtttcatcagctcgttgttcggaggttctgtagctagagcaagagctccaagtgtgtccatgatcatgttacccaaagcagttgacagca

SEQ ID NO: 22574 - DNA, 1494 bp, Arabidopsis thaliana
tgacataagcaactagggaagtatctccggttttagtcaatgtcttgagctcataacccaaccaacacctcgaactcttcctattgtagaaaaaccctaaacacttacaatctctcgtacatttgtccccacacgcactctccgttgtcgttgatccaccgttatacttcgtcataaaactatcagctccttcgatcttgaaatagtgaaatgtcttgggatcgcaactagcgagactcggaatcttgcaagtctcatcccaaccaagaagccctatgtcgctaggacaagcgttacactgacctttcttacacaaaccaaaccccaaacaatgctcagggatcctacactcatcgttaccgtcagtgttgtcgttagtaaacgccgtgtacgttacgtcccaagccgtggaagtcgccaacgtactgtaactccaaactctgatgtttccgtctgactctaaccgaagaaaactcaacgtcgcattgtgtttaggccgcgagaggaacgtcgagacgttgaattgagaaccagagtcgacaccttccatgtgtagaccccacgtggtgtcggcatcctccacagcttggaacgtcatagactgtaactgagctatcttggtgaagaattcgtattcgtagtaaccgattggttttggagttttgtttgtcgtgtagtacaagactagcttcttggcttccatcacgagactgtacggtccgtttgcgttgaccgatggagaaagtctgcttacgagcttgttttgaccgttgagtttcaaagactgtccaacgagaagcgtgtcggtcggagagtcaaagctttgccatacgaattttccatttgaatcatatattaccatattgccattctccaaaattttgatccccacgacgcctttgttagccgtgttcgtttgccagaccacgcggccatcggcttcagcaagtacaaggtttccatcttcgccgaaagtcaacgtggcgttttctttgactggtgagcctctgtttgcttcccagacccatcttagagtggattcttgggctctgtttccgattctaagagcgagagtgtatgcgtttggggttgtgttgtagaaacagagacggaagttgtcactgaaggggacgaagccacgtacgtcggggttgtattcgatgggactgtaatcggtgtagccaccttcgttgaccactcggaattggtcgtcgactggaactttggcttgtgatccgatcaagaagatggagagagtgaagcatagagctaatgtgattgaaaatttcattttgtttttgtgtgtgttaatggattttggtgtgtttctggtaaagagagaaagcttctatttataggaggagccaaggaagtctttgtttttttgttggttttataatattttaaagagtattttgaacgactttttggtctttgtttcgctataatctattacttttgctggttttgtttgagggatcgtgtatcctctag

SEQ ID NO: 22575 - DNA, 726 bp, Arabidopsis thaliana
cagaagacattgctgcatttcattttctcatagaaaatcagacactgaataatttgttgacttttgtcgagattctggcaatgcttttagcagtatacattcatctgaacacaatggccgagcattctcatggccaactttctattaaactcaatccatagaggtttgaataaagaagaaagaattcactaaactttgagtttgagcagcacaagaccttatgaatgaggatgaagctgaaagctttcccatatgttcggggaagctgtatgagctttcagtggtttccatctgcggacgccttttcgaatattttatgcccacaccagtccatcaaagccgatttccagatttgacacagggctgtctccaataccttggtcaagcgcttgggtgtcatctattggatcaacatatggctcgagcagatcagcggatctttccgagggaattccataatctttgaggatgcacaaggaagcagaatttgaagcttccctctccaacacagcaacatagttgtcttcgaactcaaaaactagatacttatctttgcacatatcaatgagatgtgccaagtgatggatgtttcttattggaattccattgaacttcaggacctgctggttattcatgtcctcatagccgatgtttacttcatttgccaatacctatagatatgctcgtcgagtgagttagttattaaattattgttgcactcaccaa

SEQ ID NO: 22576 - DNA, 1035 bp, Arabidopsis thaliana
gcaggtcgatcgactctagagcactgtgttttaaaagaaggcccctatcttatggtccatgagaaactattcatatctatttgtcattcatcgacactgcttctttcttattgatgatctagggagcaatcactggcttcattcttcctcttccatctaatatctatatatatcctaccatcttagcttacttggaatctgattcgtatcaggtcttacttagccagtgccatcggtatcgtgctctggtgcttcttggaagatttcttgatatgggtccttgggctgtcgatttggtacctctaatgccttgaagtcctgtttttcccttgttcttagacatttcctctcccatgttatcttgtgtgatgtccttacttgatgtgaatatttttataggccttatctgttggaatatatccttgcgtagtgaagctgctgcaaacaacaactattgagctacggcagattcttgttttcatatggacaaagatcctagcacttgataaggtacatgcagtttcgtatgtctctgcttgttcgtttcttgttatacctctgctacttccttttggggatgcattattaacgtgactctgttttcttcatgatgagaaagaccaagataaatgttgttcatataattattcctaagataaattctaaatgccataaaaattgggactaacatttctatgggcatcttgctcctaatctgtggacattgggacatgttccttatcattgtcgttgttctattgtgctactcgttttcatactttgaattttgctaacgtttgagagattttttttttttttttatatagtcctgtcaagttgatcttgtgaaaaaccggggccacatatatttcattcgatttttagatagttctgatgcattcccagaacaacatgctatggcagcgtttatattggctgttattgtcgatggctacaaacgaggccaagaatcaagtcttgaagctaatttaattgctgtttgtctggggcacacgaagcaacccaactatgtga

SEQ ID NO: 22577 - DNA, 1058 bp, Arabidopsis thaliana
ccagtggagcgtctccccaggcagagattgagttacttcgggttagctacaaacttggtcgtctacctaacaacaattctaaaccaagatctcaagatggctataagaaatgtgaactactggtcaggtgtcactactttgatgcctcttcttggaggctttatagccgatgcatatctaggccgttatgctactgtcttggttgcaaccaccatttatcttatggtaacatatgttcttacctctgatatatcctaatccaatttatttaaagattccataaacaaccttaaactgtgtcttgatggttaaacagggtttggtccttttaacaatgtcctggttcataccaggcttaaaaccttgtcaccaagaagtgtgcgttgaacctagaaaagcacacgaagtagccttcttcattgccatttacttgatctccatagggactggaggtcataagccttcccttgaaagctttggtgctgaccaattcgacgatgaccatgttgaagaaagaaagatgaaaatgtctttctttaactggtggaacgttagtctatgtgctggtattctaacggccgtgactgctgttgcctatatcgaagaccgggttggttggggcgttgctggcatcatactaactgtagtcatggctatatcactcatcatcttcttcattggaaaaccattctatcgttaccggacaccttctggtagccctttgacaccaatcttgcaagtctttgttgccgccattgccaaaagaaatctaccttatccttctgatccttctctgcttcatgaagtgtccaagacagagtttactagtggccggcttctctgtcacacagagcatcttaagtgagtagaaccaaactcaaaagtcttccatttgttaatttcaaccattctaaactgtttccttgtagatttcttgacaaggcagcaattatcgaagacaaaaatcctctggccctcgagaaacagagtccatggagacttctaacgttgacaaaagtcgaggaaacgaagctgatcgatcacgtgattccaatatg

SEQ ID NO: 22578 - DNA, 1389 bp, Arabidopsis thaliana
cggtacctcctccaccaccgcgtgaacgagatagttgacctataaggagtacttcctcctccactcagcgtaataaacactccaatcggccagccagagacaatagatctacccaagtacctcaaagatcttcatcccatggttcacatggtcctgtagcctctataaggagcgtaggtatggatcctcccgcgaagatgataaggaaagatttagatactactctagtagctctcgtttactcccaagaagtgaggagtactcacttcatgaaaatactttggattatccaaaggaaagggcaccatcttggaggtttaccagagatgatgaagaacgagtatccgaatctagttagccttcctctaatcgatcacatcagtcgatttgtaaaggttctgtggacctcagagatagctcgcgtccggtgctagaagagaatagaggcctcagttcttgtaagagacgagactcagtggttattccacaagaggcgctggcagttgcctttgaataggttagagattttatgtttcagtagacaaactgtgtggatcctacagagagtgcggcaagaaaggaaaggcttaaaaaggcagaacttcaaggtcagattgaggaaactgctgaacaggtggtgagagcaaaccttactcttccctcacctgcagcttttggatctaattctctagagctagctgataactttgagagaattccagtttcgcagaggcttggaccacctaatattttgatccctgcctaaaggccgaagaaaaagaccgccacgaaaaggaaacctgacaggcctcctggaagacctccaaagaaagctcaagggaagaagaagcaagttcagattccttcactttatattgggggtaacaaaagaagcgccagttattgcagtcaaagggcaacctaccccgagaagaagattaattctggaagccaaccaagttcaggaaccaattgaaattggggaaccgtctagtgctagacgggctctgcctaacctgcttctcccttttagttggacacaacggttggttctaactctacagctgaccaaaggtcaaggcacacttcagctggtttgatggatttcttgaatccatccaacacccttccgtaaaagtagcgtgttggaactgtcaagggttggggaaccccaagactgttcacaggttaaggcaaattcatcgtaaaatcttgcctggtgtgttgtttctcatggaaacaaaaaactcagaaagtgtggtgttgaatgttgttcaagagctcaactttgtacatagtgctttggtccctccacatggtcatggtggacgaggtttgactttgttctggaatcaagatttggaggtggaggttctttcccgctgtgat

SEQ ID NO: 22579 - DNA, 1509 bp, Arabidopsis thaliana
tcaccttcgaaggccttctcatccgcagcctcacctcttcctaattgttataatttacatttgggttataaacatattgtaagcatgaaatgagagtattatttgttaaacaacatctatatagaatagatgcatgtgactaggaatgttggaaaaagtcaaaagttgcaccacgtgtcgttaaagcaagtgcttagctacttggaaccacatgaacaagaagacaccaaacccgttacttccactaaaaacaagggctttcttctttttaattcacaccaaaacactttgaacacacacatgcatggagccatgaactcaccatgcattgatttcgtaatgttcagtcgtggacaacacgatgaggacaacatgtcacgtcgtcctccgtggaagagggagagatcgatgtccactcagcatcatcatcttaacttgtctccaaacgaagacgaagagcttgccaactgtcttgtcttgttgtccaattcaggggatgcgcatggtggtgatcagcataaacaacatggacatggtaagggcaaaaccgtcaaaaagcaaaaaaccgcccaggttttccaatgcaaagcttgcaagaaggtgttcacgtcgcatcaggcattgggtggacacagggcaagccacaagaaagtgaagggttgttttgcctctcaagataaagaagaggaagaggaagaggaatacaaagaagacgacgacgacaacgacgaggacgaagatgaggaggaggatgaggaagacaaatcaacggctcatatcgcaagaaagagatccaacgctcacgaatgcaccatctgccatcgcgtcttctcttcgggacaggccttaggaggccacaagcgatgccattggctaacaccttccaattatcttcgtatgacgtcgctccacgatcatcatcattccgtcggcagaccgcagccgttagatcaaccatctctcgatctcaacttagcttgccaagaatattccgtcgatccaacggccatgagcgtagggatgatcgagagagatggtggtggcaataatcacaacgctacttcatcttcgtggttaaaactcgcaagtggtgattggtcttgacgactgactaatttaattaagttgctaattatattcttttaactttcattcgtttatattctttacatatatacaattaagtgcatgagtttatatatagagtttatggatttatatgaattacacttggcgtcttctgcagatttagagagccataaggagttctagtccaatatatacaaagatataagtaagaaattaagtttcacaactagttaatatacaagatagataattgtatcattttttattattatatacgttgagaataaagtaagataaccaagggctccttgctcatataagcgcaaatgttttaatttcatgtttgtaatcttacagagtgatataatttacttgttaagccatcaagaaggagatataattttgaagttttccagaaaa

SEQ ID NO: 22580 - DNA, 898 bp, Arabidopsis thaliana columbia
gggctgcaaactcttctcgtaaatctgcaaatttattaagacagtgcacctaaatattaatgaagagagttaatgaatcaataaatttgaacatcgtgacttgttaagtttggtgagaggggaataaggaacgttctatatgtaaagcaatgataattaagagttaaggagttcatagttcatgtttttctctagtttggacttgagtccaaaatccaaattaatccaaaacaatgttgagcctaaactgtcccaagactcccaacaactcaggaagctcttgctgttttccttttaatcattgtgatattacattcttgatcgtcccacagggaaaatattttagccgttagaccaaatgataaaaaactgtaactgttgatgggaacggcgtcgtttcgctaaccttcgttttaactgatctcaattctcaaggttcaaaagagtacacacacacttatctcaattatccactgaaacattcgtctccggcgaaacaaaaccagaatgagctctcatcatcaaagcctccaaattcgttctgacccatttgttctatcacactgatgccgccacacacgcctcaccagctctcttacgcttcaatctcctctaaagcagcccttttcatgtctccctatccgttggcgcgctcttatcgcgacggagtcaggagctcaacgacggagactcatggtagcaaaaaagaggtttggttgtcggaaacggcgactacatcgattgaattgaaaagggtctatccatttcacgaaattgaacccaagtggcaacgttattgggaagataaccgaattttccggacaccagacgatgttgatacttcgaaacctaagttctacgtcctcgacatgtttccatatccaaggtctcttccttt

SEQ ID NO: 22581 - DNA, 794 bp, Arabidopsis thaliana columbia
tagggacacaatttccaatctttattgtctttcatcctcttttttaaaagtcccaaaaactctctgttcactcttaatgaatccatatactaactttgtcggcttcatttgtcggcttcatggatattttagccagtcaacaagaaacccccatcattcatgagagtatttcaccaagtcttggaattagtgaatctgacgtccgtatcttcagcatacaaagaacatggaccaagtggtcagtgaaagacagtgttgtgctaatctttgtgtggctaaacacaagcaatgatgccattgttggtaataagcaacgaccaaatgccttatgaagcattgcagcttattttgcatatagtccctcacttggtagtctgaaaaagagagaaacactataaacaaaagtgggaaaagatcaacaagagtgtatgcaagtttgtgggatcccatgagtttgcaacaactcatatgtggaataaatgataatgatctgatgaagtagcccatcaaatttacgagaatgattacaatgagaagttcaccatggagcatgcttaaagatagttaaggcatgattggaagtggtgtgcatcacagtcaactaaagagactggaatgtataagaagaatggctgacgatggtcctgcacattcttcaagctctactccagtaagccatggagaggctgaagcttcccaagcttgtccacctggtgtgaaggctgccaagggtagaagcaaaaggaatgctaacaattcaccaaatgtggaagaagaagggaaggcctggaaag

SEQ ID NO: 22582 - DNA, 541 bp, Arabidopsis thaliana columbia
gaaaaccatttattagtatatttgaataaactgaagttatatccaaacatctattacaaggcttctcgagttttgcaataactgatgtcagatacgatagcacagcaggcagaagcatgataaactgatcatctgtaagagcagagtcatcctgtttcttacttagcatactaaagaaaaagtgtccaaagactaaccagatgcaagggacttggattccacaaggtagaataatatcttggctctggttatgcttgcccggttaatgcaatggataatcaagtcttcaggggttcttccaacaatcagtgaaattttcaagaccaacgggtcaacagcataattgtgattatgtctcccctgaaaatacaccacaaactttaagcaaacaaatatctgctgaatccaaatcaagagaggtagaaaacttgcatgccatgctatatactttctcaatgatgttactggcataattcttttcttctaattcccacagcaaatcatatcccctctcttagcagtcggctggtgtgaatataat

SEQ ID NO: 22583 - DNA, 1337 bp, Arabidopsis thaliana
gtaaagtgacaaatttggttctggtttaaactcactatatctcaaatacttcaacacaattgcattctcaaacatacaacttgatgcaacagactgaatgaaccaaaaagtagatgattgtaccttgagaatatcaggtgatagtgagctaggtcctcttgaagagaaatatgcaacggagggtgctgtagtctctccgataaccgttttgctcggtccaattttcaccattggcactcttcatttttaccaaaagaattcttatgagtttcttttctctaaccgttttttagctcagcgcatggaaacaaaatgtataaccgaataatgtggcttacgtaggcgaacgagcaagatagttcctaatcctagtcccatgaagaatatcaacacgaactgttgggatcatgtctacttcttcagcgagctgtctggttggtgaggctgcaaatattagcgctaatgcgttcgctctaatagcagcagcttgtgcttcttcaatgaactgaaccggacccaaagtagaaaagcacagaattattgtctcattggccaatttcttcatccagttttcccatttgcaaaccctgcacatatcagtccttacagttatacaccaatgctgctaataagctacggatttgcaagtgtcttctaaaaatgtatagaaagtgacacgaattgaattcgaatacaacattttagaagatttttgagcaattaccctccgattgaaatacgttgttgcaagagctaatgtaccagtgatctcctgagaaatcaagctctgaccctgaaagattgaattattcaaagttttgttctttctaattctgaggctaacaagaatcaatctttcagtaatttgactctgactacaggatttaaggggagtaccgtgagagtgaaactaccgtcgataacaattctggtgggaaaactccgatcaactgtcgaagctgcgacagaaaccgcccaaggagcgacattctgaacaacaccaggatcagggccatcgtttccggtagagaacaccacgctgattcctctctccgctgcgtgaaaagccccgatgtctgcgctcgactcgaaaaacggagataacggcggcgaataggaaaagaggccgaaatcacgtggacgccgtcgtggatggcgtcgtcaaaagctgctaagatatcagcctccgtgcaaacaccttccagatccttccgccaacacgtcttgaacacagctagcctagccaatggagctccgcgcgagcagtgcgcgtccaagaccgaagaagctggagacattgcgaacaacggatccgacggcggtggaagctgtgtgtg

SEQ ID NO: 22584 - DNA, 509 bp, Arabidopsis thaliana
tgatcgggattgtaagtgtacggccatcaagggtcgctatgtttgcggtgtagcctgttaagcatcagctagtgagactttctgtgtgacaatcaggtcgtttccctcacgggtaaacactggatggggtttctcgtcaatgatgaagactagatccgctggaatcacacctggatgctcattgcctttctctgggaatgtgatctttgtgcctttcttccacccgggtttcactccaatcgttagaatctcttccacttgcattgccttactgcatttaccagaagacagatattagatattgttaagacaacaactagggtcagctcaaatcaacaattaaccatatggaagctggggaatgttgcagaatctaaaagcttgaaactttgtttcatatatgttcatcatacttgggacttgggaggttgtatatttctaaaaccatgctctaggttgactagtagataagcctaataacaaaatgttataagtgtgatcgaaatggt

SEQ ID NO: 22585 - DNA, 600 bp, Arabidopsis thaliana columbia
cagagagatagatagatatttagcagcaagagcggaggagaacaggtcccattgatgtctgaagcatatcactaagagctacttgtacctctcctgacccatgttcacagcttatcaacgtcgctatcaatggaaacaactccggcaagttcttcttgaacagtgactctcccatgtttcccaatgtctgaattgcagccaccactagcggagccgcgctgttagctctttcttttttcctgaccccgagggaaccgcccaccttgaagactgctcctttgaacatgaaatatttatgtagaactctaacacctctctgcagaggcttatgaggtgggattctatttcagcctcgttgtaacccacaggctgatctgagatgaggttgtctaagaaggtcatacatgtttggaaagattcgttctccaggcgcacgagaggagcttcttgggattcaagggacgacccgagctcctggagcttggaacgtaagagtagatcagcgttgattttgtgagcgttggatccaatgccgtgcatagcgtcgaagagcatcaacatgtgattggctgtgagagacatacggtacatgtcgtagat

SEQ ID NO: 22586 - DNA, 529 bp, Arabidopsis thaliana
tataatacattttactcacacttggaggagcacataaccgaggtaggaattcagccaactatcaacaaatggaacgaatccttggcgctcggagcaattgatccgcatgactcactatcacatccgactggtgcctctgataaacaagctgaaccggcttcttgtgtggaccctgaccagttcactacctttttggttagattcccctttttgttagtttaattttcctctagtaactagtgatattggttattaagattgtgttcgtgggttaatttctcacatcaatgtctctggttcagatcccaaactggtttgcgggtgaggcgattggttccacgaaagacaatccatttccattgccagatgcatataaggcagtgcagcagacaaacgtatgttttttatttgctttccgcataaaattgctcgtttctttttcatccatacttcagcatctgatcccttaactgtgttttggttttgagcagcttaagaacttagaggaaacaagacaatccttgagaga

SEQ ID NO: 22587 - DNA, 455 bp, Arabidopsis thaliana
tattgaaattgtatgtgttctgtttggcgttgtgacccgtcattaatccttaattaaatcacctgtgcaggctgctgcagcgaagggagaggcacctccaggccttcctctcaaaggggcgggtcaggattcgtcggatgcacaaccaagggtatatgcatgtttaacatagaatatgggttatcttcatccatctcctgttttagatgttgaaccttttatgtatttatgtattgttttgtttactaggccaatggtggaatgctgaaggaaggtgatgccttatcaggtgaactttgggagggaaagcgagacagaatacgtaaagcttcaatatatggaaagttacctggttgggacctgcgttctgtaagtgctacaaaagccataccgtttttttttggtttgctgttcccaattagcataatcctctatactaagttcttttgttgatg

SEQ ID NO: 22588 - DNA, 510 bp, Arabidopsis thaliana
aaaaaggttcaacatctaaaagacagaaaaactaaaggaatatcctttttataaccaacatgcaattaccattggttgtgcatctgatgaatcctgaccagcccctttgagaggaagacctggaggtgcctctcccttcgctgcagcagcctgaacaagggagttgatgtaggaataatgacatcaagcaggacacaggcactttacagttgatttagcttatccaaattaagatgactgtttaggtgaatgatctgtttagtatgttaggagtcacatactcacatactaagtgatgctgaaacgctactcactgagagtcagcgtttttcagtgactcaatggagaaatggaatactagagaaaaaaaacaggacttgccttttacaatttatctatcaagaaacactcacccattacttcctcgtaggcaactatacttgaaacacgacgatgttcctttcgacgtggggttttcggatcagtaatactttccattctaagacctgg

SEQ ID NO: 22589 - DNA, 997 bp, Arabidopsis thaliana
ctcccccggaaccctctgcatcaccgccttgttaccggtgatcagatctgctacactgatgttgcctggcttcctgactgtagagctggttttggctggatcttcaaatctgcccaagactttcagctgttcgcaggcaactctagtgcatctgacgttggctccccgctaattgccgaaacccttgtaactctcgctgatgttagagttgcgtgtgaatcggacatcaaagctatctctttcgcttctgactctcagatcattgtcaaagctctcaatcagaaactccaagtcaaggagcttcacgggattctccatgatatcctttctttatcttcttcttttgatgcatgtacctttacctttatcaatcgtgagtttaatcaccaagctgacgctttggcgaagagagctctcgtctgttgtatggaaccctaaattatgaagtaaagtcagtttatttgccaaaaaaaaaaaaaacaaaaaaaaaaaagtgtttttttattaaaacagtttgtttttctaaataacaggcctaggcccaattagtaacagatacagtgtttaacattactgtaactttttcaacggttgatattctcttttaaaaacggttgtaaatcattttaaaaatggttgtaaatcttttcataataacagttactacagctttttcaacacttttaaaacgcttttaaaacagcttataaatcgtttgtaaatctcttttaaaaacggttgtaaatcattttaaaaacgatgattgaacactatcgggtttaggcaacccagcacaaccacaaggacttgctggattagcatcatggtttgagtgttcttcttaatgttgttaacactatcgggttttttttgtgtcaaaactaaggcattatcacggcttgagtgttcctcttaatgttgttaacactatcgctttttttggtgtcaaactaaggcattatcacggcttgagtgttctcttaatgttgttacacta

SEQ ID NO: 22590 - DNA, 816 bp, Arabidopsis thaliana columbia
tcaatttgtgcagttttgttttctggccttaccttggtatgtgtagagaaacccacaatggaagtttcacagatccaattcaacttctggatatttttctccaatgctctatgtgctcttgccttgaacttctccatattcttagtcattgggagaacaggtgcagtaaccatccgggtggctggtgttctcaaagactggattcttatagccctctcaaccgtcattttccccgagtccacaatcactgggttgaatatcactggatacgcaataggtagattacttgatgtcacaacaaatgtgattgctgtaaacatctttcttgactggtttttgcccacataactatttattcttgtcatgtgtttgacacagcgctatgtggtgtcgtcatgtacaattacataaaagtaagggatgtgaaggcgtctcaaccaacagctgacagtcttccagatcgaatcaataaggtcagtcaaacattctcgatctctaagctcaagcagatctcagcttgcatttccctttcaaaagaaccactagagttgcaaactatagtgtagaaccagttaccttttttttccttctaatgtaacaactgatgaacacaaacattacacaggagtacaagatggagaagaagtcttcggataaattcaatcctaacgacagtgtggagatccaagagtaggaggagaggtaaacgacgaggaagccctttgatcacatccggttgtccatattggtcggacgcagctcggaaatccgctgcttaagatgctggtataacgtataatagacattttgcttcca

SEQ ID NO: 22591 - DNA, 594 bp, Arabidopsis thaliana
agttaacctcgggacccagacaatgccaggaataccagacagtgttacctcttttgccacatcaccaacaactgcacatgctcattccggttcttcaggtccagtggtacctgttgctcctgataacttaaatacaaaagagacggctacacttgcaaataaccaggttggtctctgtagcagtttttaaacacacatttacaaatattttcttgaattcaggagtttaagctgcatcaactgttagtaacagtagatgtaaccggatcatttacagactttgaaaaagaagaaaagactatagtttcaataaaacttgttctcttcatgtgctaaccctttgcaaacacatgtggcatctacatatatcatctaagggaccatcagatttctctatggaacagacaacactggctatcacagattatgctcatggagttggatctgagcatcatcaagatgatgagacacaatctagcataagaaaggcgcttcctgaggtaacgaacccttctcttataacagaaatttggatactcttttgggaatctctgatcataagaatctaaccattggcaggaccttttcactgga

SEQ ID NO: 22592 - DNA, 873 bp, Arabidopsis thaliana
cgcgcatcttcgttaacgcgtcttcgacttgcgccgcgttatcggctttttcgaccacttttaaattgtcgttgagggtttccatattgtcttcgagatcagcagcaaatgacgccgaactgaataccaacgaggagactgcaagaatagttccttttttatttacacttcatccttcacactgcctcatcgacgactacgctcattcgaccgggtcacgtactgcgagtacgctccccggccctcattcactttccgtctcgatgcagtgcgaatgattttgtgtaattttttagtttatagcgcggcaggtcgcgccagtttttttactgtccggcgattttcatctccggcaacagcacagaaccacactgtatattactgcgtgtttcaatatcgttaccgacggtgacaatattgcgccacatatcttttaaattacctgcgatggtgatttcgctcaccggatactgaatttcgccattctctacccagaagcccgctgcaccacgggaataatcaccggtaatggcactcacgccctggcccatcaattccgtcaccaccagcccggtgcccatctctttgagcatctgctcgaagcttagaccttgtccggcaatccgccagttgtgaataccgcccgcatgtccggtgcttttcagccccagtttccgcgccgagtagctggtcagcagccactgagtcaggatgccatctttaataatatcgcgacgctcggtgcgcacaccttcgctgtcgaatggcgtcgacgccagccctttcagcagatgcggatgctcttcaatggtcagccagtccggcagaatttgtttacccagcgaatccagcaggaaggtagatttacgataa

SEQ ID NO: 22593 - DNA, 809 bp, Arabidopsis thaliana
tatcgtccttgatattatccatcaatgacagctccaactttgtctgcagtgagtgaaaactattcatcagattgaaagactagtaatggtctgaaattgatcaagaagcaccagtctaaagaaaaccgatcataactacatttgtggatgtgtgtcgttacagaagttataccaataagtaagtgcaagactcaggtttcttgggacagacgacacaggggatgtccttgagcctatcacacaccaaatcaacattatgtttgagtatcttgttcttctttgcaaagaagtttttgtccgctttctccaggatcgctggaagtgcagcctatcaaaggaacatacagtagtgtcatgaatccatagactagttttgcaaagattctaaaacatatctaaaacacacaaacctgaattattgtggcagggtcaggagttacgtcaagattctgtttgatggattgtaacacctgtcagaaacagagagtaaacatacagtgagattacttgttacaaaacagcaagagaggatacaaaagaagtagcagtaaacaaaccttggtggtctcgaaaacgccctcgggatcattcaaggcgatccagccaattttccatccaggaacaacccatcccttagatatgcctgctagtgtcaatacagggactatcgaagcaaacttccccattgaaacaaatggattgtctccgaatatagttcggtcatatacttcgtctgagatcaccattatcccgagcttcctagccgtctctgcaacctaaaattaccgaaaacgcaatctttagcgagc

SEQ ID NO: 22594 - DNA, 851 bp, Arabidopsis thaliana
attaattatatcttatctctatactattattctcattatccattaattacatttggtttatatagtcgtgtcttatctaagaaacaatcaaacagatacaccaaatgctaacaatttaacacaccccaacacgttcacattgaccttcccttcgagtaatcactcaataaatgtatatcaaacttcaagtgcaccacgtttcgttgggaaataattttttttttttcatcaacttgaattttgaattaaacataatttgttcaagaatgtttttttaaaactttttaccaaagtcaattaatcaggttcatggaatacttaaattcctggaataggtccacacgttaactccacctataaaattgaagtctatgtctcataagtttcttatctcttcaatacaatcttattccacaaacataaaccctcttcctatctttttaatggcaatgaagagtctctcatgtcttgcagtgctctctctcttggctttaacacttccattagccattgcttctgatccaagccaacttcaagacttttgtgtcagcgccaacacctcagccaatggcggtatgtacatgatgattgcaaatcattttcaataaaaaatttcatatcttaataacactttttcttcttggttactattttcagtttttgttaatggaaagttctgcaaggacccaaagctggtcacagcagatgacttctttttctcagggcttcaaactgcaagacccattactagccccgttgggtcgaccgtgacagccgtcaatgttaacaaccttcttggattaaacactcttggaatctcccttgtccgtattgattatgcggttaacgga

SEQ ID NO: 22595 - DNA, 468 bp, Arabidopsis thaliana columbia
tccctgaatccaccatcttcaaatttctttccctagactgatgtccccgacgctgcttatcaatctccactcatctgcagaaagttggcattcaggaacaactaccaaagccatggaatcaccaactgcaccgttttcagcatcacgcatatgttcgttgctgcagatttcaacaacatcattactggcctgagaagtataagccatccttgctgcagatttcttcaatgcatcaatgttcgttgtgacaaacggcaagttttttggcaattggttagctgaatctctcccgtttgttgccaggtccaggtagcagctacagatgtcgttcataaaaccaagcacagaaaagttggggtccagtattttgtatgatcggagacacttctcctccattgctcttcgtagtcctccatagaaggtaaatggggatttgatcctccagttgcaggagcaaaactaagatta

SEQ ID NO: 22596 - DNA, 986 bp, Arabidopsis thaliana
ataaagtgtgtcttgataagcaaacatgtcgcattggtaaaaagcggaaaaatctgatccgactcggagagccaccgcttgatgcttcgacggaccggcggtgttttggaatgtgatgtcacgcgctagaaacctctcgccgacggcagctacagtcaatagaaaacagtactatcatttaaccgtggaaatgagttacgatcgtgtctacgttatcatctaccaacaaaacgttacacatgcgtcattattacattctttttacatacaaacaaatgtgtatgtcagtatgtgttgttagctattacgtgatactactgtttacttaattccttaaaaataaaatcaaagaagaacagtatttaccaacagtagcggagtggaaagtggtgcttccatcgacgacatttctacttccagtgataatagttttgccacggccatctcccaagaacattatattcgtcttcttcttcgtcacttccacattctctctataaactcctgcctttatatgtatcacaaacctcttgttactcttctctggcgccgcagccacagccgcggctaccgttgtaaagtcaccgcttccgtcatccgccaccgtagcgtctgctttaattgttgacccttgaagaagccttctgtctccaacggataaccactttggccatccatcactgtctaagtcgccggtaacctccttgagcttgcggttgttgttgatggtgaaggttgaagacttatctcttagctcaaagttggctatgtcggcttctgtcatgttcttgatcactgctaatgcgttgctacacatgtgctccacgtgtacctgttttgataccgttcaatattacaaagctgttacatattaaaagatttcctagtaatacaaatgttttgggtacgtatttgaagagttaagtgctctaattatgagcctactataatcactagattagtttagcgagtaagtcgtatgtcga

SEQ ID NO: 22597 - DNA, 1839 bp, Arabidopsis thaliana
atataagttggataaccgcaccacgactctcaaagtggttcctcctttgccaactgggttagctgatgtatgtcctctttccctttgtttaaataccacgctttatgaatgtgccaaactttctcactttctagattaaagactactaaattataggtttattttagtcactgactcacttactgagttttgaattattttttacctccaggttgctgtcgtaaaggaacatttttcatcttacggcgaagtctcaaaagtggaactggaagacaatgcatcgattgatagtggcaaggatcatgaaacacagaacgaaagccgtgcagcttgtgtcacatttgtgaaacgcagcgcacagagaaagcgtttgctaatgcaaagtgttggcaagaacacacgttgcagctcgtgtgggtaacacgtcaaagcaacagagagagcaacaataacaataacaatagtaatagtctctctgtttctcgtgacaaccttagcagcaaaaacaagtgcgcttctgtctctaatgacccaaaaccagcagttgaagtcaagacctcctctacggaagaaccagagaatacaaatgtttctggagacaacgacagtactttggataaacaagagaccaaagaaagcgacaatgataacaataaaagtaaccacgagtccatcgaaggagcttctgaggtgattgcactgcaggaactgatgaagacaatctgaacaaattcatcagtgaggtaatatttttgtctcagaaacatatcttttgagcttggatctggtatttaagtgatctttttctccgacttaggcttttaagccaattcgtgagacgttaatatttgttggtagcaaaagatatatacatatctaagtattttgttttccttttttcgatagtagaatgtgaaaaagaaaagagaagacaaaaaaaaaaaaaaagaagtgtattgttacatttggccttccaagaacatttggttgggtctttgtaccagcagatctttgttcctttttttcagtcattagctgctataattatttcaatttctgttgtaaatagtctggacattttgattccttgtcatttagaaaaaaaattgtggaatccagaatcggaagccattttgaaagtttatgcagtgttttggtagacttgtattattttttccctagatttagaatcttgcaactacattgttttttcattcagttttagcatagggacagttgtagataaacaaacatttgtaattcaatgtctctcaactattgaatttggaaacttaagcacgtttataactgccttgtaattcagtgtcttatgtttcgaatgtcttagccttttaaacgtactgccaagttgctagcaaacgagaattctaaccaaagcaaaaaaaaaaaaaatggaaccgatgtatcaaatatagggataactttaatgcattgataaatgtttaaaagatataatttacataaattatccgatcaaactctattttccggggacgaagttggtggcgtaacgcaagcattgttagccacagggtctgcaatgtgatcgaacagattttcgatcggacctttaccggtaactatggcttggacaaagaatccaaacattgagaacatagcaagacgaccgtttttaagctccttcactttcaactctgaaaacgcttctggatcctccgctaagttcaacgggtcgaaggcccgcccgggtaaagcgggtcaagcccttccccaagaggaccacctccgattctgtaccttcaatgaatccattagcacaacttgacacgccatatagctaatatgctttgcgcgtgg

SEQ ID NO: 22598 - DNA, 989 bp, Arabidopsis thaliana
taaacatgccagtaaaacaactaataattaattttttaggatattgcttaaaagttaaaacatattgctaatttaaaagtcataatatacaaaatataattgtagtatattctataataaacatgtttcatctttttttcggacgagcaaagaagtaagaacgcacgttatgaccatgatgctctaaaaaaaggatcttattccttttctaatgatggaaaaattattatattattccttttccaacaaccaaagaaaaatcaaaaatgtcacgctccggcaattaaggtatttatcatccttaaaagaggtaccaaaatatatagaaccgacagcgccataaactttagaaaagagagagagagacaaagagagatctgatcctttgaagaaacaacaccaaaaaccaaaaaaaaagaatggcatcagcggatgaaaaggtggtggaagagaaggcttcggtgatttcaagcttgttggacaaagccaaaggtttctttgcggagaagctggcgaatattccgacgccggaagcaaccgtggacgacgttgatttcaaaggcgtgacacgtgatggagtagattatcacgccaaggtctccgtcaagaatccttactctcaatccatccctatctgccagatctcttacatcctcaagagtgccacaaggtcatcttctcttttttttcttcttgtaccgtctgatctactctaacaccgtattgtgcactttttattacacacatatcatgatagtatccgtattccggatctagcctaagataaatagaatttgtgacacatattttgatcatctaaattttgagaatatgaaaaatatatatgtgatatttttcgttaagtgtatccgatctttgtactaatgaatagaaatgtgtatcaattaggtatatccgatctaatgtttgactatttttaattgataacagtatttaatatatatgtgtatggatttcgttggtaattt

SEQ ID NO: 22599 - DNA, 1260 bp, Arabidopsis thaliana
  unsure (1)..(1260): unsure at all n locations
cggttataacgtttgcgttctcttctcctgctcatacggacccgtcggagacaaatctcgccggaagattgattcatccgttgattaatcggagctccttagttttgattccgttatggagagtttgattgcgcttgtgaacaagattcagagagcctgtacggctctgggagatcacggcgagggaagctccctcccaactctctgggactcattgcctgcaattgccgtcgtcggtggtcaggtttggtctctttctcttgatttttggcatggaattttgaatcggtgatctttagatcataggcattgcgtagaaataatctcatctcatttttcaacgaatcgtctgatggctcccattgaatcattgatttgatcgaaactaatgataatgtttctgttgtgagatcctttgttcttaatcaaaaactgttgagtattcatgcaatgcgtgtaatccgatcgatttgatgaaattgtagagttctggaaagtcttcagtgctagagagtgttgttggaaaagattttctacctcgtggagctggtaagctttcttagaaaaatatctgaagattattttctgaaagaacacttacttagaacaacaatgtcttccgtgtagggattgttacacgcagacctcttgtcctgcagcttcatagaattgatgaagggaaagagtatgcagagtttatgcatcttccaaagaagaagttcacagattttggtattgtttgggaggagtttatgctccttagttttcctgtgactgcttgcagtatctgtagtgttgtttacgtgcccacattcttctcatcttcttccttgttatgtagctgctgtgaggcaggagatctcggatgagacagatcgtgaaactggtcgcagcagcaaagtaatatccacagtcccaattcatctcagtatcttctctcctaatggtaagagaagcctttgtacttcctacatttgcattaagaaattaactaaacatgctttaggatccttaggttcttgtacacagggtgtgaaattcaatcaaatcttaaatttatgttttctaccatctttcccatttgtcttccagtctccatactcttaacgattttatttacttcaaatgtttgtagttgtgaatttgacacttgtcgatcttcctgggctaacaaaggtagctgttggtaagtgagacagtctttgttttccatgatatccacaccccaagtcctctttagtganagagtaatgaaatatg

SEQ ID NO: 22600 - DNA, 411 bp, Arabidopsis thaliana
caggagttgccacagtaaccagtaagttttccggcccacctgcggcaacaatcgcctggttgagcagcgtaatcgcccgctgggagacttttttcgccgccggatgcggggcaaaaatgacgctgttgcccgcggcaatcaggctgatggcgttgttaattacggttgccgccgggttagtggaaggcgtcaccgaagccaccacgccccagggtgcgttttcaattagggtcaggccgttgtcgccagtcagcacttgcggagagaggcactcaacgcctggtgtgccgcgcgcctgagcgactgttttttgcaaatttatcttcaacgcgccccatgccggtttcactgacggcaagttccgctaaatctctggcgtgtttttcgcctgcttcacgaatggcagcaatg

SEQ ID NO: 22601 - DNA, 1768 bp, Arabidopsis thaliana
tcattctctcattcttccatcaaagaaactgatttgggacggtgaatgctctcacagccaggacagttgtgtaagctctcgtggatgtatatgtcacagtccagacagaaatagtgcttgcatttacgacatgttacgcatgggacgggtttattccctaagcaaaaaacaaaagcaccaatgagcctttatatttgagtgaatggatcggttactttgtatatactatgacaagggtgaaccgtatcttaagttcaactactggtctagtgaccaaatggttattcaaccaacagtattaagactctataaaatggtgttcaagtagttacctgcaccaattaggctctgttggcaaccaaaacaactctttcccaattttctccgattatcattcagacttgaaagtgcaggcacctcatcaaatggagcaatcgggaagagatgatggtatgatctcgccaaatgcggcgaagaaacaagtgttagaccgcagatagtgcattccgtagggaggtcacatacccgagctttgcatcttgggcacatgtaaccagctccaatcttaacttccttatgacacgaacaaatcgccattgaaccctcagcagctctttgtgggaaacccatcttgatcaaatttgcaattgcaaattctgctattgccggagtggaggcgcatgttcaagcagaagatcctttagatgcacctgcgtgaaaagacaaatacacacaaagcacaatgttataccatacaaaacaagtttttcaaaggtccaagtgtaagtagaaggtagctaaactcacctcgtccactgcaactgaatacaatccgccagtttcctggcagaggtgtttacatatgaacatttctgcagagagcccaattacagaacatcttaatttggatttcttgcatttttgaatggtctccatgatatcgcctggatcacatgtgcataaagctgagtacaatatcagaacctcgcggtgaccataagatggaacctggttgagatgctcatgtacaagttccagagcgttctgcaaagaggagtcacccaaagcttccaacttgcccatcaacgctttgatgtgagtctcaggactaccaccaagatctgttaatgtatgcgcaactccattttttatagagaccaacccaatttgactcagaggattctggtcaaagaactctctaatgaaagcttcgacatgtttggccattatagccatccggcttggtctgaaatccatttccgcagctgcctagacacgacaaaacagtccaaagtgtaagactttgcataccttggaactagagaaatttgaacccaaatcataatgttgccttcaataaagaatctgaataaggatcacatccttaagctctacaaacccacttagagtaagattatcattgcaaacaatacagagccaattatagaacctattgagaagactaaagagcagagatctccaaaactagaacgacgattacattaaagttacttatcagtgacccaaagtgcatagtttctcttttatataagctctgatgaaagcaacataagctcaatttcacgccatcaaactcaaaggaaacggcattgaagctaaaaatcacaaaatcagcagcagcagcggcgatgattgcaagaaaaatatttacccgagagaagtcaatgacgatgtagagatatcgaataagatccttttggatacgagtacagcagcagcgcggagagcatcgagacggcggcgatct

SEQ ID NO: 22602 - DNA, 1103 bp, Arabidopsis thaliana
atcaagaagaaaccgaagtcagagccaccagtggcaaaaccgtaattaaaaagcagcctacatcgatctcttcttcttcttcttcgtggatgaaatccaaggatccgaggattgttagggtttcacgcgcctttggaggcaaagaccgtcacagcaaagtgtgtacgttacgtggactacgtgacagacgcgtgagattatcagtcccaacggctattcagctctacgatcttcaagaacggctcggtgttgaccagcctagcaaagccgttgactggttgcttgatgcagctaaagaggagatcgacgagctacctccgttacctatctcgccggaaaatttcagcatcttcaaccatcatcagtccttcttgaatcttggtcaacggcccggtcaagatccgacccaactcgggtttaaaatcaatggatgtgtacaaaagtctactactactagccgcgaagaaaacgatagagagaaaggagaaaacgatgtcgtttacacaaacaatcatcatgttgggtcttatggaacttatcacaacctggaacatcatcatcatcatcaccaacatttgagtttacaggcagattatcatagtcatcaactacatagtcttgtcccatttccatcacaaattttggtatgtccaatgacgacatcaccaacaactacaactatacaatctttgtttccatcatcatcgtcagctggttcagggactatggagacattagatccgaggcaaatggtaagccattttcaaatgccattaatgggtaattcttcatcttcgtcttcccaaaacatttcgacattatattcgttgttacatggtagtagtagcaacaatggtggtagagacattgataatcggatgtcgtcggtccaattcaaccgaactaatagcactacaacggctaacatgtcgaggcatctaggctcggagcgttgtacaagtagaggaagtgatcaccatatgtgaagttagattattgaaacgatataattgttgtttgatgtgttcagaaataaggggacacaaaacaaaatataaggtaattactattgtactatgttttgctgatatattttttaatag

SEQ ID NO: 22603 - DNA, 766 bp, Arabidopsis thaliana
ctcaaaacatccagtaggagtaggagacatcgtttcatgttttttccatatttgaagcaactccaaacagcaggcatgacagcaagggtgattaatctgggctaaaaaataaaagatagcaaagactagcatgaaaaccgtctcagatatctgatggattatttcttcaggttcctggccagcacgttgaatgtcccgcaaaacacgcttaacaagatcaaaatgcactccaccagtgacagagacacgaagatctagcaaaggccgtagcttctcactcaaagcatatatgccttctagaataacaatgcgagactaggcacctcaagcgttctatacaaagcacgaagaaactgataagtcattgcagctgtgtagctcttatcaactaacaagtggttcccaggaattcaagtataacgccgtctgtccacaagtttgaaatagtagtaaatgcaccaacgaagaatatatatacctgtaacctattcgagaactcgacttgaagtcatatattggaacctgaacaggttttccatcccttagaccatgtatattgtcaagaagtgtatcatagtcagtcaaccttggatctgtaacaaaatataacagaatcgcaaatgttctttatattcagattatatatacataagaaaggaatgattgaataaatccataaccagaatccagaagggtgaaacatagaggtgcatccatcaaagtttccacgatacacgagtccatcattatagttgtcatgtaatga

SEQ ID NO: 22604 - DNA, 838 bp, Arabidopsis thaliana
tatttgaagaatattaattttcgcatgcaaactcaaacaaaagctgctctttgagcaatcgcagcttatttatgtggtgacatgtatgtgtgacaggagctaaataaggtggaaggttcggagacgaagcggtttgtgctggttcatggtggtgggttcggagcttggtgttggtacaaaaccataactcttttagagaagcatggtttccaagtcgatgctgttgagttgaccggttcaggtgtgagctcgattgacacaaacaacatcaccagcctcgctcactactccaagcctctcctccatttcttcgaatccctcaaacccaccgagaaggttccaactttgtcttataaaccagtctttccagtgctaattgatgatgaaaagttacaacaattggatcatgtttaagaaattaatattataacaggtgatactggtgggacatgattttggaggagcttgtatgtcctatgcgatggagatgtttcctacaaagatcgccaaagctgtctttatctctgctgctatgttggctaatggccaaagcactcttgatctctttaatcaacaggtactttttaatcatgtgtatagctgacatttggtatttatttgtaaaaatgataccatgagaggattatagagttaatagatagacctgttaagtcgtgttaatcaaataacatgatatatcatgtaaaaatagcgtgtcaacggataaaataatgttgtatttgtttagcaaaataaaataaaataatgttgtatttggttaaattatttttaaaatatcatgctatttgcaaaaatgttacagggatagtcgacctgc

SEQ ID NO: 22605 - DNA, 770 bp, Arabidopsis thaliana columbia
ccccgatggcttgatttccaaagcttttcttcttctaaagtatttgtccccaattttaatttgctatacttatctgttacattgtgtagccgatttgggacttggcctgttgctatgctcgcacaaagcaaaaacaaggccatccttgaaggtccagtatgcaatggaagtcaagtaataggatggcacactaatgaaaagagtaaaagactaaggaggttccatgttgatatgtcgggatttgcttttaacagcactatactctgggaccctaaaaggtggcgacgtcccttttcacatccaacccgccaactagacacagtgaaggagggtttccaggtatgagtttgagtttttcccatatctttggatttctctggtgtgcagtcaacccttttcttatacatgacatcgtgtgtttccaagcaggagacatcatttatagagcaggtggtggctgatgaaagcgagatggaaggtgttccaccagcttgctcgagtatactgaactggcatcttcacttggatgccctggatgtcccttatccacaagggtgggcgatccaaaagaatctgcaggctctcataactatgaaatagtttgaagatagttttgactggtaagatttataaggttccgaacttttaatgtgaactcaagaccgtgaaaagtcagtgtttgtttggatttggaaagggtgaagctagctagttgatcgttaatcagaattcggattctctacctattgatggtgctatgcgtgtttgtt

SEQ ID NO: 22606 - DNA, 520 bp, Arabidopsis thaliana
agtgtgctctaaaggaagatttaattgctgtgccagctgccagacaaacggacgaaaaccgacgccctgcactttgccacgaatacgcagttggacaccgcaagatgtgttttttgccattgagttattcccgccatcatgaattgcgtaacccgccctgccggacacgacagcgtcgcatccggcagtcacaggtcggcgataccgcccgctccgtattctacgaatatttccgggaattcctttgatgccagaacagttctgtaagatttttagaacatcagcgccgtacgcggcgtttttctgcgctcagttgttcaagtttattacgatcgacacaaatcagcgcatgagtcgggcaagccgccatacacgccgggccgtcttcacgatggttgcacaggtcgcatttattggcttcggctttgtcagcccgtacattcagacccgcgccgctgttgcggatcaccggacgtaccaccacttccatcgcaccatacgggcaaccacaacgcaggtt

SEQ ID NO: 22607 - DNA, 849 bp, Arabidopsis thaliana columbia
ccgtttcattttgtttaatctattcatgttacttagtcaaggtgaatataaaatcatccaccttcttaaactatatagataatgatgaatcaaatgaagaaaaggctacttcatcaagaatcaatactgaagaatgattcgagtgagaagctgaaactgaagaactctttgaagttgttctttgtcctgaggcgactcaggaatcggtcgcaaagctttctaacgaaccacttcatcaagactgaacaatgattctgtcattcgaaggggccaattttggtaagtatttcatatactcgagagtcgagccccagatttaactgatgtttaagtaagcattttgttcactcttggtatagaactatatatagtgacaaaactggacctgaccacagctagtttgaacttttgactaatcagactttaaacttaatgcactgtagaaaaagtgatgtgacaatatgtttcaactttgctaacaaaatttgcctaaatagttgctaaaacgtttcaacttatctaccaaaatttcagaaatagcacaatgatgctaatagagaaacagaaggtggtcatgataggtggttttttatgtgttttttcactcagcacttgaataattgaattcaaaaacactctgactcagttatctttacaacaagaagttaaccttcctctgtctttacaatcttacacagtagagtttggtcatgatcttaaaacgcctcaatgtattggtgtttcgcaaaacatcaacaaaatttgtatctccgtaaatcttctgagattcatgcatatatttcattaaatctgtcttgaggcacaagtatggaacttaaaatggtttac

SEQ ID NO: 22608 - DNA, 830 bp, Arabidopsis thaliana
tgacaaataatcccgcaaagtatgttggtttgaagggatatggattagccattgttgggagagtccctctattgagtcttatcacgaaggagaataagagatatctggagacaaagcggaccaagatgggtcacatgtatggcttgaagttcaaaggggatgttgtggagaagattgagtctgaatctgagtcctaagcttaaaaaccaggacgaaccgaatggaatcaagaactatagatataatacttcacaaaaaacaaggaaagaaattgacacagaagaagaggaaaaagacatttgatctgtctgagaaacttgattagattggtttatgttctaatctaatctgatttgatttttttttattttgtctacgattcttgagttacgaaatgttcatcatttgttacttcttgttgtcgggattgagtagttgcatttttttagttgtggagctgtgacaaagaggccagctagtgtgtggaatgtggatcatcatcctttggttgattccttgtagaatcctttttgtaaacatttaaactataataaagtgttatgattaagaaaactagttacttatttttttagtcatattgactctgagccataaactccataaaagtcctcctcgattcaattcggaatttaaacagtttcagttgaactctgaacaagaaaaaaaaaggaaaaagcaaaaggagtccgtgcaagataactctcattttattctctttgtttttgaactatttattttgcacaaattaggattgatattaaaattttaattaaatcaaataataactattaattttgcaccaattagga

SEQ ID NO: 22609 - DNA, 793 bp, Arabidopsis thaliana
ctcctccatctgctcttgcttcaagttgctatagtcccaaaggagatgtaaacgactgaggatggttctcttgagtcaagccattccatgcagtcactcgctggctcggatatatctcccttaacgtcagaactcaaggtttgagccatcttgaagagcggaccgacaggactgatgatggcttgaggacaaagttgtgacatgtggtccatgatgtctttttctagttcgcgaaaagtgtcgatgaaaagatagaaagacttgtggttttcgaatctctttaactggtctaaaatgatatctccaaaagctgtatacggagacgaagggtgaagaaagcttgggatctcgtcatgctttaacaatggcaagcaagggatttcaacgctgatgtccggctcggttttggtcgggaacttaactaaccggtggtggtaatagtaataagccgtgagacaagcacaagactggacccatagaacagccgaagggatgtgaagctcctcggcgacatcacatacccatgggacaaaagcgttgtttatgagacacgtcaccggctccttgttatatctcttaacgagattcttgatctcttgttttccgacagcttcaaggtgtggtcggaaggcatcgaagtcgaatcttttttcatcgtcgtcggcgaagtcgagaggaagaactcaaaccggatgaaacctagacctgacggtttgagcacaccgtcttgaatcttgttggcttgacgcatcttcttgccccatggcttctctgtggtgacaaaggtgacgag

SEQ ID NO: 22610 - DNA, 520 bp, Arabidopsis thaliana
cagactcaagaaaagctgttaatacaattcacatcatcatagatgacaacggtgttaagattgatactcagttgggaattaaagagcattgcattgaatatttttctaatcttcttggtggagaagtgggtccacctatgcttattcaagaggatttcgatttgctcctgcctttcagatgctctcatgatcagaagaaagagttggccatgtctttctctcgtcaggatattaagtcagcttttttctcttttcccagcaacaagacctcagggccggatgggtttcctgttgaattttttaaagagacttggagtgttataggcactgaggtgacggatgcggtgagtgagttcttcacgtctagtgttttgttgaagcagtggaatgcaacgactttggtcctcatccctaaaatcacgaatgcctcaaaaatgaatgattttaggcctatttcttgcaacgactttggtcctatcactcctgtataaggtcattgctaggctgcttacgaacagac

SEQ ID NO: 22611 - DNA, 348 bp, Arabidopsis thaliana
aaagaaaagaatagtcaatgtttatgtcgatttgtttgttaatacgggcccatatacgttcttgaccagattttagagatattattgtgataatgttgatgaaaagtcataccatccccagaagctccaatcagggaaaactatgtcgtatgcatcacggtgaccacagtagtgaaacaacggcggaggaggccacgtatcctttcgttttatcttcaagtctcttttccaaatggcgggtctatcatggcagaggaagagaagctcaaggtcagggatttgaccaggatacatccctagaagctgaagtattccccagattgtgaacacatctcgaggctgaaatgc

SEQ ID NO: 22612 - DNA, 801 bp, Arabidopsis thaliana
aaagtgtgagtcaaataagttcgttctatgaacatggtttgcaatttcttattatttttaaaactttgtattcgtagaaccgaagatctattgtaaggtttcaattttttcttgtggggttggttctcacttggagatcattggtgtttgtgaggttgttgtaataaaaaaaaactagtcttttccttttttatgtgttttgcttcggttaaggcggactatcgagtcttcttatggttaattttacaagtatccatttatgattatattatcggttataatctaagaattcagcttaggcaaccattggttatttaagggatttatagaaaaaacatcgactagatttattatttctctcagaaaaaaaacaatctataggatatatggaaacatttgttggtcattttggctataaaaacttaaaaaaggttgaccttattggttatagtggcaggttagctctgttttataacaatgattttaatgtttcaatcatctatcaaagtaaccggttaatcgatattgaagccatttataaaggtaaaactattaatcttacctttgtatatggagatccattaccgaaaaatagagatcaaatctgggaacggttaacacggtgatattagataataggtttttactttttagtcaattatcctaaaacaccaatcatgtcgttgtagtattttaggttgtcaatccaaatgggtgtgatgctagcaattaagatgcaatcagagttcacagagtcaagccaaacaataccaggttttggggttctagcagtctaagtga

SEQ ID NO: 22613 - DNA, 1311 bp, Arabidopsis thaliana
tatttttacatgaaaaagttgattagtaacttcaatttatttttggatatggagttttactcacttcttaagagggatatcagagattatggtttcagtcaagtggctggcaattttgaggaagattgatttaagtttatctatcacacttttgattttaacccgaaggtttctaatacggagctgggaactttgggaattccccaaagaaaaacagtttattgtatgaagatagtaagttggaattgtaaaggtttagaaaacaaagcaactattggttatttacggatctatggattaaacattgacctgattgtttatttctctcggaaacaaaacaatccacattatatatggaaaaatttgttggtcactttggttataaaaaattaaacaacgattgaccctcttggttatagtggcggattagctctattttataacaatgattttaatgtttcaatcaattataaaagtaaccgattaattgatattgatgccatttataatggtaaaactattaatctaaccttcgtatatagagaccctgtaaccaaaaatagagatcaagtctgggaacggttaacacagattggtatatctcgggatactccttgatttttaattggtgattttaatgaattaacaggcaactataaaaaacgagggggtaaattaagacatgcttcttcgtttataccttttaagaatgggacgaataaatcgcaaactccggaaatgtcattttaatcacatactttggttgactttcccagaaaataccaaagttttgttgaccctgccaaattagtcatcgtgttaagtctccgttaggacgacgattacggggttcataatctgttaacgagcaccgttaaacctaaacaactttgtatcgtctaaaacaaaacgagccaaaacgagacacaaacgccgttgttgttttaagagagaaaagagaacccaaatcaataattcccaaatcgatttgagaaacccaattcttaaccctaaaagaggaaattctcaattgatctcgatggcgaagacgcgaggaggaaactggaaccctcgtcggtcacggaggctgatggatgtggttgatatctcagaagatctagagactagtcagatcccagaagaaaccgcgacaaatccaatcccagaagaaacggcgacaaatctgatcccagaagaagcctcgacaaatcaaaacctagaagagcagacacttcaaaaccgagaagagatggagacaactcaaaaccctattaccaatcgagacccagaagacactgtgattgaggcgat

SEQ ID NO: 22614 - DNA, 664 bp, Arabidopsis thaliana
tcatgcaggggagtatcatactatcttcatcattcaccaccagcattgatcatcatctgttggaaaatatgaagagaacacatttggcaagttttagtaacagagacaaaacccaagaagaagaaggagaagacggtaatggtgacaacagagtcatcatgaatcactacaagaattacgaagctgggctgatcccatggcctcccaagaattacacttgcagcttctgcaggagagagttcagatctgctcaagcacttggaggccacatgaatgttcatagaagagacagagcaaaactcaggcagatcccttcttggctcttcgaacctcaccaccacacacctattgcaaaccctaaccctaattttagctcttcttcttcctcttcaacaacaacagctcatcttgagccttccctaaccaaccagagatccaaaaccactccttttccttctgcccggtttgatcttttggacagtactactagctatggaggtttgatgatggacagagagaagaacaagagcaatgtatgtagcagagagatcaagaaaagtgccatcgatgcatgtcattcagtaagatgtgagataagccgtggggatctgatgaataagaaagatgatcaagtcatggggttggagcttgggatgagtttgag

SEQ ID NO: 22615 - DNA, 590 bp, Arabidopsis thaliana
  unsure (1)..(590): unsure at all n locations
atttaaaaatgtcaaaacctaactttttgtctcactcttactatggaatatgtcaagtgaagagctctgaattacataagagaacactgagagcgggaatctatatttcgtactgaacatgtccacaaaaagatcaattaatgctaaacaataagttgtcattaatgccaatagttattacacaaatgtttttttcatccaaatgtctctaaaaatgtatatatacatttattaggatttttgattttctgatttgggtctgtctattcaataaatttcctctctggtggagaggtgactgtcaccaacttcttccctaagcctaagggaaagatttgttagagttgagccgaatatttctctctcgccaaatatggtaaactgaggcttggtacgctaatttgagaatgaaagccacctttttatcccggcaaggatgtctaagccatcttgcactatctttaaacatccttggaggggtacacgtgcgttagagcagaaaaacgaccatacctcgtgcgagaaaggacaatcaaagaacacatgctgcattgtntcatcaagcgcattgcagagcaggcaaagtgaag

SEQ ID NO: 22616 - DNA, 992 bp, Arabidopsis thaliana
catcatcttcctcctcatcccagcgtcacgtgcgctctccaacctgttcaggatcatctgtaaagctcaacagtctcatgaagacgataactccgccgtctcccgccgtcttgctctcactctcctcgtcggcgccgctgctgttggttccaaagtatctcctgctgatgccgcctacggtgaagctggtgcgtttataaaataaaataaccttggatcatttcattttcttgaagaagaatcttgaagaacatattgtgtttttttcatcctatttttattttttggtttgttgcagcaaacgtgtttgggaagccaaagacgaacacagacttcttgccatacaatggagatgggttcaaagtgcaggttccagcaaaatggaacccaagcaaagagattgagtatccaggacaagtccttaggttcgaagacaacttcgatgctactagcaatctcaatgtcatggtcactcctaccgacaagaagtccatcactgattacggttctcccgaagagttcctctctcaggtctttgctttactccatcatctgtaaaggtattgatgttacaaaatctaatgaagtgtgagactgagtggtgatttgggctttatgcaggttaattacctcctagggaaacaagcttacttcggtgagactgcctctgaggtaaacttcccattgttatttgttataagtaaaccagaagctgatagaatagaataagagaatcaaacactaaagagagaacacattgtctccctcgttgttaactgataaaacaaaactcaaaagcttttttaactgataaccttcaaagacctctctagtagtcgatgattattacaagaaagattcttaccttaggtggagtgagttacaagttctactctgtgtgtgtgtgaactgatgtcttacagggagctttgacacaatgcagtgcaacagaaacatctggagtcacatccaggaattggtggaacctacta

SEQ ID NO: 22617 - DNA, 1300 bp, Arabidopsis thaliana
tgatgtttggtaagccaaagaagaacacagatttcctgccatacacaggagaaggattcaaaatccagatcccatcaaagtggaacccaagtaaagaaattgagtatccaggacaagtactaagattcgaggacaactttgacgccaccagcaatgtctctgtcatgatcactcctacagacaagaaatccatcactgattacggttctcctgaacagttcctctctcaggtttcactctgtttttaaagcaaaaacggttcaatcagacgataatcaccacaacacagctgatgataggtttctggtttctgcaggtgaattatctcctcgggaagcaagcttacgtcggcgaaacagcctctgaggtaatttccttttctagttggtgaaggagtttttgggttcaaacaagaaccaataccttaaagagtgtgactgatcatttttgcagggagggtttgatgcaaatgcagtagcaactgcaaacattttggaaacatctacacaagaaatcggagggaaagaatactattacttgtcggttctgacaagaacagctgatggagatgaaggtgggaagcaccaactgataacagccactgtgaatggtggaaagctttacatttgcaaagctcaagcaggagacaagaggtggttcaaaggagctaggaagttcgttgagaatgctgctacgtccttcagtgttgcttgatatgaatcataaacattaatggaacgctctgttatctgttgtcttcttcctcattgtccattgtataaataatggatcaagaaaagaaaacaatcatttgatatctataactattgtttatctttctctgatcgttaaagtactgcaaagaattgaaatgacaaggaaacaaaaatcttgataaaattaaaagatccatggcttattcgtgagaacttgtaaatttagtaactgagatcccagtgacgtctcactatactgaaacatcatgtgtagctgagctatctgttttcctcaaatttacaaacagggctcaagcctaaacaacagagcagtatgtggatgtaagactgtgatagcctaacaacaacaaaaattaagttacgacaatctggaaatttaacccaggggtggcagaaagagaaacccgctgcaacatcggtcaggtttctcttcaaggaaataacttcacttggcagagcatcaaataggaagaaaatcatagctcttctaatcgtatcggcaaacacaggtaagacgtccagatagagcaggcactgttcttcatggatcacagagaatttgt

SEQ ID NO: 22618 - DNA, 1105 bp, Arabidopsis thaliana
agcataaatttatcaccaaagattgtaaattggactagaattctcgacttacattaaaggactgagtatctcccggatgctcctccaggaagtgaggacatggcctgattcgtaatgtcttcaagaacacgcttgagttcagcttttgcgtgcttaactgatttttcgctaggcccttcaatgaataagtacagcttccgttccccaggtcccggtatacgtcctgtaggataaaactgacccctggtggtaatagcagctccagtccactctgatattggacccaaagtttctttatgggtgaccttccaacgagcattttgtgggaagtcattgatttcaagttctgcttcatagtgctcaggcattgcatcagctggaatctttgccagattatgttgcagattcatggcagcaaccatggctgcagcacggcctgccccttcactaggaagggtaggaacagtaaccggaaggacacctggcatggcagcaagcccgccaccatttgccagtaattggttagctgtcacaggagcactcactggagcagcagcagcagctttggcagcagcagcaatggcggctatctgagcaaaagtagcctgctgctgtaagaactcaccaccacctgcctttcttactacatcattctcatcttctgagtcagacttgtcttcctcaaagccatactcctttgcttgtgctttctttgctgcttttctaacttcttcctcctcttcgttgaatttaaagccactaccaccatagccagttccatgagcttgctcaataccctgtttcactttcaccatgaaaccatcagcaagtgctttcagatcatcaggaactggctgctcagaaagctccagggccttgactaaatctggtgcatattttgcatcatcctcggagataaatgtcacagcacagcccttacgccctgccctgcctgtcctgccaacgcgatgcacataatcttcatagtggttcggcgcatcaaagtttacaaccaactcaagctctttcacatctagacccctagcagcaacacttgtggcaatcaacaaattgcagacatcgttcttaaaatcagatatagttg

SEQ ID NO: 22619 - DNA, 865 bp, Arabidopsis thaliana
tcaaaatgttaataggaaaaggaaggccacatactttccaggtgctgtcaacctcagggcacatggaattttctgttcttccactacctattagcaacacaaaaaaaccagcaataagattcaaggggtaagggaaaaagctttttgatcatttcacggtgagcgtgctatctcgcaaagaatgagacagaaggtcatcataacatagatatttctggctttatgccaccatgtgatcaagtagctttcttctttctccacttcaaagagaaatccccatgtttataaaatctcttgaaagcaaaggaaaccaaatacattaattaagtggtgtagctggcccacttaccagatatggagtccaaagccaacaagtcataatctgaaacaagcccaacctgcagcaacaaagaatccctcataagcatccaacctccatctgtagattagattcagctccctttcaaaacttaagacctgaataacaaaagttgatactaaccaatttccagtcttcgtcaattacaggaaatccagtgattctattctccacaaggagttccagagctgtagagaaggcacaaaagaggccataagtatgaaaacaaggcagtatcttatgctccaaagaatctgatgaactttaaaggataacaaacagctaccttcatccacagtagtcgtaggtttcacacgatcaagtcctctttctttgtcatgaactcaccaacagtgtacactccacttcttggctacagtaatagtcatatacaaaactcaaactaatcctctacttgtacaatattgattaacctgccaaccagtggctgcctaaattctcaaaatctcgattccaaaattggtc

SEQ ID NO: 22620 - DNA, 1266 bp, Arabidopsis thaliana
ctaaccgtaatcgaaaatactctcagatagaaagtgttgaattagaagatgtcctttctcaaagagcttatatgctcctctacagcaggtaagctgttatttcctcctgtcttttgttgttcagctctccgtgtaaatctaatctataaccacaagattgagggtgtttacttcatcattaagagttgcgtaaattgattgtatatgatgaaaaatataaacagactaatgttgttgagcttgtgagtttcttatgtttctctgttgtcatgcaggattcaagctcggtcgtcatcttcatgtcttagatcagaagttaaagacgagaagaaaacagacacattggacacagaatcttgcgtaaaagagttagttgagagttcaatggtaggagctattgaaagcagaagcagcacccatgcgaccattgaagaccctgtatgcgagcaatcaccatcaccatcgccatcaccatcaccatcaccatcgccatcaccatcaccatcagtattggcctctgaatgttgtagtgaggttgaaaggattgatacattggattccgagtccaactcttcgattgatgactctgcaacagatcatcaagaggatgtagcaaatgggaacaaagatccagaggtaaaatatcaggctgccgattcttggtcagaccctacaacttcaactccattggtctgtacaaaatccaaacctccggtgagagatatggacaccaagatgatcgacgctcagtgatgtggtatgtacaacatttgaaaatcagcagagctttttagcttacaaagttacaatagtgatgtagatactattacacaatgacttctatggtaataaagggtgattatacgtagaatttaaatgttcgtgaattgccatattgtttgccattcatgtgacagactcatttagacccataagtaggtaaatattttgttgacttaaatagacgcattgactcttacctaaaaagttcataactacattagattcataccacataggtgatgaattcaatataaaagattatacttgtgaacaagttggatgcaaattagagtcaattcttggccttggagcagaacttgagcataggaagagttgttttgtcttctcaaaccaactccaacacaaaagatttgcatgcctcgatgccattagccttgaaaaactctttcaaccctgaaccgaatcgcgtctgtgtatttcccttgtacatgactaaattcactggccactctactccatgct

SEQ ID NO: 22621 - DNA, 853 bp, Arabidopsis thaliana
acacccatttcaacacccccatcttaccatgatcgctcatcagacttctcctttcctaaatatggggtaacggcagtatttcttgtttttttaagttcttttttcttaccataatgtcaaattctcatatatagtgaagtgttcagtcagtcatataggcaatgatagtgaatgcacttcatatatagggtttgtgttaggtatggcgttagaggttgatggtatgcatgcatattattgtattatgattttaatttgctatatatgattgtaatttcagtggtttgtaccaagaagaagaccaaacggcgatgaggaggaacaatctggatctgactcttgaacccatttacaattaccttggctgttacgccgcttgaatagactacatcgatctatatcaatctctttaaaataatataagatcgatcctctactcatgatctatattaaacaccggttaattaatatatttttggtatgtccttatatcatatcaacatgatcaagcctttttccaattcaatatatcttgtatttcggggagcaatgaataaatgtaatatttggggactgagagagctagaaagaattgttgttcaaaccttttctatattgatctcatcgttacattgtaatttgatttctttcacacaaaaaaaatatttgtaatacgaatttagtctttgatgatttgaactttacttggtcaaagtaaatcacagccttagaaggtaaattttgaattgaaaatagaaataaaaatgttgggaacgtgacattcggtttcttctccatttgcttcatgtaggtgcgtgatacgatcggaaatgagaattattgggcccttggg

SEQ ID NO: 22622 - DNA, 756 bp, Arabidopsis thaliana
taaaaatatctatttgatatgtattttgatattaaaaatattttaattcgagttgtgtactcgtaaattatccaaaagttttagcagaaataaacatatctacgtatatgttggtgttgaaatttttttgttgaatttggctagtcagcaaaatttagttttatgcaaatggttactgcagaaattactgaatctggtttagtgttaccatttacaccctatatttccgtgaaatttgtatgtttaattctacttcttgcctctaaatgcacgatcttttcagcacttcgaagaggttaaagtgacttttacccgatgagaagggaattgtgtggcagatagaattgctagggaatctctttcttttctgaattatgatcccaaattgtattctatattgccggattgggttaaagcttatgtgtattcagactcttgtgtaattgtaagttgttgttgaaccaaaaaaaaaaaagcacgatctttcttggtactcgtagtaacaatagatattttgttgagaattaaaaataaagtagaagagaaaccagtaatgcgtcagacgtgattaagcgaactatataatataattgatcgataatcgtttgctagtgcgttaaataggtgtatagtaaaatgaacctcgcgctacacgttattatttgtatagtaaaatgaactattattttcattgccaaattgtagtacttgcaatataaatataacgaatcggtctacgagctaaggcacaaaagc

SEQ ID NO: 22623 - DNA, 508 bp, Arabidopsis thaliana columbia
attggttgacatgtgaaaccaatatttaggttaaaatttgtcatcttttgtatgtataagttgagaaccgatcatgtcatttagatcacattcgagagggagtagtcaattcgcagagaaggtaacagaggatcctgtaacgtacaagacagcacaaagcaccgtgacgtgcatttaccaagcgcatatatccggattctggaggaatgttacggtattgtggtcaaagaatctcatgaatcattcgcttatggtcatggtgacaaacgtggaaggcgatatgaattattgttgcaaggttgatctgaagccttggcatttttggaacaagaaaggctacaagtcgttcgatgtggaaggtacccggtagaggtgtattgggattttaggtctgcgaaattcacgagtagtccagagccgagctcggatttctacgtggctttagtctcggaggaagaggtggttttgcttgtgggtgattacaagaagaaagctttcaagagaacaa

SEQ ID NO: 22624 - DNA, 978 bp, Arabidopsis thaliana columbia
ccttacttgtgtctcttttagagcctcaagtgagatcaattaccaacatcttgactcaattatattacgggttttgagtgaagttcacatcttagatttttgccatttgaatctgtagatatgttgcaatcttgctaaggatgtctctgttacctctagtgataataaaatatctcacatcttttatttttaatgtatccagcgacttgtagacggggcggatgagtacttgcagcttctggatgtggcaagcagtacaatttgtgccctctcagaaatggctcaagacttctaatgcaaattctgcttgaattggacctgtgccttaagacttatgagactatcatagtgtaggttttgataaaaagttggagcgttatgacgttttactggttacttatctgttattgttttaagaaaaactattagatatatttattgcatcattacttaagtctatttgttttgtgggtaagatcattaaatatcattacaatgtgaaatacatgatcgaatcaaaataattaacatctcttataaccaacaaaatcatgaccagatagcttgatggacattgcttctgttgtaagaattagtgaatccctttatctatatccaatattgacaccgtaaaaggagtaatgtgtttctttactagttggatatatatacagtgtagatcccaaaatgtaaatataaaaataaaaaatatagtagatttatataattatatttctccatttaccacctctaataatcaaaatagtaaaatcctacgaaaatgtaataaaatacaagaggattaatatacatatccacataaaaggaagattcggatacacatccaaactatagaaaacattagtaatgccataaataaataaaaatgctgtcaagacacaaaattcgttgaatgttatagtcttcacataaaactgtcataaatctggatacgttctaaaaataattgatctaatc

SEQ ID NO: 22625 - DNA, 545 bp, Arabidopsis thaliana
gattatacacctctccgagtgtttggtacagcctgctacccctgcttgagaccgttagcaaagaacaagtttgatccacgctcgttgcaatgcgtgtttcttggctatcacaaccaatacaagggataccgctgtttgtatcctcctaccggtaaagtctacatctctagacatgtcatttttgatgaagctcaattcccatttaaagaaaagtaccacagtctggttccaaaataccagacgaccttactacaggcttggcaacatactgatctcacaccaccttcagtgccttcttctcaattacaacctcttgcaagacaagtgactcctatggcaacaagtgagaatcagccaatgatgaattatgagacagaggaagccgtcaatgttaatatggaaactagctctgatgaggaaactgaatcaaatgatgaatttgaccacgaagtagctcccgtactaaatgatcaaaatgaagacaatgcactaggacaaggctcattagaagatctccatcccatgattacaagatcaaaagatgg

SEQ ID NO: 22626 - DNA, 975 bp, Arabidopsis thaliana
attacgataagaaatcttatcttgaaaaaaaaaaaatacttgatagattttgactctttggaattgtagtttagtcgtgtactagtgtctagtggctagtgcatgtgcggtgtcataaatttaaatctaaatgtgatagtgagcgacaaaattttgtttctttctaaaagataatagtatgattcaagaaaacacaaacataatttatttcattttattcataaacacaaacacaaacataacagcagaaaaatatataaaacaagaaataacataattgaagcaaaacaagaacatgagaacaagtttcaaagattgattcaagaagaaaatttaagaccagaacctttaaacttctcttcaatggttctatcaatttcctctgccaatgactcactcaaagtatctctccatcctccaatctctccttttctaaagaaagttttagtctctattccatttggcaatttcccttctttgttaacttccaaattacttaaactctcaaagctacacaacttcacaatctctctcacttcttcttcttcaataaagccacattccaagaactccgcgatccgcttcatctcaacttcggtctgcttctttagctcctcgtaagtaacaaacaagaccttgttcggattctcgcggcttgcataccagtactccaatatatgatcccaaaagggtccacctataaacttcccttcacaaaacgcttcaaccgctttttcgataggataatccgcggtttcctcaggagctagctttttcccaaaatgccataaggacacaaacatgtccttagggttcctacaacaatacacaatcttacaagacgagctcttaacagactcggggagcgaaagatgcgatatgtgcgtgttcatcagtcttggagaaggcaaactggagaaatcgaaatctggggactcgtagtaaactccttccaagaagggcacaaggatgatg

SEQ ID NO: 22627 - DNA, 1002 bp, Arabidopsis thaliana columbia
tatctgccttctttctaaccatttttatttgttatctgttatagatatgtgaaccgggcgttgtttcttcttcacttcacttgtgggctatctcacccaaatactgctgccacatatatcaatgtggctatgatggaaaaagaagtagggaatgatcatctagctctaaggtacctgcatgaagctctaaagagcaataaaagattgctaggagctgaccatattcaggttcctcccttatctatcttgcctcaatttgcgcgcattcttaaactaatcatgctttctgtgttttactttgccagactgcggcaagctatcatgcaatagcagtggctctctctttcatggaagcacattcattgagtgtgcaacatgaacaaactacacttcagatacttactgcaaaacttggagcagatgaccttcgtacacaggtgattgatttgcttctggttcattcgcatacaaatctcagacgaatattaatttcttactagcaaagtaacaaagtgaacgttttgaactctgagacatacatgtttgttttctccatttgtctctcacaggatgctgctgcatggctcgaatattttgaatcaagagccatagagcagcaggaagcaggccgaaatggaatcccaaagcctgatgcttccatcgcgagcaaaggccaccttaggtactaaaatggaaactcctagaacacataaaggatatggtaattatttcattggcaccaaagtccgaccttctcttgcagtgtatcagatctcctggactatataagttctgatccagacactaagggaaatgttgctcacaggaaacatcggcgtgccagggtaattcctaaactctaatatccttgtttcctcaggtcactcattttggattttgttgacaaataatacctgaataaaaaactgtcaattgtgtagactcttcttgaaaagtttgactatgctgattggtatctagatgtatgctaaatggaatatg

SEQ ID NO: 22628 - DNA, 493 bp, Arabidopsis thaliana
aaaaccccttcacatctcccacttgttttgcatcacaaacatttcttccattacattaaaactccaaaaaattcatttttgttttcttttagagttcacaagttcttcgttgttcagctactcccactgtcataacacgaagtgggtttttttctgatcaaagaacaaaaacaaaaatggatatctccgccttgtttctcactctcttcgccggaagtctcttcctttactttctccggtgtctaatctctcagcgccgctttggatcttccaaactcccactccctccgggaacaatgggttggccttacgtcggagaaactttccagctttactctcaagaccctaatgtctttttccaatcaaaacagaaaaggtcagtgctttaagaaccgaaaattttataaaatcgaaatttttgaaagaaatttgatgatgttttatgacaggtatggatcggtgtttaagactcatgtattgggatgtcatgtgt

SEQ ID NO: 22629 - DNA, 1547 bp, Arabidopsis thaliana columbia
ttgtcgagtgtggacttggccagagccgacttaactgcgtctacgactcctaggcccttctttgaggctaggtaagcagcattctgtcaacaaacaatgcgttagaagctgccttgagtaaatttagaagcattttggagttacaaagtcttgcctcgatgttgatcataactccggtgacagcctttgctttgctgaagtcaaggaaatccgcaagagtaatgaactttccagcgtttttgtttgctggatttctctggaagcccgtggcagtgaaggggttctctatttgtgctgaatacaaagatatcccaatgctcagtgacttagttgagaatgagatagtttcagaagtctatagtaaaacaaatcagtttcttacgcttcacagactggatctcggcccatgtaagatcaaaagagaagattccgttggtaggctggatctcaggaacgctggtggctcgggacatgaaagtagtcctgtcggtggtacttgctgagaggtctgcagcatcatggcagaaagcgattccgtatttggacatctgaacagagcagtcaattatgtatgctccatcatcgattgctttctggtaagccagatcagtgcagcctggatagtctccgcttgctccattgtgagttataaccaacgcatgccctgctttggggagattgccattttggtgagaaaagcaagctgcaagaaaacagacgctttagcttcttcttaataatcagctatctgaggaaacgtatatagcaagtcatctcactgatggattgtgatgctgttggcgggaaatcagtaatgacgccatcaacagaaaactggccattgtccacaaactggagatactcagcggagggatcatagctgtagttaaagctggtgcgcaagtcattggcaaaccctgaagcatagacctctagaccggctttgtgggcatcagccacaaaagtggtggcgggcttaaggtacttagctgagtcaatgggccaaatgtagtctttgggcacaagaacgcctgaagcaaaggccttgatggctgcgaggttctgctgaatctcactgtacttcttgttggtggtgggctcaactgcctctgggtctttgaactcgaatatgagctttgtcttggccctgcccgcgtccatcccgatgctcttcaagaaaccaatctctggagatgagatgacattaatgccgcggaattgcaagcttctcaggtactcggctgggctcagcttgtgttccatgtagaaggcatcgtactgcacatttgcattgtttgttgttttgatgaatcaacaaaaaagctccatatgttggttaatcatgttctcaaagagaagaaaacatacctgaacgctcaaccaaaacttgggaggcttggttccaaggacgtcctccactgcggaaaccgacatttggccgtcgaagatgctaggccgagagaagatgttctggaccactgcacaataacataaaagatgaaaatgtgtggtcgtggtggtgagcattgaaggcatgatttagagca

SEQ ID NO: 22630 - DNA, 892 bp, Arabidopsis thaliana
gtcagtgatcaccaattcgtctcgatggtctcgtgccaacacgcttttatccgccagtgcatctccagcgatggtccattccgtcgtgagattcctgattcactcctcatattcacgcgctctgcgtcaacgtcggaacacttacacctgactggcttccgtcaatgaaacgtgccgctgaactcgcttctcagctccgaaagccttgggttcttgatcccgccgccgtgagttgctccggattccgattaaaagcgtgtttggagctcatcgagctaaaacctactgtaatcaaaggaaacggttctgagattattgctctctcctctgcttcacgtggacaaactaaggtatatattgtaacatcacactgtattgagattaacaatgattcgagaattttgttatgagaggttttgatgactctgtagtgaagttgttttgctaaagtatgagttggtatttgctagggtgctgatagctcacatgaatcaacagacgctatagaagctgcaaagtcattagcgatgtcaagtggtgctgttgttgcagtgtcaggagctgttgatattgttactgatgggaaacaggttattggtgttcacaacgggacgaagatgatgcaacagattactgcaactggttgttctctagctggtttgattgtagcgtttcttgctattgattcatcacgggtactggaagctacggtttccgctatggctgtctttggcattgcaggtgagttgggtgaagcgatggcgaatggtccagcgtcattgagaatgcatttgatagattgtctttatgggttggatgaaaccacagtgcttaaacgtgtgaatgtgaccaggttgggttgatgtacatgaatcacgtctttgaaaaagtt

SEQ ID NO: 22631 - DNA, 1029 bp, Arabidopsis thaliana
tggaaaatattaaaaataattgcttcaatattgcaaagctttgatattttagaaaacaattttatttaataaaagtgatatatatatatatatatatgtaaaagtaaatcaaaagtaaattagatttaaaagaaagtgagtgtataagagacaaaacacgaaaaaaaaaatatgattgaggatgacaaatggattataatttcatatatatacataatgaattcacccatgtaactgatgaaaatttagggggataattaatactcaattctagatttatttatttgcaacgtatccatctatacctagagaatttttaataatttgtaagcaaaaaatcttgaaagaccacaaatggatttgaatttgttctggatttgtactgtgataatccattttgctttgcttgattagtttttactttttaccattggtaataatttgggatcatgtttagttgtttactagataaccaattttgttgggcctgatccaacaattttgccgattataaagtaaataagtgaatagttaagcccaatataaatttacgagtgacggatcatctgtgttctcgaaccatctttttaacgaactctctagaaccctttttctttttcacccaaaacccaacctcgtataaatctcaccaatccatttcttctcttcttctttgcgttttttgtttggaactgaatcgaaaaagatggatgctaatttcgagatgcctccagtcggtggaatgaacgacgacgacgacatggatttcggtgacggcgcctcgtttcttaaagtcggtgaagagaaagagatccaacaaggtttgaagaagaagcttcttaaagaaggtgaaggatatgaaactcctgagaatggcgatgaagttgaaggtaattaattaatcgattcagatactaatgcttttcgatttaggtttttttgaatcgaagcttgagcttgatttgtttctgcagtgcattacactggaactttgcttgatgggacgaagtttgattcgagtcgtgatag

SEQ ID NO: 22632 - DNA, 545 bp, Arabidopsis thaliana
ctgaacattttttttttctttgtaatttcaggcggcacttgtggcaagtagaagagcattaaacgagagaaaaggggcactaaacacagtacacgagattcttgagagattggaggcccatctaaaggcggatggccaattcactgtacgcacttggttccatgatgtgttttccttattcacccctttcgctttcttttctctaataatttcatttcaggttgttgcaaacatgagaggaaatagtgctcaggaagtggctgagcgtgtgctgagccaaccatcattgtcaggattgcaggtaatgtttcagaatgtgggagttcttaagccttagctttttagttcttgctgattgtttatggggtctataacaagcagggaccgacaataagcccagtgtactgtacacaaaatggaaaagtatcggttgactactatgccatcgtgatttgtgtccaaaaaaggccctatacgactctgtgaagcagcttagagcggttagtaatcctgccatttctctcttagtaatccctgccattttt

SEQ ID NO: 22633 - DNA, 1109 bp, Arabidopsis thaliana
tcgctaaattttaggtgtggaggatcccaatgatctcgtcaaagtccttgtcacctcggtagttgatttctcggaggtaagtgaattctccgtcgttaacgtttgtgaccgttctatggaagacttttttgaatggggtgtccaggggcaggggtactcgagccgtcatggttggatagttgaggtccgcgtcgtggtctatctctgtcttggagcaatctatcttgtcgcttccaacgtgtgatcttagcttctcggtgttgtaacctagtttgcacaagtaatctatgtagtcttggtaatgtgtttcgtagaccaaacccgggtctcggacttttgtagcgtttaagtgacctgacccatatgcaaactcgttgtcgtcatctgtcatttctgaggctgcaaagagaaaaagaatattcaaatatatatactacaatatacagatgaattgatctgttattggtgcattttgggacttacaagtggtcatgagggcagatttaatagcggatggagaccaacgtttgaacgacttgaggtacaaggcaagtccagtggcgtgagggcaagccatggaagttcctgacattatgttgaatctgagatggcggtaatcgttggcggggcggtctgacgatagtttcacattctcaggccaacccgctatgatgtctaaccccggagcagctatatcgggctgaaaacagttgttcatatgagaattctaaaccaaaactataatgatgcatttttctagagatcaagttgacgtgtaaaagaaaagtaccttgagaatgtttgctaggaaactgtcacaattaggacccctcgatgataagtgagcaacagttggaacccatccctcttctcgtggaatctcctcggtcttgtgaattttggctaaacgttctttgctgtagtaggaatcaacacaaaacaaaattcatttctttatttaactttgtggagaaaacaattaattagtcttaaatttcttatatgaccacttaatgaatgtcgttacctttgatcttttttatagtagtccatagtttacgtttcttttgttcgtccaaaaatatagaagcgataggaaactgtaactt

SEQ ID NO: 22634 - DNA, 1003 bp, Arabidopsis thaliana
cattggtatcaacacaacataattaatatcttaatccatttttcgtttatctataaagtttgattcctctggttaaaagttaaaacaaggtcttgatactaatcatactatatacagtatatactaacgttataagattataggtggaaactacaaatcgttattattaaaatagatatatgaatctatctttcacatatttccaaagatcgaatttacacagggcataacaaaataacaaaacaaacacatccctttccccaaactccgaaccagacgcgatagatatctacaaactttctttgactacaacaagcttttaatcaccatcaattctagccacgtgtctcgttcacagaccatctaaaattcaaaccatagttttacacgtcgaagtctgaggatcccacaacgccggcaatagatattttctaccggcgagacccaaagcgttgtaactcgctccactcgtcttgtctacgagaacccgacccgcgtaacccgggtaagcacccgaaccgaatatcccggtacaagccgagacagcttctggagacggattcgttacggtgttaacaagaagagtcgcgatgtttataatcattccgtcaactccgacgtcgccgttaggtgcgactaacggcggagactgaggtccgtagataggctgatgaaacggccacgcgcagtaaccaggacactgcgtttcagagtttccgacccacacgtaagctccactgttaacggaacttgactttgacccgtgagtcccgcatcggttcatacagagtccctcaacggtgacgtctttcgccgttaagacgacggttattgaccgagcaccaccagcgttaagtttgcttgacagagcacgaaggtaagggctctttagggattttccgagagggtaattctcaaggaggagctgtttaccgacaacaagagttgaaacgccggttttgtacttctccgtcgtcttccaccacgacgcgacggatggagg

SEQ ID NO: 22635 - DNA, 926 bp, Arabidopsis thaliana
ccgtgatcatgaacagatgtattatatagggagcttgcttcgtcggcacatactttgtcttctcatctcctccattattttgatcttatcgcaacagatctctcatctccttcacttgttgactgtgtaagtctatccgattctttcgtcttccctggatttttttctccgtcaacgatcctttgttcagatcgatctgtttcgtctagtctcagtttcaatttcgtgctttgattggtttatgagtttgatttattggaatatatgatcttatcttatccatggttgacgatcgtgtctagaatcgaagttgctgaatagctttgatcgtcgttagcttatatgaattctgatggtttttgttattggatcagcttaagattattcttgttgatttgttgttatttgatcaaattttgtagttataccacaggacaatggctgacaaagatgaagcagcgacgcgtggaaatgattgggaagttgtttctcttactgcttcagcttacgctgctgctcctggtcctaaaccagtagtggactcgaaagatgatgatcacaaggaagttactccttgttacgaagctgagacatctcatcccttatacatgtctcgccactttgttttcccaccaactggtcagcttgagaatactagtgaccttaccgaggctagcttaacggggtctcattgcaaggaagggagtgatttgagtctgaaagggttggatttatcagatgatttcggaggacttgagttttccgaggataaaggcaagaaagaagaaaacatttacacgacagctatgagttctctggacgatgaaagagctatcggtggctcacacgtgtatgaacctgttgaagaaccgccgagcctgtttcccttctgatgttcacttgatctgaacctattaagatgatga

SEQ ID NO: 22636 - DNA, 605 bp, Arabidopsis thaliana
tgcatcgctcatcatctgctcgaacgcagccttggcttagattagctctcagtgcgttctccctcgcaacctgaagcgctcggttctgttcagcgagtttctctctcataagctgagattcttcaagaatcacggcgtgagagattgcaaccgccacttgatcagccaccaccttaacaatctcaagctcttgataagtccaagcctgcggctgtctcaatggaagcacacacaccaatatcgcataacacatgtgaatcgcctctggtgtcccgcctttaaagttacaaacccgaagcatagggactcttatcccaaccgtaggacctgacttccctcggctagtcactgaggcaagcacagaaccagggctcaacatattcacctcttcgcttctcttaatcctcacaacatcagactcactaatcggtatcgagaacccagcataaccaccaaaatgctcattctcattctcatcatcaatcctcggtcttaactcatgagtaagattcatctccgtcttgatctcattcgggatccaaaccgcacagttcttgagcccagagtcttggacaactccacaagcgtagtgtatagaatggtgt

SEQ ID NO: 22637 - DNA, 1105 bp, Arabidopsis thaliana
taatccggattcattgcctttggttttgtgtagattcgagttagatccaagtattcccatatcttgtccagaagtccatcaagattccactccagatgcgcactgcaagataaataaatttatatcttaatggcaaaagtaaacaagtttatcgcaaatcctgccggtaatttaacaacatttacctgacaggacagtaatgaggaagtttgtccaaaatttcaagttcctcaagtgtgattgaatcgatcttgttgacagcatagatacagggcatataaatccgactgccctcgatgacatcaatgaggtcatcagcggttgcatcgtagcgcagggtgatgtcagcattgtgcatcctgtactcaccgcaaatcgccttgacggtgtcaaggtcaaggtgtgtgacagcgactgtagaagttagattgataccacctttgtcttttttcctaaatgttaaatttggtggctccttgttcaacctacatagcaacagtccatgatcgagtcagactatctaccagaaacgatcaaatatacagtgtataaaggttgttatataaacaatctataccttattccgaatccttcgagctctttttcaatgagacgcttgtgagtaattggttttatggcatcaagaactattaagatgcagttgcatgtcctagccgtacttataacctggaaatagtaaagtgtgaaagatgatcaaagagggtcaaaatataaaatactcaagagatttagactcgacttacctgtcttcctctaccttttccatctttagcaccctcaataataccaggaagatctaataactgcaaacacatagaaggggacataaaaaagagtattagcatcagtgtccaatgaataattacaggtcgtttcctgacttaaactaagtaccaagaagtcattaaaagatcaagcaagatacatgtttaatatagaagtaagactcgagaaaagataattacaagctaggacatggcatatgtagccaaggatttcattgtgtttcacaattacaagacagaggaacactaccaagaattacatttttcccccaaatacagattacacagcgcatagatgt

SEQ ID NO: 22638 - DNA, 570 bp, Arabidopsis thaliana
ttattatatttcacattcccaaagtttctttcttttgttccacattcccaagcttttctttcatcccaactttattttcttcttccgtctctgcaaaaacccttgctattctcagaatcataaacaaccgccatagtgtccattccttctgcatttcacatttggtcgaatcggataaaaaggtcttctctttgtgttggagtaacgatgaacaagagaagtgaatcttatctagaagaagaaagatgagatctctgagcagtgtgggacttgctctaagcatagtctttggttgcttgctattagctcttctcgctgagctttattacttgctttggtgtaagaagaggtcgacgacgagaagacctgattttcgaaatgactattctacccctggaaccagagagcttctcttcatcttctgttgcagtagtagcacaaacccttcttcttcttctccttcttcttcctctttctcaaaccctaaacccattgacactcaacaacagtgtcctcttaataatgggtttgagaatgttggtggtccagggcttgtgccgaggtttctgt

SEQ ID NO: 22639 - DNA, 500 bp, Arabidopsis thaliana
tcattgtagttagcaatgccgccgataaaatgcactagagcatcagaaatttcaacaaccttaaaagaggaaatagttccgggagagagggactgaatcggctggcgcacatgtaaggacctcgccatttgctgtgacaacgtatgtctctggatccacggtgatctctggaagcgcatcattcagcttcatgtcgagttttgtgagctgcctcacgttggacaccgctacaaccctcttcttgagtccatatagttcttttaccccctttctcaaggcagcctggtttatgtaagaatacataaactatagttaatattaactgaatccacaaatgaattggggaaagaatggaagatacagagtgacaaaagattatatgccttgctgacaaatgcaacagagttttcacttccggcctttccaaatgctccaaacataggtcttgatatcacctaccatcataaaataaaagaaaggaccgtctttagagacgtgtt

SEQ ID NO: 22640 - DNA, 812 bp, Arabidopsis thaliana
caccttcacaaacaccggttttctcttcaccgtcgaagttcccgtcgcaaccgcagcagttccagtcgtcgccatcgcttcaaattacaatacccagatttcgcgttcgccctaatttggtggaatcgataaaacttttggagaagagaaatgggaatttagggtttataaagaaaagacgacgatgtgctctctcccaagacggacgagagtttttatcacctgcttctcacagtttcatgagcttgtcacgtgtcaatttattatttgatattaatgactgctctttatttattattacgtaaatgtgaaatattattacacaggtggatactgaaaagacactagtgactagactaataaagcttctttggtgctttggtttctgcaactagcaccaacgcttgctcttcttctgctgaccgcggtgaagttgacttatcctccggcgatttttgttgctccgggtgagttttttcttgttgcttcttctcctcctcatcctcggaatctaactgtagattctgtcgtctgtatctgatatactctactatgataaacactgcaataaaacgagtcttgagagaagttagattccagaatgcagtaactgcagagcctgctacgaatttcttgtgtgtgcaaactccccaagcttcaaccaatctcctttgtgcgcgctcaactgcacatgagcaaagatcagagaatccttggtgtcaatcattggaaccatcaaggagcctcgcagtctgttaatagagttatcgtttttggttaagctgacttgcgtctcatgaatctcgctttgg

SEQ ID NO: 22641 - DNA, 743 bp, Arabidopsis thaliana
cagaggatgcttgcgaattcagacctatcgcgaaagtatacaacagatcattcatctcgacacgatcgccactaatgtcgatcaaaaacttatcggctagatcagttatttcactcgcatctgcgtgaccgaagaaccaagcaatctcctcacgtaactctcattctcaaacctgaagaaataggcaatgtcgaggaacacgatcttgtgctgctccttaagctcgtcataaggtattctcaaaacatcttgaatcgtgttgcttgggctattagcaagagcactaagcttttctttccagtaactctcgtctttactacgaagctcacgagcaagcagcttgagaactgatggatgtcccatagagtaatccacaaactgttttgcaagatccgtgaaacttggctggtagaaaccgtcactagcagaaaacgcgtgatagttgaaatggtttagggcatcacagctactcagccccgggacgagataagtgctgttgagtccttgaatcaccgatttgctgctcgttgtgatcacaattctgcttcctgcttcagtccagtcacactcaccaagaatcttatctatctgactcttgtcacccacattgtcaagaacaacaaaaactttttttccttgtagttgagtctttatgtagtcaatcgataacttggctgtatttccatctatcccattgtttttgctcttccataacccgagcaataggtccgtgtctctagagt

SEQ ID NO: 22642 - DNA, 550 bp, Arabidopsis thaliana
tcacacaaatgcttaagaactcttcaggcaaacactgtaacagcaaatctaaactcttcctcttccacttaaggattttttcatctagaaaaactggtgcggtgtatcgaacatgcttcataagatcttggaacagatcgctctgaacatgtggaagagtctgggttgcaccattctagtccagaccgagaagattcaggaacacgctgggcaagcaggcgggctgcgtctttccaccatgaaacctcggtttctttctcttgtagtctgcgttcaacacgattcagagcagtctcaagcttcactaactcttcttgttgccttgtctccagtagttcatgcagctttttgtctagttcgtacggacacactccatatctttcatctgacaccaccatctctggtatatgactctttgtgacctcattgtcctacaaacacaaaagaaccacaagtctgagaatcaagagcctgtttcataattgcttaaacagttgaaacccaacttaagaagataaaagggttttctttgaagtactttaagtttgca

SEQ ID NO: 22643 - DNA, 550 bp, Arabidopsis thaliana
tataagactgacctgaagtaacatgatgatgcgctcaagcccataagttatttcaacagatactggagacaacggaagacttccagcctagaaagaagcaaacttcacaattatattgttttctaacaaccgacgcagaaaatatactacagaacaaaagataaaatctaccctaagaaaccaaaatgcaaaccgtagtctatagttaatttctagaaatgtttacataaaatgaaaattacctgctggaagtaagtaaattgtgtgatttccataccatccatccaaatctcccagcccaacccccaagcaccaagcacctgtaagaaaccgtatatcgtgtgcagtcattcacatgatcagacacttgcacgctgagagtataatgagaaactaaaagagatggaaaacgcataaaacatgggttcacacattaccgggctctcccagttgtcttctacaaaccgtatatcgtgtgcagtacatcaatacctacacataaaaatagtaagggaaggattatctggatgagaaacttcctaatgaaaca

SEQ ID NO: 22644 - DNA, 988 bp, Arabidopsis thaliana
agcgctcttgaagagtgccgtgaacttggacaaggcttccaacttgcagagaaggatatgggtataagaggttttgggacaatctttggagaacaacagacgggggatgttggaaatgtcggtatcgatctcttctttgaaatgctttttgagagtctctccaaggtatgttatgaataaagtctacttcgacattctcactgattatgactctgatgagccttttgtttatcctttttaaaaattggcttggttattgacttatgagtcaatcttgttggttgtttctaggtggaggaactccgtattttttcggttccatatgacctcgtgaaggtatgttccatttcaacaaaaggtgctgctttagattaaaaatgacacaagatcaaaatgttttcaaaatgaaggctaaatacgatagttagtagtaggtctgttgcttgtgcaagagaactggagaacttcaaatctctatgcagttgttatgcctcgaactgtagcaattaatgcctttctaattcctgtttttgctctgttttccagattgacataaatataaatccccggctaccctcggagtatgtaaattacctggaaaatccgatggagatcattcatgaagctgaaaaagcagcagagaaagatatgtggagtctaatgcaatttacagagaacctgcgtcgccaatatgggaaagagccttactccatggaaatcattttaaagaagctgtatgtgagacgcatggcggctcgatcttggagtaaacagaatttatgcatcaggcaagatggttgtcatgaaaacaaatatgagtaagaaggtgttcaagctgatcacagattccatgacttgtgacgtttccgaagctccttgatatatgaaggagatcaaataatggtacttaaagagagtaaattagtggtttttgcataatcaatttcaggagacgcttaagatgaacttaagggccttacatgatatg

SEQ ID NO: 22645 - DNA, 516 bp, Arabidopsis thaliana
gattctccgagggaatcaggaatggtagacgtgaatctgttgttgttcaggaaaatggcgtcgagatcctttttgaaaagctcaggagggacttgaccttcgaaatcattgtatctgacgtcaatgaacttaacagccggccacgagaggacaacagaagggaaaggtccgacaaaccggttgttgctgacatcaaactcgtgcattaggctcaacttctcgaaactcttaggtatgataccacagaaccggtttgaattcaaatgaaacatcgcaacatctgtcatcaaaccaagttcagccggtaaatgccctgcgatatccgcaccattcaaatcaacccccgccacaaccgcgacgtcaggatcatcaagagccggggcacagaacacacccgtatagccacacacatgagggccatgccagtttcctgtggtgttaaacgggtctgaatacaccgcctttttccaggcttggagagcaatatacgctctcttaagcctatggtttgcaaat

SEQ ID NO: 22646 - DNA, 770 bp, Arabidopsis thaliana
atcccatattacagatagatatacctttttgccatcgtcaattagaacagatttgtcgcaaagagcgaaatagagctccttcttcgataagaatttgaaagctcgggattgagaaatcaaagattcatactctggcggaataaacttctcccatacaatatctgacttgaccgccgaagcaaaggttttcgaaaccgaagcaaggacgcacgcatcttgagggcttgtgaaagagactatgattgagacacattcttccggtaagtcatccaactcagcaacgccgtgacttttgtcggaagctgagagtctaagagtcttcttaactcgttgtacaattttacgaaaatgctcatgcatgcaccttgttttggtcattatcgtctctcacaggagtcgttggtttcggacttttttggtttggaaaaattctaacgaacaaacccaaattataaagagtcaagtaaggtcgactttgtggaattaaaccgtgttagagtggaataatatgtcattcccgtcattcttattataatatagtcttgactcgttacgctaacaattactagaaaaataagacttaaaaaggatatcatcacataaacaatttagaatgatacatccattcacctatcttacctttcttcgggtttcctccttagaaactactcatcggaagccggatcaaagcatacggcggccctggctaagaccatacggatccaccactctaccttcagcttataaggggacatccaaatccaaaaata

SEQ ID NO: 22647 - DNA, 1955 bp, Arabidopsis thaliana
agcactacgaaagaagtttactcccaattatattgtcttttaacaaccaaagcagaaaatatactacagaacaaaatataatatctaccctaagaaaccaaaaaggcaaaccttaatctatagttaatttctagaaatgtttacataaaatgaaaattacgtgctgaaagtaagtaaattgtgtgatttccataccatccatccaaaatcttctcgcccaacccccaagcacctgtaaatcattcaaatgatcagatagctagtatatattaacaactgaccaagcacctgagaatatagtgagaaactaaaagagatggaaaacccaaaaaaaacatggttcacacattaccgagctctcctagttgtcttctacaaaccgtatatcatgcgcaatcacatcaatacctataagaccgcttaagaatagtaagggaaggattatccggttgagaaaatttccaaatgcaccataaaagacgaccttcacataatcaaaccttgaggaaatcaaaattaactctataaaaccacaaaccagaaccagcacatggagaaaacttcaatcaattgtacatatacaaggaaaggaacctatcctggttgcaattgagtgtttaaacacatataagtggaaacaaaagagaaggcattttcaaatgagtacctaaagcagaaagactgttgataaagagttgttgagagtttccaaggttaggtttcaatatgacttgaaattgagtgtgtctttgaagcctattgggattttctccatagcgagaatcgtctggacgtatgcttggctcaacataagcaacatttcatggttcaggaccaagaaccctcaaaaaggtacaaggattcatggtgcgagctccgacctcagtgttacttggttgcataacggcacatccacggaagcccaatattccttcaatttcaaaacaaaagagagtaattcaatttcaattcgtcaaaattttgaaactagagaattggagattgaaggagatgagtgagaatcgaacgaacctggagacgctgaatcacttagttggaatgcaaattggacaaggatccatttttattattttttttgtctaaaagctggttttcattacagtgaaattgaaaccggtacaacagctggtacattaaaagctgaatttaaagcagactttgctacttcatatgctcgtcgattgatatctctagaaacaaagaaaaatttgataaactcaaaaactgaagataaagaaaggatgtcgtgaagaatcccatagagctccttagattgagactccaaatttagtgctttgatcagctgttgcgaatctgaagcaagtgaaattttcttataaccaaggacgatggcctgctggatcgcaaggaaaaccgtcatcgcctctgccattaatggagatcgaacgttagaggaagaagatttgccttgtctctctgagttacaggagaaatccttgtagatccatccaaagcccgcctccttcgtctcggctctccaagctacatccgtataaacgcgaattgtatcaacctcaatctcgtcaattggatatggaattcggggatgtggaggttgatttatcaagatctgtgccgctagccattctcgggcttgagagactgcctgagagatcgcatctgagggtccgatctgcttctgttcaaagattcgtttgttgcggcacgtccaaatcgtccacatgatccacgggaagagtggtcctcctccaagtcctgtgggtggcaaattgatcagaagctttgaagattcaatacctttcctcagagtgataattctggacgggtcaataggatgtttgaaaggggcttgttcccaaattgagcgtgcataactacaatggaagaagaggtgagtatcagattcttcttctccacaatgtgtgcatacaactgtagatacaattcctcga

SEQ ID NO: 22648 - DNA, 864 bp, Arabidopsis thaliana
ccaaatcgtacggaatattcgaatacttttcattaatgacatagaaacttgttagatccaatctactaactagaaattaataaaaaaaaaatgaaatgaataaattatttaccggcagtagcggaattgtacgtggtgtaacctccttggacacttcgaccgccggtgataatggtggatctcattccatctccgaccaacattatgtcatcattatttagacgtacgttaatgttttcttgatatatacctctttttacgtatataacgaacctccctgacgtcacctttctccgtcccgccacgtcaatagccgcttgtaccgtgttgaaatgtcctgatccgtccttggccaccacgaggttggctcgaacggcacgcaggagtctcttatctttacgggaaagccacgtcggaaagcccttttgattagcagtggtgttgcctttgtttccagcggtcaagagggctccgttgacggctaagcagttgctaatgaggtgggagattttggtgtttgaaacgatgggtgtgatgaagtctgtgacgtttaaatcggatgagccacgtcggcaggtctcggtgtttgtaagcgcggtgctcagccacgtttgagcgtcgaagtcagtgcaacttttcgcggcaccggctttaggagacacgccatgcaatgtccggtttaactgcatgatcgtgtctccatagaggtcaatgcaatccgccaaaactgcttgtttcttgctatccgtgcagttcttgccggaattagtcaactcggcacgggcggatatgcccgatccatggctgcttccacagcattactcggaactcggataattgtgtcggctgttgaaaccagttgtg

SEQ ID NO: 22649 - DNA, 880 bp, Arabidopsis thaliana
taaagcatatgaagtttgcatatggattaactataataaccttgtttaactgcttgattgcatagtgccttagccgatcgtcaaaagaagaaagtatatcccttgcctggaaagaaacaatggacaaaatttcatatttatgaaacagatcatatatatagtagtttttatcaatgaagttataagctaagaaaacctcaatcagagtaacacgaatgtcgtctttcacatgagaatatctctgacgaacatctttcatgatgaaatcactcaattcaccactaaactcaacaccagttggcccacctccaaccacaacgcaatgcaacagcctcttcttctcatcttcacctatgcctaatatataaatttgcgtgtaatgatattagttttggttcaaaggtaaataaataagtggatgatgaatgtgttgtttactatatatacctggaacttcagagagcatgaggttaagaagaagcttcctacggatctcctgagcgtggtgaacctcacggaggaaaatggcgttttctaagacgccattaattccaaatgtggatgcttctgcaccacaagctagtaccagtttgtcataagctatcttgaacttccatggcttcaatgtgctagacccctcagttacagtctcacaatgcacctgtttaaaccaagagcatgattcacacatatcatatacaacagtccaaagcactctgctttcatcacaaacacaaaagtcgcgtttgcgtttacaatttggaaattttgatatacctaaatgtgaacgcaaaattagcgtttgaaacaatgtctaaacgaaactacttctacatccacaaattgtagaaaatccaaacataaaactacaaaaatagat

SEQ ID NO: 22650 - DNA, 491 bp, Arabidopsis thaliana
cgatcgtggatatgaagatatgatcggtgcttcaacagaaacaacatctttgttgctacgggacttctttttggcaattgcgagagaaggagagttttttttagtggcaactttcttcttaaccattttaatcttgagacaagacaagagtgggagagatagagacagaaaagagatgttttaagggtaagtgatgagattgttctaaagagatatgcaaagatatatattagaagtaaacgtttgagataaaaggatgtgagtaacgtgcatgttgttggaatcttaaaaaaactaattaagtccattattacaatatagattatagctcatagttgaaactaaaaagtctccattaaatccttaattatgtgtatatcaatatttacctggctttaattggctgaatttacctacggtgacgtttggtaatatgaggtgccgtttgaacttgtaagtatgtacaagaggcgtccctacagagcgttttt

SEQ ID NO: 22651 - DNA, 993 bp, Arabidopsis thaliana
ggataataatggtggtgggagctcaggcaatgaacaatacacttccggagacgccaagcaaaatgggaagaggacttgtcatcgccatacccctcaacagatccaaagacttgaagcgtaaaacctttattgtttttttcttgatttctaaactaataattgatattcttttattacaataattattatgataattgtttttgattttttgaatcaagttatttcaaggaatgtccccatcctgacgaaagacaacgaaaccaattatgtcgagagctgaaactcgagcctgaccaaatcaagttttggtttcagaacaagcgaactcagagcaaagtatatattcaacttggcaaatcctttttaaatatatcttcaataattttttccaaccaactaatatatatattttcatatgctatagactcaagaagatagatccactaacgtattacttcgtggagaaaacgagactctccaaagtgacaacgaggcaatgctcgatgcattaaaaagtgtgctctgtccagcttgtggaggccctccttttggcagagaagaacgcggacacaatctccagaaactgcgtttcgaaaacgcgcgccttaaagatcacgtaaacatatgatttgttccataaaactttcactatttctattttcttgttggatctttatttgaccatcatcgtatttttcatttaaatttacgaacaaaaatatataaatctttaagaaattatattcgatatcttgaaaatgtatataaaactgtaaatattgattgtgaatatagtagatatacatatacatatatgccactaactatttctttttgtgtgaagcgtgacagaatctccaatttcgtagaccagcacaagcccaacgaaccaaccttggaggactcattagcttatgttcctagccttgatcgcatctcttaccggaattaaccggtgcaatatcgacgagccatctagctcatatggccacc

SEQ ID NO: 22652 - DNA, 553 bp, Arabidopsis thaliana columbia
ttattagtatagttaaaaacaaacagactgatttattgctattgacgtgacagagaaatgtaacacttacccagcgaccaagatgagaggagagatagtccataatatgccctgatatatcttgaacctgtggggtttagctccaggaccgtttctttggttgatccatccgtaatggggacggattaagagcacaaatccaagaagaaaacctgtagcaaaccctccgatatgagcaaagttatctactccagggagcacaccgagccccaagttcaccgccacaatcaatacaagagttacaatcgtcacaacctagaaaaagcattggcaaaacaacataaattctaaagttcagatctttagatcatagatagaaaacaggtcttgaaggtatagtgagttaccttgttagaatagattgtccagttgataaagatctcagagagcattcctccaagtaaaccaaacacggcaccagatgctccaacagagatgtttgaacggaggaaaagagctgacaatatgcttcctcaaaccctgatatcaaata

SEQ ID NO: 22653 - DNA, 591 bp, Arabidopsis thaliana columbia
caagatttctccatgtggcgtatttaccaacctctgatgccctctgatcagattcttcagtcgtcccatgatcttcattattagcattgttgtctttattgtaactcgcaggatctaattcatgctaagcagaaaaatacgaaataattaattcttttaggatgagcaaattccttcatgagctagatactacaacaaaataataaattattttcgggagacgcctattaactattctaaagtgaaatgataatacatatcaagtcccaacatatgatgaaatggattaaaaaaaaaaaaattatggccttttgaaaacatctttgttaatttccttattgttctcaagtcccaacatatgatagaaaaagcttctctataactctattctgcaccctatttacttgtctccccaactttccacacatatttagttatttacacttatatatacatctatgtattgttttggtccctatttatttatgcatgcatgatttgtgagtatctttttacatataactattacacgtaaacataattcaaagaaaatacctgtggctgtggtcggtttgtgtgtggaaaagatgg

SEQ ID NO: 22654 - DNA, 604 bp, Arabidopsis thaliana columbia
catctctattcatgctatacttacgagcccaaatatgttttccattagacttaaacctttttatcttctcgccgtcgagtatacgatggagagtagcaactgaatttaagaccagctttgcgaatagtgattgttgttgaccattgtcattcccatttgcgttaaggaagttcttgttgtcctctttcatgtaaacgccttcaacacaattttctccatagtttttggtgaaaaatcgtttcacctccgcttgcgaaacaggaaacccacgagaaaatgttataaacatagtcctttcgttatcagttgcgatgcagctagcgttccaaccccatagaccatgagaacatgggaataagttgttgttgtagagattatccccaacaacaacatcatgcataacattgatgctcccaaacgtcggatggggaaagccggggatgataagaggatggcggagtctggtgacaaaaggatatgatgaagaaggtggaagagctcgttgaagaatatcagaaaatatttctagacaaacagtggttaaaaagtttctgattcctgcaatagcactgtatctggtgttgtgaaatatttgaagagatat

SEQ ID NO: 22655 - DNA, 571 bp, Arabidopsis thaliana columbia
caaatgcactgtttaccaaacacagacggtaacagtaacacacaaaacaaagagacggggagaaataaaccttatcagaatccaattcaggacggcgtttcaaagcgtcgccgtcgtgaagctgcagcggcggacgaagagcatgaggctgaggccccaatggtaatgaaggccatgtgcttttttactcttttctctctcaaccactgaacaatgagtaaagtctaatttttcctctctctttgcttctaaatttcagaaatggttcaaagacaatggaggacccacggaagactagagcgcgtgaatgtaacggtccaatgagaaaactactttttaattgataaagcactgaaaaattctgataaacacttccttagcatttaatgataactaaattactaagttgagttagaactccattaaatattctaactgaataataatggtatcagatgaatgaatactccaatcatatttcccaatttagatattaagcttaacttaaagagacttttctttgtcgctttagcctgaagtgttgcctttgtaagacaatagttaacgatag

SEQ ID NO: 22656 - DNA, 546 bp, Arabidopsis thaliana
acatcaagtggccaaactaatggaagaagacatgggctcggccatgcaatatcttcaagggaaaggtctttgtctcatgccaatctctttagccaccgccatctcaaccgccacgtgtcactcccgtaaccctttgatccctggagctgttgccgacgtcggaggtccttcccctcccaatctttctggcatgaccatacagtcgacgagtacaaaaatgggtagcggtaatgggaaattaaacggtaacggcgtgaccgagaggtcgtcttctatcgccgttaaagaggccgtatccgtttcgaaagcgtgataacggccgtttacttttggggttaggcagagagataccaaaaacaaagagaaagtggggtgaagtgggagataaagtcaaagtctacgaagaatgaggttgaggttgtttgatgtgttctctgaacgaagccatatttttcgtagagttttggttcttttacctacgcactacaaaaccattcaagggacatttctttttcttgtttaaatatatggttgcaatatgtttta

SEQ ID NO: 22657 - DNA, 565 bp, Arabidopsis thaliana
ctagtttgaagtgtctctacggaagtaaatagtgcttcaacagtgaccggtctaaatacaagtaacatacatacttcatatgaacataattgaattctggatcaagggtttacgaaagaaagtacctgtctacgtaatccttcagggctgcaaagatatttctcaggtatttcactatctgccatatccaagcagctgaaaagatatgatagattctctcgttagtgaaactggaccatgcagcttctgagaattatgtacatagtaaaagaaaacttcagaaaaaggctctcacgggatgttgagagcagcaccatgacgagacaagacggaagctacaggatcataaccatccctgagggaggtgttgtaataacctgcagttagttcagcggggtgtgaagatgtcttataccaccaatagattccaccaatttttgcaaccagcattacagagcttttctcttcttcctgacgtctccgcaagacatcggctgcctttgcaagaatagcatcagcatgacaaatcaacttcccactgtaccattcctacaatgaaaagcag

SEQ ID NO: 22658 - DNA, 659 bp, Arabidopsis thaliana
tcaaataaagtattatctacaatagcaccataaagtatcaccatcaaaaacgacgagcacatcacaagtgtataaacatataaaatttaccatttaattaccttatatttaatatttgcatacccttttgttcttcaaccggcgaaacactctcatttacgtcgttgacggtctcctccgtcacaatattctccggcactatcgcctccaccgccgtgaccggaggaaaactggctgccgtctctttttcctccggttgtttgtcaccattcgcattgtctaccgccatctcctcactacaatctcctccatcttccttttcctccggtttcttgctattgttttctacggttgtctccggctggtcgccgggaactacggcggaaacgtcgtttgtttcctggcaccggcagctttcttgtcttttaattgcttcgctatcttttcccttcactgattcagcttccgaaggtttcttgatcctcgtggtgtttcccgtaacaacatcgtgttttgattttccgcaacccatcttttaatttctctaataaaactcaattctttttctacaataacctcgtttttgcttgctttaaattgatttttttttgtgaaaataaaaaatcaaagtgttaatggaaaaaagatgaatcttttga

SEQ ID NO: 22659 - DNA, 516 bp, Arabidopsis thaliana
ccgtacacttacaatcccgatcacaaatgtgatccatccagagtatgaagaggtggttcctaaagagggaatgccactccagaaagatcagacaaagaaagggaacttaaggatcaagttcaatatcaagtttccagcgagattaactgcggaacagaaagctgggtttaagaagcttattgggtgatgattaaagcatctctgtcttgtgatgtgtggagattgggataaatttggtaatatacaatttatagggaattatctccctcttcattaaatttcgtgttgttaaacaagtcttctttttaaagaatagttttttcaagatttggtacatgtcctccataaacaaaaattgaagatcacaaatctttttgttatacaaaagtttttcagttcttgtctagagtatgaaattattctttggtaaggggagatcgatgccatgacggcgtgtagggacgctaggaagaaggcacacaaatgacgccgatgacaaaaggtaaactggtaaga

SEQ ID NO: 22660 - DNA, 1120 bp, Arabidopsis thaliana
tagagatgttttattactctatagcaatgattgacttgttttctcttttgtgtagttttatagaatttgagtccagtcctttcttactttctccttcttcttgtcaaataaattcgagtctgtgacagtttagtcagatttatacttacatatctataaatatacacccggttcaaattgatatttgtttctataaagatttccaattcgaaccaagtaatatgggatacttggagtgttcacatgttgctttcagatgtaattgttcattttccatcaaattcctctggatgcagtatttaattgattacaaatttggccaacttacacattgttactactagagtttcaatctatatcatgatggtgtattggtgttatatcaaaattaaaacgtgattcttatgtgaatttttatgttcaacattattgttttctttgggtcaaatgtaaccttttatctttttgtcatcaacatgaatgttccttataacatgcactttattagcctgtttaaagcaaaacgtgacaaaacataaatattcaattgctatatacggaaagcgatccagatatttgaatgattaatgggcccaaaatatctctctacgtcacatacataatcccaattaacctaaaagcttaaaccgactagccggttctaagacatttccggtttaagtatctgaatatagttttctctctctctcactcgtgtcctctcctcaaaatcctcagccgcatctcacttctcattctctagaaaaaatggcttcgtcttgtctcttcaatgcctctgtatcgtccttaaaccctaaacaagaccccatccgccgccaccggtcaacctctctcctccgccaccgccccgtcgtcatctcctgtaccgccgatggcaacaacatcaaagccccgatcgagacagcggtcaagcctcctcaccgtaccgaggataacattcgagatgaggctcgtcgtaatcgttccaacgccgtgaatccattttcagctaaatacgttccgtttaatgcagctcctggatccacggagtcttactctctcgacgagatcgtgtactgtagcgctccggtggtttgcttgatgtcgacacgatatggag

SEQ ID NO: 22661 - DNA, 576 bp, Arabidopsis thaliana
atgctttaaatatcataaagtttaaaagaaaatcattaaaattttaatatatgaaatgtgcctaacaactccatctaatttcgtacgttagattttactggttttactttctagatatatagcgttgatgattattatataaaatataaaaatttggaagttagaaagtataaataagtataaataaaaatactatggctatagtttatggcgtaatagtttttaatattgttgttactatgcttcgaattcaaaatcacatattttatgttattgacagtgtgaaacattaattaattactgatatcttactttttaacaacaaacatattctttaataaatgtcttcaatactactcacgtgttaaatattatatcatccgtcgccataatttacaattctatgacacggctaattctttttcttttcttttttggcaaacacacgactaattcatacgtttatataaattcaagtaaaaagaagaaacttacggtttcgtacaagaagtgctagtgcggcggagaacgttgacccatttggtgaaggggttggtgttcggcggctgaggatat

SEQ ID NO: 22662 - DNA, 953 bp, Arabidopsis thaliana
cagagaggtacatttttagttaagaaactctaatgaggctttaagactacacaaaagagttgaaaagaatgctcttattacccgattatcccgcctcctgttggtattataggtgttgatgtgacaggaggctggttcactgtttgtgttgatggagttggtgttgttgttcctgctgtcattggtgttgatgtcgatgaacctgtctggtatatacaagaaccagtgcctgttttggaacaacaatccaaaccaaagtcaatcctagccatctaactgaaaacaagaaagaaaaagagaaacagagtatcttctgttttttctcactcacttgggttggtgttaactaatgaggctgcaccgccaaaatcacagctttgtggagaaggattcttctggtaatagctgttgaaggcaaatgaggcatgactctgaagactgataggagaataacaattgccgccttgctgtagttgagagcaatccgcgatcccgcaggcatagtcaagagcctgttggagtgagacttgagaggctccaggcttggccacacaccagctttggcctgaaaccgatggagagtttgagacaacaggcggtgcaaccacaggaacaggtactgggaccgtccctgagggttgtgttggaggatactgagtcactgggttggttactgggtttgtcacaggtggtgtgagtgtaggaggaggaattgttatgactggaggtggtgtgagtgtaggaggtggaatagttgtgactggaggaacaataggaactgttgtggctggatttgttggcgttatggtcaccggaggaaatgtagccgtcggtgtagttgtggggtttgtaggaaagaccgttggtgggtttacacatcatgatgtgtagttgttgaagaacagtatgagagaagagaaagaacaagaaggtgaagacgaagaagtactctg

SEQ ID NO: 22663 - DNA, 583 bp, Arabidopsis thaliana columbia
cagaaactattgtttcccttgctagtttataagcataactaattctttttccctccacgaaaatcggaaagcttgacttgaatccttctcttatacgttgcacatcaatcattagcaaggcagttttattctcctctggtacgcatcttcccatgacctacgtactcaaagcaaatgaataatgacatgatcaatattcagatttttacacttggtagacaagtacgaaaaacaaccaatactaacgacataaaccctaagaagcaatgttcgtttttatattaaaacaaaaagaaaacttacaaatttataaattggataatcatcacaatatattgagatatgagtgatcccaaattcacagcttcggttagtcctcgcttcaatgcggtaagctcagcctccaaaggtgtaatgttggagtcatgatgaattggtcctttcatctgaaacaagagatcatctttcttcccgaaaattgcaccccaaatccggccgatgagtcacacttaccaacctttgaagtaaaggctacacaactgagactagtgctaatatcccggagaatttactggtgagggtt

SEQ ID NO: 22664 - DNA, 546 bp, Arabidopsis thaliana
gccaagactttgcaaactcgatcaacgaacactgtatgctcataaactctaacaaatcatctgtctgaaaaaccaatatttctttggtagaattctattgtcattactcattactaacagcgaaattaattaacgttctttttcttactcaggtatgaattacactaccaactgattacgtttggaaaggtattattgctctaagctttgaatttatcatatggtaatttcaagcattgtaggcacctgatcaattatgtgtctaaatcatgtgaattcatgtcaggtattttgcacaaagagtagaccaaattgtaatgcatgtccaatgagaggagagtgcagacactttgccagtgcttatgctaggtaagcaagctttcatgtacttatatgcaataattaaagataaaatttaggattatgggtaagtaacaaaaaattaggctcagtttcatggtagctagctggaaatagtattacaagaacaacataaagatcaaagacagaatcatggatccatatgcactatcattttagctcttg

SEQ ID NO: 22665 - DNA, 503 bp, Arabidopsis thaliana columbia
  unsure (1)..(503): unsure at all n locations
nnnnnnnnnnnnnnnnnnnnnnnctaaagacgttttttagcgttaacagaccgtcattggcaatatttcctctgcctaacccctgagtattatcgaggctgacttccgcatttgggctaatgctggttaacgcattgtagcgtgcattaagcccctcgatagccagcgttccccctgtaacattcaggtttccgccacctgtcagttcaccctgactgatcccacctttatttaccgtcagcgccccctctttgaacaaaacagtcgaacccatctgcccggtgaatgtctctaccgtctgcgtcgatccattaagatcgacgatggccgcgttgctgatgttcagttcccgggtgttgccaagtgcaccatccgcatcggtacgtaatgtccccatctgaacgtaggttgccccctgatagtcgttctgaccgttggaaagcgaaacctgtcgcaccgtattgattgccagatccccttaccaccgatttttgccgacatat

SEQ ID NO: 22666 - DNA, 455 bp, Arabidopsis thaliana columbia
ccttggaacctcgggtcgacagacatcatcattcctgattccatggatatgtgcgttagttataggaacaacacccgggttgacaagagtctgaaatgtgctgtacccaccaccagctatatcctgagctgcaatttcaattatccgctcatttttccgatgcaaaccagttgtctcaagatcagagactataaccgtgaggagcttagacagatctttatcttgcgcaacgcgttgctgaagattaccaaaaggctgtaccttggttctactctcttcatctataatcctggttacaggaactgttcctcccaacacactgctcttagtgttgcttctactaccttgtgtagttgtactcacgttacgtctgatccatcttgctttaccatcaacagaagaagctctaacatcaagcagcttcaagctagagctgttcttgatcatccatgaac

SEQ ID NO: 22667 - DNA, 522 bp, Arabidopsis thaliana columbia
aggaggatgcctggcttctgttcaaatgctagcaatgaacacgatggatgtaactgaacttgttgaccagtcaatgccacctcgtatccaagctgattatgtccagtgtacatcgccacgttttctgcaagagatgttagtataaccattttcaaatgcttgtcgtgtttagtaccctcatttggattccaaacccagtaactaggactgacaagagtaagttctctctcaatgcatatctccaattccttgactgtgtcttcacatctcctcattgatttggcattcaggctattttcccagcaccatttatttcttctctctcgcggcagagatgcccattctttgtacaccgaaagaagagtgaacaagtctccattctgattgcagaattgcaccttgaagatgacacagtaaaaaactttagagcatatttctaacaggttgtaagaagattttaaactacaaaagttcaaaaccctgtgaataccagtacatcacaaatggtaaataacaggaaag

SEQ ID NO: 22668 - DNA, 932 bp, Arabidopsis thaliana columbia
ctcactgtaattatatgtcaactgcaataaacttcgaaagatggattctgcttcttgtgtttgttacctgtcccagtgtccagagatttcatagagctgtttcctagaggaagattcaaagatcttgcctttaatggctcttttattgtttcctgtgaatctactgagaaaagaatcggatagtaactgcaattcggctccgagtcctgtctccggacactttatcacgatctttccggcccagtgagctcccattgccggcaaaaacgtcatgagaagttttggttggttcatttcgtaagtctctttgtgattcagaagtttcaccactcttttacccttcacctcaacgtccacgtaagcaccttttaaatttcaaaacccactttttagtttattgttgtatgttttgttaaagttgagttaaatttgttttatacgtaccacgaaatttaggcgtgaaatattgacataacaaaacgtctacgttttctttctcgtgagttgcatgaagagcagaaactggtggatgatgcgatatctgaagaagaagaaaaaatcaaaacgtaacataaattagtcgctatactaaaaattctttcaatatacactaacaagtaatctaaaacactaattatagaagaagaataaaacacttgcttgctctgcgagaacgttaatgtgaccattggacacgtggtgagtttcgccgatgacaggattgtatggagccaagccaaagatcaaaggccggagtgttgagatgtaccacgtcaccattgctttcatccgttcgattggtttgtcacgacgactacattctccgagtagatcgtgaccgtcgaaactgtatactatctcgccgtagcattggagctgcgatctcgctaggttcatttgaggtggaagctttcatggtaaatgaaactttt

SEQ ID NO: 22669 - DNA, 459 bp, Arabidopsis thaliana columbia
aactcttctcaaaatctcaaaaattatactctaaagaaactagagaagggattaaccttttgttctatataaatatcgaatcaagaatcaaagtataattgttttatatagctataagaaaaaatgggatcaagctaaaatcagaaccttcatgtttatgtggaagacataaaaccctagctagcttaaacaaaaaaataactctagtgtatgggtagagagagacacacacatacgtatgcatataaactaaacgatcttgtatagttgaatacttgacgagatttttttttaatatctatatatatacctgttgccgaggaggcggtgaagacggaggatgagatcttcctcgtccgacgtaattcctccacgtttaaccgagggtcggagatagttcatccaccgtagacgacagctctttccacatctgagtaaaccagctctcttaggaagcga

SEQ ID NO: 22670 - DNA, 501 bp, Arabidopsis thaliana
atccgagccaaggacgcctggagcgtaccgacatgctaatcaaagcttagagattaatgaagtggaacatattgaagactaatcaaagcttagacatatataaatagatatactctgttcatcaataaactaaactataagcaagattatctataacaaaagttaaactttatcaaaatctctgaagtataaatgttttagatcttcacaaacatagagattccaatcaaggcatatataaacctagaaacagagaaattatggaaagattgaacgcaatttcgagtgaaaacgatagagaaacgattacgaaaccctaaccaagagaacttatatatgtaaatgattaagatccttaccttggtcgttgcgagcggtgaaaagaatgcatccagtatcgtcaccaattaggcactcagcgatacgaggagatgaaattggctgctgcgtcaacgaacttttacgaatcgccggattaacgggattcgattcaaggacttt

SEQ ID NO: 22671 - DNA, 873 bp, Arabidopsis thaliana
taatcgtttcttagctttgaacattctcatgtttggaatgaatttagtaaaatcttacacatacattttctcgatttctgggtttaagtgagattgttgcgattgttctagttagggttttggatgtggctctgtcttcataccttgatatatctgatgttctattcatgaattgttactattgattaccttgttggttactaatgactaagaggaattttcagtttctctgagtgtttatatctgatgaagtctttagttgttgtgctaagagtttccatttggtgaattgttgtttgatttttttatagatggggtccgcagcttgagcaagcaacctacaagaatcgccagcgtctgtacctctcagagcaagtaagtttttagctttctcttgtatcttgttgtctcatcttctttatatacttctcatcgtattatttgtatttttcttggttgtgtcaccagactgatggaagtgtgcccaatactttggtcatagcaaattgtgaagttgttaagccaagggttgctgcagcagagcacatttctcaggtattatgtggtttaatactaagcttgtgtcctttccatatcctactccacactacaattggtttcatgtttgacacttatatactatcttctgaaaatgtgttctcagttcaatgaagaagcacgttctccatttgtgaagaagtacaagaccatcattcagcctggagaggtgtgaattctgcccactcttgagatatttctgtattgagattgttctttttagttctatttggtttgttaattgtatctgcatccctgtttcatctgtccatgaagttattcgtctggcacgttggtgaaagtgaattttgatgt

SEQ ID NO: 22672 - DNA, 527 bp, Arabidopsis thaliana
caaatgttatcatcacaaggccacggagacgaactgtcacttaaaaatttggggctacaaatgtgtctcgtgtgagaagtgtatttctattttttgtatcttataaatgaataaagagtagttgccaatgtaatatcatctacaagctacattctgttgttgttgcaccaccaacaccgaccctctacggggaaaatcttgagacaccaacagatctccaatcacacctaactcatcaaactccgtccactcactcaatgcactcaccacgtcggtccctactccggcgctcctccccaccacgaataaatcaaaagaattagcaatcgagagaaggagtgttgatgtgtcggaaccgtcgttaactgtctcctctacgtattccacaaaactatgttgtccaacagtattgttattgttcctcagaacctccttaacctctgccgagtccagcatctgatcccaccctgtagtcatcgcatccattttcgctgggattagctcaacactgtcaggttccattcgga

SEQ ID NO: 22673 - DNA, 499 bp, Arabidopsis thaliana
gatcccccatctaaccgattaaaaaagacactcttctgttaaagatgaatttaattgatgccaataaaaaagatgaatcatggagaaggtattaaccagcaagactagacttccagagtaatcagcaatgcctcccattacatcgagtcttccgggtgctctcgccacaacaatatcctcctgaatggccacaaaaacttcattagttcctcaaaacacacacaaacttcactgaatccaagaaaatgatacaaacctcccagttgaaaagcgcggcacgcgctaaatgctccctttcttgatgatggcctcctattttcgctaatgttgccaaactatccaagaaaccgatggtatctgaaaggccatggtgatctccatgaagaatttctcagtcacgaaaactctgttaataaaacacataggagcttaagaggtgagtaccattaagtcctttgagagatcaaagtatacaagaaacacacttggagggttctga

SEQ ID NO: 22674 - DNA, 1192 bp, Arabidopsis thaliana
gttacatgaacgaaattataacatagttccagtcttgtgttaccattaagatattactagttcatttagttgttagagattattggttctgaacttctgatgaagaataattgtttgattaagatttcataaagagaaacttcttttattcattgcaagtgttcttaatttagtgtttcttgtatctcaggtaactccagagttatcagataagaacaacaacaactgtaacgacaacagttttaacaattcgaaacccgaaaccttggacaaagaggaagcgacatcaactgatcagatagagagtagtgacacgcctgaggataatcagcagacgacacctgatggtaaaaccctaaagaaaccgactaagattctaccgtgtccgagatgcaaaagcatggagaccaagttctgttattacaacaactacaacataaaccagcctcgtcatttctgcaaggcttgtcagagatattggactgctggagggactatgaggaatgttcctgtgggggcaggacgtcgtaagaacaaaagctcatcttctcattaccgtcacatcactatttccgaggctcttgaggctgcgaggcttgacccgggcttacaggcaaacacaagggtcttgagttttggtctcgaagctcagcagcagcacgttgctgctcccatgacacctgtgatgaagctacaagaagatcaaaaggtctcaaacggtgctaggaacaggtttcacgggttagcggatcaacggcttgtagctcgggtagagaatggagatgattgctcaagcggatcctctgtgaccacctctaacaatcactcagtggatgaatcaagagcacaaagcggcagtgttgttgaagcacaaatgaacaacaacaacaacaataacatgaatggttatgcttgcatcccaggtgttccatggccttacacgtggaatccagcgatgcctccaccaggtttttacccgcctccagggtatccaatgccgttttacccttactggaccatcccaatgctaccaccgcatcaatcctcatcgcctataagccaaaagtgttcaaatacaaactctccgactctcggaaagcatccgagagatgaaggatcatcgaaaaaggacaacgagacagagcgaaaacaaaaggccgggtgcgttctggtcccgaaaacgttgagaata

SEQ ID NO: 22675 - DNA, 647 bp, Arabidopsis thaliana
atgtgcaagaccagccattaatcctcagcttccaagggaacaagttaacttagccgaatgggctatgctatggaaacaaaaaggtttactcgaaaagatcatcgaccctcatctcgttggtgctgtgaatcctgaatcaatgaaaaagtttgcagaagctgcagagaagtgtttagcagattatggtgttgatagaccaacaatgggagatgtattgtggaacttagaatatgctcttcagcttcaagaggctttttctcagggtaaagctgaggctgaggaggttgagactcccaagcctgtggctgtccctgctgctgcgccgacttcacctgctgccaccactgctgcagcaagtgaacgtccagtttctcagactgaagagaaggatgactcaacggtggaccaacactctggaaccaccatgtttactcagtttgctagccttaacggaagataataaactgatgaagcatttgcaccaaaccaaacggtgtgaagagttagaaaaatgaaacattgatcctcttgaggtaatcggatttgttgtataatttgtcaggtacatttttatctatatctcttatcttgctttgtaacggcaatgtattctacagcggtgtaataggttattgttgatacttagt

SEQ ID NO: 22676 - DNA, 582 bp, Arabidopsis thaliana columbia
atgagaatctagatggaatattttgatctgaaattggaagtttctagggagtaatgccgcaacccacatgttctgttttttcttttttcttttcttcaagtagtgttgcatgattcatacgtgtcggcagagatgtcctgagaaccgaattcaatgttgtagcagtagcaataagttcaaagaaagtccatttttttatattactaattctgttcttggtttatttgagctggtctttattgcatttcacctggattcagatactaataactgtctcaattatgtaaaaatgacaactttatgaaattcagtttcacaattatgtaattcataatcgatgaatgttttcttgagtctttatcatctttaggatttgattaagatgcaatttgatgaaaatactaaaaagactcatgtgttctcatttctctatgtagatacgatcagtacaagaactgagtgggcaaacatgtcaaatctgtggagatgaaatcgaattaacggttagcagtgagctctttgttgcttgcaacgaatgcgcatcccggtttgtagacatgctatgagtatgacgtagagaag

SEQ ID NO: 22677 - DNA, 470 bp, Arabidopsis thaliana columbia
acaaaaagcgaagaatgaatataaaaaggataagctgaatgagcaggtggggaaaagtggggtaaagcactgcgtacccggatctcctgtagctagatcctctagaaccacaagaatccttagttgtaatgggattccagctcatcaccttttgagattttgagaagagttgctctttggagagcacagtaggatgaaagttgtaagctgtgttcgggggggagttcttgtctatcggtggcctctatggtagaatcagtcaggggcctgataggcggtggtttacactgtggcggatgtcagcggttcgagtccgcttatctccaactcgtgaacttagccgatacaaagctatatgatagcacccaattgaatcgattcggcagttcgatctatgattaaaaattcatggacgttgataagaactctacatttaacagctacttaggatggcagaccttaaagtaaag

SEQ ID NO: 22678 - DNA, 519 bp, Arabidopsis thaliana columbia
ctttattagcatgaaaatatcatacttccaaaaagtaaacccgttatggggctgaccaagaaacgggaagcgagttatttagaaacaacagaacaaaggaacgcagaagaagagcgacgtgttaagtctcagaaccagcaatgcacaatgccctttagttcaagttgatgacatcgtaaatgaaactggcacgtttcagttagcaaggacgcttttaaactgagctatcgattcaatagccttgtcaaactcactatcttccaatgcaaatgaaaaccggcagtaaccagggattccagtccaggaaccgctgtttaagcaaacaccggtatggctgaggaacacatccctcatatttgaatccgtaagctcgacgatttcctgtccatctcctgctttcagctttacttttttgttgagataagcttttggctttgcagccattgagattccagctgagggttggataactcccaaccagagttctgtagtacctgttccaataatttaaaaaggaag

SEQ ID NO: 22679 - DNA, 492 bp, Arabidopsis thaliana columbia
gatgccattggacccttacactacggtaaagaagaacttcaagccatggaagatcataaacttaggtacctacagagttttattcctagaacagccttaagtttggaagacctggtaagagttgcaaggacatgggaagaaagggctcgcttttgttacacagaagatgtaagacttagtagcgatgaatatgtgaagatgttaatcgttgatgcaagcttcctagtagaacttcttttgaggtctcagtttgatgtatatagaggtatgctagataggatatatgggaagcaaaagatgattgtcgatgtgaaccatgacgttatgttacttgaaaatcagcttccatattttgttgtcgaggggatgtttggattgctacatgttgactaccatagggaacttccccctctgactcgaatcattcacaaccacttcaagaaattctggatgagcatccttcattttcgagaagcatttctgattcaaaga

SEQ ID NO: 22680 - DNA, 1154 bp, Arabidopsis thaliana
caaaatgatgaaatttcaagtaatgttcacacacacttatgtttcaatgtgaatttgtatttgtaagctaatattaacaactacaatgaaggaggataagtaaagtaaatgcagcagagcatttagaagtacacatacatacatatacatatccacccatataattacacttcatttgtaaaatatataaattttataaaatacaccaaaatatagaaatatcacacacatctccccgaccaccaccaaaaaaacatacaaagaaacaaatatatcaccttaaaaagtcaagttttttctattgcaattactgtttataacgacaaattcggtttggtgcattctttatgtccttttttaattatttatctgttagtttgtttttatcttccgttaaggttagcaaactgagtaaacatggctgttccagagtgttcatccacggccgtgccactgttctcttccaccttagcaggaaccggaacagtagccgcttcgttggtggtgactgagggagtgatcggagatggatcagacacaggcaccgagccaggtgtcaccacatcaggcttagcgttctcggtctcttctgctttgccctgagtgaatgcctcttgaagctgaagagcatactccaagttccacagaacatctcccattgttggcctatcgacaccgtagtcttctaaacacttctctgcagcttcagcaaacttcttcatcgattcaggattaatcgttccagccaaatgaggatcaatgatcttttcaagaagtccttttcgtttccattgcatcgcccattcagctaagttaacctgctctcttggtagctgaggattgatggctggtcttgcgcacagagcttctagaagaacgacaccaaaggaataaacatcggatttgtcggtaagttgttgtcttctaaagtactccgggtctaagtacccgaaacttcctttcacggccgtgctgacatggttttgtccaaaagctacatctttagaaagaccaaagtcagcgacttttgcaactaaagcttcatcgagaagaatgttggtggatttgacatcacggtggataatcccctgagctgttcctgtgtgtaagtagtgaagcccacgtgcagatccgatacatatctcgcgtctttg

SEQ ID NO: 22681 - DNA, 538 bp, Arabidopsis thaliana columbia
tgttccgcagatccctgaaaacataaaggaactgacgtttgtcaagagacaatataaagaaagttggaacatgcttctaggtaacaggataggagatatgattgtttttgtaacagtcatacacgataatactctcggttgaattcagctctctttcctgccatattctagagggaatggaaccactcagagcattgtttgcaagcgacctgtcacattaggtagacaacaaaacaaacaatcagccatcttcatatccaagatagaacgaacaacagcatttcagaaaccaaacaaaactcgctacaccaatcaaacagacttacagcttttgaagccgtggaaggcctgagaaatttgttggaatggttccagttagactgttattggatagatcgctgcagtattttcatcagaagatatcaaagttaaaagcacttcatttccaaccccaaaaagagaatactaatcccagtacattgcccggattaaatcaaaggccagaattatgaaaagcgctaaaagtttacatggttgt

SEQ ID NO: 22682 - DNA, 532 bp, Arabidopsis thaliana columbia
gaacatgtctcccaccacaacaccgtctttaccacagatccttgactccctggaacatccaccagaaaaatctcccttgacccatttctccaggaaattaggcctaaaacctggcaaacacttacacatttcctcattcttgctgttgcagctaccaaaatttccacaagcattgtatacactacattcatctctaggttcagcccaaatctgtgcccagaatctttctccatctaacctgaagtactgagcttgaccagaggagctcatggtgaaccttgtattggtatacaaagatgtgaagagaggaggcacagaggcattgtgaacagtaacagtctctgtgaaattggaaagaaagtaagaaatcgcataaggcatctcgtcggatcctatgaatttacccgaaattccggatttccagtatctcattgatcttttccaaatgatgaactgtttgtcttcttcttgatcgatctgaaaggtgaaatttccatgtgatggatcgttgaagcttctccatgatgataaa

SEQ ID NO: 22683 - DNA, 539 bp, Arabidopsis thaliana columbia
cgactctagactttctccctctctccagatttatgcatcgcccaataatctccatcaggaagatcctactcatttccaaaaacatatagcaaacataagacaaaacaaatgtatccttttactattccttgtaatagacacaacttagatgattaaacagttattgtccatatccactgaaactcgaccatgattaaccgactaaagactctactagacgacccaaaccggtatcaataaaccgggtttgcacctaaacgaatcggtttaatcatttatatagaacaggataaactgactatacaaagaaagtaaatttaaccaaaacaaaaaataacttggtgataaattctcaaaaccggattagttgaaaaaaccaaaataactgaaccggtgagtgtgattggtttgttacctgaccgaacaagagaacggcgaaacgagagagagtctgaaagagaccggggatgaaaaaagcgatcctccacgcggtgaacttggtggctccatattacgaacaacgagacacgatgggcatg

SEQ ID NO: 22684 - DNA, 547 bp, Arabidopsis thaliana columbia
ctagaggatcgcacgatccccagacctttttatatgtgttgtgattatgggatcatgggagtggcccttttctctttatagaagctgaacttagaacttaataagagtgtatcatacacgattgacaacaaacttttgtgtttatagactatcagattccgtgttctttgagaattgtgtttttcttttttcagttattcttttgctctgcttggggtttgtcgattcatagtgtcataatcttactttcattctccactatgactgtaagaaagaataaaaattccctttcgttttaccttttttgaacgaattcattttaaagagatctgtgtgtgtttgtgcataaaaccaaagaaactcattgtgtcttagtcaagttttgagttttgatcttgtggtttgtggttttggttgtctcttgttatgttttgctcatttttcttataattgtgatgcagaacaatcttgttgaggcaagtgagtatgattttggagaagagagtgacctattcaaacccctgagccgattattgaagaacaatgt

SEQ ID NO: 22685 - DNA, 739 bp, Arabidopsis thaliana columbia
tgaatggaaaacgttctgcaacatctgcagaggatctccatgactcaccaccagaattgcacacctaggggatatgaagaaaaaacatacttaagctttcagttggatgcagaagaaatgggtgttagaggattgtttacctttgatattcagcttccatggatttcatggcagtggcaagtcgggaaacaacatcatcagcactttcacctccttctggtcccataaaaggatctttttcatcaagagcccatatctctgggtactggggcaaccagaaaagatggaacttgagaacacatgtcatttggccgtttccgtcataggtaagttaatgagaaagtaccttgtcatgggacttgagttcaaatgtaggtccaaaatagcgttcgcgcagatcttccatcatctgctcagcaagaaacaacctttgaattacggataaacataggtttgagcaaatgtagaaatatgtgggatgcataaaagagcatcctttagggacacgtatgtctaccttgcattgaggagcatcaaaggggagattgaggaccttagcaacaaccctagcggtgtgagtggttctggagaagggggagtagcaaatgcgaaccttgtccagttctatgttactttccttgagttgctgaatgttgatcatgaaaaggttgagtgttttcttctatttggggggtagggtggcaaataaagagatgaagcaaaccaacctggaggacga

SEQ ID NO: 22686 - DNA, 600 bp, Arabidopsis thaliana columbia
gcttcgaggttggttttttctctccaggaggatcaagaaatcgttatctcggaatttggtacaagaaaatctctctccagaccgttgtttgggttgctaacagagactctcctctctacgatctctcaggaaccctaaaagtatctgaaaatgggagcttatgcctcttcaatgaccggaatcacatcatctggtcatcatcatcctcaccatcttcccagaaagccagcctaagaaacccaattgttcagattcttgatacaggtaatttagttgtgagaaactcaggggatgatcaggattacatatggcagagtttagattacccaggagatatgtttcttccaggaatgaaatatggtcttaattttgtaactggtttaaaccggttcttgacatcttggagagcaatagacgatccatcaactggtaactacacgaataaaatggatccaaacggtgttccgcagtttttcctgaagaaaaactcggttgttgtcttcaggactggtccatggaacggtctaagattcaccggtatgcaaacctaaaacctaaccctatctatcggtatgagtatgtctcacggaggaagaagtt

SEQ ID NO: 22687 - DNA, 584 bp, Arabidopsis thaliana columbia
gaagacaaaaacattacttattttggtgtatactttgaaacttatagggtctattcgagctcatatctctctcaacttcttatctgaacacaactgacaatgactacccaaaccgcactggaagtctagcggtctcacttgctagccccgatggtcgtgtcattggtggtggaattggaggtcctctaatagcagcaagccaagtccaggtgagcttacgcttgttatcaaattccttagatgaatttagatttcttatgcttaactatgtgtgtttgcctccttaaaaggtcattgttggcagcttcatttgggcaattccgaaagggaagattaaaaaacgtgaagaaacttctgaagatgtccaagatactgatgctttggaaaacaacaacgataacacagcagcaacgtcacctcctgttcctcagcaaagtcagaacattgttcagactcctgtaggcatttggtcaactggttcaaggtcaatggatatgcatccccccatatggacattgatctaatgcgtggatgattcatgtatatagaagcattgaatctaggagaagaagaagaaacttgag

SEQ ID NO: 22688 - DNA, 448 bp, Arabidopsis thaliana columbia
ccttccacacatgatctccaatataacaaccccgaagctatacacatcgcttttctcggttaattgaccatagagggcatactctggagccaagtaaccgtgtgttcccgcaactctggtagtgagttgagattctccttctctactctgtttagctaaaccgaaatccgcaactctcgctctcatatcgacatctaacaatatgttcgtacctttaatatcccggtgataaatagcgggtttcacaccgtaatgcaaataagccaaccctttagccacatccaaaatgatgctctttctctgaggccagctcaatggcatcttcgtagtctcacctcgaggaaacaagtgatcatcgagatttccattagacatgtaatcataaacaagatatctctgactctcactatcatcatccaccatactacaacctctaagcggaacaaga

SEQ ID NO: 22689 - DNA, 513 bp, Arabidopsis thaliana
cccaaagatgctaaataaccaactactagtggctactattctccaaaatgactgtgagacataccacgattgtatggaatgaccaagacacataaattcccatagagtgtagagacagtgcatccccgcaagtaacattgttatgccaagacaaagtccctaaatccacaaggaaaaagtatcaaagatcaaaattgaaatctccttctaaataataaatatatataaagacaaatagaacaatatgatatttagtatgaatgacagagaaagagagagttaccttgggaaataaggcagagttgtggagtaggcaatatgcaggcaagagacaataaatgagctcagggattgaccttacacaaatggaaacgcaaagataagctactcgctgtcgaaatcttaattttctgcaaaacaatcctagcaacggactttgtttgttgaaaagaacttcgatcgatcctgttgcccatcgccgttgctggatcattgcctccagtcctcccggcg

SEQ ID NO: 22690 - DNA, 550 bp, Arabidopsis thaliana
tacctgcatgtataagaaaaaccaagtttaatgataatccttagaaacaataatcaaaaccgtttttgctagtcctatatatatactataacagtcttacgagaaccgtcttacgagtaatataatagtaaccacaatagcaattatcaccaaaaagaaaacaaaacagcagcacgaaccacaacattgtgtcaaatccagatcatctctgccaagaccatgaaagcaatctccagcatcggctccacattggtagcaaaacgtatgtccacatctgccatttatcaggtaaattgtgttgatacataaattcgaaataaccgaaaagagatgtaattagagatgatacctgcaaactacactgatgcatccagaagaaagttcaatcatgtgtttacacttgctgcattgacgccacgatttctcattcgctagatctcttagccttccatcgttttctgtaggatttggatgtaacgtcttgtactcgtcgcacgacaagttattatgccacgaaactttgcacttgacgcaaaagggttcgcacatt

SEQ ID NO: 22691 - DNA, 1257 bp, Arabidopsis thaliana
atatatgacttaaacattttaaattgcaagatcctaacttttttttctttctgaccgggcattaaaacaatttagtttagtcttgtagactgtagtcatacaactcgaacctaggactacatggttcacacttataaattggatctccatttttctcatttaatagcttgcaagtttaacagtattttttttgagaatcactctttctttctttctaattcacaacttaaaactgcttcaattcacattagttaattatagttttgggcaaacattttgcacgcaaaataaagttacatatatagaattattaattaagacaatgtcatggtaaacttagcgtagtaacacaacaaacacatatcaccatactacattcaaacagagaaaacaacaaataaaactgctaaaaagccagctatagagagagtagacaatggggttccatattttcctttcttaaacaaacccattagaaatggaaggaacaacatcattaccaaaacacatccgcaagcctctgccagacccgaaccacctccttcatggctgtaactcgaccgttgtagacccacagaaaaaacagctagagcggctatattcaccaacacaataaatgtgccaggcaagaaacaaagtgagccatcaaattcaaatttaaacaagtctgagtttggaccaacgtcttctccttgagagggtccagaccctaatgctgacttggtcccagccacagtctttttagtgattatgaacaccgtttccgagatgccaagaagcttgagtgtgatatcaaagatgctaaataaccaactactagtggctactattctccaaactgattgggagactagccacgattgtacggaataaccaaggctcataaattcccatagagtatagagacaatgtatcccaacaagtgtgacagttatgcctaaataaagtccctacatacacacacacaaataataataataacacattaaaaacctccttcaaaattaattttatgaaagtcaattgaacttcatttaaaccaaaacagaactttaaaccttattatgagtgtcagagagagagtcaccttggggaataaggtagagttgtggagtaggcaataagcaggaaggagacaataaataagctcagggattgaccttagacaggtgataatgcaaagataagctaatcgttgtcggaatcttattttcttgctaaacaatcctcgcaacggactttgcttgttgaaaagga

SEQ ID NO: 22692 - DNA, 586 bp, Arabidopsis thaliana
tgagctaattttctatgttgttgcagtaactaatcccgcaagaggtgactattctccgggggatgatttgcttgtgtccttgcttatttttcctaatgatgaaccgatcgaagaagagtatgagattgaagaagaggatttgagtgaagaagaggatcaaattgaagaagcggttcgagcctccttggaggagaccaataatatcagtttgagacccgcaaacaagctcgtggtcaattctttagccaggaaaatatacaagaagaccactagttctactgaaaggtgcacaatttgtttggaagagtttaacgatggaacaaaagttatgactttaccttgcggacatgaatttgacgatgagtgtgccctgaagtggtttgagaccaatcacgattgtcctctatgtcgtttcaagttgccatgtgaagatcaatgaactagctagtttggttctgtcaccggagtctttttccgttttgtaccgcatgtaatctcgttcgtaacgcccttttgggttttgtgatggtcaacaagctagtaattactatcacgataagattgatattaatcaaaagagtgttga

SEQ ID NO: 22693 - DNA, 1041 bp, Arabidopsis thaliana
ggccatgtcaaagttcttctgcccaaacccaactctctcaagattcacaatctcaatctcactcagactcaccacgaggaacgggtattctatcagctcaactaagcagctggaggtcggtattatgaatgcagatgtcttgtgcggaacaccatggaaaccaagctctctcagaggttgatcaaactcaaggtccagacttgcaaactgtggtagttgccacatatcattcacccggtttgcaaaatgattgaaatccatgttgatcttgttcttcctatcgcgctccctctgttcttcgtcaatctcatctggatcataggctgatctcctcccaccacctaaagactgcacaacatccattacctccacatagaattgaacgtcctttgtcttcttagttcctaccatgatgtggttgtgcaaatgaaaatgaaggagggtgatcatctccttctcagcaggctggaaaaacgcatgctttatgtttgcaaacaggacatccacgcgctcgtcaggcctggtagttgaatacctgaaaccatttgcatgagcttcgagtgtcccaggaatcttcttgcgcccactaaaaggcggacggatccacagctcggacaacctgaggggtttgaacttgttccctgcaagctgaagtttctcttgggtcaccaatgtcgccctttcagctctctctgactccctggccatgacttgccgtctaagggtcttaatctgttgagttacttcgctgctatgccttgaatccttggtccggaatgaaacctccttgaggtagatagcaccctggtttttcaaagagtttgagtcatgagggttgaagggtgtacccgggacattgaaaatgatacggatgtagcagtttcggttggtatcttgattgcctgacactgttcttattgtagccacatggaatggaaccaagctcccatagatgggtaacaatacagcctcgtttctcgtatcaacctggatcatcaattccttatggggcatgtcgttaacattcttgtaggcaccaca

SEQ ID NO: 22694 - DNA, 1722 bp, Arabidopsis thaliana columbia
gaaatcgttcttcaagggtcttgtgcaatctccaatcgagtcttcgggttctgaatcttcatccatagcatcagaaagctacagcccaaatctgatggatgatcttgtgagcactcctcacaatcagttggttctgcatgcagatttcggcgggccacatttgcgacgtgcttcatcaccagactgctccacatgtccagcttcctgtagaacttgtggatattagtgatgatgatgaggacgattcgtcttccatcgttccagtcagaaaccgacagaactctgtgccaatgtctactgaagttctaggggtatcatccgtgacatcgcgtctggcgaagcgcaaacgagacactccaagtgaggagttcctgtcacagaaacaacagaaaggaaagggagttgttgtttcaggtcctagaaggagcaatctatttcaggagttcaaattcagttctcctctcgctgaacaaaggtacttgtatttctctcgtcgacaaatgatcaaggaactgaatttggatcctctggctggtaaatggatcacggatgtgatctctgaggcgggtcttctcaacacagtaacgggaattcaaggattttaggacgaggtggtctatgaattctgggccaacttaccttccgttcgagtggaaggggactcagtcaaggtgttagtaaggggtttcgagtgtgaattctcacacgcgaagatcaatgctctattttaccagaaacctgtcggggccagaactcaacgcattcagactgctgggttggtttatgatgaggtggctcggtacttgaccgatggtcgagtccaaaatctgcagaacattcccatgaataagttttcagagaactggaagaatctattcaagatatcttgttgaaattggtctcccacaacaaaggaagggtatgtgagcagtgacagaggaaggcttgtctatcgcatagctcacaaaatggcgattgattttggagaagtggtgtatgatcatgtttttcaacttgctctgaagtctgtctccaacttctttctgtcgtttcctagcctcatttattgcttgattcagactcaacatcctgacatccagatactcaagcgcacatcggccagtgtttcacaaggttagtcagctggcaagaaggtagcatcttcaacagcaccagccacgcctttgggtctacgggcagctgtgcaacaggctgtcaccattctgcaggctgccttagatgcaggtaagtgatgtgcctctgtcctctgctcttctgttataataattcttattgaaaattttgactaagttgtgcactcaagcagggggagatgatgcgagaactgcggatgagtatgggaactttgatctatgactaagggggcacatgatttgagggggagtatttgtttttaattggttttgtttgttcttatcgtttgggtctagggttatttagaccagaacaatgctttgctcgggtgattgtatcatcacggtatgtaataagatgtttaaaaatagggtttttaaaactaattgcaatatgttgattatgctagtttatggctctagattctgtctactggctgtgtgttgtgttcctgattgcattttaggttatatcaatggaggaatgcttgagtacaaactcagtcaaaaagggggagattgaagatgtagagtttgacaatcactgatggcgacagacagtgatgga

SEQ ID NO: 22695 - DNA, 1482 bp, Arabidopsis thaliana
agctcacaactaaagaaaataaacatttaggaaaataacaatcatcactgaaaaggttttaaacgcataaccctaatccacaaccctagaaacgaagacccaaattacgtaggccaaaacaaatcaatacagacaaatcgcacaaaaccactccagaaataaaatcatatgcaccacaagtcaaggaaacggattagattcgtgctcgttagtcgttaccgtgaagagaagagaaagtcatatttacctatacgagatctcacaggatcgtcgataaactaagccctgagatgaagaggcgattttgggaggattaaaggatctactgactagctgtgtaactcttatttttttagaaattttggtaaaacagatgttacaaaacttgataatttcattaaaccaaaatataaaagtaaaatattttctactattagtgaaaatatgaattatcttctattcatctttacaagattatctaattattgtaattaatgttacaaaaaattaaacattgtcaactgtattaaggcaaaaaaaaagaacatatataatagagataaatacgcctatgcggtatgcctataagtttcgtgtatatagttaaaagttgaaagaaaccctaaatgccttaactgctacgtatcgaagattattgagattatatgtccaattttgataatgctgccgaagaaggcgctaagcaaggaggaggcggaggctaaaacgtcggtatggtgggacatggacagctttccggatcctagtgggtatgatgctggattgctggtcagatccgtgagtgtatagaacggaagttgcggaatttaggttacactggtcctgtcaccatctctgcatgtggcgagctacaaaaaacccaagagcacgtactgcgagcactctcttccactggaatcattcttaaccaatcctatcgtcgttaatcttcttcttcttcttctaatcttttttttatactacatattactagtttttagatatattcaatcggcttgagttgctgtcttttactgaaacagctatgacacacatataagaggataataaagtgaagaagaagaagttgatgaagaacgtatgagcatctagaggacgactaagaagaagaagaagagtatacatggcccatggagccttgtttttctccaaggaatttcatttggtgaatggttatgttttatacttttatttgtagccggaaatgttgggttaactttatactacttatgcttatatacaaatacaagtctcatcttttattcttatttttaagttaggatagtatgtttggttaatgtttttttaataagttaactcgttatcgtatatttacatatttcttttatggagataggatagtatgttcatacttcatgcataatactaagttggatgaataaaagctaaacattcattttctcatacaattaacaaatgaaaactgacttgtgtatgtca

SEQ ID NO: 22696 - DNA, 521 bp, Arabidopsis thaliana
gatacagagaacaagcatcaagcataagaaaaaaaacttacagcttcatatgtcaaggttccagatcgtgagacaattccaatcttcccaggcttgtggatgtatcccggcataattccaattttgcattcaccaggcttgataatcccagggcagtttggaccaatcagcctagttttcgattgactgttaagagcatgctttacacgtacctaaatcagaaacatcactcaagtcaaagagagaagcacaagagataattatatcagtattcaatcctatgtaataagcactgaaggagatataacaaacaaaatcaaaggcatggtgataataataagtaccatgtcatgttgagggattccttcggtgatacacacaataagatctaactcagcctcaataccctccataatagcagcagcagcaaaaggagcaggaacataaatcacagaggcattggctttggtgtcagcttagcttcacaacagagttgaaactgggagaccaagtgttctgtt

SEQ ID NO: 22697 - DNA, 2159 bp, Arabidopsis thaliana columbia
tatttattgttattgttatctctaatgatgtttatttctaaatttgcataaaggttacatattggaactctagtaatccttttccaacttgggttcaagagatagtcgatggacctttgcacaaagtcaaaacatggccaatgtattttacaagaggctatttgtttcatacgcagagtcatggagttggacgtaagacttgtaactatggtgtatgtgtgaaaggtgaaaattatacggatgcatctgacgccgcagatttttacggaaacttaactgatatcatagaacttgagtatgagggggtgctcagtttgaaaatcacactttttaaatgttcgtggtatgaccctaagctcggaagaggtactcggaggagcaatagtggtgttgtcgacgttctttcatcgaggaaatataacaaatacgaaccctttattttaggtacgtatggtatatacatatggtcatttagtttttctagttcatatacaaatatctaattctccaaatatggtgcatttacaaacaacatctcaagcggaactagtgtgctttattccttatccatacacgaaaaaaccaaagcgggagttgctcaatgttttaaaagtaaatccaaggggaaacatattaggagaatatgaaaataaagacccgagtttattgcaaacagaaaatgatgatgctgttttaataacaacaatagaagatcttgtactcgacaatttgacaatcaatcgcaaccccataaacctcgatttagatgccggagatgctgatccagaagatgaatttcgatgtaatttatcgtcttctgatgatgaagaacaacaagacgaagaataatattagttttgtgtttatgatatgtacataagttattttgaaatactatgcaaacatttttaaattattttgaaaaactatatttattaagtatgttatgtttatttatatttctatagataattactatttttgaatatctatggcccaaaaaaacacaaggcccaaacccaattattaaaaattaaacaaagcgactaatttgtgacaatttagcgactaaccattgtattgggccaaaataactcgaggcccaaatagggtgactaatttgtgacaatttagcgactataaccattctattgggccaaaataactcgaggcccaaatagggtgactaatttgtgacaatttagcgactaccgaaaaattattgggccaaaaatttcgaggcccaaaattggtgactaatatgtgacaatatagcgactaatgtttaaattttgagaactttttaggcccaaacccattagacccaatccctttcaatgtcaaaaccctaagttccatctctttctcttcgaaacatccgcagccttcttcttcgatttctctcttcctcttcgatttcctctgcgaaaccctagcaaatttctctcttcctcttcgattttcctcttaatctctctaccaaacatctgcagtcttcttcttcttcaatctctctcttcgatttcctctttgaaaccctaccaaatcaatctttcctcttcgtttttctcttaaatctcctcttcttcttcttcgatttcgtcgatttgaacctctgtctcatctagatctctccttaatatcatgtttgggcgaggaaaaaagaagcgaaccagtcctaaccttgctcagagagcctccacatccacggctggtcgacgacctcgttctctcccgtcccagtacaatttcacgccgacagcagaacggtcgcctcagctacagacgcctgcatcagaagacgcggtcctcctttaaaggcaacggcagctcatgttcggagctatccgccgcctctgcagttgttccagcactctggcagttgacaacctgaagtgcaaaggtctgcctccgtggaagtgcagaacaatcctgcgaatcaaggcgcgactactcagcaggttcctccggctcctcaacaagaccctccgccttctcagcaagaccctctgccttctgcagttcaagagtcttgggctcacagtcacccatcctctcaaggcaacaacttcgaagaatatccacctttctcgccggatctccaggaggacacacttcaatccctaaacgatcttcttatgttgcaggagagggataag

SEQ ID NO: 22698 - DNA, 594 bp, Arabidopsis thaliana
tcacgtcttcccactttgtagtaaacctgtgaagcatgatcccttgaactagtgttctccaaacctgttgtgagtaagggcataagaaaaacaaatggtccctagtctccattgggtggctgcagagaacacaacgtgtgttaacattttggttccacttttccattctctcccccgtagcaactctgttctttaccaccaaccacgttacgaaagcatactttggtgtagcattcggaaaccatatttttttgtgacctacgaacaaaggctttgcaactcggatttgggaccaagtttctttcgtcatgaacttcttttggtagcagttgttcttccccttccataacgcaacatcatattcaccatgaatccggttttgcttatgtttctctatttcctcttccacccggtttagtaacggctgtctatgcgtcctccttcttgtcatatccattacctcacccaaagtagtgtgttttggtatcccaactcaatgtccctctatccctatagtacatgaaggtgcccaacggactcaataatcaaccaaaaagaagtagagtcccattttcacttaaccgatggaaagtt

SEQ ID NO: 22699 - DNA, 2899 bp, Arabidopsis thaliana
tgcaatgcttgtcaaaacgtttctcaaggttttacttacgtaagtgatgatcataagattatcttggatgtgcgatgcggttctatttcggaaccttttgtccatgaaagtcatcctcttcattcgttatacatcagccgctcaacagaagaaaagttttgtattgcttgcggagataaggctactatggttttgagttgcgaggagtgtgactttattttagacattaaatgttctaatttgccaaagatggttaaacacaaaaatgataaagaccatttgttgtccctatgttacggagaaaaaacaagtgagcagtactggtgcgagatatgcgaggaagcacgaaacgcaaagaaatggttttattcatgtgatgattgtgacattacttttcatatcaaatgtacgcttggagacttcgtagggatgtatcaggaagctaaggatgagtcattccaaacttatatgattcttaataatcatataaatcgaccagtttgttgctgttgtgagtctcgctgtcaattctcttccatcttaaggttttatggaaaattaatatgttctctacaatgtttgcaaaagaagttccaagaattacatgatgatatatcctgagattcagattgctagtgatttacctgaagtgggtttgaagcaaattcattattgacacatgttgcttcgcctcaaatgttatgcacacagaacatgtaaacataaaattatatttgtaaaagttaaatatttataatgtttgttttcataagatttactttattttttttaataatctcttgaatgtctgtaccttttcttttgttaaagattgttctttatataaagattgtaccacaggctctcccagcaacgcagatcacagacattactgatcactctggcagcgaatgggtcacagacagtgctgctactgctcacatcaccaactcgccacgtcatctgcaacagacaaagtcctatgctggttctgattctgtaatggttggcaatgggaattttctacctatcactcataccggttctacaagtattggttctacttcaggtaagcttcatcttaaagatgtattggtttgtcctctaattactaaatctttgttgtctgtgtcaaaagtcacaaaggattatccctgcatttttgagtttgattgtgatgaagttcgtgtgcgtgataaggaaaccaagaagcttcttcttcagggaagtaatcgagatggactctatgtgctggatgaaccaaagcttctggtgttctactcttctcgccaagttgcagcgtctgatgaagtttggcacagacggttaggacacccaaatccccatgttctccagcagctatcctcaacaaagtccattcttattaataaacacagcaaggctatttgtgaagcatgtcagtctggtaaaagctcaagactgtcattctctgcatcatcttttgttgctagtagacccttagagagaattcattgtgatctctggggtccttctcctgttatgtcagttcaaggattcagatactatgttatatttattgacaattactctagatattgctggttctatcctctcaagttaaagtctgatttctacacaatctttgcaaagtttcaagctttggttcagaatcagctacaaagcaaaatctcaatttttcaatgtcatggagggggagaattcaccagtaaggtctttctcaatcatcttcaagaacatgggattcaacaatacatctcctgtccttacactccccaacagaatggtcttgctgaaagaaaacacagacacattactgattttggtttatctatgctttttcaaggcaaagtccctcaaaaacattgggtagaagccttttatactacaaactttctcagtaatctgcttcctcatactgctcttactgatgctaaaagtccttttgagctgttaaacaagaagaaaccggattatcaggccttgagaatctttggatgtgcttgttttccgacactccgagattatgcacaacacaagtttgatcctaagtccttaaaatgtgtgttcttgggctacaatgaaaaatataagggctaccggtgtcttcttcctaccacaggcagagtctacataagtcgtcatgtcatttttgatgaacactccttccctttctcagatacttatatgcatctgcaacccactggtgttacacctttgctctctgcctggcaacaaagttttatgcctcagacaactgcttcttctacagcctctgcaactgcaacctctccattcaatgctgcagagattcaggtttctcctgtgattaccagtaacaacaacacaggcgcttcagtgttagaaaatggttcatctcagctgcctatacagaattcatcagtcttgtctactgtggctagtgaagagagttctgagtgtacggagagcatcaatctcttacctattggcaatagctcttcttcacttgctaacaggacggataatgctgatacttctcctcttcaagaagctgcaacagaaacaaacagctctactgtgcaagaagctgcagaatcaacaactagctctacaatgcaagaacctgcttcaaatcagtctactcatccaatgataacacggtctaagaaaggtattacaaagcctaatccacggtatggacttcttacacacaaagttaaatatgcagaaccaaaaacggttacagaagctcttaaacacccgggatggactgctgcaatgcatgaagagtatgataattgtacagaagcacaaacgtggagtctagttccgtatacttctgatatgaatgtccttggaagtaaatgggtgtttcgaaccaagttaaatgcagatgggtctttgacaagttaaaagc

SEQ ID NO: 22700 - DNA, 2952 bp, Arabidopsis thaliana
gttatttctcgagtctttttagtgccttttcaggtataatatgcaatgagacaacaatggagataaggagatattttggaacaagagctaaggaaaaggaagataaggacgattttagattcagtaatcagcgaggagtgtcgatcgacacactcttggacgtttttagggtctttatattgtttttagacctagttttcattataaagtctttcatctagttttcattatcaagttttctacaaaaccctgttactgagagacataagctattcatcgattgttttcagagttttattaagatcttaatacagtcaagagatcccttcttttcccttctctatttattgtgtttatgctttcacacttaaatatgttgcttgtttcaatcaatatgtctgagtaatctgcttgttaggaatagggtttctcattagggattcatatgatttagtagattgccccatttgctaggttatctatagaattcttcatctttaattatgcttaatgctagatctagagtaattaactagatcttgaatccagacaatagatatgcccgccataggtatctgtagttggatctattatttgatgagtctggtttataggtgtgtaataagaatcggcctatctactaagatgaataattgaactcgttaagaatgcatatttaggttgatagtttctcggcttctccggttattattagctatagatatagggagtttcgcggcatgcccaccgcttattccataattagagtttgagtttaagaatggttcgataacaacctagctttcattagatctactaaccaatagtttcttgagaataccctgttcctacctctttattaaatcgtttacaacacaatcaatctgctatttttttactttgttctcttttattttcactcataccctgctaccttaatctcgacatttaactcattgtttgaacaaaagaactccatgaattcgatcctaaaatactgcaattgatctcttatttgagagagtagttctaggtaatttgaaccatatcaaatttggcgccgttgccgaagttcttgggaatcatcattgagttttgtttagagatttcgtctagttttacttctattttgttactcacgcgtttcttgttttcttcttttctgtgttcaaagtgtatgcctaggcaaacaaggagcacaaaacagaaggagcttatcaacttgtctgttctggagttgggaaaacttgaacgcaccaaccgaaaaactcaaaaattagcaatggctgacagagtcatcagagctgatgcagaagaagttttgagagatgaggatgggcaagcctacaatgaggctggtcagagattggatgatcatggactcatcctacctgatgacgtcgatgagaatcaggcgcgcctcaacgcgcaaatagctgccagagacacagcagggctcgctgtcgatcgacataatagaggtgtcgatcgacaccatcgggagtagaatgacgatggtgatggtgtcgaacgacacaacagaggtgcacagcaataatggagaagatgctccacacttttccctaaggatgcttcagagacatcttctgcttcactcaacaagtatgtcaaatgacttgttgacaatgaaattagctcagatgaagctaagttgcttaccagagacatcagtgcaatcatgctgcctaatgccaagaaggagaaggcacaaagagtagacattgctgagtacatccgcaccatcactcctggtcagaccactgagaagcttcccgatccaggtagctttgttcttgattgctctatctccacaagcaggttcagccgttctttgtgtgatttgggatcaagcatcaatctcatgcctaagtctgttgctgagagactaggcatgactcactacatgcctactcgcatcactctcctcttcgcggatcgttccaagcgaatccctgaaggaatccttgaagatgttcctgttaaagttggtaactctattatcccatctgattttgtggtcctggattatgagaaggaacccaaggatcctcttatccttgggagagcgttcctagctacagctggtgctaggtttaatgtgaaaagagtgagaatctctctcaaggtttgtgatttggagatggagtttggcatggatgggtcagagcttactaagcctatcagttgtattgcttccagcacagacacacctcctcaaactgctgaaaatcccaccacagagccacacacaacgctcccattcgctcagctcgccaatgagatttgcagagcaacggtgtcgatcaacaccactacccctgtcgatcgacaccctcgggtttcacagatagaggattctgcacattctctccagctcacaccacttgaggacctatgtgataagttctcttctctctcttttcctgttttatctttgattaattctttagattatttgaacactgctttacatgataacaagcctagagttcctcgaaagcttgttcctcttattgttcttgcttgtgacgagacgagtgttgatcgacacactcctgagtgtcgatcgacaccagaagctgctccaactaaatccatttacacaccgccttggaaggcgaggaggcaacaacaatcctctaccagtccacccacatcttaaaccccaccaagtcaagttattgactcaaaacaagcgcttagtgggaggcaacctactggtttgatttttcttttccctttcttttcttttcttctatttttgatttatttcccccgctttctctggatttgaatgccactggggacaatgtcgtttaagtgtgggggaggtcatactaatattgcttttatttttgtttcttatcatttttcgttttgcagttcatttggttattttttgtatttctttcctagaaaaaaaaagaatgt

SEQ ID NO: 22701 - DNA, 3207 bp, Arabidopsis thaliana columbia
gtgtggttagagttatcgatcaaatctaagtggagaactcgtcacaagcagaaacgtcccgccataatcatcatctgagatctttgattctttatctgaaccatccactctgtaacatgttataagtcagacttgaataagctcctagaagaatgcacatcaatgcatttttgtgcatcaatacacacacataactatcataaacttagaaaatttgccttaagttgaagttttgtgagctagtactcaagtcaaaccaagcaagattatatcaaatctaattctcaatgcagattcacagaaatttcactccaaggacatggaaactagtcacgaaaaggaaatgatcgatgttataagtatctcaagagcgtgtttgtaacgccgagttcactcatctggaaatgagatgaggactttatacatgtataagaaaaatattttatatttctgacggatttgcgagggtaaaagttttaccgttggaaaagcatcgggcaccaaactttaccctccaaaacgaaaaaattatgcgtcaattatttcttttttccaaatcagttttacgcttatttttttcaaaacaaaacccttaaatatctcttaatatttctctcacatctcaactctccctcaatctctttgaaatctctctcaacctctccaccgtctccttctatctctttgaaatctctctcaatctacaagaaaacaggcgatttgcgaaggaaatttgagatggcgtaaatccctcgcaaattgctatagacttgcgagcactttgcgccggaaaaccaatacgtcgttaatcagtcgcaaaatttgcgagggagaattcccacgcaatattgcgtggcaactgcgagaaaattgcaacgacggaagaattcctctcaaagtcatcgcaaattgcgagggatttgctgtacgataagagcctcgcaaactgcggtaaacttgcggcgtacaaactttctgtagcaaattttgcgtcagagttgcgagtcacttgcaggttaggtcagcacgttttaaataatcttcctgctttagttggtagttgaacttctctcgcaaattcgtagcaaaatagcgctgttcctcgcaagttcctcgcaaatccctcgcaatatgttttcggacatctataaataaccaacgtaacatgtacaaaatcttcatgttcaaaatacaacaggacacacctcgtcagaaccacctaagctaagagatacattccataccccaaaatctaacataaacatattaaaaaaaaaacttacatgttttcagaaattgtagagagaagtaagaagaattgcaaaataattgagagagtggaagtgagagaacaaaatagttaagtaaaattcaagttaaatagatattcagagtaaaaaaaaattactacaacttaagcttttattaaattaaataaaataacaatcaaacgagtattgcttaaaattaggaaaataagtttaataggatttactcaaaaacattttgtggataataataaaaataaaaataggatttagcatccccacatcttctcaaaattatatattgaacaagctatagttgccttcttccgttcttagctcatccaaaaagtcatagtcgtgatcttttcgtcgccttcagttgttagctcatcaaattcatagacgtagccgtcttttaataatagcatccacgtgaagggtaaacaaatatctctccaacgatttttggtttctatttgattatctttgatcagtttttatttttcctctatagggtgaaactactaaacccacgttgagttcatgaactctaatatatattgtcttcttcgtcgacttagatggaacctctcgtcgtcaccattattgatcttaagcttcattaaatttctatttcaatttagcactattattgtgcggttagagttatcgatcaaatctaagtggagaactcgtcacatgcagtaacgtcccgccataatcatcatctgagatctttgattctttatctgaaccatccactctgtaacatgttataagtcagacttgaataagctcctagaagaatgcacatcaatgcatttttgtgcatcaatacacacatataactatcataaacttagaaaatttgccttaggttgaagttttgtgagccagtactcaagtcaaaccaagcaagattatatcaaatctaattctcaatgcagattcacagaaatttcactccaaggacatggaaactagtcacgaaaaggaaatgatcgatgttataagtatctcaagagcgtgtttgtaacgccgagttcactcatttggaaatgagatgatgactttatacatgtataagaaaaatattttatatttccgacggatttgcgagggtaaaagttttaccgttggaaaagcatcgggcaccaaactttaccctccaaaacgaaaaaattatgcggcaattgtttattttttccaaatcagttttacgcttatttttttcaaaacaaaactcttaaatatctcttaatattccctcaaatctcaattttcctttcatttctctcacatctcaactctccctcaatctctttgaaatctctctcaacctctccaccgtctccttctatctctttgaaatctctctcaatctacaaggaaacaggcgatttgcgaagaaaatttgagatggcgtcaatccctcgcaaattgctatagacttgcgagcacttagcgcggaaaaaccaatacgtcgttaatcagtcgcaaaatttgcaagggaaaaatcccacgcaatattgcgtggcaattgcgagaaaattgcaacgacggaagaattcatcgcaaagtcatcgcaaattgcgagggatttgctgtacgattagagtctcgcaaactgcggtaaacttgcggcgtacaaactttctgtagcaaattttgcgtcggatttgcgagtccttggcaggttaggtcaacacgttttaaataatcttcctgctttggttggtagttgaacttctctcgcaaattcgtagcaaaatagcgttgtttctcgcaagttcctcgcaaatccctcgcaatatgttttcggacatctataaataaccaacgtaacatgtacaaaattttcatgttcaaaatacaacaggacacacctcgtcagaactacctaagctaagagatacattccataccccaaaatctaaca

SEQ ID NO: 22702 - DNA, 2121 bp, Arabidopsis thaliana
ccgccagaaggttgctggagctgaggaagaaaaaaaaaaggaagggcaagaaataagatttcaggtttatatgaacttaataggatttgggagaaatcagaaacttgaatggaggagataacaacgagtttaaagatctttttcaggtttccaatacagatggcatcgcggataaggtaatgaagtgtctctgattattacggaaaatatgaataaggaactaaccaaagaggtcactaaagcagaagttagttgataagtgtgcattttacacgttttgagcatccatttgtcatcactttagcatcatatcatcactgttttataccatttctcatcatttgtcatcactttgcatgtctaggatagttttgcatgcatattgcatatttgtgttgatttcaggtgatttggagctgttgacgagctatctagaagaagcggacctgatcgtgacaaaccactcgacccagaggtcgagtaggagcttcaagacctcaagagaccactcgacccccaggtcgagcagaggacatcaccacttcacttcaccactcgaccacgaggtcgagtgccctcgtctccatcactcgatcacttcactcgaccatgaggtcgagtgtcttcaccttcactgccagaccactactcgaccacatcactctgcctagaggtcgagtacctccatcacaccactcgactgcatactcgatgacaagcttcagagccttcttcattccgcactcaaccagacactcgagcacaaggaagaaaagaagactccagctattcactcgacctctcactcgaccacctgggtcgagtacagttcttaacccgtccaaatacttcgtcgttttgagtattagggtttcgggatatttggctataagtagcatgtacttctcattttcgcagaaaagaagtttttacctagttttatttccgcagaccttgtgttctagactttttgtaatccagatttctctttatctattcagtattcagctttggttcttgattttcgtttactgttgttcattctgttatcacactactgttacactgttgttatcatgtcttcaacctgttcaacgtttatgctttctgttatgatgtctaagtagtgaataggtttctgaggatgggttagagtagtgtagaattcttagtatgctaggtgattgagtattgattgatagatcccttctggattagttgttcttaatgcctattgctttctgatcaactggaatttgagcccagacattttcgggtccaaaaagtgttcgatgaaatgtctgaaccactaattccagagattcgtggccctgtaccaaggtattggttgcagggaacgttttggctttaacttgttgatttgtaatgcctgttaggtagctctcgtcaatggtgattgagtctgggactagtttaacttcagggtctctgttgaggtggcacttagatttggttaccgaacttgttgtatagggataatttattgagcatgtcaatcacctataaactgaggaaacgaaactactcaattaccccatcctcgggaattctttatctgattgatttctttgtttactctactgttgtttactgcatcttgtcatctgttgtttagtttctgcaattctttcttgttactcgacctgatactcgaccacccagttgtctggcaacagactgtgcagtcgagtatctttgtttcatttactgtatgttactcgactagtcactcgaccacacccagtgctctgcaatgagctgtgttggtcgagtgttttattgtttctgcttgattttctgttttctgcatgttcacttagaactgctagaacacactaaaacatgttaatgtttggcttgacttaatgacttctgattacatcttgattgttagtatcacacccatttggattgataatctaaaatactacaacgacatgatagtgctttaggattaattgatctaaaaacttattatcaatttggcgtcgttgcctattgggtgtttgtttgtgacatttaagaattcagacttgcttagatcaagttctttatcaattttcattacggttactaactgtgtgtttttcttgttgtctt

SEQ ID NO: 22703 - DNA, 2547 bp, Arabidopsis thaliana
accgttcggtaagcgctaagacataattagaaggagctggaacccaaaatcacttattctgccaaacacttaaggaaaatgtaattaacttttggctttcacactcgatttcccctttttctcgaaaacccataagacataactctctttcactacaagaaaacaagtgataaacgacttacaccgaagtcgcatagtagtcgtaaaaaatgataatacgactaatcggcgactaaagacgttagtcattattacatagtcgctgagtgaggtagtagtgaattagtcgttgatcgacgactatattacgacaataacacaatcagtaaacaattgtcgttgtatagtcgtataagattggcgactatttaacgaccatagcacgattaattgtcctgtacaaagcgtgtgaaacacgtggtcgtataatagtcgtataagtgtttccgacgatttgacgactatttgacgactaattctatcaatgtaaggaaataattctcgttgtcatataatagtcgtataatgttttacgactataatacgtctaatggacgattatattgtgactaggttggttagtcggataataatcggtaattaatgtgactattatacgactattttacatctaatttgctacctaaatacgactactgagcgactacttgttttgtctgaataagaatttggtcatcgattgttgggtttcttgtttgttgtttaaagttatggttttttctccttttttatttgaaatgctaaaaaagatgaaaagacttgtatatatagaaaatcaagttcaaatacacatacaattatcttgtttattacacaaacaacttattcaaataaacataagttcaagtagagtttgggcaaagataatctaaggatgattaggtggaggacttggtagacgttctgtggttgtggtagagtgactggccatgaagtccaagaactgcggatcggtttggcggagatacttctcgactaaagacaattgctcgagcttgtccttttgctcagttgtgactcgggatgactcagcttctcgggcagcaatctcatcatctctcttctcattatatgcagcctgctcttctattttcctttgagcttcctgcagccgttcttctagggcttgaaaggatgatgaggaaccggagtgatggcggttggcgctgcctagagtgtcttttagacatccaagtccataaggattgcctcttgaatccctttttgtggactgcaagaaatagagaagaagctcattagtgacagaatattaattggactctaagactcataattatactaaaacatcttacctcgagaaagatggctgtataatcatctagtgtgagctccggaggtcgtgaagagccatcagaggtagcagaagcatccgcctctagtgctgacagcctatctctcacattctgctgataagcttgagcaatcttctccgacttctgatcaacaaatgagccatccgacttagtgtgtgtttggatgaacacctcaccaagatggaccggtcttcccaacttctcttcctgcaaatacaaatcaatatcaacagtagtcaacagacataagaactcaacatactcacaagaaaacaaactatattggattgaaaacagaaaacagaaaactctaacttatgagaatctgcagaaacacttaccaattcatctgggatttcttgaaaagattttggcccagagtagtggacgtgaggactgataccgttacggtcagagagatgagctttggaataggtctgactccttttctgtgctgcttctgtgtcccagtaagcacacattgttccccacatcgtttctccaatccatggaggctgctctcgagttgtccttgcggtgctaaccatgtccttcaagcgcctcttgacgatctcattgaagtaatactggactgtccctgttattaagggatcccagtggtgcgttttctacaaaaaaaaaaggaagaagttagtgaaactacagaaacttaacttgaacaagagcagatatagaggaagcttaccgcaaactctaaaaataatctttctcttttatcaactagcacacatgaccagttatagaagggagcatcgaatttttgtaaaaaaattctagtgatcttcctaaccaagcgagatcctctgtctcgagtaaacctccaaacacatgcaacaaagaaagaagtaaacatgttacaaaagtgaacaaagttatgttcccaaaacaaatacaagtcacacacgactataaactatgtgccacaatagtactgtctcaacaatagagcatcattcacaatcaaagcatcatcatttgtgtaatatagaacagcgtaacacgagtttagaacttaactaaacaaaagacacagaactaatgtaatcaccacacaacactcaactatgtttgaccgattcacaatagagcttcaaacaacaataaaacaggcattattacataaactaatgagtctagaactaaacttgactaaatgcctaaccccaaaaca

SEQ ID NO: 22704 - DNA, 2730 bp, Arabidopsis thaliana
ccctgactaacgtttttgagtagacttcgatcatatcgcagcttaggattatcaacttggacattgatttcatctagtttatctagtgttttgactctgagtccccgctttcaaactgcacttccagcttgttcttaattgtttgcttgagggcaagcaaagactaagtttaggggagttgataagtgtgtattttgcatgttttgagcatccatttgtcatcactttagcatcatatcatcactgttttatatcatttctcatcattcgtcatcactttgcatgtttaggataggtttgcatacatattgcatatttctgttgatttctggtgatttggagctgttgacgagctaattggaagaagcggacctgatcatgtcaaaccactcgacccccaggtcgagtagacgcttcacgacctcaacagaacactcgatcccctgttcgagtagtgtccttcaccatttcacctcatcactcgactccctatccgagtaccaccacgagaaacactcgatcacatcactcgaccacgaggccgagtgtcttcacctccacaacctgaccatcactcgatcacatcactcgaccccgaggtcgagtgtcttcacctccactaactgatcatcactcgatcacaccatctacctggaagtcgagtatcaccatcatcaccactcgactacatacttgatggcgagcttcagagtcttctccattccgcactcaaccagacactcgagcacaaagaagaaaaaaagactagcttatcactcgacctctcactcgaccacctgggtcgagtactgttcttaatccatcccaatactgcgtcgttttaagtattagggtttcggaatattttgctataactagcatgtactttacattttcgagaacaagtttttatctagttttattccggagacactgtgttctagaccttttgtaatccggatttctctatatatattcagtattcagtattcagtatttgttcttgatttcagttaatgttgttcatcctcttatcattttgctattacactgttgttatcatgttttcatcctgttaaacgtttaatgttctctgcaatgatgtccgagtagtgaataggtttctgaggatgggttagagtagtgtagaattctcagtatgctaggtggttgagtattgattgatagatcccttctgaattagttgttcttaatgcctattgctttctgatcaactggaatttgagcccagacatttccgcgctcaaaaggtgttcgatgaaatatctgaactactaattccagagattcgttgtcctgtaccaaggtattggttgcagggagcgttttggctttaacttgttgattcgtaatgcctgttaggttagctctcgtcaatggtgattgagtctgggactaggttagcttgagagtctctgttgcggtggcacttagatttggttaatgaacttgttgtctagggttaatttattgagcatgtcaatcacttgtaaactgaggaaacgaaactactcaattatcccatccttaggacttctttatctgattgattttattgtttagtctactgctctgtactgcatcctgtcatctgttgcttagtttctgcaattctttactgttactcgacctgatactcgaccacccagctgtctggcaacagactgtgcagtcgagtatccctgtttcagttcctgtttgttactcgacctgtcactcgacctcccccagtgctctgcaaagagctgtgttggtcgagtgttttactttttctgtttgattttctgttttctgcatgttcactaaggactgctagaacacaccaaaacctgttatgcttggcttgacttagtgacttctgatcacatcttgattgttagcatcacacccatttggattgacaaccttcagtactacaacgacatgatagtgctttaggattaattgatcttaaaaacctattatcatttacaaatactgaagcatacaaggatagaaatgcttaaaacaaggtagcaacaacaagcaaaggttaagataaaagctacacaaagatcgctagtagaaatcaacaaagagtccatgagagcttgagggccagacctagatggcagcttggcacaagggatatcacaggttgttgaagagtcatctatcgacaaagcgttagacgaggcaatggtcacagtcattagacaaagtgacgttgagagacggtccctagccgagatactcgtagacacgggaagagctacatgagttagctcatcggtagagagattggtgactatggtactatagtcgggtgtggttggagataacagagtgagaaagaattggtaatcaccgctccttggagacggaatcataatgcctttctttctcaaaagtcgagtttcttgaataagatacttagggttgatggttggcacttgatacatcttgaaattcagaggaaacaagggtggaattgtgaagaagctccggtaatccgctttccttggaagcgggatcataatgccggttttcttcgagcttagccttttaaagtggtgaataacaccatcgtttccttactggggaaaactttggggacaggttggatcgcatatggaagttgcagtactctatgcgaaatcatgatcgacacagtgaggtaatggggttgtggggacttaagacagatatggcttcggtaaggatagatac

SEQ ID NO: 22705 - DNA, 1998 bp, Arabidopsis thaliana
aaatggactgctgctatggtagaggaaatgggaaattgctctgaaacacacacttggtcacttgttcctcttacaccaaagatgcatgtgctaggctccaaatgggttttcaggatcaaactcaatgcagatggctcattagataagtacaaagctcgactagttgctcaaggcttcaaacaagaagaaggaatagactacctcgagacatatagtccggtagttcgatctgcaaccgtccgagttgtgcttcatctagctactatcatgcaatgggaactcaaacaaatggatgtcaaaaacgtctttcttcatggagatctcactgaaacggtctacatgagaaaaccagcaagattcattgacaatgctcatcctgatcatgtttgcttattacataaagctctctatggcttaaacaagctccaagggcttggtttgacatattcagcaaattcctactcaattttggttttacctgcagtatgtctgacccttctctctttgtctacgtaaagaacaaggatgtgatcatgcttcttctatacgttgatgatatggtcatcacaggaaatagctcaaaacttctctccagtcttcttaatgagctcaataagcagttcaagatgaaagatttgggcagactcagttattttcttggtattcaggcgcaatttcatccaaaaggtctttttctctctcaacagaaatatgcagaagatcttctagctacaactacaatatccaactgttctcctgttgcaacaccattgccacttcaacctgagagagcacctaatcaaaccgagcccttcgacaatccatcatatttcagaagtttggctggtaagctgcactacctcacacttactagaccggacctccaattctctgttaattacgtgtgccaaaagatgcacgcccctacagtgtcggattttcttctcctcaaaaggattctccggtacatcagaggaacaacaaccatgggaatttcattcaacaaggacacagattgtcaactgcgagcttacagtgacagtgatcacgccggttgtcatggtacacgtcgctccaccggtggcttctgtacatttcttgtcaacaatctaatctcctggtcttctcgaaagcaagtctcagtcgccaaaagctcaaccgaagctgaatatcgctctatgtccgatacagcctcggaaatcacatggctagtcaatttacttcgtgatttgggtgttccgcagttatagctccccgaactcttctgcgacaacctctctgccgtttaccttacagcgaatccatcgtttcatgctcggacaaagcattttgcaactcactatcattatgtccgagagcaggtagcttttggtgagctcatcgtccatcatatcccgggttatctacagctcgctgacatatttacaaagtctctcgccaaggctcctttcgaatctctccgattcaaacttggtgtcgatttcccacctcctccaagtttgagggggagtatcaacagaacagctccaaacgacacagttttggaattgggctcaaaaccattaaagcccaatccgaaacaagtgcccaatccaagagccaagcccaacatagtgcaacgacaacctgcaacaacaaaggacaaaagcagaaaagttgcagagcggtccttatctccacgcagtacggaagtaacgacgaggaatcgctatgaggctcttgaatcatgtgaagacaacgacgccacataacagccaagtgacagctatgcaaatcaagaagacactaggttaaatcaatctagatgtataaatagacatagcttgtaatcacaaaggcttaagttgaaagcaataaacaaaagactttcgatttcatattttaacttacagctaacaacaacatgtcattaaaatttgtagccgattaaattatcaaacttagtatgtacacctcgataagaaactaatagggaattctctagatgtaaataaaaat

SEQ ID NO: 22706 - DNA, 554 bp, Arabidopsis thaliana columbia
ccagcgattcatatgatgcaatggatatagatgatggtgtgactccagtcctctctgaagctagaacaacggacccgttcccgcttcgtgatccaaactttgggagaagtctatttgataatgatcctgttatgtcgcgtcccccatttgttagtcatccaagggaggccagggagatacctatagaggttaaagacagcaatgggccatcaggtcaatctaatgatgctcctactattgaggatgtgaccgagacagctcaagctcacggtccagctgcccaagaggcggtcattatagatgaagtaagtgatgatgataatcagtctgctccaaccggacaaagtaggcatgctgtacctgttggttctgcagaaaataatatgcaacattacaatgatatagaagaacaaattattcgagctgctattgaggctccaaaatggagactggtgatgacgtaacaaaatctgtcacagtgcagtcagctgagcgagaagtgttgcgcagtgaaggttggaaggcttcatctcagaaagagaacttctgaaatg

SEQ ID NO: 22707 - DNA, 476 bp, Arabidopsis thaliana columbia
ctaactggaaacaaatgaattgattgttgtgtaacattatcaaatatcaactacaaaatgtatgttaactacaattgttcgatatataatatgttattttatctatatactttcaatacaacagtttgaattttcatggaaaaattaaacatcccaacttgaattgttacaagatcttgcttataataggtagttattaaacatatataccaaccaaacctttcttctcctcaactcctccgcaaataaaacagaaataatattatatttatatggttttgtgttttctttttcttcttaaacgttgagattgttgaagtggtcgcacctacgtctcacttctccatctttatcgcccttgacgccgaccgtgccaagtttctccatcgcacgagcgaaatcctcaaagaatgctgtctcgttagttgcgtatagatccacaaacggcttggtgctgttgtccttaataaggatgt

SEQ ID NO: 22708 - DNA, 553 bp, Arabidopsis thaliana columbia
ccggagtgaaatgttgtatttcaactgacttgtttgtttgccgtctgaagctcgaggcatgtgcgcatccgtttttcaatgaactccgtgagccaaatgctcgtcttccaaatggccgacctctaccattgttgttcaacttcaaacaagaggtatgttaaaccattccaaaatcacttttccttcaaccaaacataactgaatgtgcatacagttactcaatctgttagctctctctttgactattgaaacagttgtctggggcttcaccggagcttatcaacaggctaataccagagcatgtgaggcgacagatgaatggtggctttccatttcaagctggaccctagaaaagcgatctcgagatgcttttccagagcaaaatgccgccttatggaatgaaggagagggagatttacttctctctgattaactaagtatcagcttctgagaagagatgatgtccctccttagacgtggcaattcagctttttgagaatcaggaggcgatgattgtgtctattatatctttttgtcactgacttgtagagag

SEQ ID NO: 22709 - DNA, 428 bp, Arabidopsis thaliana columbia
  unsure (1)..(428): unsure at all n locations
tagtacatctnnnnnnnnnnnnnnnnnnnnnnnctaaagctgatgagcaggcaacattagacctgggcgagcgggtagtaaacgctgcgatggcgcaaccgtaatctatctgtatggcgatttaggcgcaggtaaaaccacctttagccggggctttttacaggctctgggtcatcagggtaatgtcaaaagccccacttaatacgctggtcgaaccctatacgctcgacaacttaatgatctatcactttgacttgtaccgccttgccgatcccgaggagctggagtttatggggatcccgattattttgccaacgatgccatctgcctggtggagtggccacaacaaggtacaggtgttcttcctgacccggatgtcgaaatacacattgattatcaggcacaaggccgtgacgcggcgtgagtgc

SEQ ID NO: 22710 - DNA, 368 bp, Arabidopsis thaliana columbia
  unsure (1)..(368): unsure at all n locations
tcaaaatgatgtttaaagtttggaactttatagacacaatcaaaactattgtctaaaggaaattgatttcttcaggtgagaagaaatacgtgtacattggttcctctttccatcgtattattaaggatttcatgatccaaggaggtgatttcacgngggaaatgtaagttctttccaacaagttacatttcagactgtttgtttgttattttgatatttctttctaaatcgtctttttcgatatggtctcatagggtactggaggtattagtatttatggtgccaagttcgaagatgaaaacttcacccgtaagtactcacaaacaaagaaaaagtctggttttctgcaaatatggcattacttcttt

SEQ ID NO: 22711 - DNA, 550 bp, Arabidopsis thaliana columbia
atccccctaatttataaacgaatctacataatttctaaaccaaattagtaagatggcttcatgattgtttagtgatgaaacgaaaaataaaaaaaaaaacatgtccaaaaaaaactgaaccaattgtctgaaaattaaagagataattgattaaaattgaacctgacatgtgtgactaaagaggaattaggtttgtagttattattttttctaaccaagaaaccacatacagtaataagctgaacggaatcccggtataactcatatttcagtctggtaggatatttattaaaccggaaactataagactgacctaaaccggttgatggaggacttacaatgatctcggcgacaacacgtggttgtctcatgggacggagaaggaaggccaaagagcgagtgacggcgacgacaaggcaaatctgaagaatgacaagaggaaaagcgaaatctaatggactctctccatcgaacactccgttagacgttgtcttcatcatcgccacattcttgggacacttcatcgccggaatagtacagttgaccaaag

SEQ ID NO: 22712 - DNA, 343 bp, Arabidopsis thaliana columbia
cagtccctgtgataagaaaattgtgtaagattagttaaagaatgtaactagtctaagtgatctacaaggaggagttattaatgagattttaacttacttcatctgggagacattgtagtgggtatggttgtttaggagcgaggtccaaactggagtcatatgcaaagtgcatctggcaacataaatggctgatgcacatagcagtgatggcttatacttcaaagcttcgtactcaaccatacacaactcgataaggtagaaggcgagttgttcaagctgataatagaaataatactattcaatgtctaccgtattcaacagaagaattttataggttattaaa

SEQ ID NO: 22713 - DNA, 477 bp, Arabidopsis thaliana columbia
tactcgattgcttcatacgtggacacttcttctggatacgataccaagacagaggacaggtccaaaaagtttgaaaaatgaagctccgggcctagtctcggcatcacgaagtctcgcatggaccctggtcaacatcaaaaccaacgcccatcactcttcaacaagatatcaaatataccagattcattccataataaccactttcatatggaagcatctgggaagcacaataacgccagaattaagaataaccacgtactcttgccagtcatctcgacttgtaccctccaagtacctcaagtatcctgctagagcattcagtacaacctcatttccacctccaacagtatctcttttacttgtgacaaaaacagagttatcaaccttcttcgctaaacttccatcaacaattggctccatactgctttccttcaagttaccaagcctttccattaatactctttcagcagatgcctg

SEQ ID NO: 22714 - DNA, 292 bp, Arabidopsis thaliana columbia
tcgactctagtcgtgaatcccgatgctgtttaaaagataagaaggaataacagaccacagttcattttgcacgaactcgaagctttctactcagattggagaatcaaagttagttattccaccccacggtatgcacaaggaaatggtcaagccgaagtgcatacaagacaatccttagcaatctataaaagcgcttaaatcatttgaaaccttagtggatggtacgatcaactcccacccaatgtgtcggcatatcgtagaactcctaggcgatctaggggagactccgttt

SEQ ID NO: 22715 - DNA, 596 bp, Arabidopsis thaliana columbia
tgcgtttttcaagaagagaggaaaggcctagcatcttaaatcactgatgcaaaccagcaaaagtatagacaaacctgcgtcaagtgagcaactcagttcttgcaagcaggagacgaaaccttttgtcctgggaagcagcacgttgttcagtatcggaaggccattttcagcagcaaatttcttaactcctttggcatttagcctctctgcataaagttccattgtaaaatgcttttaactaaaaggtctctaaacaagaatgatactccaaagaaaggaaacgtacgtgtaatctgtgccctcggggaaaagagcaagccataaagcgtctcggggatccttaaaactcgaaactatctgtctcaagtttgcttcatcgacttcccatctcctctcaactggaataaactcaaagaggtgaaacgcccaaccaaagagaggtaatttcatcaaactactcttaagcacatatttgatatcccaatctggcctttacgcagtgcaagatcccagaagtacatccaatcaacttctgttcggtggtttcaatgagcaatctcgatctcgcaaggaccttacactagagaagatacttt

SEQ ID NO: 22716 - DNA, 500 bp, Arabidopsis thaliana
catctctgcccatcatagcacgtggagattcattcggttcccatttcagctaggtccctgcgcatgcacagaaagttccatcatgagacttgttgagaaagctttattgctcttctttgatagagtgagtgttttacctatggggtggtggtatattaggaaacccaaatccttgtgccatgaatggatctggatgcatcatattcatacccccaccaaatcccatgtccattgggtttaatccgtaacccataaatggaggcattgcgcctggaaacgggcctccaaatccattgaagccagggtgaaagccattgaagccaggttgaacaccgttgaagcctggttgtacgccattgaagccaggttgcatgccgttgaagtactgcggacctggtcccatttgcatcatatagtcagggcctgctagatctggcacaggattccattgcatgtctgcaataaatcacataaacaaaccatcttttagacctcccatt

SEQ ID NO: 22717 - DNA, 575 bp, Arabidopsis thaliana
  unsure (1)..(575): unsure at all n locations
cgacaacaagtgtcttctttgcgggaataagtttgacggacgaattcaccactgtgatgtttgtaactttaccatatgtggcggctgtatggaaaacccaccgccgcttagtgttgtaagcccgaccacccatgagcatcaactttatcttctttcaaaacctctcggtttcacttgcaatgcttgcgggactcaagctgatcaaagcccttatttctgtcttcaatgcaacttcatgattcattgggagtgtatcgatttgccccgcgtcataaacatcaaccgccacgatcatcgcatctcctacactcgtcgtcttggacatgggcaaaatacatgcggggtttgtcgtaaaaaggttgatggcttctacgggggttattcttgctcaaaatgttctaactatgttgttcactcgagatgcgcaacggacgaggatgtatgggacatgatagagctagaagggacacccgaagagccagaggaagatgcgccattcgaggtgattgatgatacacgatcaacattttaccatgatcatacttagtntcacaaggatgggaggatctcatgaa

SEQ ID NO: 22718 - DNA, 594 bp, Arabidopsis thaliana
  unsure (1)..(594): unsure at all n locations
gtgtcttctttgcgacgagaagtttgatcaagatcaaggtcttcaccattgtgatgtttgtaatttcagcatatgtagagcatgtatgaaaaacccaccaccggttggtgttgaaagcccgacgacccacgaacatcagcttcatcttgttccaagacgcatccatttcacttgcaatgcttgtgggacgctaggtgaacaaagcccttatttttgtcttcaatgtaatttcatgatccatcggcagtgtatcgatttaccacgtgtcataaacatcaaccgccacgatcatcgcatctcttacacaagacgcattagacatggaaaggggatatgcaaagtttgtcgtaaaatggtagatggattctatgggggttatatatgcgtcaaatgtcttagttttgctattcatgcacgatgcgcaacgagagaagatgtatgggagatggtggagctagaagggacgcctgaagaagatgaaattgggccattcgaggtgattgatgatacacaataaaacattttagccatgatcataacttacgaatcaataatgacggtgatgcccanattctcatgaaaacatagtttgtg

SEQ ID NO: 22719 - DNA, 2364 bp, Arabidopsis thaliana
ctgtcttcactaactccattgatcttgggagactacagagtctatcaaagttgtcaagatggtccaatgggtcctccattggcagtccatgaaacttgttgctttgaatcatggagataagaccactcttgatctcaaagttgttgttctgaataggaggtgggacaataccagctctctgatggtggtttctaggtgcatcaccagcaccaatgttgcctggcaactcattagcattcacctcattagccatgactactgggtttcaagtggcttgttgttccctgagttcacgctgaatcctgtcgatgtcgtctctgtaccgcaggacattatcagaaccttgagaacgagtttgcatacgtttcgatcttactcggttggtgtactcgacgtgctagtcgagtaagagtacctgcaagacaaaaacaagcaaatgaagaaacaagtgagtaaccagaaagaaagaaatagaacttgatcttaataactcagaaatcctaaatgtaacaagaaaaacacccaaatggcaacgacgccaaattgatacaaaggtttttgtgtgtcaattccctaaatgcatcttatgtcattgcagcatttaaggtgtcaatccaaatgggtgtaattgctatcaatcaggatatgatcagagaatactaagtcaagccaagtgtgaatgggtttggtgtgtttctactaaacctaagcaacaggttaacatgcaaatcaaataacaagaacagaaagtaaaccaagcactaggtaaagcactcggtcgagcaaacgagtaaacaggtcgagtacaatactaaaaacaccaattttgcacaaaacgaacaaagtactaaaaacacgagttttgcacaaataaacgaaacagagctcttaagaatgggataattggtcttagtggactcctcaatccattagctaactaacaaactcaatcaagctatccttagacaatagattcaaaaccaaatcaagccacttccgtgtgagtgattctcataactttagaacttcctaatctcaatttccattgatgaaacataataaagcaggctttaaacaccaatctattaaagtcaataagcagtctaatcatccaattccttgggctagaatctacaaatctctgaaattagttggttcagacatttcatcaaacatcttttggatggagaaagtctgagatcaattttcaattgatcagaaagaaaatagcattaagaactcctaaaacagaagggaatcatgcatataaacacttagctagctaaagaagagaggaatccacctaaacctaacccatcctcaagaactctgaagaacactactcaagaacaatgaagaacatcatagaacaaaacccagaaaattcataaaacccagaaatcattataaacttagcaaaagatagatctcaatgagataaacaagtttgcagaagaaatcaaatccaaattctcaacacaacaaccagaaaatgcaaaagaaaatcaaggaaccctaatatccagcggacaagacaaagatcccttgggcaaaaacataagaggtctatttataggcaatcctaggttgccctaattgggaataagacaaaaaagataagtcggcgcaggagccgtcggccctaggccgagtagaaaagccgagtggcttgctcttggtcacacagctcggctctaggccgagtggcatggtcgagtagcttctcttcatccttaagtgcacaactcggcctccagccgagtgccttggtcgagtaggctccttgttcttcacgtgtgctccacttggcctccagccgagtacataggccgagtatacttcaaatccttccttaggttccccgaactcgagtatgtccatcccttgtgctagaaacctccaagttgagtccaaaagtacctaattcacctgcaaaacactccaaatgcaagtatgctatgcaatgcaatgcaaaatgtgcaaaagaaggaaaagagactaagaatgcatgaaaaggggcatgaaactaagctaaatgcatgaaaaacaagggcttaaaaaggttaaaatctagtgttatcaacacccccaaacttagctctttgcttgtcctcaagcaacaatagaactaggctaggagtgaggtttgaaggtggggattcagaaccaaaatatgcatgtaaaatagatagtctcaatgtccatgttgctagttctagagtgctaggctgaatgacctctacttaaaaactttagccatcttcttcacaacacaacctaatctttcacttagtctattcaagccttcaaatcagcaaattccctttaacatttattaagcaagagtcatggatcatactacac

SEQ ID NO: 22720 - DNA, 849 bp, Arabidopsis thaliana
tcaaattctttaagacgggacctagataaaaacataacacatatgccattttcattaatgtgttctttagattaacgatgtgatctaaagagatgcagagtgcaaaaacaaacctcaatattataaatcttttcttttcaatcgccaaaggcatacaacaaagattaacagaaactgatacaaaggtaggggtatgaattgaagggtcctactactaatatttccttttcatattattattactgacattatcgttgagtacaaaatataagtactgttattgtagctttgcaacctcaagggtggtacgatattggtgtatcatgtgaatgagagacaaagcaaaagaagtcacgtgcaagtgaggagacacatgaaaaggaagcttgcttgaagaaaaatatattcttaggatctaaaaatatctttcacaaactctgtttgagtttaaataaggaggggatatcgatttagagagattatgctttagatgttgtgagagttctttgtgagactttgactaagcaattgttttgataatcaatcagatcatctttctaattgaatatcgtatttggaattggagtttgggatatcaacaacctaacaaaggcatcaacatcacttaacgagctgctgcttcatcctctactacaactgagaaatcggcttcctatagttacgtttaggagtatgggctgttgatttgtaccttctagctaagatggggatgacaggatttggcaaggtacgctacggaaaaatctataatttatcttagtagacacacaattgttttgacttgtgtcaaattggacggtgatagaattattgatacaagatatggtt

SEQ ID NO: 22721 - DNA, 1957 bp, Arabidopsis thaliana
tagtgtctcatgtagttctagttcgcgttcttcagactggataggactaggtgggcgcttatatcatgggttgggatgtgtttaaaagaaaagagggaatccattgttgatgaggaaagggaaagaattctaggggaagtaagctaaagaagttagaaaaaaatctagtaaaggtgttgggaatgttaaagaaaagaatgaggttcttgttagctaaagaagaaaggttaaaagcctttggttttaaaaaaaaaaacaggaaccttagttgttaaagaagtccaaacccgctagatgtatcaagagcgttgagaaagcttctcctagagttaagagaaaaaaaaaaaaagaatgatatgaaaaagagtttgaaagattcatgagtgcaaagggtagagttaagttgggacaggagttgggattaccattagagcttcattgttatactctgggtagatgggatcttatctctgtatgcataacttgggacttacctttagcattctactaaagctcaatcattcttgagggatcccctgttacttaagcctattctgtaggggaccatctttgtctcttgaccttcaccttagccaaatgagttcattgatgatgcattgcttgattcacgttccagaactaatgaatgttaaagggattggtagatttgaaaacatgtgtaggtcgagtataagagacggatttattgataacaaggcatggctaatgtttttgagtagaattcaatcatatcgcattttagaactaccaacttggacattaattttatttgctctatcatatgctttggttctgagtccccgccttcactcctctcattcaactatgtcttcctaattgcttgagggcaagcaaagactaagtttgggggagttgatatgtctataatttgcatgttttcagtgtccattcatcatcgttttgagtccagtttcgtatcattcatcactgtttgatatcatttctcatcattcttgcatactttgcatgattaggatagctttgcatacatattgcatttctgagttgttttcaggtgatttggagctgtttgagagcaaattggaagaaacgagccagaaccagaagacatactcgacccctaggtcgagtgactttggagccattcttcccatccactcgaccaccaggtcgagtaacctcagctcaggccactcgacgacattactcgacccccggtcgagtaccgcttcgccacaccacctgaccacactcgaccattcactctaccacgttactcgaccccctggtcgagtatcatcactcaccaccatcaccatcactcgaccggacactcgatcacgtcttcacagtctactcaaatccgcactcaaccagacaagctgagcacaaggaagaaaagaggagaagacaaagtgtttggaagcggcttggacctccatcggatcacgaagcccatctcggcccattatcactctatgggccgggcgattaggttattggcccgtctactatcattttatttcgtttggtataaatagatgttttagggttctgtcctaaaacatctagtcgacattgcgtttttgcttcagttttattttcagttttactctgctacgccgcttttgcttctgcaacctgtagttcgcgatttttccaagttattgagattccgcgtttgatttcattagtcatcttgtttctctactctttatctctttacttatgcaatattatcgtttacctgcgtttatgtctttgagcatgctgtctgagtagtgacttagaattcttagggatgggatagagtagttgtggaatccgtagtctgtagaatggttaagttttagaattgattgaatccctttaggactagttgcgtttactgcttatttctttctgatcaactggaattcgatcccaagcattcccgcacccagaaggtgttcga

SEQ ID NO: 22722 - DNA, 1443 bp, Arabidopsis thaliana
aatccatccaagcgcttgattgataacctatactcatgaccatacacagagaatctcaagaatcccaatccttcacgatccaattcatcagaggtcataccttggtagagctccacttgcagcggagaggaattgaattgtctattcttcatatgctacatacgaataagccatcagagtgtccagatgacaactctggtacaggtgctgaacatcctccaacaatccaaattgtgcaagcgtggtcgagcatggataccttgtgctacaaaactcattcaatttgaagagcctaatatattcctcagcaggcaatacatcaggtttgtgcagaagtttggtagctctacgagtatgctcaggcatgtactcgtcttcctgatcctcatctataagctcatacctctctgtcattgctctcttcccacgggctatctcagcttttcttctgaatattctctctgttctctttctggccttgaagacgacgactctgtctcatccatgttgtagtcaggatcaacagaagaactgccactgtaattactcatgattctcctccagaaatctagatctcaaagctcaaatgtcaataggttagtctcaaagataacaatgaaaccaaaattgttatcaacaagcaatgaaatagacccaattggtcgagtacaatctgatactcgagtaacctaagctgttctcgagttacactaactcgaattggatctattagagtagaaccgttggtcgagtaaactctctgaagttggatggctctgttggttgcaagaacaagaggtcaaatggtttgttgtagaggtcgagtgaaagcttgtggtcgagttctgtggttgtaatcgagttgtccatgagacttcgacggtgaacgaggcagagtactcgattgcggcggcgcagagatggtcgagtgttgcgagaacaaagtgatggcgaacggcgaagtgaaaaggtcgagtgacggaggaaatgaactcggtgtcggcggtgcggaggtcgagtgctttttggaggtcgagtaaacagatgggtcgagtgaatcttggtgagagatagcgatacatggccttctgtagagtaaaagttttggatttttactctatctccacgttgttcctttgtccctgagaaccacaaacacaactaagacaaattaaaaataacaagaaaagaaaaatttatttacagagatagtcatgggacttcctcccaagtgagcttgtttaaagtcattagcttgactcctttactcctttaatcatcaagaagttcttggagatgaaccaatgtcacctctggaaggatttgatccgctaagtatttcttgagcctttgaccatttactgtgaaatctccactcttaccagctagagtaactgctccataaggacggacctcagtgatacagaaggcgccagaccatct

SEQ ID NO: 22723 - DNA, 1362 bp, Arabidopsis thaliana
ttggttcatatcaatggtctgaacagcatcaccacgggtaaagatcattgcatgattctggttctctggctttccctcgcccagcttcactggaccaggtagcttcacacggaatatttccacttccttctccaactggtgatcgtatttcaccagaacggagtaataatcagtctctcctcttcccgcaggcacctcatccacatatgcaatacggagagcttcgttctgcttcatcagatacagaatttcctctgcctgaggctctttctttgctttttgagacccgtagatctgacacgccacaacatatgtgaatttcatcaatgcagtcccatactcatggcctttatacagcgtactcacggaactacttgctctgcttaaggaagatcggtcgttttcagagacaaacccatcagattgaccacccagttctccctgcaaattcctcactgaaccaagctcctgagcaccctcgcgaatgtccatttcagacgcagagtcaagaaaagcgagcatcttaagagcccggtagtagtacatcatcccacgaactgtacgtgccaatgtctgacctctgtaggaagcccaaagcctgaggtctctcagcttggttgtccacaactcactatctgtcttgattccttccctatgcatccgttccttgaaatttttccattcatcagcataaattgtctgcaggtagtatagggtggaaatcccatcctcagtctcatttcggagctgttctttgctgtatacaacttcctcactgtaatatggagtcagaacactgaacgccatcattttctcaacctgaggggcatgaggcatgttcatgaaaagcgaattactgaagaaagcaatccgccgtctcgcctctagattcacagggacgctgtgcatagagtccctagaggtgagaatcgtgtgtaaacgcctaacctgccggtagaagtcttcattgcttgcatcaggaagcctaatagcattttgaaacagcaactttgaggctgggtctcgaggagttaaaccttcattagatagctgttcagttgtcttcttctctataaagaactgtcgagttgcaatctcataaagagactgcagaacattcaccacccgcccactatctgtttcctcatcatttaccagcccaaccaatttctgcagtgtttcataaatttttggcagcaggtccactctaaaggtcttggtgaactgctctgactgaatggactgattaattatctgaaagaagaccgtaattatcgaatgttcttcagtgtcaactttgatgattgagagcaatagatgtttgatgctgtcatatgcctcaactacagcacaacgcctgta

SEQ ID NO: 22724 - DNA, 3530 bp, Arabidopsis thaliana
cgacacactcttgggtcaaccgacacactcttggtgcgatcgacaccagtttcggcccagcaaaaaccctagacgctttcaagtttacaaaagctcatgtttgccccagaagacttccctatttgcattattagtccatggacgtttataggatctatatatattgtttttacacctaagtttcttttatcaagtcttttatgaggttctttgcaaaccctattgtaagagacataaagctatgcatccattgttattcagagtgtcattcatatctatatacagtgaagagatcccttctttccccttctctatttactgtttttatgctttttatctcaaatatgttgtttgcttctaccaatatgtctgagtaatctgcttgttaggaataggatttctcattagggattcatatggtttagtagattgcctccttgctaggttatctgtagaattcttcatctttaattgtgcttaatgctagatctagattaattaactagatcttgaatccaaacaatagatatgcccgccataggtatctgtagttggatctattatttgatgagtctggtttataggtgtgtaataagaatcggcctatctactaagatgaacaattgaactcgttaagaatgcatatttaggttgatagtctctcggcttctccggtcactattagctatagatatagggagtttcgcggcacgccaccggttattccataattagagtttgagtttaagaatggttcgataacaacctagctttcattagatctactaaccaatagcttcctgagaataccctgttcctagctcttttcctaatcgtttacaacacaatcaatctgctgttttcttattttgttttcttaatatttcacacataccctgctagcttaatctcgatatttaactcactgtttgaacaaaagaactccttgaattcgatcctaaaatactgcaattgatctcttatttgagagagtagttctaggtaatttgaaccatatcaaatttggcgccgttgccgaagttcttgggaatcatcattgagtttagtttagagattttgtctagtttttacttctattttgttactcacgcgtttcttgttttcttcttttctgtgtttcaggtgtatgcctaggcaaacaaggagcacaaaacagaaggagcttatcaacttgtctgttctggacttgggaaaacttgaatgcaccaaacgaaaaactcagaaattagcaatggctgacagagtcatccgagctgatgcagaaggaattttgagagataaggatgggcaagcctacaatgaggctggtcagagattggatgatcatggaatcatcatacctgaggacgctaatgaggatcaggcgcgcctcaatgcacaattagctgctagagacgcagcagggctcggtgtcgagcgacaccaactgggtgtcgatcgacaccatcatgagcagcgcgcggaagtgatcggtgtcgaacgacataacagaggtgtcgatcaacaccaacaccagattcctgcagctattcctccagctgcggaaccacgtcgtacttttggggatttcaacaggccagacctgttctattctaatcgatcagcgattgtacccccaccattccagagaaacgactattagctgaagcctggttactttgctttagttggtcagcatcctttccatgacttatctcatgagcagccaatggatcatatcgagcgatttgaggatcttgttttgagcataaaggctaatggagtctcagagaactacttactgtgcaagcttttcccttattcacttgctggggaagcagcttcttggctgaagcaacttaaagcaggttccctcaagatttggagaagcatcaagatagccttcttgaccaatttctacgatgatgctaagtctgaggagttgcgaaacaagctgtctaccttcacacaaggtccagttgaagctttcaaggctgcttgggttcgtttcaaggagtaccaacgagattgtccacatcatgatttcagtgaggtacaacttctaggtaccttcttcagaggagttgattggagataccagatggctctagatgcagcgagcaatggtaacttcaatacacgttacccagctgatgctacagccttgatagagaaccttgcttgcagcaacagtaccaagaatgctgattttgagaggaagaagattgctggagctgtttcaggaactctgatagcagaggtgaatgctaagctggattcagttcataacttgctcacagggaagaagcatgtccattttgcagctgaagaagagactattgagcctgagcctgagtcagtggaaggagtcttttacatagatggtcagggatacaggaaatttgggcagccacaaggcaacttcagtggcaacagatttgcagggaaccagggttcctcatactacactccaaagcctgctttccagaagacttttcttcaaagcagctttcagaggacctatggaaattcaacttaccaagcccccccccccctcagcagagacaagaatggaatcaatgcttgagtagattcttgagagccaaacaaagcttcttgtggagtttaatggcaagtttgatgctgtctacacagatcttaatgggaagatcgacaatctgagctctcacttgaagaagctagatgtataggtagctcaaactgcacaatctatcaagagacaagagggttttcttcctggtaatcatgatgctaacccaaggaagagctgcaatgccatcttgatcagagaaggagatgatgtgtgggaggaattggacactgaagacaagttggagctcgcagttgcagagatggtgtcaaccaataccctcctgtgtcgatcgacaccatatgggacgctttcctgcaatcatgctgcctaaggccaagaaggagaaggcacagagagtagacatagctgagtacatccgtaccattactcctggtcagaccactgagaagcttccagatccaggtagctttgttcttgattgctctatctccacaagcagattccgctgctctttgtgtgatctgggatcaagcatcaacctcatgtccaagtttgttgctgagagactaggcatgactcactacaggcctactcgcatcactcttttcttcgcggatcgttccaagagaatccctgaaggaatccttgaagatgttcctgttaaggttggtaactccataatccctactggtctcgtggtcttggactatgagaaggaacccaaggatcctcttatccttggaagagcattcctagctacagctggtgctaggtttgatgtgaagagaggaagaatctctctcaaggtttgtgattcggagatggagtttggcatggatggttcagagcttactaagcctatcagttgcattgcttccagtacagacagaactccccagactgatcagactcccaccacagagccacacacaacgctccaacccgttaagctcgc

SEQ ID NO: 22725 - DNA, 2783 bp, Arabidopsis thaliana
ttagagatggcctagagatggagtatatagggtagtggagtgcaaaacttttaaaactttttgttgcacctcgagaccttgcactcgagacattagtcgagtatgagtgatgtttaaaaatcaaaaaattttatacatcatttactcgaccaacaaaagctataaagtcttacggggagtttatcaagtttacagaagattacgagatttcctgaggtttttacagtaaacagagagcacaaaataaagacaagaagacattgtgggacccgccgctgacgcccatgtcttccatgcaagagaccaagagacaaggaatctctttacaccccctctccaccactcgacctcatcgccaccttatcccccccatcactcgacctctccgccttctccttccatcataaacactcgacttctccctttcaccttcatcccaacaacactcgactctcacttctctcatcgaccctcactctcaagctcaccaaacactcgatctcatcgaccactcttcgccaccaccacctctcattcgtctcagtttcactcgaccacaactctcttcgcctctccatcatcacggcctgctccctctctccaaggaaacaactcgacctcaccatttcattcactcgacctctatcaccaagtcgccttcaccacttctcgctcttaaccactcgaccatcttcaccatcaaccaatcaaatcgttttctcctccattcaagttccaaaactggaccgccgcttcactcgaccacaaccacgaaaccagcttcactcgacttcacaagttcactcgaccgcgtctccttcttcaccaatcacacgaactcacctctcactctctcatcttactcgaccgcgtgtaagaagaagctaaccaaacaatccgatgaaccgtctacaacactactcgcctttgccccgcgatcaagtacttgaaggtttcagccttgctcatttgggttcgtttggagaatcactctgtcacaacatatcactcaaccaaagagttcactcgaccaccgcgaatctctcttcgctatcaccggttcacaagctcactcgacccgtcgctcaaagtgtactcgacctcttccaccatcaagcaacaaaaactcgatttccaaaaccaacaaaatcactcggccggtttactcaataacattacttgaccaatttactctgttagtttatgtttttggttttgttgggactaacgtattaacgtttatctttgagtttcatctattttcaggtttcatcatgagtaactacaatggagaatcctctatggatcctgattataatgtagatgaagctgagtcttggtccactagaccaaagagagaagaacacgtttacgaaagcttcaaaggagaattggaacgctctgcagctcgacgtaaccagagaagagctaaaatcgccagaggaaagagagcgatgtcaagtagatatgagttgattgatgaggacatcgaaactgagtatgagccagagtcatggcgcatggagacgaagctgctgaacaaacccgacgaggttacggtggaggagtatatcagattctttgagatgaacgacttctgggggacgagatatccctgctatgagactttagcccagctggggttactggaggacgtgcagcatcagttcgagaagtgtcatctggagacactcatgtcttacccttacgctacctataaagaggagaggatcgagtttctttccacactgcaagtggagatgtattagagtctcacagactttgagctggataccatgggattagggttcttgacgttctcagtggatgaacaacgttatcagctgtcgatcaagaagttggaagaactgtttggtttcccaagtggaaatggaaccaaacccaagtttgaaaggaaagagcttaaggatttgtgggctactagtgggaacaatgtaccactaaactctgcgcggtccaagagcaaccaaatcaggagtcctgtgattcgctactttcagcgttcaattgccaatgttttgtactccagagagtcgtacaggcaccgtgtttaacacggacatggagatgatagattccgcacttacaggcattctccgccgtacaaagggaaagaaggtcctgagaggcgatctcaatgacgcgccaccagtaatgcttctattgatccacctgtgtggatacaggaagtgagcgttgacaaacggcaagaagaaggtgagaggagcactatgcataggtggcgttgtgacgccaattctggcagcttgtggagtaccgccgaaggaaccaaggttagaaccaagaatgatggatttagatcatttgcgttgatgtgagttcttggagtatgacatggttggcgacttctaccgctacaggtttgagcattcgtcgatcaaaatcgccaatattcttctcccctgcattgaagctactagaattctcgagggaaagaacattgacttcaagcctgcgcctgaagatatttatttcgagggcagtccgccaactgaggagatcactcacgaggaaggagttacaacagaggaggttgatgagactaatgaaacagatgaagtggagtatgacacgagcatgtatcattttagtgagcatgtacctccagcgagggagagcaagagtttgagtgaactcacagaaacaacagcaagttgcaatatgggctaccttgttgtgtggtgatggtttggtgagggcagtggtcgtgtgtgtggtttgtgtggtgcactggttgtgtg

SEQ ID NO: 22726 - DNA, 3303 bp, Arabidopsis thaliana
ttttgtctatcaaagaattctttgtatagacgaggtgtaagcgatccctactttgcatttttgggcccgaagtcgagattgttttgagcgaagtacatgaaggcttgtgtggaagtcattcctcgggaagggctatggctttcaagatcaagagaatgggttactactggcctactatgatcacggactgctttaagtatgctcaaagatgcaaacgttgccaactccatgcaccactcattcaccaaccttcagagttattctcttcgatctccgccccataccctttcatgagatggtcgatggatatcattggaccattacataggtcaacccgaggtgtacaatatctactggttctaactgattatttttcgaagtggattgaagctgaagcgtatgtgaatattaaagattcgacagtaaagactttcatttggaagaacatcatatgcaggcaaggcatttggaagaacatcatatgcatacgaaatagttactgacaatgggccacaatttattttgcacgagtttgaagcattttgctcaactgggggattaaagtcagttattccactctgcggtatccacaagggaacggtcaggccgaagctgcaaacaagacaattctaagcaaccttaagaaacgtttgaatcatttgaaagggggctggtatgatgaacttcagccagtcttatgggcatatcgcacaactcctaggcgttcgaccggagaaaccccgttttcattggtttacgggatgaaggcagttgtaccagccgagctcaatgtgccaggacttcgtcgaacggaagctcctttgaatgaaaaagagaattctgcaatgcttgacgattcgttggataccatcaacgagaggcgagatcaagccttaatccaaattcaaaattatcaacacgcagcagctcggtattacaattcgaaagtcaaaagcagaccattctttgtgggcgattatgttttgaaacgtgttttcgataacaagaaggaggaaggagctggcaaacttggcattaattgggaaggtccttatattgttaccgaggtggtccgaaatggtgtttacagattgaaagatttagaggacagaccagtccaacgtccttggaatgtggtgaacttgaagaaattttatgtttgaaaaaaaagaaaaaaaaaaacgacacgcattttttgtacatgaactacggtgaggcttgatcccgaaatgggtacataggcagctcggaaacgagttcagctattaattaaatttgtcttattcatgttgaaaaagagttcgattacacgaacgagtgaaaacaaggaattcgactatgcgaacgtacaaagcaggaaacaaagctaaatttattcaaaacggaaaacaagaaaaaatgtgtcgaagtcctttgaactagaaaatcctcctcgtcttgcataacacctcgaccccttgactggcgatgtcaagaatgggcatcatacaatccgggatgcgagcaaattgtgcgattccgagttcgatccaatctccggggtgagagttgagggtgtgtaactcccttgatatcacggtgactcttcgcagcattttgttgatcttctttcgaagtttcttctttttcgttgagcgttttttgtgttgagccgcgagaccttgatgaaggacatcgcgatgtcttagtctctgctcgaaaggtccctgataagtgcacacggagctcggatctgggatctaaagttacgaagtggggagcgtcctctgtctggtacgttcggaatgtcctcatcaatcatcccgatcctcgaaaagtctggcatggattccgagcatcggaggttgaaggccataactacgaaagaaaagagcggtattgttagtaaggaatgaaagaaccctagagaggaaatttatagggaggtctcttagctttcagagatgcgattctatttaaagccggagtgattcgcggaagtattcacgtcgctttggtcgccctgcattcaaagagtatctccaaaacgaatatttgatgagtcaaggaaaattaggtaggtccatgcgaaaataaaaaagagggtttttagtctcggaaaacatttagggaaggggctcaggaacaagctccttcatcgccgttcggggttcgaagtggacgcctcgtttttgtcgtccatgtcgggttcattcttcacgcgcttccaggagttactgtcctcttcctcgttgtcaccgtcttcactgtcagacgggatcacttgaactggagcgtttacaggaccgggaacttggcctcgagcacggaggtacatccgaagcatgtgcgagatcttcgccacgcagtcgaagttcctccactcccactgaaaagggtcgctctccatggcccttatcttcctctcgatgcaagcaatttgggcctcaagcgtttgcctcttgaggcctaaacgctgcctttcatcgcacaggcggcgatgcttatcgacgacctaaagtacgaactggttagaaaacaagtagaactcgttccgaaaaagagaacaagagaggctttaccttgtccataaagtcgtatgcctccttcttttccttcgaaggaaagtggaaacaagcgtgtggaaagaggacgccggcgggctcgaagccatcgccgggcaaaaacaagggactcccggggtcatgggggcagacggtggttgctccttcgcgttccattctataggtgttgttcaagtaaatttctgcgaacatgtctttcgagagttaagaaagtttatgcccttatttatagtgatttagggttttactcgaaaccacaaagttaataattgtggcatatccgaatgagtttatccatttttgggatcgaggaaaaggcaattattgccttagaagcgtgacacttttccagatttccaaggacaaaaaggcaactgtcacatttaagataagtgggccattaaatgcaaagtaaatagtaaaggctcagagaccgcaaaaataatcgaactgactaaacccgagttggggaattcgcggattcaagtccgcatttttagggataggtctgatcaacctacaaataccgtaacttgaccacatggttaaacaaaaacgctatttaaagagatggactttgcaaatccatactcaaaattagcacaaggaaaacccttttgggatcataatcttaaagaaaaggtttaaagcctcctcaggcaaagtatttgtttaagcctacttaggcagataaagtaatcaaaaagaaaaacaacaataatgaatttcgagtttaagg

SEQ ID NO: 22727 - DNA, 3022 bp, Arabidopsis thaliana
ctcggaactgacctgccaaatatccaggaggatctccacagatcccggatggagctaccatgtgcgtagacctatattaaggagcaaggacgacttggaagagacataaaattcagcttacattcacacacatacttttacacttgtaatctgctttcacattgtaaaagctttgtcataatcaatacaaaaagtccattcgttcttagcaatataactctcaaggtttcagtgaagttctaaccctcctttctcataatctcaattacaaatctctagtgtggatttcagaacccacaagtaccgttcttaattcgtcccaatactatgtcgttttgagtattaggatttcggaacatttcgctataagtaccaggtactttatattttcgagactatgttttattccgtagacagattgtcttcttaacatttcgtaatactttgattgagtattttgcttttcattactaagttgttcatcctgttattgttctgttatcatttgttgctatgatgttttcattcatgtcatcgtttatgttttctgaaatgaagtctgagtagtgactagggtttctgaagatgggatagagtagtttagaatcctcggtctgttagctggttgagtttgatatatagtcccttctggaatagttgttcttaatgcctattgctttctgatcaattgaaatttgagcccagacatttccgcaccatataagtgttcgataaaatgtctgaaccactacttctagagattcgtggctctgtaccaaggtattggttgcagggagcgttttggctttaacttgttgattcataatgcctgttaggttagctctcgtcaatggtgattgagtctggactggttgaacttgagggtctctgttgcggtggcacttagatttggttaacgaactttgttgtctagggataatttatttaacatgtcaatcacctgtaaactgaggaaacgaaactactcaattaccccatcctcgtgaattctttatctaattgatttctttgtttactctattgttgtttgctgcatcttgttagttgttgcttagtttttgtatttttctcctgctactcgacctgatactcgaccacccagttgtctggcaacagactgtgcaatcgagtatccctgttatattttttatctgttactcgaccagtcactcgaccacacccaggtctatgcaacgagttgtgttggtcgagtgttttattatttctgcttgatttttctgtttcctgcatgttcacttaggactactagaacactccaagtcctgttattgcttggcttgactctgtgaactctgattgcatcttgattgctagcatcacacccatttggattgacaacctaaaatactacaacgacatgattggtgttttaggataattgactaaaaacctattatcaatttggcaccattgccaattgggtgtttgtttattacatttgagatttcagacttgcttagatcaagttctttttcaattttcatttatgttactaactgtgtgtttttcttgttgtcttcttgatccaagtacacctctgctgtatgcaaactcgatcaacaggcaaccagaacctcttgttcaacgataacattgaccgcatagctcgcgaactcagagaaaggagaaacactgtcaaccttgtaccccagcaaccactccaaatggctgacgaacaaaatcaacagaatggccctgcaaacattggtgctcgggatgcaccaagggatcactgccagatgaaaggaattgcacctcctgctgtaacacccccgaaccgttttaggactaagaacgaatccggaagcgttacttgtgacgctcgtagacgatccgaccgagttcccagaacacatctggtaccaaggtcagtccatccgcgaacatcgttcctcacaaacacggcctaaggtttttcaacccataccatgtttaagaaattctcctttattcaataaaacattaaaacacttacaatggattgggatccctagcctaatgctcaaatcgagtcaagttacaaatctaaattttacaaagacaacaaactctacacgtgttctccaacgtccgtgctcccctttaggtctccccaactaatgttacctgtaagacaaaaagtagaatcctgagtaatctaatattactaagtgagcccgggtttctaccaaataacaaaaatctcaatcccaatccccaatcaaacaatcaatacgattatactcaattgagtatactcgacaagaaatcacacaacacaaacaaacaagtaatgaatactttttacagagtatatgtagcggaaactacttaatctaaaactagcatgctaacgactcttcatcctacggaccctatactatacgatgctaatttcccataacgcaatgtctccgactgctagacacaaagtctaaaacgatcacatcccttccccaatccaaaccgtctacaagggaccaactctcttacggtaaaacttttactaccctgtcgggtagtcccgggtggtagcgaaccattctaagctattgggacaatcacgacatcgtcacaccttagtcataaaaatgacctaccacattacttattacaagcctaatgtaacctaatactactcgtaataaaatccactagcaagcaactaacacgcaaaagataatcaagccgaagcaagattaaccaacaacaatcaatcactcaataatcaaacaacctaatatgcttgccaacattttaattcgtaataaaaattacgaacaaacaaacaatattcacggtactaagggatatagtacagaaatcaaacaatcaacaattatcgcaaataaatacgatactaaatcctagcactaacaaacaatcaagcaacatgatgtggagaacaaatgaatgggatttcgtggctttatataggctagggaaacttggtgcccaagttacggtaacttggagtgcaagcaaagtaatggatagggtt

SEQ ID NO: 22728 - DNA, 2756 bp, Arabidopsis thaliana
ttttttggtttttctatgccttagatgaatgcagactcaaaaatatacacaatgcaacacacacttcctgagccctcccccaaacttaaatcacacagtccactgtgcgaataaacttggaagagagtactcaggacaaatccaatcacagaaacaaaatgaagaaacaaatcacaacagatgatataatacaatggtaaattgaggcgcttaccccagtcgaagaatgaacgtagttgctcgtcaatggctgcttgtgattgctcccaggccatagacgaaccgccttgttctgtatcagctccagcaggtgggtactcgacctcatcagctctgtggcggccaacaccgctctgaggatactcgacctctctccttctgctgtggccagcaccgcggtcgagtaaactactagactgcagaagtggtctgctcctgctgctagatcgagtgagtgtggtcctcctcttcctcccagattcacgaggctcgaatgatgaatgcctcgcagggacatgccgaatctcctgctctctaggctcaggcctgcgctgacttggctcgggcgcgtcatatctcctcgaaggcatgtcatgagggagctgtccctacagaattgctgtagtggaagaggagcagctgatcttgtcctccagaaacttgatagccctgaggcacttggcgagtaacttatcctgtttcttgcaccacttctgcagcttgctgttgttcctgtgcgttcgctcaaactcttgctttccctcgcaggaggtatatgctcactgaaatgatacatactcgtgtcaaactccgcctcatctatttcatccgtctcatcaacatcttctgttctagctccttctgtgtgactgatctccttagttggcggactgccctcgaaataaagatcttcaagcgcagcacttgaagtcaatgttcctgccctcgagaatcctagtagcgtcaatgcaggggagaagaatgttggcgattctaatcgatgattgctcgaacctgtagcggtgaaagtcgccagccatgtcaaactccaagaactcacatatgcgtaaatgatccaagttcatcatcctcagtgctaaccctggttccttgagcggtactccacaagcttccagaattggcgtcacaacgcacccacgcatagtgctcctctcaccttcttctttccgttcgtcaacgcccacttcctgtatccacacagatggatcaacagaggcattactggtggtgcgttgttgagatcgcctctcaagacattctttcccttcgtccggcggagaatccctgtaagcgtagaatctatcatctccatgtccttgttagacacgatgcctgtagactccctggagtaaaagacattggcaaccgatctctgaaagtagtggatcacaggattccggatttggttgctcttggaccgcgccgagtttagcggtagattgttccctatagtggcccacaaatccttaagctcctctctgtcaaatctgggtttggttccctttccactagggaaaccaaacagttcttccaacttcttgatcgaaagctgataccgctgttcatccactgaaaacgtcaagaagcctaaccccatggtatccagctcaaagtctgtgaatgcctcctacatctccacttgcagcgtggaaagaaactcgattgtctcctccttataagcagcgtaagggtaagacatgagtgtctccagatgacacttctcgaacagatgctgcacgtcctccagtaaccccagctgggctaaagtctcatagcacggataccgcgttccccagaagtcattcatctcaaagaacctgatatactcctccactgtaacctcgtcgggtttgttcagcagcttcgtctccttgcgccatgactctggctcatactcagtttcgatatcctcatcaatcagctcatatctacttgacatcgccctctttcctctagcgatttcagctcttctctgattacgtcgggctgcagagcgttcgaattcatccctgaagctctggtaaacatgttgctttctcggtctagcgcaccaggacttagcttcatccacattgtaatcagggtccatagaggattctccactgtagttactcattacgaaacttgaaagcaaatgtaactcaaaaataaacgttaatacgttagttccaacaaaaccaaaaacacaaaccacacaaagcaaaaacaggtcgagtaaaccggtcgagtataccaaagccggttttgaaattttttttttattttttttttcgttttatgggtagttgatcgagtgattatggaaggccgagtgaagcgatggagcttgagtggtgaaaacgacgaggctatgcaggagcttcggtctagtaaaccgaacgacaaggtcgagtagtgtccttggagagagcaggcggtcgagtagtgaatgacgagtgtagagacacgaattggtgatgagatgatgtgagaagaagtcgagtgattgtagacagttggtagatgcgatcgagtgatgaaacgatgaagaagatggtgattggggatcaagtaaagtggagctcgcggaagaagagaagacggtggtgtgaaggggtcgagtggttgtggtagtggagaggtgatgagagctgtggccgagtgattttgagcgagaagtgttgaaggcgaattgatggcggaggtcgagtgttgttagaggagcggtgattcgagtgattgaatcggtggtggag

SEQ ID NO: 22729 - DNA, 636 bp, Arabidopsis thaliana columbia
gtaactgcaacaaggaagctaagactaacaggagaacgcccaactggtggaaacaaatggattcgcttccaccaggaaattccagttccattgaccgttgacatcgactcagtttcagccatgttcaaggataacaaactctacatccggcatcccaaactcaaaacagaaatccctcaaaccaagccaccaacaccggtgatcatgaaaccccatgatcagcatgagagaaaacaaggccagggtccaaaggcaatggttgagaagccaagcggtggtaaaaccgatcagctgaaacatgatgcacagcagctaaaacatgatgcacagcagctgaaacatgatgcacagcaaaaagcaagggaggtagtacagagtggaaagaataaattaactggtgagcctaaaggacctttgagttccaaggatgacgagaaagacaaagttggagcgaaatggtttgagaagtacaaagaggcaactggaaatgtggtaaaggaagcaaagaacaaaagacagttactttgcaatttggctgcttcggtttcattggttctgctaatcttactgtatgctagaaatgcagtacgttcatccttgtgtggaaaccgaggaatgagtgcacttgcatttgta

SEQ ID NO: 22730 - DNA, 583 bp, Arabidopsis thaliana columbia
tgttcgctttgtgctttacctggaataaccaaagtaacatctggatagttcattccacgagcagatacatcagatgtgacaagaataagtctatttgattccttaaactcgtctgatacacatgttctatggagctgaggttttctagcatgaatctccctaacgttcaatttcatttcccggagcagagtgtacatcagtgatgttaccataccggttgagcaaaagactattatctgcgagaatgaaattggatagttacgagaattaccaaggtcagaaataaaaaagcaatcgtttaagaggatttgttttaccttataatcaggcatgttgttgatgtgctcttttagaagatgaggtactaagtggaaatgagattcgtgtggagcaacaatacaagattgcttcacctataaccgaagcaagaaactcaataaccagattcaagtaacaagcttttgagacaaaaagaagagcttaagagtttccttatcatgagtttctcacaaccgagcccgattgtgtcgatataagagtgatcctttttacacaagttgtgagactcgcggacctgaattta

SEQ ID NO: 22731 - DNA, 2654 bp, Arabidopsis thaliana
aagatgtgaggagaaacgtctagttttgaatggggagaaatgtcactttatggtgcaggattggatagttctcggtcacagaatatctgagcatggtatagatgttgatagagccaaggtcaaagttatgacaagtcttcaagcgcttgataatgtcaaaacagtgaggagtttccttggacatgctggtttctacaaaagattcatcaaggatttcagtaaaattgcaagaccactaaccactctactctgcaaagaagtcaaattcgagtttacacaagagtgtcatgatgcctttgagcagataaaacaagctttgatcagcgcaccgattgttcaaccaccagactgggatctaccttttgaggtaatgtgtgatgcgagtgattttgcagttggggctgttctaggactgaggaaagataagaaacttcatgccatctactatgcaagtaggacacttgatgatgctcaaaggaattatgcaactatagagaaggagttgttagctgtggtgtttgcttttgagaagttcatatcttatcttgtaggatccaaggttattgttcacacagatcatgttgccttgaagtatttaatgcaaaagaaagatgctaagccaagacttttgagacggattttgcttcttcaagaatttgacatagaagttagagataagaaaggagttgagaatggtgtagctgatcatttgtcacgcattaggatcgatgatgatgtccctataaatgatttcttgcctgaagagaacatatacatgattgatacagttgaagacgatgtctacaaacatgacaggttgcaggatcgtgcgtaagtgtcgatcgacactccattatgtcgatcgacactcacatttcagaggaagttgatattcgtagttgcgcgatggtgtcgatcgacacccttgcacctgtcgatcgacacccttctgaatcgacaagaaaatggtcatcaactgagaattgcgccgtcacagcggtcgaaaaagattatccatggtatgctgacattgttaattacctagctgcagatgtggagcctgataatttcacagattataacaagaagagattcctaagagagattaggcgatatcaatgggatgagccttatctctataagcatagttatgatggaatttacaggagatgcattgctgcaacagaggttccttctatactatcacattgtcacagctctagctatggtggtcattttgcaactttcaaaacagtatccaaagttcttcaagcagacttttggtggcctacaatgtttcgggatactcagaagttcatatcacaatgtgacccttgtcagagaaggggaaagatcagcaagcgtaatgagatgcctccaaattttagactcgaagtcgaagtcttcgatcgctggggtatagatttcatgggaccattcccaccttccaacaagaatctctacatcctagtagatgtggattatgtctccaaatgggtagaagctatagctagtctaaagaacgattcagcggttgtcatgaaactcttcaaatctatcatcttccctcgttttggagtgccacgcatagtcattagtgatggagataagcatttcattaacaagattcttgagaaattgcttttacaatatggagtccagcatcgggttgctaccccctaccatccacaaacaagcggccaagttgaagttttcaacaggcaaatcaaagaaattcttgagaaaacagtgggtaaggcgaaaaaggagtggtcctataagttagatcactgtgggcctacaggacatctttcaaaactccgcttggtaccacaccttttcatcttctatatggtaaaacttgtcatcttccagtggaattagagcacaaagcagcttgggcagtcaagatgatgaatttcgacatcaaaccaggtggagaaaggagacttattcagttgaatgagcttgatgaaatacgaattcacgcctatgacaactcgaagctctacaaggaacgcacaaaagcttaccacgacaagaagatcctcactcggacctttgagcctaatgaccatgtacttctttatgattctagattgacattatttcctggcaaattgtcttctcgttggacaggtccctacatagtccactcggttaggccatatggaacaatcattctcaaaaacaacaatgacaaatcatttgctgtgaatggacagagagtcaaacactactgggctgaagctgagattccagtagaaaagcctttggatcttcaggatccacctgttgattaagcaactacaaagtcaagctattgactataaataagcgcttagtgggaggcaacccactggtaagtatttctcctttttattcatttcattcatttgatttctaaccaaaaacgcgatggtctcattttccaggtaagtcgttttaacctaaaacttcatcttcttcatttcatttttctcaaaaccgccgaattcactaaaacctccatagatccttcgattcttcaccatttctcgtgatttcaggctcttaactcaatacaatctcaccctctatcttctccaagtgtcaattccattgatctgcaagatgacatgccagaaaaagaaggctaggaagagcgtcggact

SEQ ID NO: 22732 - DNA, 433 bp, Arabidopsis thaliana columbia
tataagatcgttaaaagatcaatatgatgtctaatagaacaagaaatgtgtgattaaaaacagagtaaaaaacatgtgacatatgtctatgagtgtaaaaaccacaaagatacaatattacaatgattaaaacctgcaacatatgtctgccaaagtctattaaggttaatctgcagctccgaggtcacatacagtcgagagcctacactactatgtatcctccatgtgagggatcatgaattctttaccacgaggatctagcttccccggtccggctaaatctctgacttcgtccaatatctctgtagcaagtttaatccgtacagccaacatgtttttatcgcaaaggccatcaaatgatcttccaagcgccaggcactctatgtatctcagtgctacacagcactatcatctagatctttattctcaagga

SEQ ID NO: 22733 - DNA, 859 bp, Arabidopsis thaliana
gatttcaaattccttgctgaggaagtcattgtctggatatctctctgcgactgatttttcaataaaggcaaagatgggctgagcaaagacttggtaagctccaacgaggtggacaacaatggcggcgttactcatgtcaaggagccaaaacgggttgtagaatccaaaaccggtgaggaggtttcccggtgctgcatctccaaaagcggcataacccattgagccacatagcatgtagaagatagttgtgacggcaatactgatttttgttgctttcttcatcgttttcgattccgccggtggggatcttacagtatcctaattacacagagcaaaaagaatcaaaaatttaattgaaaaattgaaacttgtgtgcaaagaaagtgtttcttaacctaaaaatgaatcttctcatttttggttatagaaattttttgaatcttctgtggaaagaaggctttcttttgtttacctgaatctcgattaggacaacagagtatgagtacgcaaaggcaatgtctccaagtgcttggaaggttctccatatcttctgtgtttgagtcactgttccgatgcttattccagtgagacttcctttgaaaactccattcgctgagacaattcacatcaagatttagctttttttttaattctcgtgaagcttataagagtctttcgtagttatttttcacctgcaacttgaacgattccaagagctagaccaatggcagagtaagtgaaggacataacagctgcaacaatggagatccccaaatctgatcgaaatcaggaacctgagagagcaagatctctgccacaccaaatacgatcatgtaaggattactggacatgtgacatg

SEQ ID NO: 22734 - DNA, 619 bp, Arabidopsis thaliana columbia
caacattaatgaagaattatttaaacgtactttactcaatttccatcacatgcatagctactacagaataatacgactcgtcaaactttatataaactctatttccctcgtccttaacaatacatttcacgatcccaaatctctctttctctcaacttctctttttaacaaacgaaaaaagacatggggcatagaaataccgtattgacaatacttctaaccatttctatagccataatggtactcattgctacagtatttgttagcaacaacaaaacagaaacgttgttacaaacgcatacgcagacgcaaacgctaattacaacgggaagggtgagccgtttcttagcgcaaaacgcaaagaacggtcgtaatcttaacgcagcggatcattgcaataaagaagaggagatatgcaagagtcaaggaatgtacaactcaaccatggcgtgttgtacaacaagtgtgttgatctggcgtacgataacgataactgtggcgcatgtaagaccaatgcaagttcacgcagacttgttgtagaggagagtgcgtttacttagcttatgataagaggcattgtggggagtgcaccatagttgtttggttggtgagtttgtgc

SEQ ID NO: 22735 - DNA, 333 bp, Arabidopsis thaliana columbia
tactacccgaataaagtttttctcgaatccaaaatagaacccagaaagacatcatcaagactcttcatttcctttatcagaatcagagatttatctgataatgatggcgatacgaaaggaatcgacaaaagccctatggtagtcttgaatattgcgggcgatggtggtggtggtattgttgataggaacaacaaaagatgtctgaacatcgagacagtgatttggattgtctctctcagaacactcgtggatgctatcgctgaatcttgatctgtgttggtggaaatatctctggtttccatttttcttgagtgcattaatctgtttagagat

SEQ ID NO: 22736 - DNA, 424 bp, Arabidopsis thaliana columbia
atgagttcctttatcaggtagtggaggcaagtgagataattgctgcagaggatagaaactttccagaagatgtgttgattctttcttgcaaagaagatcgagatttctgtcttcctttcgttaatcaaggtaaccgtcaatgccaattttacactatgaaaattactaagaaagaacaattagaagttaattaatgtcatctttccattaacaactgtaatgtaggagctgtaattttcacctctgagcttttactgaatggaatcgtgattcagaaactggaatatgccaggtttgcaacgcattatcaccaaaatcagagattataattgtagtgtgtgtttgtgtaactacgaaccaatcaacgttaatggatagaacataaattggtcaaacgcaaatctccttacaatttttggattct

SEQ ID NO: 22737 - DNA, 796 bp, Arabidopsis thaliana
aagttgaacaatgaactgatatcttgtccacatgtatgtaggaaatgttcgaaaattctgggtgacctcttgtgtacgatcactgggtttgactctttctcgttgcaacctaatgctggtgctgctggtgagtatgccgggcttatggttatccgcgcatatcacatggtaacatcttttatcctaaatttggatcttattctacctaacaatcttctattcaattgtattaagctgaaaagtgaatgaatgaatgcatttttcagtcaagaggagatcatcaccgtaatgtgtgtatcatacctgtctctgcacacggtacaaaccctgcaagtgctgctatgtgcgggatgaaaattattacagttggaactgatgctaagggaaacattaacattgaggaggtgagaaaagctgcagaagccaacaaagacaacttagctgctcttatggttacatacccttcaactcatggagtctatgaagagggcatcgacgagatttgcaacataatacacgaaaatggaggtcaagtgtacatggatggtgccaacatgaatgcacaggtgaaatatcttactaaaacagaacacagagatcttgaattttctctaatttgtaagagcatggtgttgggtacgtgtaggttggtttgacgagccctggttttattggagcggatgtgtgccatctcaatctccacaagaccttctgtattcctcatggaggtggtggtcctggtatgggtcccattggtgtgaagaatcatttggcaccatttcttccttctcacccc

SEQ ID NO: 22738 - DNA, 987 bp, Arabidopsis thaliana
aaagcttcgtcaatcatttaccatattgagaacaatgcaaatggtctaagacaatttcagaaaacgagcttgattaccagataatagaaacttagaactaatagcgaactctttaaatttctagcttcaggtggcctagataagttcaaaaattgacaataaactgatgcgaaacagcttaaagcatcaaaaatttatctattcaaagtagttcagacgaaataaacttcataaaacaaaagagcaaacatctgagatacatatttcaatctaaatgaagataaaacattaaactcattgatacgagattgtaacgcacagggcaaagggaaaatccttaacgattagccttggcaactctttcaatctcatccttcttcttgatggcatagctgcaagacataacagttcaatcattagcttcactttaagttatatgaacaatagtgaagtcatttggaagtgtatttacctgttggaagagcccttggctgcgttgatcaattcatcagcaaggcactcagctatagtcttgatgtttctgaaagcagcttcacgagcaccagtggtaatcaagaagatagcctggttaacacgtcttagaggagagatatcaacagcttgtctcctaacaacaccagcagatccaattctggtagcatcttcacgtggaccactggctcaagcaacaaacaaaacattaataagaataaaatgttccttgttccaatgatactatttcagcatacttcacaaggttagtacctgttgacaatggcgtcaatgatgacctgaattgggttcaagtcagacaagaggtggataatctccatggcgtgcttgacgatcctgacagccatcaatttcttaccgttgttcctcccgtgcatcatgagagagttggtgagctctcaacaatggggcactgagccttcctgaatctcttcacagagtatcttccagcggtgtggggaacaaaggtagcat

SEQ ID NO: 22739 - DNA, 553 bp, Arabidopsis thaliana columbia
tgcaaaaactatcacctaatagcatgattctctttctctatgagtccatcaagattaaccaaagtatttttagcgagacgttccttaaccctccccagattcttcatctccgttatgtaattcacattcaccatccgtaaggatttcgaatccagaggtttaggcttcgtgccttcttgtaaaatcactaatccgtcaaggaatacgcgaaaacaaacacaagaagatgaaatcaagaaggcgaagtagcagagataagaatctacgagctgcgagtagcgatttcgaaaaaggatatcgaaaacggcgaagttgggttcagaatcataagccaagacgatgccattgaactgatctccggtggtcagcttgacagcgtataccttccccacctcgaatttctcgtcctctcctccgctgtctactttagccaccgtagcacttgctggtttcatggcggcgaacgaactctccggcggtttctaaatcgcggttttgaaaaagtgacggtttgcaaatatcttggtttatggcgcgtggacaattaatacaa

SEQ ID NO: 22740 - DNA, 535 bp, Arabidopsis thaliana
tcaaaggagctgctgcttctgcaacggaaggtttactgtctttatgttcttcgataactgctcggaactcttccaccactgttgggtccttgaacttcagtgccaatgtagagagaccatccttggcgtcacttacactattcacacaagcaaatgtgattcctttcttgtccattttagccagtttcatttccgggtaaagacttgcgtttaaggtcaacctgtagtttccttttgatctcattactaacctggcttttctgttttcagtcgttgatatattcaccttgagttctcctttcccacgctctttccatcctccctcaagatattcgaacattactgagtcagctgtgaaggctgctttttcgttctcttctcctgtttccactgaaacatcttgctttgatgggaaggcagtagtagtttccgtgctcttcgtggtaatggaagtagcaacggatgcaccaaacagggaagagtttccattgtttgcttggcaaaactgaaggatgactgttcagaaccagaccca

SEQ ID NO: 22741 - DNA, 1169 bp, Arabidopsis thaliana columbia
tcaggtgaggtgaggatcctgaaaaaggttctttcttacgccgataaagctcttaaacacgattgaaaaacaccatttttaaggacctattttatatacacaacaataaagaattgcatgtattgttaggatgaaacataaccaaagaaaaaaaaaaaaagaggagagacttgttattattcccacatttttttttccaaatacagagaacactttctacaaaagcatctcttttatcttccttcttcatccaccataaaaaagactgaacaaagaaacaactttgaatcaaaaaaattcattgttgtcaccgtaatgtggtgcttgatgttgaagtttcttgaggtcttgaactatatacatcgtcgaaatggagatcaatcccagcttcgatatcgttatcgtccatgaatgtagttctcgacaaatttcttcttgcattctcttcccaatccaattcttcttcttcttcatcttcttcttctatgcttcttctgctccaagagttgtctaataagtttcctgctgtgtagcggtttataaaatcaggtggctcgatgaagctattggtggttgcgggatgagctgtgctgatctgagagtggttgcctcttccccaccactggttcctaccatcaagaggatgctgactcccataactatcctctccctcgggttggtcatggcgcagaatgctctctctgaaaaactgacctgatgtgcttgcctccatgttgagcagatctctgctatcttcaccacggattcccaaatcaggaggccaacaatctgtagcgttctgatttgcggttaagatttcatttgctctctctattgggtgatcagttctgttgtgagcctgagaagtgtaataccagtcaagaagataaggatgattcctctgatctggatcaatcagccacattgaatcagtgtgattgccgctcgcaagcggatttcttggaatgtctctgtataaagcaggggtattagtgctttctcgccacgccctactaggagatgagtgtcttgtgtttatttcatgaagctttcggtcccggaaagttctgagatttgacagaaactgcttcccaagagaatctgactcccaagaaggataactactctggaaactgcaaataaaatgtaacacttaacactgatttgca

SEQ ID NO: 22742 - DNA, 288 bp, Arabidopsis thaliana columbia
cattgtggttaaggaaatcaaagaggaaccaaggtaagtgtgactacacaaactaacgcctagctggcttgcaggcaaggtaggtatactctgttcgtctctgaagaaattttgcggatccacagcagttttcactttcaccaaccgatcaaaattttcaccgaaatacatcctcccgaaaacctctgctactctgtaactgtatgggccaggggtattaactccaatatccagatccctgtaattgatctaagtgtgtctagggttctcggtcaccaaacgagccat

SEQ ID NO: 22743 - DNA, 451 bp, Arabidopsis thaliana columbia
taagctagtagaggtagcagcaattacagcatttagacatgcttctttggtaatttaacaatgcctcctttcaaaattggacaaaatgaaaggccgtgtttgacataagaaagaaagaaagactcatcttgagatgcagcagctctagtcattttttcaagttagattatacattaaaaaaaaaactcatttcaagtctgaatcatcaatctttcaactgaaaagcagatcagacactttagcaaatgcttacctttactcatgggtttcgaaatcattctactagaagcaaaaataccattttcaggcaaatcaattggattggctgcaaaatgcatgatagaccgggcctgcaaatcaatacacaagatgaatgatcaaaaccataccatcaaaatttatattttcaggctggacagaattatgtgattcatttaccttttcaggtggt

SEQ ID NO: 22744 - DNA, 595 bp, Arabidopsis thaliana
  unsure (1)..(595): unsure at all n locations
cttcctcctcatggtcaccggtcacttccattctgtagctccctgttttgtccgttacggcttcttttgtcaatgttacggttccgtttgttctgctcctgcattctagcttcactttcgcgcctatagaaaacaatgtagacaaatttgaataagcagaaatactaataacataaacaatgtgtaatatgtagtatatagatgtatgaaaatgtttaccttcaaggaacttgctgagacgggtaacgaattggacacggcatgtgtcacaataaaccgatccctgaatttggaaacggtcaaagtcatcggcatcagcgatggccacaccggcgagagaggacaggcacacggcagagacaaagaagaagaagatggctttggacgccatttgtttcaaaatgttaaaagattctggtcttctttttgatacctcttctcttttgtaatcgttttctttgtttgagatgttagagaagaggacaactaattcacaagagccacaaagttcggttttatcaaaatcataaagttaaaccatctgttatttttacctanatagagacaatcgttcattagtaaattagtgagtttg

SEQ ID NO: 22745 - DNA, 580 bp, Arabidopsis thaliana
tctccgccgtgtgtttgtcttctctggcaggtttcgccgccgctgatgctgacgacttcgatcgtttccagattcaaggatcagtttactgtgacacttgccgtgtccaattcgttacccgtctcagcaaattcctcgaaggtaacatatttacgcacgtatatctatgtttctacacatgtatgtgtgcatggctaatttacaacgtgcaaccgtttctttttaagagaatattttcgtttaataaaaaaacttatcattttgagatggccatacatgcatgcgcacgcaaactatcttgcatgttagagcctagaggatgcaagcactgtcataaaataaatatatcagtttctaaattcgaatgagagtattgcaatgtccttgactacattttttcaaatatttcgtaaatcagcttctaagattaacattgatcagattcaaatttccaaaatatatccgtttctcttagatcaaaaaggatatataaaattagtaattaaccgaaacaaattcttgaggtctatagcttgtcgaatatttttcgatttaaacatttaccatggtcatacaaaat

SEQ ID NO: 22746 - DNA, 563 bp, Arabidopsis thaliana
tctcttctgcaatttcccagaggcaccaattcattgtgaaaatgtaacttgcgacttatgatccttcccactttacttactctttaaaaactttatcgatgtaatttgatgcatagagacataaagagaacgtccagggagactaaagaagggacgttacttaatctctccccttttcctaaaaatccatataaaaaggaaaccaaatacaaaaaaaacgacgtttcatcctcaaaactcgtctctatggtttaacaaattaacaataacaaaagacatctagagctcatcgtgagactcatcttcctcctcagtcgatgattctcctcctgcaccacctggtgctccgccagatctctggtaaactgctgtgatgattgggttacacactgcctctacctccttgagcttctcgtcgtactcttctttctctgagttttggttttcgtcgagccactccaaagcctctttcgtcgctgcttcgatcttctccttttcatctccttccaatttgtcggcatgcttgtccttgtcgtcacttggttcttcatgttgacacgtat

SEQ ID NO: 22747 - DNA, 829 bp, Arabidopsis thaliana
gtcactggtgattctcgcaagtgcatcagatcttcttctgcgggcaactgatggaatgcttgttgatggagaagcttgtacattacctcaacttgaggtactgcactgttatagattgctcttcaatgcccttcttcgggctagagtaataatcattttctgattccactgtattttaaacttttgcagctacttgaagccacggcaagagcaatacagccggtgctagcttgggggccatctggactagcagtggtcgacggtttatccaatctattgaaggtaaaagcagaatcgaacagagcctatggtttcctgcgtcgattgtagatgatcagtagtaggtccagttaccaaagtgcttaaccttgttcacatctttttgcttctatgcagtgtcgtctaccagcaacaatacggtgcctttcacacccaagtgcacacgtacgtgccttaagcacgtcagtactacgtgatatcatgaaccaaagctccatacccatcaaagtaactccaaaactgccaacaacagagaagaacggaatgaatagtccgtcctatcgattcttcaacgccgcctcaatagactggaaagccgatatccaaaactgtttaaactgggaagctcacagcttgctctccacaactatgcctactcagtttctcgacactgcggctcgggaactcggctgtactatatccttgtcccaataacgagcacccacttttgtttttggtaaattttagttctctagacaaaacatttggacgtagaccaagaagaatatatatatagtttgttgtatgtaatgttgtaatgatgagtgac

SEQ ID NO: 22748 - DNA, 2805 bp, Arabidopsis thaliana
ctgattaatatatgtgcagcattgagttcatctggtttatctagtgctttggctctgagtccccgctttcaaacctcacctccaggttgttcttgattgtttgcttgagggcaagcaaagactaagtttgggggagttgataagtgtgtattttatatgttttgagcatccatttgtcatcactttagcatcatatcatcactgttttataccatttctcatcatttgtcatcactttacatgtttaggaaaggtttgcatgcatgttgcatatttgtgttgatttcaggtgatttggagctgttgacgagctaactggaagaagcggacctgatcatgacaaaccactcgacccagaggtcgagtagaagcttcaagatctcaagagaccactcgaccccgaggtcgagtagaagacatcaccacttcacctcaccactcgaccacgaggtcgagcgtctccatcacctgaccatcactcgatcacatcactcgaccccgaggtcgagtgttttcaccaccattacctgatcatcactcgacctcatcactatacctggaagtcgagtatcaccatcaccaccactcgactacatactcgatggcaagcttcagagtcttcttcattccgcactcaaccagacactcgagcacaaggaagaaaagaagactccagctatttactcgaccttccactcgaccacatgggccgagtacaattcttaatccgtcccaatactgcgtcgttttaagtattagggtttcgaaatatttggctataagtaacatgtacttcacattttcgcaaacaagttcttatctagttttattccgcagacactgtgttcttgaccttttgtaatctggatttctctttatctattcagtattcagtattcagtatttgttcttgatttcttttactgttgttcattctgttatcatcctgctgttacactgctgttatcatgttttcaacctgttcaacgtttatgctttcaactatgatgtcttagtattgaataggtttccgaggatgggttagagtagtgtcggattctcagtatgctaggtggttgagtattgattgatagatcccttttggattagttggtctaatgcttattcctttctgatcaactggaatttgagcccagacatttccgcgcccaaaaagtgttcaatgaaatgtctgaaccactaattctagagattcgtggctctgtaccaaggtattggttgtagggagcgttttggctttaactcgttgattcgtaatgcctgttaggttagctctcgtcaatggtgattgagtgtgggactaggttaacttgagggtctctgttgcggtggcacttagatttggttaatgaacttgttgtctatggataatttattgagcttgtcaatcacctataaactgaggaaacgaaactactcaattaccccatcctcgggaattctttatctgattgattttattgtttacactactgttgtttaatgcatctggtcatctgttccttaatttctgcaattctttcttgttactcgacctcatactcgaccacccagttgtctggcaagagactgtgcagtcgagtatccctgttatactttctgtctgttactcgacctgtcactcgacctcatccagtgctctacacagagctgtgttggtcgagtgttttgctgtttttgtttgattttctgttttctgcatgttcacttagaactgctagaacacaccaaaacctgttattgcttggcttaacttagtgacttctgatcacatcttgattgttagcatcacacccatttggattgacaacctaaaatactacaacgatatgattggtgttttaggataattgactaaaaacctattatcaatttggcgccgttgccaattgggtgtttgtttgttacatttgagatttcagacttgcttagatcaagttctttgttaattttcttttcagttactaactgtgtgtttttcttgttgtcttcttgatccaggtacacctctgctgtatgcgaactcgatcaacaggcaatcagaacctccttttcaacgacaacatcaaccgcacagctcgcgaactcagaaaaaggagaaccacagtcaaccctgtacctcagcaaccactcgaaatggctgaagaacagaatcaacaaaatgccctgccaacattggtgctagagatgcaccacgtgatcaccgtcaaaggaaagaaattgcacctccggctatccagaacaacaacttcgagattaagagtggtctcatctcgatgattcaggggaacaaattccatggtctgccaatggaggatccactcgaccaccttgatgaattcgataggctctgcaacctgacaaagatcaatggtgtcaatgaagacggattcaagctccgtttgttttcattctccttgggcgacaaagcacacatctgggagaaaaatctgccccataactcaatcaccacctgggatgattgtaagaaggtttttctatcaaagttcttctccaatgccagatctgcaagactcagaaatgagatttctggtttctcacaaaatactggtgaaagcctctctgctcagcactctctacagaggagtcctaccacgcatcagaatgcttctggataccgccagcaatggaaatttccagaacaaagatgttgaagaaggctgggaattggttgagaccttgcccaatcagatggtaattcaacgaggactgcgataggaccgtcagaggcacagctgactctgatgcaaacacaggaaggag

SEQ ID NO: 22749 - DNA, 1693 bp, Arabidopsis thaliana
  unsure (1)..(1693): unsure at all n locations
agcaaatccctcactgttacttaacaatacaaaaagacaaatgtaaagcaaaggacttgcatctatcaataacaaaaatacaaaacctctatatatggggctcaacagagagatttcactgaaacagaactgtcactatcttgcgcctgagataagcttacgaagttacgataagataataaaaaaaaaaaacagtttttgagacttgccgttgactctcgtccgatcattaactgacatacttttttagttggaaccaactctctgactccgaaaccgacacttttcactcttctgcttatgttagccaactattacattaccctactaacgtaagcgtgttgattaaaaatcaaagggaacggaaaaaggacttacggtaacgggcgttacgaggctgccgttaggacaaaatcgtaaatgacaagtttctcgtcggatcccaatagaaaccgcgaattcgtaccaggtttggatgtattaacttagccacggctcgaacctgagcttcgaaatctctaaaccggtctaaaccgcattcagctattcgtcgaaccgccacagctgttccgtcttgaagcaccgctttatacattatgctcgaaccggtggctcccaaaatataagctgatgctttgagaagcgtttcgatttcaagctctttctctgaatcgagattcactaacgttccctttttttcttgatcgtctaatcctgaccgtcgatttggtccgaccgggttctcttcgtcggattcggattccgatgtctcagattcctcttcttcttcttcgcagtcaccgtcaacgtaaacggatttgcgtaaacagtaccattttgagaccttggaatctgttgatgacgtggaccattttgacgtagccgttacggtcttccgttttctcgactggtaaatgtagaaaaacacaatcccgaggattgctaaaccggctaagtcaccgacaacaatgccaatgataagcaccggtttatgatcccattttgatttcggaccggttttggagctaattgggtgattggttaagccaatagtatttggtatagcagctaatgcaggaggagaatttggagtcggcgatggaggtggagaggttgcttcaccgtcacgacaagggtgttttgcatggtcggatccgcagagacccgggttaccgagaaagagttggattcttggttatcgagaacccgaaaacccgggatttgacctgtaagttggttgaatgagagatcaacggtggcgtcttccgggatttcgtcggcgaaacctgacggaatctcgccggagattctgttgtacgaagcgttgaaatagcgtagacgattccctctgaaatgtgacggcaacgagcctttgatcaaatttgacgagagatcaagatactccgtcgacttaaaacctcccggaatcccgccggataaatagtttttctgaagtgaaatctccgttaagttccggttccatcctaatgtgttcggtaattcgccgacgaaggaattatcggagagattcaacacttggaggttcgaaagcgcgccaaanactcgccggtagtgcaccggagatgtgattatcggacagatcaagaaatcgaagctccgtcgcgttgagaagcgaaccgggaaagaccattgatggaattgtggaaagataagtcttgaagtgattgagtga

SEQ ID NO: 22750 - DNA, 966 bp, Arabidopsis thaliana
ttgcaactctcaaacccgagatcaccaccaatccaagtctccctcttcgttttccatctccgccgcagctaaacccaccgtaagataccgtgagtgtctaaagaatcatgcggcgagcgtcggcggaagtgttcacgacggatgcggcgagtttatgccgagtggtgaagaaggaacaatcgaagctctcagatgcgctgcttgtgattgtcaccgtaatttccaccggaaagaaatggacggcgttggaagctcggatttgatctctcaccaccgtcatcaccactaccaccataaccaatacggtggaggaggagggagaagacctccgccgccgaatatgatgcttaacccactcatgcttcctccgccaccgaattatcagccgattcaccaccacaagtatggaatgagtcctcccggaggaggaggaatggtgacgccgatgagcgttgcttacggcggtggaggaggaggagctgagtcgtctagtgaagatctgaatctgtacggacaatcaagcggagaaggagctggtgcggcggcgggacaaatggcgttttcgatgtcgtcgtctaagaaaagattcaggacaaagttcacgacggatcagaaggagaggatgatggactttgcggagaagctagggtggaggatgaacaagcaagacgaagaagagcttaagagattctgcggcgagatcggagtgaagagacaagtcttcaaagtttggatgcataacaacaagaacaatgctaagaaaccaccaacaccaacaactactctctaatcagtgatcatatgattaattgagagattatgtaagagattttcttttaatctacttttgttgttgttgtttatttaatgttttccttcttctaggtttttgtagtttgtacgatctttggatcaatcaatggatcttttgtttgcttagttaatgtttttaattttggtttgcct

SEQ ID NO: 22751 - DNA, 979 bp, Arabidopsis thaliana
atgtccggggatgcttcggatacaatgaagcagagatctcagcctaaaagaacatctcaaagctatgatcttgaggcttcaaatggaacaaacccgtggtcagctgcaaatttgcatcctgaccttgagatcgcagctataattattcaagacactattgagaagagagaaagcttaaaatatagaagaggtgacaaaagactgatggagaaaactaatattcttggtctttctccaatagaagaggagaaaaaggagttgtttggcagcagaagtttagaaaaactgaaggttgtaatcccgaggggaaaccacgggttaccaactaccgaaaactcttgtccttcgcctttgattcagcgatggaggtcaggaggcggttgtgactgtggtggttgggacatggcttgtccacttatggttcttggtaatcctcgtatctcatgttctcatgatcagcctcttgtagaaaatcagcatcctttgcaactatttgtccaggtaaaattattgaagactttaaaggaactcttcttctgtttatcattttaacacatatcttcttcatattgtagggtgctaaagaacatataccagcattgtacatgtcatttgttgaggaaggacagtacgatgttcatttccacgcgcagttatcaacattgcaagcattctccatctgtgttgccatattacataacacggaagtctcagatagttacagaaatggcgagaatgtacaacagttttcgcattgcaactcgttgaaaatgctgattgatgatgatgttcagttcttagttgaagcagtaacagaggaagaagaagtccctaagcctctgaaagaagctgtgaccgctcttcaatcctacatgccgaatcctcctttctcgccaatctcccgagtgtagtctgtgatgctatcactattgcaggtgcatttgagttggcgataagacaagaagaggagagaaggttg

SEQ ID NO: 22752 - DNA, 3273 bp, Arabidopsis thaliana
attactctatcttcactaggaaagtttcaggaaatcctaaaatttgctgtaaacttgatgaactctctgtaagactctgtagctcctgttagtcgatctctaggccctcagtagagtaaaagttttgaatttttactctaccttcacgtactcctttttttttttttttttctgagaccacaaacacaactaaaacaaataaaaaataacgagaaagtaaaaattatttacaaggataatcatgggacttccttccaagtgagcttgttttaagtctctagcttgactcctcacacttatcaagaagaaaatgaactgtagagagggtctgcataatcctctctgataccatcatcatactcagcgtcctccctggagaggcctgcagcagaatactcaattcccctttcttcaaaatatgcttctttctcttctggagggtaatctatctcttcagaccatcttgaagtgaacttctttctcaggatagtgtcgatcccgcctttaggttgagcttccttctgcaactgattcagcttacttctaagttcctcaacagtgtgggctagcttctctatagtttcatcttgcttatcagacctctttttaagttctttaactctttcagtctcatatccttctcctgagatcactctatcatttccagaggtttttccatcttctgttgacccttgtggagttttgttgatgccaaactgcaacttgatatgctttccaaggttgagacttattttcccttccatgacatctatcactgctcccactgaagctaagaatggtcttcccagtattaagggatccttatgctctacttccatatccagcaccacgaagtctgtaggcacttctactccattaatcatgactggtagatctttcagcatgccaaagggttttctagaagacctatccgcaaggatcaaagtcaggtcacaaggtttatactgaatgaactctaaccttcttgccacagagagtggcatcaagctgacagaggctccgagattgcacagacaatcgctgaaagcaaattccccaatggaacatggtagagagaaagatcccggatcttctaacttctcttgaacaatcctcttatcagcagatcaagttcgcatacagtcgaggtgtaccgggatcaagaagacaacaagaaaaacacacagttagtaaccgaaaagaaaattgaaaaagaacttgatctaagcaagtctgaaatctcaaatgtaacaaacaaacacccaattggcaacggcgccaaattgataataggtttttagtcaattatcctaaaacaccaattatatcgttgtagtattttaggttgtcaatccaaatgggtgtgatgctaacaatcaagatgtgatcagaagtcactaagtcaagccaagcaataacaggttttggtgtgttctagcagttctaagtgaacatgcaaaaaacagaaaatcaaaaagaaacagtgaaacactcgaccaacacagctctttgtagagcactgggtgaggtcgagtgacaggtcgagtaacagacagaaaataaaacacagatactcgactgcacagtctgttgccagacaactaggtggtcgagtacgaggtcgagtaacaagaaagaattgcagaaattaagcgacagataacaggatgcagtaaacaacagtagaggaaacaaagaattcaatcagataaagaattcccaaggatggggtaattgagtagtttcgtttcctcagtttacaggtgattgacatgctcaataaattaaccatagacaaaaagttcattaaccaaatctaagtgccaccgcaacagagattctcaagttaacctagtctcagactcaatcaccattgacgagagctaacctaacaggcattacgaatcaacaagttaaagccaaaacgttccctgcaaccaataccttggtacagggccacgaatctatggaattagtggttcagacatttcatcgaacaccttttgggcgcggaaatgtctgggctcaaattccagttgatcagaaagcaatagacattaagaacaactaatccaaaagggatctatcaaccaataatcaatcacctagcatactgagaattctacactactctaacccatcctcagaaacctattcactactcagacatgataacagaaagcataaacgttgaacaagttgaaaacatgataacaacagtgtaacagcaggatgataacagaatgaacaacagtaaacgaaatcaagaacagaaactaaatactgaatactgaatatcccgaaaccctaatacttaaaacgacgcaatattgggacggattaagaactgtactcgacccatgtggttgagtgggaggtcgagtgaatagcttgagtcttcttttcttccttgtgctcgagtgtctggttgagtgtggaatgaagaaggctctgaagcttgtcatcgagtatgcagtcgagtggtggtgatggtgatactcgacttccaggtagagtggtgaggtcgagtagtggtctggcaatgaaggtgaagacactcgacctcggggtcgagtgatgcgatcgagtgctggtcaggagatactcgacttccaggtagagtggtgaggtcgagtagtggtctggcaatgaaagtgaagacactcgacctaggggtcgagtgatgcgatcgagtgatggtcaggtgatagagatgaagacgctcgacctcgtggtcgagtggtgaggtgaagttgtgatgtcttctactcgacctgggggtcgagtggtctcttgagatcttgaagctcctactcgacctctgggtcgagtggttttgtcatgatcaggtccgcttcttccagatagctcatcaacagcttcaaatcacctgaaatcaacacaaatatgcaacatgcatgcaaatctatcctaaacatgtaaagtgatgataaatgatgagaaatggtataaaacagtgatgatatgatgctaaagtgatgacaaatggatgctcaaaacttgcaaaatacacacttatcaccttcgggaatgatgctgtccactaggtacttcttgaatctttgcccattcactttaaactcataaccctctcttgaaactatttcaactgcactaaagggaagtacctctttaatagtgaaagggcctgaccatcttgatttgagtttccccggaaaaagcttgaaccttgagttgaatagtaacacttgatcaccagctttaaaatctttatgcagaatcttcttgtca

SEQ ID NO: 22753 - DNA, 586 bp, Arabidopsis thaliana
ttgtataaggataactaaattacaaggagagaaggatcatcgaccgagagatcgtgaatgtaataatggcggatcacagatccacatggaatgagacaagagtaagattaagaagaaaaaaaaaaccttatactgggaattaagctcttccttgagctcagggatctctcccttcttcgtcgtggagaagtatttcgaatcgtgaccactcatttctctcctttcttcgacctgacccgacgatgtttcttctctgagattttatgagacagagagagagacgttttgcacacacaaaaaaaaaagagagagagagacgatgacggagaaatgttggaatggaagacgccggtgacgattttcttggctaacgggccgattgtttagtgggctctctgataaaagttagcccatttatgaatttctcgagtgtgtcttttgataattagtaaaaactttgatatttggctaaaacttttgaatattttccaatttcccctaaacttaggttttgccataaactggaactgaaccgaccgaaccaaaaaaaaaaaaagagtttgatttggttcaggtccaataagta

SEQ ID NO: 22754 - DNA, 334 bp, Arabidopsis thaliana
ctggatcaagagcattcgaatacaataaagtaccgttggaagatccaagatcttgtatatacccaattcccagaatccgattcgatccgaagatgcttagtggagattccagcgtctttaattgcgatttcattaccacgaacgattcgaccaacacgaatcgtagatccaggcttgtaatctagagcatcgccttctcttggacccttgacgaatactaatctcaacgatggcgtaaccattgttaccgtttctctcccaaatgcgaatattgaagttttgatttgtctgacgctccaattattaatgggccttaaatgggcttttatcgttt

SEQ ID NO: 22755 - DNA, 2894 bp, Arabidopsis thaliana
tatctagtttacaatagatttcctgcagttttcccagtcaacagagttggaccacgcactgaggataagatagagagagaatctcaaactcaatctcagccattcctttcactcgaccttactctctcctgttttccaccactcgatcaaaacaaccaactcgacctcataaggcctagccgtactcgacctccgccgcctccacagagttcaacgattcactcgaccatcagaactactcgacctccaaggaccactcgacctcggcgccaccgtcaccagttcatttcctctttcactcgaccggacctcttcacttgattccgttgcagtactcgaccaattcatccacatcaaccgccgtctcttctaaaagaagttactcgacttcttttcccggtctcgtatctcactcgacctcggagaaacactcgacctctgcgccgccgcaatcgaatactccgcctcgctcaccgtcgaagtcttagggtctactcgattacaacaaaagaacccgaccacaagcattcgctcgacctccagtattcactcgacccctgcaaccatctactcgacctctaggcttcaccggctgaactcaacctccacgactcactcgacctcctgaagcattccaactcgaattcgtagaagatactcgatccaattcgtttaagggaaactcaagaacagcatcagtctactcgagtacagaattgtactcgatcaatagggtctatttcactgcatattgataacaattttggtttcatcgctatctgtgagactaacctattgacatctgagctgatagttctaaatttttacaggggaatcatgagcaattatagtggcagttcttctgttgatcctgactacaacatggatgagacagagtcgtcatcttcaaggcctgagagagaacaaagagaatatgaaagcttcagaagaaaagctgagatagcccgagggaagagagcgatgacagagaggtatgagcttctagacgaagatctggaaggacgagtacatgccagagcatactcgcacagctaccaaacttgtgcacaagcccgacgtattgcctgctgaggaatatattaggctcttcaagctgaatgagttctgtagcacgaggtatccttgctcgaccacacttgcacaactcggattgttggaggatgttcagcacctgtaccagagttatcatctggacactctgatggcttatccgtatgtagcatatgaagatgagataattcaatttctctccacgctacaagtggagctctaccaaggtatgacctctgatgagttggattgtgaaggattgggactcttgcggttctgtgtgtatggtcatgagtataggttatcaatcaagcgtttggaaggattgtttggcttccccagtggaacgggaactaagcccaagtatgacagagaagagttgaaagacttgtggatcaccattggcagctctgtaccgttgaattcttccaggtcaaagagcaatcagatacgcagccctgtcatcaggtacttctagcgttctatagccaatgtactctactcccgagagatcacatggactgttactaactctgatatggagatgatcgcaatggctctcaagggaactcttcgccaaactaagaatggcatgtctctccaaggtgaagtcaatgacacacctctctctgtacttcttctgatccatctgtgtggatacaagagctgggctgtcagcaataaccacaagagagcgcgaggccgttctgtgcataggtggtgttatgacaccgattctgatagcttgtggagtcccaatcatttctgatggactcgagccgcgagcaatggatatcgagcacctacgtcactgcgaattcctggagtttgcaatggttgacgacttccacaggttcaggtttgagcactctacagacaagagagctagcatccttctccctagccctgaggttacacggataatagagggagataacattgattttcggcctgaggttggatgcctctactatgagaacgctccgtcattggatgaggatgatcttctagaagaagctgcttcagatgggatggatgaagacagagcagtggagttcgacactagcgtgtatcactttggtgaacatgtacctccagcgagggagagcaagagcttgactgaagctcataagaacaacagtaaactgcaaaagtggtgcaagaagcaggataagctgctcgccaagtgtttcaagactatcaagcttctgacagataagctgagttgttcctcctccaccactgctattccacagggacaacctcctctggagatgccatcgaggagatttgatgagcctgagcacaggcctgagcttagcgagcagagagtctcacatgtcccggctaggcattcgtcattcgaatcccgggagcacaagagaagaaggaaggctacactcactcgatctagcagcatatcacgcctcattcactcgagaaggtcactcgaccgcggtgctggccgcagcataaggagagaagtcaagtatccacagagcggtgctggccgccacagagctgatgaggtcgagtacccacctgttggagctgatacagaacaaggtggttcgtctattgcctgggagcaatcacaggcagccattgacaagcaactacgtttattcttcgactgaggtaagcgcgtcaattcaccattgtattataccatctgttgtgatttgtttcttcattttatttctgtgattggatttgtcctgagtactctcttccaagtttatgcgcacagtggactgtgtgatttaagtttgggggagggctcaggaagtgtgtgttgcattgtgtatatttttgagtctgca

SEQ ID NO: 22756 - DNA, 3104 bp, Arabidopsis thaliana
  unsure (1)..(3104): unsure at all n locations
cacatgtttgatttaagtaatttgatggaactagttcaattggtacatttgaattgttagtttggtacatatgaattcttcaattggttaatgtttattgaatttgcaggatacttatgaggccgaggatgatgaggtttctgttaaagagacagaggaagatgaggctggcaatgatggtttggaggatgatgatttagattctcagccactgccgccacagacaatgcattttcctttttcagaatacggcaaagtgtgcaagataagcagtaggtgccaggtcacgcagacagttgaactgatagagaggaagtttaaagaagaagctgtatggttcaaaagacacgatcagttcaagcatatattccacatgcctcaggagcctaaccaccagacgcaaggcatgtgggtgcttatgctgcgcacagtgaagacagatttgctcgaggaggcttggtttgtggtaaatggagtacctattaggtattccattaaagagcatgcgttgttaagtgggtttgattgccacagttacccaaaagaaatgaatacaatggggaatattaactttgtgaagaggatatttaaaaaagaatctggggtaaaggttgtagatgttcttgctaagtgctcgaagatgaagcatggttcagataggttgaagttagtgctgttgtacttcttggtcaaggtagtaaaagctggtgcaaagaatgatggaaacattgaagagtttctattaaggattattggcgatatgaatgcgtgcgagacgtttccgtggggccgttacacctttttggaatgtatggcaggaataaggaaaatgatgaagaacatgaatggtttcgtgaaaccaaaagctcaaccttgcttcagtggattcattgtgcctcttgaggtaagtaatttatgattattatatgagaataaggtctaatgtacaggttttatgatattaacattgttttgttatttgtagattctgccttatgaggctattccacagcttggactgaaatttagagtccatgtnacgtccgctttgagtgactgtccaaggatgtgcaagcataagtttaaagaatgtagcatgaaaggtgtcccgttggaagttatatataaagagcttgggaatactaaggttagagtttctgtatttacttgattgtgtgtctagtctatcatgagattgattgattgattgctaaatgaatttcttttaacaggattttccaagcattttggtacctgcctatcatgagaaatatctgttgaaagatctcttagacgatgatgttgatgatgactgcggtccaatagatattgttattgacagttggagagagcgactattagtagagaacagtaggatatggtggaaaggaatgtgtgagatggacatttcttctcgatgtattgtaaatgagatttcggatgaggaagtccatgagattgagaatgaggtccccgagactgctgtccctcctcgattccctgatttagatacagtttgtggcatctataacctcactgacgcagatgatgaccaaaggctttgatgaaacaaaagataagattgatgccattgatgtgagagtgcagtctattaagttatttgtggcagatctgaaggaaagggaacatgggaagcaaacagaggaggcaagtcaacatgggcatgcaagagacgatgacgtgttatttgcttcgccagatggttatgtgaccaccggaaacaagcaacaacgggatatactgatcagtgaacattctccagaggttgcagaaaacagtaagtataataattaatgtcaattgggtataaaaatgtgaatatatgacttaggttttgttttaaaatgtgtgcaggtaataaagagacaaacacgacggagaaagagctgaaaggaaaagcgaagaagaatggcgggggcaagaagaagcaggaggtgccacctgtaatagaaaccggaaagaagtgaacaagggtagcatcccgccttattaaatcaccgtttgtgacggataataagaagcgtaagagaatgcggaaggcagattgatccagttaatggtagttgtggaacaattggtttacttaaaaacgtttggcttgatttgcattgtaatgatgtctacttttgtgaatttttaaacatttggcttgtaattggtcttttaggttcaactgtttattttggttcctctactatggttcaactgtttattttggttcatctactatggttcaactggaatgttactaagtcacaacggatagttcagatagttcaacactaggattatccggttcgacttattagttcaaatggttcactttggttcaaccgattagttcatccggttcaactgctagttcaaatagttcatccggttcgactgattagttcaaatagttcagatagttcaacactaggattatccggttcgacttattagttccaatggttcaatttggttcgactgattagatcaaatggttcaaatgtgttcgactagttagttcaaacggttcgacctgtatagttcatccggttcgactaattagttcaaatagttcatccggttcgactaaagtccaaatggctcgactaagaagtccaaatggttcgaccaataaagtacatccgttcgactgattatataattgttagcaaaatttactttcaaaacacagatagttatattcaaacatttagattcatacattgtattcaaaacatagatagttagcaaaataaagattttaaacaacaatttagatttagatttatcttacaaacttaaacaaaacaaaggcataatgtttattgaaagagagagtcaggaggatactcgcgtggaggctcatccactctccagtagtaacttccatcatctggttcatcgtcctcctcaatgggatttggctccgcgaaaaacgaccaattcggtgacgatccatcgtgctcaacacaccatctccttagtggcagtggaatgtcagcaactttgtcgaaaccgtatctcacccagtctttcggatgagcctcaaccgcctcatacgctctccaggtcttgcaacttaatgagtagtg

SEQ ID NO: 22757 - DNA, 1674 bp, Arabidopsis thaliana
cgagtttcccggcggcggatggagatcggttcagtatctagacatttcttcaaatctaatcaacggttcactcccacctgatttctccggcgacaatctccgatacctgaatgtctcgtataaccaaatctccggagagattcctccgaatgttggtgccggttttcctcaaaacgccaccgttgatttctccttcaacaatttaaccggttcaatcccagattctccggtttaccttaaccagaaatcaatttcgttttccggaaacccgggtttatgcggaggtccgacccgaaacccgtgtcccattccttcatctccggccaccgtctcgccaccaacctctacacctgcactcgcagctatacctaaatcaatcgggtctaatcgagaaaccgaaccgaacaacaactcaaatcctcgaaccgggttaagaccaggagttataatcggaatcatagtcggagatatcgccggaatcggaatcctcgctcttatcttcttctacgtttataaatacaaaaacaacaagacagtggagaagaagaacaatcatagcctagaagctcatgaagctaaagacacaacttcgttatcaccatcatcatcaacaactacatcttcttcatctccagaacaatcaagcagatttgcaaaatggtcatgtctccgtaagaatcaagaaaccgatgaaaccgaagaagaagacgaagaaaatcaacggtcaggagagattggagagaataagaaagggactttagtaaccattgatggaggagagaaagagcttgaagttgaaactttgcttaaggcttctgcttacattttaggagccactggttcgagtataatgtacaagactgttcttgaggacggtacggttctcgcggttcgtcggttaggtgagaatggtttgagtcaacaacgccggtttaaagactttgaggcacatattcgagctattggtaaattggttcacccgaatttggtacgtcttcgtggattctattggggcacgacgagaaattggtcatttacgattttgtcctaacggcagtctcgtcaacgcccgttacagtgagtcaaaatcatctctttcacatttcaatctttttcctcgctttatgataaaggcacatgttagcataagatcaagtcgcacgctagcatcaccagggttttgctactgtgttcatattagttggtagtagttaaattacacctgtattaataaagtcaacggctggtcaaattttgattctttgtgctattggacagggaaaggagggtcttcgccgtgccatttaccgtgggagactcggctcaagatagtaaaaggtttggctcgtgggcttgcttacctccacgacaagaaacatgtgcacggtaacttgaagcctagtaacatactcttgggccaagatatggagcccaagatcggagatttcgggctcgaaaggcttctcgccggggatactagctataaccgagctagtggatcatctcggattttcagtagcaagcgattgacagcatcctcgcgtgaatttggtaccatcgggcccacaccgagcccaagtccaagctccgttgggcccatatctccctattgcgcacccgagtcgctccgaatctcaaactaacccgaaatgggatgtgtttgggtttggagtg

SEQ ID NO: 22758 - DNA, 2661 bp, Arabidopsis thaliana
ctaagtttcatatatcaagtcttttataaagttttgcaaaaccctattgtgagagacataagctattcatcgattattcttcagagtttcattcagatctatatacagtgaagagatcccttctttccccttctctatttattgtgtttatgctttttatctcaaatatgttgtttgtttcatcaaatatgtctgagtaatctgcttgttaggaatagggtttctcattagagattcatatggtttagtagattgccccctttgctaggttatctatagaattcttcatctttaattatgcctaatgctagatctagagtaattaactagatcttgaattcagacaatagatatgcccgccataggtatctgtagttggatctattatttgatgagtctagtttataggtgtgtaataaaaatcggcctatttactaagatgaacaattgaactcgctaagaatgcatatttaggttgatagtctctcggcttctccggtcactattatctatagatatagggagtttcgcggcacgccaccggttattccataattagagtttgagtttaagaatggttcgataacaacctagctttcattagatctactaaccaatagtttcttgagaataccctgttcctagctcttttcctaatcgtttacaacccaatcaatctactgttttcttattttgttttcttactttttcactcataccctgctagcttaatctcgatatttaactcactgtttgaacaaaaaaactccgtgaattcgatcctaaaatactgcaattgatatcttatttgagagaagttctaggtaatttgaaccatatcaaatttggcgccgttgccaaagttcttgggaatcatcattgagttttgtgtagagattttgtctagtttttacttctattttgttactcacgcgtttcttcttttctatgtttcaggtgtatgcctaggcaaacaaggagcacaaaatagaatgagcttatcaacttgtctgttctggacttgggaaaacttgaacgcaccaaccgaaaaactcagaaattagcaatggctgacagagtcatcagagctgatgcagaaggagttttgagagatgagactgggcaagcctacaatgaggctggtcagaaattggatgatcatggactcatcctacctgaggacgccaatgaggatcaggcgcgcctcaatgcgcaattagctgctcgagatgcagcaggactcggtgtcgagcgacaccaactgggtgtcgatcgacactatcaggagcaacacgcgaatgcaatcggtgtcgaacgacacaacagaggtgtcgatcgacaccaacaccagattcctgcagttgcggaaccacgtcgtacacttggggatttcaaaaggccagacttgttttatgctaatcgatcagcgattgtacccccaccattccagaggaacgactatgagctgaagcctggctactttgctttagttggccatcatccttttcatggcttatctcatgagcagccaatggatcatatcaaaagatttgaggatcttgttttgagcatcaaggctaatggagtctcagaggactacctactgtgcaagctcttcccttattcacttgttggggaagcagcttcttggctgaagcaacttaaagcaggttccctcaagacttggagaagcatcaagacagcattttagaacaatttttacgatgatgctaagtctgaggagtttttaaggctgtttgggtcccaaggtccgaaccggtctcaagaagtgacgcagacgtccaattctggtggagggtctgagggaagcaggcccttccattggtcttacactcacgaccgtgatcatctgatcattaaggacgaggctgggttggcgaatctgtttcgccacatcaaagggaagatctgctttccttgccggccacagtcctgctaccgaatcctccgactttttattctcccgagagggagagagtttaatggtgagtttccggtgttttctgtgtgtttaggtgtctccaatggtcctgggcgcccttccttatataggggacgaatagatgcttcccgaatcaatacatccgttccttgcaccttaccgaagagttgcacctttccgaagagttgcacctttcctaagagttgcatctcttcgcccgtaactgttcgcccttatccaccctttgggcaagcaaccgttcgaccataaccgcccagctagtcggaaagtcgaccagctacctcgagctcaaccgtcactcgtccagctgcctcgagctcaactgtcactcgtccagttgcccgagctggactgtcactcgacctgagtaaccgtcactccttccagctgagcttgagcttcgggcgagctaacccagctgatttccttacgatcctagcttagctcgcatgatttaccctttgtccgagcgtatggtcagctccttctcacttgtccgagactccaccttcttctctttgaccaagtcctagacaacgatcctattgaggatcgcgggcgttacaagtctccccccttgaattggatttgtcccgaatccgcatcaagttgatctttaccatctccttgaacactccagaaaattggcttcatcttatcttggtttccaagtgtat

SEQ ID NO: 22759 - DNA, 1406 bp, Arabidopsis thaliana
gggcgcggaaatgtctgggctcaaattccagttgatcagaaagcaataggcattaagaacaactaatccagaagggatctatcaatcaatactcaatcacctagcatactgagaattctacactactctaacccatcctcagaaacctattcactactcagacatcatgacagaaagcataaacgttgaacaggttgaagacatgataacagcagtatgataacagaatgaataacagtaaacgaaaatcaagaacaaaaactgaatattgaatactgaatagataaagagaaatccggattacaaaaagtctagaacacaaggtctgcggaaataaaaactaggtaaaaaactactcctctcgaaaatgagaagtacatgctacttatagccaaatatcccgaaaccctaatactcaaaacgacgaagtatttggacgggttaagaactgtactcgaccaacgtggtcgagtgagagctcgagtgaatagctggagtcttcttttcttccttgtgctcgagtgtctggttgagtgcggaatgaagaaggctctgaagcttgtcatcgagtatgcagtcgagtggtgtgatggagatactcgacctctaggtagagtgaggaggtcgagtggttgtctgatgatggaggtgaagacactcgacctcacggtcgagtgaagtgatcgagtgaccgtctggtgatggagatgatggcactcgacctcggggtcgagtgctgaggtgaagtggtgatgtgctctactcgacctggttgtcgagtggtctcttgagatcttgaagctcctactcgacctctgggtcgagtggtttgtcatgatcaggtctgcttcttccagatagctcgtcaacagctccaaatcacttgaaatcaacgcaaatatgcaacatgcatgcaaaactatcctaaacatgcaaagtgatgacaaatgatgtgaaatggtataaaacagtgatgatatgatgctaaagtgatgacaaatggatgctcaaaacatgcaaaatacacacttatcacttatcctaaaagcctaagtagtgtttccttgttagaagatacaaagataaagactcatatggactttggctaaactatcaaagctttgaaaaaacagaagaagcttgattagtgttttggagtcgaatatgacttgatgtaatgtgtatgattgattataagaacttaaaccgcaatcttatcctaaaagcctatgtagtgtttccttgttagaagatacaaagataaagactcatatggactttggctaaaccgttaaagctttgagaagcatgaagaagcttggttaattttttggagtcgaatatgacttgatgtcatgtgtatgtatgagtataagaacttaaaccgcaatcttatcgtaaaagcc

SEQ ID NO: 22760 - DNA, 608 bp, Arabidopsis thaliana
ctccctagatccaatgtacgaatctacaaaacgtcaataataaacttctcgaagcatatttactcgcataaaaccaacataatctttctctaactcactaaaattaagtggaaccaatatgtatataacgaatgaccgacacttttattttaatggtgtatccatttcaattcgtatcttataattccataaaataaatggatgtgatcgatccacagtggtttaaaaagtctcattctgcttttgttgacttcttccatactctatagtctctaaagtcaagctttcacattcaaactattctttatgcgcgtgcttcgcaagttcgcatgcaactgatgcaagcctataacatatatgtatcaatctatgtacctaactaactattgatacatatgtgtatacgcaataaggggtaaaagagtgattttcttaccgtggcattctttgaacgagtccttctccgaaatggttaaacgcaattgtgacttgcatgttcttgtcctgcgtgtaactatcgctatgtcctaaaagcatgaccttatcatggtgcgtcatatgattgttcgatatggttatagctgtggaacgatgtatagcgtctatga

SEQ ID NO: 22761 - DNA, 919 bp, Arabidopsis thaliana
atccatgaacatagtctcgtttcttccctctccctgatttgctcataagataaatgtactgatgtctgatccccatcaatggatgcttctccagcaagaaaactttgtggtaagcttcccttagaacaacagtctgggtccgaatcttgtgcgacatgtaaaatatacccgggtggtgcaccaaagccttcttgaacctcatcccgaaccctaaatactcccctaagcaaatcacattgtctgtctcagtcttcttagatactaaaaggaacaaaagctcatgaagtactgcgacacgccacttctcagcctgatcactgtacgaccccaagtgaaaagcattttcataaggcgaaatgtatgggagattttgccattgctccacccaattcttcacccttttatgcaattcgtaccctttggggaaattcatcgaataccttatgcgcaacccttttttcacacgagacccatcaatggtggcttctcttctctccatttccgacacaggaaggttgttccgccgcgaagatatcgtcaaagcaagcgtcttttcacccgttaaccgatctttgatctcagttacttcaaagtattccgggtaatcgccgatcaacgaagtaatgtaatcgcgagggagacccaaatcgaacctgaaacgatcgaggacatagagaggaagacttccagctcccgttagcatcaagaatttagtcaaccgttgaacagtgacgttgcgttgaggcggcgagagatgaatcgtctcttcttctttgtggagagtgagagcttggggagtgagacgaacatggagaggatgagaaggagaaggctgaaaagtggtgaagacagaagggtatttctggaaaaacgcggcggcggttatgtgaagattgacgagaggtttgagaagtgaaga

SEQ ID NO: 22762 - DNA, 3664 bp, Arabidopsis thaliana
gtgcaggtcgactatcccctgcgcatgtaatgaaacccagcgatactggcaccaaatgcaatgaacatatagttgaatcttccactctcatcaatttgaagacacacgactgtacccagatttgcccgtcttattatgtataggtaagaaggcagttcttcaaaactactatcaggggttcccagagtgagctccgttgcaaacctgagcgtcttgtatgacttcaaataactcatctgttaacacaaacatattaatagataagtcaaccataatatatttacaacgcagtcaaactataccacaactcagccaccaagtgatcttaagtcagcctttaaagtcataactcaaccggaatgtaattatatgtcagccatactatatcaataagtcaaccataaaatatctataagtcagccaacagataaatagtaagtcagctgaaacattgtaattacctttactcaaaaatgcttagtgatgattattccgactgattttggtttaacatccggaccaacgtcaccaagatagtccctgtaaagaacttccagaacatcaggtgttgcttgtcgggatcgaccagaacattccgttacaaaacatgtgtgttccgaatcgtatatataaacatgaaaattaggatcatttccttgtctagatgcacgaaccctccaaagacatatatccaccaagcactcgtaagatactgtagtcttaatagaagttggtacatcaaaatcaaatccatcccttatcgcaagaagtttgagtcgatactccaacttgaatttgctacggtattgttggcctaccgcgagtgttagcgtagaccaccatcttcaaaagactatcgtaaactgctctttccgcttatagctgcacaactctacaccctctttcgtcggggttaaatacgaatctctgtttctttacccacgaaccggaaacaactatgaccgtaacgggaccagccatatcaagagaaagatgaaagaaattgaagatgtatgagaagatgaatgaagaaaagaaagttccggtgatgttgtaacgttcaggcggtggacacaatctgggaaaactatttaaagcaagagacttttcgtatttccgtcgaggatgctgacatggaatgatgacatggattattacagccgacgccgttttgaagtgatgacgtggcaagtcagccaccaaacaaacatttcataacacagccatgaagcaaatctttaagtcagccgcaacatgaatactattacagtaattaaaacaggaaaaaaaacaaagttaattcagccgtggtatgtcgtaactcaactaactcaaccgtaacgttcaacaactcggccataactgcatgatattatagtaattaatcttttaaaaataagtcagccataacatggctgagttatatcgtaatccagctattggcggctgatttatagcactcgaccataactcagccgtcacatctttccataactaagccaatcaaaactataactcggccgcgtcgaggaaagaagtcagcctttttctcataactcagccatattgttggctgggttatcttataacttcttataactcggccgaccatccttaactcaaccataccgttgcctgagttatacaataactcaggcaacattttacaactcagccgtaacgtctggctgagttatactcatacttcgccgtttcgttatgactcatatataacataccgtaactcagccggctgagttcatttaatccacgtcaacaaattctgatgtggcagtggcattccctgtaattacgttttttccgataacgtttagtaggggcacgctgggtaataaaaaaaattcgataatataacagtaattaaaaaaagttctgtcgtgttctggtaataacacctaatttcctacccatcacagttaatctccctattatataacaaaaaaaaaacattggaaacattactactgtttgataaatttcattctggtcaacgctctctacatctacggaagataatggctgaaaagaaaaaacgaagcaataatgatatatgagtgtttatgatgagatttctagctgtgttcaaaatcatagcaaaaggacacataacaaccaaaatcatacccactagagacaagagttttgagttctgagtttgaaaggagataaaccacctataatgttctaatgatctttccttcactgcctttgagatttcttctcatgtccattgggagagaatattttgttttgtctaagcatgcctccatatcgagatttttgagtagtgtggtaagtaatgtagtgctagcagaaggttcatatatcatattgaaaactcagttgttgaaatacttcaaccaatccttaatttttctccagcgtctgcatctcatccacgctatcctttgtctgtgtctctacatctgcgtccgttagggtctcacgagcgctattgataacactttattttacttattttaggcatgtgtttatcatcatttagcttagtgatcactcattgtttcatatcattttgcatcacatttagcttattttgcacacttcgccatttaggatcatcttgcatacatattgcatgttttggtatgttttcaggtgtagaaggagcttacaaggactctactcgaccctctactctatccaaccaggagggaagcagcagagcaatctactcaactagttcactcgatccaggtaggcacagaggagaaatcaattcactcgacccacttactcgatccagacagccatagaggaagcagcagatcggtatactcgcccctcttactcgatcttctactcgaccaagggcgaccaaatctactagactttttgatctatcaaagcgtcttcggatcctcctcattccccactcaaccagacatctgagcatacagataggagaggaagaaacatctactcgaccaattgatcactcggagcatggacacaaaggcgcagactttgcagcaccctctttactcgatctccaagatcgagcactcgcccaaaccgcctcaagtctcttgtcgtctagtgaatctagggttttcaacattttactataaatagatcactttgggatttgtccaaaggatctagcttttatcctttagtttttctttatgttcttgaatcttcaaaatttaattactcttaatctatttagtttttgtatttagttttgagtaaagttgtttagtttctttagatctacattttggtatgatttcagtaatttctgagtttgtgttcttaattatgttgcttgagtagtcattagggttcttgaggatggattagattaggataatctttaggttagtcaggtggttaagattaggttagacccttgtggattcgtaggaacctatgcggtttcggtggataatgtggaaattagaccatagacgtcaagagtaaaaaagaagttaaaatggatgcatgctctatgaattccagaaatttgtaggatatagaccaagagattggctagtatgtttataggcttaggtagtttgttgcttaaaccatgttttgctatgtttcatcaacgagagttgagattaggaagtggtagagttatgggggtccatgtcacgagagtaggagtggattg

SEQ ID NO: 22763 - DNA, 3761 bp, Arabidopsis thaliana
aatgattaggtccgcgggcatattgacaccgttcactacaaccgagatgccccgaacaagtccggtcggatacattgcctgtccgccggccgctcgtaccattccataatcggtgtttggttctttcctgaacccacctgtttcaaccaattctggactaacaaaacaatgtgtagccccagaatcaaatagagtgtgcgttactacgtcaccacctctcaaggtccctacacattcccttagaatgctgagtacctcccctttcccatatgtatgatgcaatgcaaatgcagttattgaaataatgaatagggagttgtgagaacgtaccagtgatcgccctgaagtttccggcatcgttagcttcctccgacaactcataaactcgcggtgccacggcttgccgctttgggggaggcggcagtccatttcccccgcgattgtccctttgtccggcctgcttctccgcagtcaacttagggcactctcgctttagatgtccagtctttccgcaatagaaacaagtccttgtctcttcaccgagaaccttggactgtcctggttccattctcgggcaactttggatcgcatggtccttgcttccacaccggccacatgcacctatggccttccagcaagttccgctgtggctcttaccacaggtcacgcattccccggtcttagcatcggacttggtgttatccaccttgttaaatttccttttcttatccgcgggtttggtggattgattgttccggatcggtgctttctcccggttcaagtacctctcctcctcgatcccttcctcaatcattgctgccctttcaaccaattcggaaaccgagttgaatgtccggaccaaacaatggttgcggatctctatccttagtccacagataaatcggcgcacttgagcttgttcctccccaagttcacgtcccacataacgccttaggcggttaaattcctcatcatattcacgcaccgtgcggttcccttgaactaggtcgaggtacgcacattcaagcctatcccaagcctccggtggaaagtacttcttgttaaactcgtcttcgaaatccgcaaaggatcggacctcgtcccctctgcgtttctcgacggttaaccaccagttatgggcgtctccttcaaggaagtggaccgcaatgtccctttggtaatcctcaaggtagcgggtagacttgaagttcctcttgagtctactcctccactcatcggccacaatcgggtctgtactgcccatgaagtgtctcgtgcccagccttgagacatgttcgagaagactcagatagtctcccctttttcgcccatgattcggttgtggattcacttccacaacttccgagtcatcgtccttttggttatccactctttggaccactggatccgctacaacggccttggtcaatgtggctagttgcgccatcactcccttcatcaaatcccactgttcttgggccgttggagtattgttccggttatccgtgttgtcccttgcaccactactctccggtgcttcctcatttatggacttcttcccggcctcaggtccggccgagtctgtcccatcgagcatcgtcccgactctggttttctcgttgatcatcgtttcctcctcaaccaaagtctcctcgacaatgcccttatccttcttactctttcccgttttgctgctcttacccatctgcgaaacctccaaagttaatccacataactcctagtaaaatagcaaaagagtaaagaacaactaccgcgagattctcaagccgacgagtggtgataccccttaacccaacacctagtcctagaaccaagcatgctctgataccaacttgaaaggccccgatccggactgcctaaagtccggacgagttctctcgacctaagacagtaagtgactcggccctaaccgtttatgaggttctttcctagtctaatccgttccatatgattccgtgattcaatatatgagacgaatagagtaaacaaacaatcggatactttattgattaagcaaaggattcgatacaacctatgagtttgcatataagctattacaagtcatataatcgatccctagattatccgaactatcaccacccatcatcccggccttgagtctctcgcgcctaagccaagtccttcccacgatcaccattcgttcctgaaagtgatagagccataagtaatctcatttacttagtcttatgcaagtccatgcaaagctctatatgccatacactactcggatccgtggagaggattcagagaggggaagatcgcgcatcagtccggccgattctcggcaggtcagttaagacccgccggttctccgtcgagccgcgtccccgcctcagccgatccctacgcggacccagtcttatgtaggatgcatatgacccggatactacccagccctctagtcgatcctttaaaggatccgactactaactcacatcctagaacccttagacacaaagtctaggatcccttaccttccttctcgaggttaggtcgatccgaccctccttctttattgtcggccacagcccggctaccgaatcctaagactatttattctcccaagagggaaagagttttaatggtgagtttcttgtgttttcggtgtgttgtggtgaatggaatggtcctgggcgcccttccttatatagggggcgaatggatgcttcccgaatcaacacatccgttccttgcacctttccgaagagttgcacctttccgaagagttgcgcccttccgaagagttgcacctttccgaagcgttgtatctcttcgcccataaccgcccagctagtccgtcatttgtccagctacctcgagctcaaccgtcactagtccagctacctcgagctcaaccgtcacacgtccagctgcccgagctggactgtcactcgacctgagtaaccgtcactccttccagctgagttgagctttgggcgagctgacccagctgatttctttacgatcctagcttagcatgcatgatttcccctttgtccgagcttatggtcagctccttctcacttgtccgagactccaccttcttctctcggaccaagtcctagccaacgatcctattgaggatcgtgggcgttacacaaacagtatgtaccggctcggggcacgcttgacacttatccattgagctcagttgattgtcccccaaggcgatatagatattttcggtagcgttctcgcggttagctcgggctgtgctcataggattaccacccgagccattctatgaactctccgatatagttgaccaaataaggtcccgagatgctttgttctagcctcggggcctatcatatatttaaccataaggtgattgttattcttatgaatgtttggctcggtcttgcttgtgggggaatccgaccccaacagttagtcccccagctcgttggtttaagagttaatgcgacgagcttcatgaatggtgtgaccgaaccagctgctttcgcatctaaactgactgattcatgtctttttagagtaaggcttatttgtttgttcccgaacaatgtctttgttttggattttattctgatttttttttttttcctttttgattttttttttaatgtaaagacatgcgtggatggctttaccacattctgaatgaatattttggaatatttcgataagaaactttgtctttcatacccgaggaggttgacaggggtacaaattacctgtgtcaaagttgggtttag

SEQ ID NO: 22764 - DNA, 473 bp, Arabidopsis thaliana columbia
ggtccatcagcaactttccctcgattcctctcatttggaggaggtggaactccagaaaatggtcgcgttggagctggttttgttggagatagagacggagacaatgatggtgcagtcgaggtggaattgatcattgtggcattgaacgggtttccttcatgtctgcatcaccaatttatacacagagcaattataagaacctgaaatgcctccatagaccatagtgtattagtaaacaaaagagcacttacaggaatttcggaatgcttagtaatttgtccggtatgggtccagagaagaggttattctctatgtttctgtttcaagaagacaacaaaaactaagattttggagaagttactcactgcttaagtacctatacgttgtgagagatagcaacatacaagtcttgaagagcaaggccttgaagacgtccagagttcctgagagctgattgttctgaacacgtctgc

SEQ ID NO: 22765 - DNA, 533 bp, Arabidopsis thaliana columbia
gttcaaagtcgaagttaggttctcaaagtgctaaacgttcttggtttgtggtgtgttaattttcacaaagtggtatcagagcgaaggttctttgtattggtggttcagtaaagtccttacaaaacattgaagctttgtcgtcagcaagggttgaaatggagaagtttgacgaacgaggagactacacgatgtggaaggagaagctaatggctcacatggatctgttgggcctaaccatagctctcaaagaatcacatatggtctcagattcaaagacgttagaagaaggaagagaacctgagaaagaagccataatggaggagaaaaggcagaaagcaaggagcacaatagtattaagcgtttcagaccaagtgctaaggaagatcaagaaagagaagactgtagcttctatgttggatgctttagacagactgtacatgtctaaggctcttccaaactgcatttatctgaaacaaagactatacagtttcaagatgcaagagaacttatctgttgaggcaaacattaatgag

SEQ ID NO: 22766 - DNA, 505 bp, Arabidopsis thaliana
ctatataatgtgaaacataaggagtcttggaagaattgttagacgttgtggattagtttagatcatgcaagttttgtgtaatggtggtactgtgagatttgtggattctgtaaactggtaatagttgttgttgctgagttgatttacaagttgagtgagtgagggcaatgcatcccttttgttcgtatggttttcatttctgatgctgtttttatcaatggttcagggcaatgccaaggcgaaatttgatgaaactcttgaggcgcatgtgagattgggcattgaaaaaggaagatctgagctggtatgtgatgcatttattttctctggaaatacattaatttctctatcctattcttaataaaaagatcgcgttcttagcattttggttgattgccctggctttatctctagactgactgctatcactgtttaaattgcagatagttcgtggtactttggctctaccccactcctgttaagaaggtaaaagaaatgcatttgt

SEQ ID NO: 22767 - DNA, 515 bp, Arabidopsis thaliana columbia
ccatagatatatcgttatgtcatgaatcaacgcaaatcaaaatcctaactttggatcctaaccaaagccaatgacgatttgtgccttctcagagaaacccactctaaatcccggagcttgatcatagagaatcccaacagatctacctttctccaaatgaacaacaactctcgtgtgagagagattccttagtacgaaagatgaatcttagccgatgtcatgaggctgataccaaccgaggatcgctccttgagatcaaacaacaacactagagaaataaccatatcagatctgaatagaaacaaccatcatcgccgcctcaaaaaaaaggtttagagggagagagagaaaaaaggtttagaggaagtaaaaataaataaatatatctttacattgttttttacattgtttaaagtttctaaggaacttgtgttttcactcttatttgtgcccatgtttccgtgcccactggcctcggaatcgtttgtaccggtgttggatttacttgaaggatt

SEQ ID NO: 22768 - DNA, 1093 bp, Arabidopsis thaliana
gatcatcttttcctgaatcatccgacaaaaattctggggatgaaggtgattgggtacgaagagatttgccagaatcattactctttcaagttctcctcaacattccaacaaaagatctggttaagactagcgtcgtatcccccgaatggagacatctttggaggtgtgttcctggattagatttggatgaagctgatttcacacaattcgatactcttgtgagttttatcgatagctttctgagtatcaaccgtgagtcatccttaaacaagtttaagttaagaatctattgcaatcatgatcgtgataaggagactaataatgctcatatggcgcggtggatcagcgcaatctttgagcagaacgttcagcatgtcgatcgtacatggcttccagtggaggtacctcctatactctacttatgtgagagtttggtaactttaaggctttgtggcgtagtcttggcaaatcttgagtttatgtacttaccgcttgtcaaagtcctcgctctagaatgggttatatttgcaaatgaattggctttggaaaagcttatctcaggttgtctagttctcgaaagcttaagtttttgcaaatgttcattagacaatgtaaacgttttacgtgtgagatctcagtctctattgagcttcaactattatggccctagttcccgtgatcttcattttaaagatctagtggttactattgatgccccaaagcttgagatcctcaagctctctcatcaagtaacttcaagtttcataataaagaaattgagttcccttgtagaggcaaatatcaaggttgagtttaacttttgtgtggggaaaaagtttaatccgaatgatctgtcaaagagaaaaatgattcttcattttcttgtcgccatctctcgtgtcaaaaatatgaccatcgctgcatctactcttgaggtaacgtttgttgaatttgctatatttattgttttactttatcctctataagtttattttatcctgatacttttcttgtttttggtggttgttgtagatcatttatgattactcaagatgtgaaccggttcccttatttcgtgacatatctttgctgc

SEQ ID NO: 22769 - DNA, 343 bp, Arabidopsis thaliana columbia
gtcgaacagcgaagatgatgttcacaagagtatcaaatattctgtgtggtcaagcactatcaacggaaacaagaaactcgatgcggctttgcgtgatgctgaaacaaaaacactcgaggattttaggtattgtggaagaattctctgcttcacggtgagtgaacttgagaagtggcttcttttcaagcatggctaagggagttgtgtgagtctcacgtgagatgtcgtacacgtcctttatacaggtgaatgcgagtagacaatttgtgggattagcagagatggttggatatgtggacttcaacaaggatgtggattccaggcaggttgataagtggagagg

SEQ ID NO: 22770 - DNA, 483 bp, Arabidopsis thaliana
cggatccggttcggttagggcagacacttttgcctaggctagagaagctcgtgaagtgtaacgcgtttaaggcgaaatcggcgggagttgttgtgatcggaagtgtgattggtgctggtggtttgtctggaaccagtgtgagctccggtggattgaaaggacttgtggattgcttattgagcttcttggttagtgaagattgggcggcgaggaaagcagctgctgaagctttggggaggttagctacaatggagagaaatgagctaggtgagttcaaggctaagtgcttgaagatctttgaaagcaggaaatatgataaggtttggtttaaattgatcaccttgaattttttattggaatgtaaggtttggcttaaagatgatcatagatttgaactttgatatggtttaggtgaaagctgtgagagaggtgatgaatcagatgatggaggcttggaaacaggttccagatttatcagaagag

SEQ ID NO: 22771 - DNA, 558 bp, Arabidopsis thaliana
gaaacttatccgctgtctttcctgttacgcttgtgacatggctttatatcaaaggattagaatatcaaaatttcacatatttaccgggaggataatcgttttgcggatgaattagctaaccatgctttttctttaaatttagtttttcactttttagatactattccaagatgttctcttttgtcggatgatgcccgttgtttggcaattcgatggcatgttgttgcttgttaagtttttgtatgttgctatgaataaatttggggaggcattatctccccgtcccctaccaatttctttttttttcttctatcccatatatatatatatatatatataactgtcgaaaactctttgctttcattttcttaaaaaatcacgtaaacataattttagaaataattaaataacaagttataatatttttttttcttcccatatatataaactccgaaaacatatagtcgtatattatttcttaaaaaatactttcaattgactttttccttttgtattaaaatctattctcccacatatttggtagttattaaaattgta

SEQ ID NO: 22772 - DNA, 536 bp, Arabidopsis thaliana columbia
gaacgagaccaatcgcaaatgctggggctgggagggtaatgatgacgttgacagttttgcccatgtctattgctgtaatttacgagaaaacccaacctttgttttttcaccgatatagagatgatctaagccgtcgtctttcgccgtcgagcctgacaattgagtgatctgatcctccttcttcgtcttgttaataagtccaatttgctcggatttcgcttaactttatcgcatttcctaaattgccctcgtcaccactttcacactctctctctccctatggccaccgtcgcgcttcttaggtctctccgccgccgtgaactccacgcagctcacatctctgcatataaattcgtaagaaatgatccttaatctcgttcctttcgcaggtatctaattagcttgaaatcacagttttatctttccttttcttttttcgcagagttctgctagcgccggcgggaggacgacggagctccgactacacggagtcaaagatatcatcgccgttgcgtctggtaaaggcggagttggaa

SEQ ID NO: 22773 - DNA, 437 bp, Arabidopsis thaliana columbia
  unsure (1)..(437): unsure at all n locations
gttttgtctctaggttattccgggatatggtcacggtgttctgcgcaatactgatccaagatatgtatgccaaagagaatttgccttgaagcatctacctgacgaccctcttttccagctggtactttttttctttctcttttctcttttctgttcggttctcaaaattctatcaatgttcagtagctaacaaaatccttccaactctgtaggtgtcaaagctttatgaagttgtgcctcctgttctcactgagcttggaaaggtagtatctctatccttcgtttaccatggtgatccttcaatattccaccaacaactccacaacaccttacctacatgctaggggcttatgaatctcttgcgaatcaattttttatttacttgcgaatccgatgatggcttgttacaggtgaagaacccgtggnccaaatgtgat

SEQ ID NO: 22774 - DNA, 577 bp, Arabidopsis thaliana columbia
ataataccaatgaaacacaatgatcctgaccaatgagcatgcttcgctgtctaaatgcaagccacgattaactaacacacatgacacagaactgttagtcttaatcacattgcttaatgcttaccaattaccataaatcactcccgccaccacgcgttttcttcaatttaacatataaaactcgaaaccttaattacgttttccaaaactaatcagtttttcttttcttccaagtttgttattcctcgtcccgaatcttcgcattaaaaacagaaccaattccgaccaaagttttgagatctgtaatatgacgaatcccgataacatgaaaccggttgaagctactgacgtggaatctgcggcggagaagacgtcggagccgacgccggcatctggaacgtcgacgattactcagagatggaaaagagaggatttgataaagaaagcatctccgattacgagaggaatctgtcttttgttctctcttattgctttcttaattatggtctctaataaacatggttacggtagaaactcaatgactacgaagagtacaggtttgatttctgttttttga

SEQ ID NO: 22775 - DNA, 350 bp, Arabidopsis thaliana columbia
ccatcacttccgtcaccctttcaccggagctcctccaccgccgattccacccatttctccttactctcagatcccggcgactttacaacctagacattctcgctctatgtcgcaaccgtcttctttcttctccttctgattcattgccgccgttaaatccttctgctccgtcggtttcggtgtcggtggcggagaaaaccggtgccggattcagtccttcggtgcctccgtcatcgattacgatgtgtcagtcctctagctctaggaacgccggtgttggagagaatctacttcgagaaagtcgtctcggcgttcgcatagtgatggtacagttgggtttagttcaatga

SEQ ID NO: 22776 - DNA, 497 bp, Arabidopsis thaliana columbia
cgtttcatggtccccgcaaaactcgactcaccgagcctcgcgcacaatcaatctgctacgacgcggaccaccgatggaccgtgtctgtctcgtggggatacacagtccagatcatacgtggcgtgttgtcagctagagagatggtgatccccacgcgcacgttcatcgattggtacaaacaggcagacgaaagaagctatgcttttaacacgcgtcctatcgccaaaagcgcgtgtcagcgtccgcgagtgtattacctgtccaacgcgcttcctgacttggctttgcgtagaactgctagtgaatacgtgagatggtacgacatgtgggagcctgaatgtgactgggatatgtcggatccttcggaatttgaacgggtcattgtttataagaaacccgacctcggatagatggaataaacatagggtaagtaaacaatgttatcatttttaagttttgttctctataagttttattgattcataattttgtggtga

SEQ ID NO: 22777 - DNA, 418 bp, Arabidopsis thaliana columbia
gtgtgctgtaaagtaccccttcattgtccggtaataagaacggcttctcgcctgagaagccgaaaaggaacgcccgtcatcgcggaacctgcctgacacattatttttcaatcggatagatagtacccgtattcataatgccattaggatcgaactgctttttcagcccttccagcaacgcccacgcgctgccgtgttccagtttgctccagtgaacgcgatgtttaccgataccgtggtggtgcaccatcgaaccgccgaggcgaatggtttcttcacagatgatcttgttgagcggattgtggtacttgtcgatttcctcttccggcttacagtcaacgacgttgtaatcgtagacgaagtacatgttggtgccgttctgatagctatgagaggaatgaccgcccagcatggtgat

SEQ ID NO: 22778 - DNA, 429 bp, Arabidopsis thaliana columbia
acccctctttactaaagctgcagacttgcttttaaaaaacacatctgaggtttgattgtttagtaactacgtactactgaaacaacatatggggatatatatatatatttaaaggcttattagatcctatcaatcatcattactcattccttagtgtgtaatctcgtcgtcccgatggatattgaatttgcttcattaattgtttccatgactaagaagactgcgtggttgctcacgcacccgcgggccaatgttgtcaaaggccttaaactctaccaagatgtcttcactcgacctcaactctccaagcttctggattctattaatcagctccgagaggctggtcggaatcaccaactttcaggtgattttacctttgaatttaattccgtctttttttctttcataaaccttacacacgagagtaag

SEQ ID NO: 22779 - DNA, 380 bp, Arabidopsis thaliana columbia
gaggatgacgaggagtggtcgatgatcgatgctctacatgaagattgaactcctgaatttctgtgaggggcattcgtactttctctggaacagggattgggtccctgtgatcaaagccattgtgagcattttgaaaacgttgataaagattcgggagataaacaaatagtaaaagggaaggtcacttactcttttataactggttgtgctttgaagagcctcttctgggcttcttctgtctccattctcctcctctcttccctttctcttcgcatttcctcttcgtgccttactagactctctaactggaacggttctggttgtgtgcattgcttaggttctggttttggtggtacctgagagttggaacacgtaagatt

SEQ ID NO: 22780 - DNA, 1039 bp, Arabidopsis thaliana
atcagactttccaaaccatactcttttgtaacccatttatcgtgggccataaacccaaaataataaatcatgtatataaacgggctattgggccataaactagtgataataagctttggggcgacgatctctggatacgtcacccctcgcgatacaattacaaccgatcaaggtcagcgaatactccgacatccttttcttgcggcccacatcggtctttagtgaatcacatgttttttctattgtcgtttcttgcgcatcaagttctgctgaggtttcttgttattttatttttgaaatttttcaacacctttaacttatctcgattttgtttaccacttaaaaaacgcccaaccaatggcatacactgaaaatgttttctaaacatttaatatttctgtggctaccaaaaagaaatcaagagttattttccatttattctgggtgaaagagaaacagagtgccacctgtcatttcctaatctggcacgtaggtttttctcatacgtattacagtgaataatacagtataccaaaggcggctcgtagcagagtttgttcgattctcttaaccacattaggtttggagtattatttgcttctctcgattgaagaagagtacctaaagaatcatgttgtggatcaaaaacctagcaagaatctcgcagaccacttcttcgtctgtcggaaacgtgttcagaaaccccgaatcctacactctctcgtcccgtttctgcaccgctctgcaaaagcaacaagtaaccgacacggttcaagcaaaggaggatgtagttaatgcgttggagccacaacgttacgacggtttggctccgacgaaagagggagagaagccgagagttttggttctcgggtcgggttgggcgggttgtcgggtattaaaagggatcgatactagtatttacgacgtcgtttgtgtctctcctaggaaccacatggtcttcactctctcttggcttctacttgcgttggtaccttgagtttaggtctgttgctgaacaatctctcgtatcaaccggcga

SEQ ID NO: 22781 - DNA, 391 bp, Arabidopsis thaliana columbia
gtgtgctctaaagtccactaccgttatctcgatgtcagcaccctgaaagagctggcgcgccgctggaagccggaaattctggatggttttaccaagcaggggacgcatcaggcgatggatgatatccgtgaatcggtggcggagtggcttactaccgcgagcattttatcaagctgtaaaatttttcctggtcacgtaagcgccggaatccacttgcggcggcgtgattttgacgctaaattgaacgtcttgctgataatttcagcacttgagataaaaacgcaaaaaaaacttttttggggggttgcagagggaaagatttctcgtagaatgcgcctcccgtaacgacgcagaaatgcgataattacgatagccatattcagtagtacgc

SEQ ID NO: 22782 - DNA, 1023 bp, Arabidopsis thaliana
ttaatttccaactttccaattatacgccataatggaacataaacaaaatgatatttttcaggaccaaatggactgattataaggtttactagattttgtggagcgtaccaatctacgactatgtccatataattaccatattactccaatcaaatattgcaggtaaactgatgggagtaacagatttcataaaccctaaagacttaactaagccagtacatcaggtaatataccaattttcttataacagaaaaatatcaataattgtaaaaaaaaatacaaaaattgttaactaaaatttttaaccattgcgaatttgcgatggatcaatatacaaaaagatgatacgagagataacgggaggaggcgtggactatagctttgaatgtacaggaaacgttgatgttcttcgcgaacgctttttatccactcacgtcgtaagtccataataatattatgaattgagatcaaaatcttaatttggtttacttgatgttgatttagttacttgataaagaaggaaatgagaaacattattttgatgatagggttggggatcgacagtacttgttgggatctatccgacgccaagaacattgcctcttcacccaatggagcttttcgacggccgtagaatcaccggttctgtgtttggtggcttcaagcccaaatctcagcttccaaatttcgcccaacaatgcatgaaaggggtctgaaatttgtctctaatttctaatcttagaaacaagaagtaattttgtgttttagtgatattaattggaatctttgatttgtaggttgtgaaattggaaccttttattaccaatgagcttccatttgagaagataaacgatgcgtttcagctgcttcgcgatggaaaatctcttcggtgcattcttcaaatctctaaacttctcaagagatgattctacacattcacaaagtttactacactatatataatttcccaacaaacacttattttactgcattattcagtatattatcttacctataaatgtg

SEQ ID NO: 22783 - DNA, 541 bp, Arabidopsis thaliana
tggaaagccgtggcatcacgatttgaaaagaatgcggaagttcatatctgtaatgaaggtaaatatccatccctgactatcagttgtctggagaaacaggaagagccaccatcattgcttcgtctaaataatcggatcaaacagctactcccaccggtagatttaacggaactgttacttgagatagatgcccagacaggatttacacatgagtttgcgcatgtcagtgaatctggtgctcgagcgcaagatttgcacatcagtttatgtgcggtattgatggctgaagcctgtaatatcggactggaaccgctgataaagcacaatataccagcactgacccgccatcggctcagttgggtgaaacagaattaccttcgtgcagaaacgctggtcagcgccaatgcccgcctggttgattttcagtccacactggagcttgctggtcgttggggaggtggagaagtggcatcagctgacggcatgcgctttgtcacaccagtgaagaccatcaactcaggatctaacagaaaatattttg

SEQ ID NO: 22784 - DNA, 529 bp, Arabidopsis thaliana
cagttacagaggatttgatgagtatcaaggtatagaagtagcatggaaccaagtaaagctctacgatttcttgcagagtcctcaagagctagagaggctctactgtgagatccatctcctcaaaaccttaaaacacataagcatcatgaagttctacgcgtcttgggtcgataccgataatcgaaacatcaactttgtcactgaaatgttcacttctggcaccttgagacagtaagcttatctctctatctcataagtgaagttctcttgataacttacgcataatgtttttatatctttcatgcaggtataggctaaaacataagagagtgaacataagagcggtaaagaattggtgtagacagattttaagaggattaaactatcttcatacacatgaccctcctgtgattcatagagatctcaagtgtgacaacatttttattaatgggaaccaaggagtagtcaagattggagatcttggtcttgctgcctgattaaacactctctcgctgctcattgtgttggt

SEQ ID NO: 22785 - DNA, 631 bp, Arabidopsis thaliana
  unsure (1)..(631): unsure at all n locations
gtgttacggttttcctctagctcttcagttacaagtttttgaatccattccggtgatattggagaggataaaagatccaaacgatcttcgggacttcactgagaggtcatctgaggggttgtcaatagcgtttctgcttcgtaagagttatattcttgatgctgaagttgatgacaagcttgtggttgcacatacattggaacctaagggaatgattaatgaatctgagttggtttgggaaacagaggtttctgatcccaaggtggattacattttgagattgatcaacgagggacattgtttcaaaccatttgaatggccacacttgaaagcagcaaatcaagaggtcaatattccagatattgatggtgacagccttgaagatgtcacagatgttagtcaagcaaggcccaaaaagcctcttactaggtcttctaagaaggagaaggaagttgtcaagcctcctagtatccacaaacatacttctcaggaaaaaataaaggctaaagttcatgttggtggagaaagtaacgaccggggtatgtccgcttgcttacttgaatgacatgaaggagtggatcctganacagaatcaagaccttagaaacaagattagggaggatgttaagaa

SEQ ID NO: 22786 - DNA, 614 bp, Arabidopsis thaliana columbia
caaaaaagtcgtgaaaagaaaacacaagtagctagagtcgaaaaaaaaaactataacaataatgaatttgaccaagactggttttactttgtgtgatagaatctatgataattaacttttcatcatcatcatcatgatttatataattaacgtttcttcttcatctcgtcaaaatggtaaagaaggcgatcgaagtcggacttgctcacgtgacactcaattccaagacataaaagaagaagccgtgacgttatccacgtagggatattccatctccggaaccggtgagaaatatggaactctttgtgtgttctgatgagcccacgacggcgacgacgaggcatagtgatgatgatgatgactgtaatagtttccactccgttgtacgaattctctactgggacttctgccgctgatgaacctccaccggagatcgttaagtttctggccgtcgcacgcctcgcctctttcttgaatcggattcacacgcgttacataacgactgcaccaagttaacattgtatatgttacaccaaaatatctttgaaaatgtagttattatagacatgtgattatatggagattgtataataaatattagggacgactttata

SEQ ID NO: 22787 - DNA, 514 bp, Arabidopsis thaliana
tgaagaaccttgtttgtaatcgttcctcatcatcatcaccctctttaatgacatgatttgagttaaaataatgtcgtttccattgttttctggaatttgtagaagacacttttgacaccagtgtttcaagcaatttggcaaagtattttaacaacgaaatcaaagtgcaaataagtgaactagtgtggaaaataaaatatttaaattggactgaggaagaacgtcaaaaaaatataaaattggattggttaaataaatctaaaattggaccgggatgggtgttttcgtaatttaggcttgttgagccaccgtgtgggcaaaaatatccaaaaacacaacacaagtgttgtcttctcgcgtctctcatcaacgagaaccagtttttttgttgatcctatcaacaatgacgaaaatagagcttcgagctttggggaacacagggcttaaggttagcgccgttggttttggtgctctccgctcggaagtgtcttcggtccagtcgccgaagatgatg

SEQ ID NO: 22788 - DNA, 567 bp, Arabidopsis thaliana
ctgggtataaaattatttcaaagattctttgtcaaagacttaagacggttctaccatctcttattttggaaactcaatctgtgtttgttgaaggacgtctgatttgagataatattcttattgcatagaagatgtttcatgggttaagaactaatccgtcatgtaaaggaaaatacatggctattaaaacagatatgagtaaagcatatgatagggttgaatggaattttcttgacgaattattaggaaaatgggcttctgtgaaaagtggatatcatggataatgttgtgtattacttcagtccaatataaggtccttctgaatggacaacctagaggactaataataccagaacgagggttaagacaaggagatccgctttctccttacttatttatcctctgtacagaggttctaattgcgaatattcggaaagcaaaacaaggaaaaatgattacgggcatcaaagtagcaactgcaagcccctcagtatctcatttgttatttgcgtatgatagtctttacttttgtaaggcatgataagacaatgcggagtaattttaaat

SEQ ID NO: 22789 - DNA, 631 bp, Arabidopsis thaliana
tagtagcggccgccagtgtgctctaaagcgtcgatatgataccccttgtcgctcaacgcctgcttcgccaacttgaccgagttcagatcatcgtggctctcacggagcagcagagtgacgcagggaaaatctggggcaggccggacaggctttgcgatgatgttgacgccaagatggtccctctgattatcatcatcgtggaccagacactcaataccagagaatcctgccgcacgcagctcgagatcccagcgctgaggagatacaataggttcggttgctcggccatcagcctctccaagccaccaaccgggcaacgggcccatgataagattaatcatttttgcagcagaaggcgtcacgtcctggagaaagaacctccctcgtggatgaagcagcttgcggacgtttttcagggtcacgtttagggtttcggtagcatgaatgacattagaggcgatgatcagatcgtaactgccagcatcgaatccctgctctaacgggtcctttccaatatccaaagtccggtattcgagcccagggtattcggcgaacctctctctggcagcggagaagaagccagacgagacgtcggtgaatctattttctgttcagtcagaagccagaggtt

SEQ ID NO: 22790 - DNA, 542 bp, Arabidopsis thaliana
tagcttggcgaagtccgaacagatagccttacgacccgattcatcgaatatcttttcgagtgttatatcttgtaaggctacaagtgttgtctctagcatgtctagaccagcttggttcgcaaacatgaacactggctgtggctgcaacatatccagaccatattatacgtctaaaactacaggtgtattctgctttttgtttggtgtaggacacatacctttaatgagcaacacaggatggcatcttggtgatcccatagaagttttagtaccgagtcgtcgcttccaagtgaatcaatcgtcagcaactccgagcctaagtgatgactggaaaaacaaacatatcagcataaggcatcatcgataagttcgaggattataagaaagagacgagagtaaacatttacacccccaccatgtaactttgtagagatccactgagcaagagtaacagcttcaggagatcatggggacaatttggagccagactcgggcttatcacagacggtgagatcgccattgaacacgttgaactgatgaga

SEQ ID NO: 22791 - DNA, 512 bp, Arabidopsis thaliana
cacaattggcagatcaagttctcatcacaagattgttgactgaagaactcgaagtctctgtgaaagtgcagagagaagattccggatggttctcgaaagaggacttgagagatactgttaaatctgtgatggatatagatagtgagattgggaacttagtgaagaggaatcataagaaattgaaagagactttagttagtcctggattgttaagtggttatgctgataagtttgtagaagcattggagattgaagtcaacaacaccaaattttcttgaactgaatactttgaatgttccaaaataatgtttacttcaattttatgaataaagagtatcgtcttacattttgatataaagtcttactaagaaatgattagagatctcacactccaatttttctctaataattttggaaagatcattacaataacaggtaaagaagtattcaaaaaattataactagaggcaaaaagatttcagaacagtcccaaggcagaagcagcttgagac

SEQ ID NO: 22792 - DNA, 3407 bp, Arabidopsis thaliana
ctaattctagagattcgtggctctgtaccaaggtattggttgcagtgagcgttttggctttaacttgttgattcgtaatgtctgttaggttagctctcgtcaatggtgattgagtctgggactaggttaacttgagggtctctgttgcggtggcacttagatttggttaatgaacttgttgtctagggataatttattgagcatgtcaatcacctgtaaactgaggaaacgaaactactcaatcaccccatcctcgggaattctttatgtgattgatttctttgtttactctactgttgtttactgcatcttgtcatctgttgattagtttctataattctttcctgttactcgacctaatactcgaccacccagttgactggcaacagactgtgcaatcgagtatctttgtttcgtttactgcatgttactcgaccagtcactcgaccacacccagtgctctgcaacgagttgtgttggtcgagtgttttactgtatctgcctgattttctgttttctgcatgtgcacttaggactgctagaacaccaaaacctgttattgcttggcttgacttagtgacttatgatcacatcttgattgttagcatcacacccatttggattgacaacctaagatactacaacgacatgattgatgttttaggataattgactacaaacctattatcatctaccgtccagatgtcctcaaagatgccaatattctcaccttgtgtagctcacccaatgacttccaagctagaggtggccacaatccttccggaagcgctgatgaaggccgctatcgaccatttttcttaaggtgttttgcagctaacaatcccacggccgtgtattacgaaggtattcgtgttctaacgcatgaaaaaaacatcaatggagccatcaagctcttacagcgtcatgctccagtacgagcaaatgcaacacttgcatgcgccattgtattcatatatgctgggtatgattatatgggcggcttgtttctacagctcttcacccgcaaccattatccattggactcggttgccactcgagttttgggtgatgagttcatcgaggaaataaagaagtttgaccctccatacagcaatacatatggtcctacgttctcttatcctaccagccatggaattagtatgcctccttgcgccatatattgttggtgatatttatgaatggacgtacactgatagtacactacagcgtacactgtttgttgggtaaatgtagaaatgtaaatgtggacgtacactacaacgtacactgtttgttgggcaaatgtagaaatgtaaatttggacgtacactaaaacgtacacgtctagttttaagctgttattaaaaagaggttgctcataacaacaataacaaattatatatggaatactattacgttgatttgacaatatgaatacacatcatcacttaatacctttgcaataaatacaaccataacttacccaaccatatcttcaatgaagcttatttaagtgttggaatttcatttggttgaaacaccttactcctaaatatgccaaacccaaatattcctgatgatttgcttgcgaagatagccaagaaaatggctgacaaatgttggtggtacctcggacctatgttgaaatccggtcctcgtgggagagacattgtctaccgtccggatgtcctcaaagatgcaaacattttcagcatgtgcgacgatcccgatgacttctacgcggcaggccacgatccaaatgacatcaactccgaaggtcgctatagacccttcttcaaacggtgcttacaagctggtaaccccacggctatttaccatgaaggactgcgtctcgttacacatgagtctgacattcagggagctatcctacacttagagcgaatagccccaaggaacgccgctgcaacccttgcatgcgcaattctttacatatgtgctggtaatgctcacatgggtggtgtctacctttggctcttcggaagcaaccattatgctttggaattggaggaggcacgtgacatttgtgaggaggtgctagaagatataaagaaatatggtaatactttaaaatacacatacgctaacagtttttcgtacccggaatgtggtgacgtaagcactcctgagtgcgcggagatgtgttacatgagatcgagactcttcaataatctttgcaaccaatgttacatctggttgtgtgctaaacggattagccagatcctgtagagctcacattcgccacgatcctgtcatatttataagctttccatgcaacaatatgtgagctttttacgttgattatcagtaatggaagtttgtttttaataattaccactttgtaattgattcaaacatactagctcaaactactctaatatgagacatcattaacacaaaataataataaaataataaaatatctacgtacacgatatatgataatgtacacgtggcatagtttaattccaactataaaaattacatactgagcgacgatatagtttgtaaatgaagacgaaaggaaatttgatttgacgtcgtataacccatatctagaagatttcgctccatattaattactcgctgtcaaatacactctagaagtgacctccatcacactctcattaatatctctattagacgtacacggttcccgagcaacgtactcaattgatttggcagataaaataagtaagttaatgtttatttgaaaagattgttagtaaatgcgttgacccctaatatagcactatacatgaagccatattgttccacttatatgcaatacaaacagacgtcaactcaatcttctgtcagaaaacgtaatgagtattttatagacgtacacggcgcgattatgagaggtacacagtagtttgtttaaattaaaagttactaatatgatgcactaaatatacatccacgtcacccacccacttacattgatggttattctcctctttaaaacccatgtcaaacacacttagttgaatacacgaatccgtctaaacctcctcatttgaaaaacaatgcctttcctacctccgctaacccctccaaccgagttgtacctaggaatccaatggccaaaccacataagcatacttgtcaactacctccccgtcagccagactcccatagagacgctaaggaacttagtctacagttgtgacatcaccacccttgcaatcgatgaattcatgacgtggccatcgttactccaaccggagtctaccttccggccatactttgagctgcttatagaacgtggatccatcccgacggtttaccttgaaggtgttcgccaagcgagcaacttcgtgacagtagctcagggcctttcagtcatgacaacggtcgctttatctgatccctttgcttgcttc

SEQ ID NO: 22793 - DNA, 1735 bp, Arabidopsis thaliana
tcaccaccgccgcgatctccgccacgcgcgttttcgtcaaatccctcagaaccgtctttttcagctccatcaccacagcggctagggattccaggtaataagaccgagttgccattgcttgcagcttcgaggaggctgcgatgtcgccgtgcttgtcgatgatcgcctgcagggtttccgacacgctctgcctcactctgtaattcgcgacggatacgtaagcctcggatatcattgattgactctcttccttgccgctttcgtagttcttgagtcctcgcattttggtaatctcctgcattgtgaagctttgtgactcgtcaggcagctccggcggctcgaactgcttgtcttgctcataggtctcggccgcaactatctggtagttgtggtgaacaggctgcaggtttaaagcattgtcatttctttgttttttaggcatttcagaatcattagtgactgtgagagagagagagagagagttgggaaaggattcacaccgtgctgttctcggatacgatcctggaacgaagtgggctgcggatttctggatagaggtaggtggagtgattatcgtcgtcgctggatgaatagtatggtccatgaacgggactcggaggagcgctcttctggtgtattaagtcgccatctagctcatacattgcctcgaaatcctcgttatcctggtggcttctacgatggtcaggctgcacaattagagagaaaattcaatatatgtgactcactgtcaagaggacgttttttatcactaggaagaagctgaaacaaaaacaatgagccagacttaagattttttgagtaccgttctgtatggttgtggtggtggtggtgaatggcttgctgctggatgcaatgggctaggtggagagctgtttcgtggtgttacatcgtcatcttgctcataaaagtcctcaatttgctctttaccatggttactacgttgatcagactgcagcataacaagaacatattctattgtcagtctaagtgactcactagaaagagaatttgatttacttatccccaaaaagaagccagtatcgagtttttgagtaccgaccgttttgtatgctgctggatgaaacgggctcggtggagagctgtttcgcggtgtgacatcaccatcttgctcgtacaggtcctcaaattgctctttatcatagttactacgacgatcaggctgcaattagagagagagagtttatgtcatctatgtggctcatcgtgtactcaagaatcacgagcaagacttaccgttctgtatggtggtggagagcggcttccagctggatggaatgggctccctggagcgctattctgcagcatggtgttggcctcaggctcatacatgtcgtagtggtctctgcggcgatcaggctgaaatcaagcatttaaaaagcaatgcattctatttagtgattgatgggtttgaatacgaagcaggtcatcagaagtttaggttattagtaccgtgtggaatggagatggagaagggcttctgaatgggtgaaatgggctcgcattgcttcgggtatctgcttcatacattcgatcctggtgttctcgacgatactcggttgatttcctaggacgttcaggctgcaggtttagagagaatggtatcaggaaacaaacggtggagacagtagaagactcgaatcagaagaagcagaaagtaccgtgcggtttccagctggatgatatgggctggaag

SEQ ID NO: 22794 - DNA, 1005 bp, Arabidopsis thaliana
cttccttttagggtttttcagattccagaaatctcggacacgttatcttgcgcgaggaaaaccaataatatgttagcccatgggccaaaagataccatgtgaattatgggcctttagtttacaggacatgaacataagccttgccttataatacaaacctctgttttttcttgcaactaggtcattttagttacataaatgtgaatgtacactggacaaacaagcactaactttgtatcttgcaaaagttaattctcatgagtcatgaacctaaagagaaccgtagtcttccttctatgcaacccatacaaaagagtgttcaaatacatcttcacagtcagtcagtcactgtcccaaaataagctaacacattatacaaatgaatcagaaataccatcagaacaaaaactacaatacccgcttatctcaagagtgtccatcactaagctatggcagaaagagtttgagaaaatgtttttttttttttttctcaaaagagacagtcacaaaacaagcttaatcatctacagagtaaatgagtgcagattttgcatcccgccaaacaacacaagacattccttcaagtgtgacgtacttgaaaaagaaagcgattttaacctgagtcataacattcaaacctgcctcatgagtcataaatcaaacagtagcagcaatagcacgcacgaatttacaatcctcagggactgtaagcacagcgtcgaaccactcgaccgtcccccaaatctcttcattgttgcactttttttgaagcgaaatctctgcgcaccaaatcatcttctccttagactcactttcagggacataagtgcccacaaaaccatcaacttaccaccataatccaccaatttaacactagcataatcatcaaacttaggtacccttctaaaccctttagatttccctagccgattccctttccagagtataccatagaactcccattggtctataaaatagctatgtccctatcatacaacagaagac

SEQ ID NO: 22795 - DNA, 598 bp, Arabidopsis thaliana
ttttatggttttcaagacagctaccgagaaagatgtcgcgctatggacatcaatgataactgggttggccttccacggaaatggccagcaagctctgcagctattcggaagaatgcaagaagaaggtgtgacgccaaacaatgtcactctgctcgctgtcctgacagcttgcagtcatagcggactcgtggaggaagggctacacgttttcaaccacatgaaggataaattcggctttgaccctgaaactgagcattacggaagccttgtggatctgttgtgtagggcagggagagtagaggaagcgaaagacatagtgcaaaagaagatgccaatgagaccaagtcagtcaatgtggggatcaatcttaagtgcttgtcggggaggtgaagacattgaaaccgcagagttggctttaactgaattgcttaagttggaacctgaaaaagaaggcggatacgttttgttgtctaatatatatgcaaccgttggaagatggggatattcagcaagacgagagaagcaatggagaatcgcggagtaaagaagactgcaggatatagtagtgtagttggagtagagggcttcataggtttgt

SEQ ID NO: 22796 - DNA, 2194 bp, Arabidopsis thaliana
tggttatgaagggaagagaagacgataatatagagaccataaagaagcgatttaaagtgtttgttgaatctaccctcccaattattagctactacgaatcgaaagggaaacttcgaaaggttaggatttggttctccacttctcttccttgatcattactatcatacgctgttcctgattttgattcttgtttctgattttctccagatcaatgctgcaaaatccagcgaagaggttttcgaggctgtcagagttctatttgcatctgaaacttgacaaggtgatgctcgtgatcatccaaacatacagttttctctctagtccttgtagatatgtaatgcattattgtttggtctttgtctttgtagcatcaaggacttggattcaccgaacagaacaaaacagagactccaaagtcaatgatgtgccttgtcgtatacgtaactaagtttacagattcatgctttatttgtatatgtaattatctctacattttacatgttctcatcatacgatatagccaaactttcgtcgcaataaccatatttttagctaaaaacttgtttagcttgacttatttaatcaagactctgttggggcggattcccccacaagcaagaccgagccaaatagtctaagaataacaatcacctcatggttaaacatatgattggcccctagcctagaacaaagcacctcgggaccttattcgatcgaccgtcccgaagagagtttgtaaaatggctcgggtgttaatcatatgaacacagcccgagccaatcgtgagaacgctgcgggaaacatctatatcggctcgggagacagccaactgagcttaatggacagtcatcaagcgcgccccgagccggtacataccgtttgccccgaagccacctctcaaacgaccaccgagccgtgaagaacacgcgaggcaaagacttgtaaaaaccattcattctccaaggatcatttccggtaaaatgggatcttttatgggactttcagaaatgataaaggagaatctttgaagataatgtcgaaatcaggaaatctccccaaaacctccgaagaataaggagaatatccttaggacgattatcctctagaaccgacctaaggataaataagaatcttccgaagaatatcgctagggaggcggtttaaggatcctatataaagtgccttagggacttcacaaaaagggggagatcttgggatattcacaagaaacatagaactttatacctattgaaaactacgaatggcttgatcccttcacagggtacgtaggcaatccatcatggatgcagctatacctttttaaaactctaattctttttctgttcttgagcaaaaccctaatgtatttcataagagattagaatcccctttataattgagtcttgtatgaaatacctaatgaagagaaattactagatttgttttcctcttttaaacaaatctattgtgtgaatccttggttcaacaattggcgccgcctgtggggacaaaaaagaactctcttcgcatatcattcatccaagttttcgatgtacgctcatcaagccaagacaatcagatccgtctacttgtggggcgatctcccgtcaaggttcaatgaaccaggtgacgtataacctgttcacggattgccccggagatcagatttccagagaatctaaccgtagctcaatcggatatctcttctcaaagttatctccggttttctgaagttgatgctgtctgtttctgacaaatgatctcataactccctttctgcaaacaacaaatctctcaactcctcttattatctttatatccctttctcttttaatgagatgtgtatagaccaatttacccctcctccttctttctctaatattcattataaaattaaataattttagaaaaacaaaaaaaaattgaaccgaaaaaaaaacagaatccccaaaactctctctcctctcctctgaagctcgagctcactctctctctcgctcactcatcgctctcttgccggaattcgctcaccattgttgccatatccttatcttcggcaagcttcgtcgacataaaaagacaaggtatgtttctcgagctgaataaagcttaaaattgaagattagaactaagagattttgacaatttgatttaagattaaacaaattgtgtttgggtatgccattggaagtta

SEQ ID NO: 22797 - DNA, 1646 bp, Arabidopsis thaliana columbia
atcagtaattgtatacactgatttttcctgtaacataatcaatggggtaagccataacaaaccaaaaccatcaatctgcttttggaaccacagaaatgagtttgtttacacgtttgatgaaactgttggccgaataacatatgttttacttagtttcattatgctgtatgttggagatgcactttcagtcaatcgcgagcttgtacctgcaagctgttacagaaccaacgtggtgagctggcgagctggcaatgtgaagcgagctggcaatgtgaagcgagctggaaatgtgaagcgagctggcaatgtgaagcgagctggcaatgtgaagtcggggataagcaaagcacgtgttgtgagctagcgagctggcaatgtgaagtcagggatgttaagcaaagcacgtgtgttgtgagctggcgagctggcaatgcaaatggacgttaacggcgatcgttattaacgtggttagcgtttactttctttacctttttgtataagagcaacatgttatgctcatgctttcattatcgaagattgttatagaaactctctctcttctagaactttctttgtaatctctgggtttttctcatcttgagaaccagaggagaatcactccgcgtttcatgaacgttgtttgattcttaagtaatatacagagctttcaatcgtgttggtgttttggttgttaatcggagatcgtgatattttctgtatcacaagcatcacgtttataaatgttatgattatatagccaaacgggcatcatggatggcagcttcgtcataaatagttttgcatggtatcctattctatttactatttactgtactattccgacccatatgcaagattcaaataaaaaagctcgttttacatcaaataattggaggctcaaattgttttctcttgatgtcatgttttcagtatatatgtgaaaatattactcgtttagttataatgatatgcaagaacttgacatttcatttattagttgaatactttggagttataggagtttgtagctataggagttcagcatatctgttattgcatcactgtaatataacccaacacactaggctaataggctgaaacatttcacttcaaacataaatatacaaacatcacagttagtagttgagtttcaatacaactgttctctgattacaacagaaactccatgtttgttcaacataaattacacatctacaaatcaagcaccacgttctgttggagacaatgcattgaaagtttcgatagcgtactgtttagctgcatctcgcatcttcccatcatctagtttcccacaatactccattgcgttcactgagtgtagctctagtaagaccacacttgcaattccaaccagccctgaaataaacaaatgtaactatatatgtaaaccaatcacattgcacacaattagtgggagatcacaaatgaaacacaaacagacctagtgaagaacaactgcactgtatcttgggtctactaacagtcattggctccagcctctgtgttagcatgtacccgttaactccatgctttcgaatcaggtacggtagcatgattgttatgtgctctacgtacttctccacctgctcgtctttcaacacgtctctgttacagtctaaaactgt

SEQ ID NO: 22798 - DNA, 579 bp, Arabidopsis thaliana
tagtaacgtccgccagtgtgctctaaagctttagatggttgaaagccatagatcgtctcatcatctgatcatgcgctaagtagactctaccgtctgttttcccccgataccctgaaacagctgcatcttgacttcggcggctaatagtcccttgacttcctccgatacaatccgctggccgtcctttactagtctctcgagttgctgatctctgacctgggtaggggcgcctcctcgaggcgggttgctctcaattccgcgggctacccgacgcgtcttctggctgaggtcgagcatctgtttacttccgtagtcgcgagtggtgaatagagggctttggctgagcgtggcgacccagtacttattccagaggagggagagaatctcagtatcaagggcgcttttaaaaagtgacacctcaagtgagtagtaatgggaagcgtgtgctccaaagtcctcggctttgttaagcggtacggtctggtattcgtcttcttcttgctcctccttggggggggtatagtccttagggaacgtcctgaacgcaccgatgtctacctttcccgcagagatcgtacg

SEQ ID NO: 22799 - DNA, 3250 bp, Arabidopsis thaliana
ccaataccttggtacagggtcactaatctctggaattagtggttcagacatttcatcgtacaccttttgggcgcggaaatgtctgggctcaaattccagttgatcagaaagcaataggcattaagaacaactaatccagaagggatctatcaaccaatactcaatcacctagtatactgagaattctacactactctaacccatcctcagaaacctattcactactcagacatcataacagaaagcataaacgttgaacaaattgaaaacatgataacaacactctaacagcaggatgataacagaatgaacaacagtaaacgaaatcaagaacagaaactgaatactgaatagataaagagaaatctggattacaaaaagtctagaacacaaggtcttcggaaataaaactagataaaaaacttctttgctgcgaaaatgagaagtacatgctacttatagccaaatatcccgaaactctaatactcaaaacgacgaagtattgggacgggttaagaactgtactcgacccctgtggtcgagtgaatagctggagtcttcttttcttccttgtgttcgagtgtttggttgagtgcggaataaagaaggctctgaagcttgtcatcgagtatgcagtcgagtggtggtgatggtgatactcgacatccaggtggagtgatgaggtcgagtagatgtctggcagtgggatgaagtcactcggtctgggggtagagagacgtcatcgagtggtgtcagaagacactcgacctcatggtcgagtgaagtgatcgagtgatggtctggtgatggagatgagggcgaagtgaagtggtaatgtcctcttttcggatggtgaagtgaagtggtgatgtcctctgctcgacctggtggtcgagtggtttcttgagatcttgaagctcctactcgacctcttggtcgagtggtttgtcatgatcaggtccgcttcttccaaatagctcgtcaacagctccaaatcacctgaaatcaacgcaaatatgcaacatgcatgcaaaactatcctaaacatgcaaagtgatgacaaatgatgtgaaatggtataaaacagtgatgatatgatgctaaagtgatgacaaatggatgctcaaacatgcaaaatacacacttatcaattcccccaaacttagtctttgcttgccctcaagcaaacattcaagaacaagctggaagtgaggtttgaaagcgggaactcagagccaaagcaccagatagaccagatgaaatcaatgtccaagttgaaagttctaagctgcaagatagaattctacttaaaaacgttagccatgcctcatcaatcaatcaatccgactcatatgctcgacctacacaagttttcaaatctaccaatccctttaacattcattagttctggaacgtgaatcaagcaatgcatcatcaaagaactcatttggctaaggtaaaaggtcaagagacaaagatggtcccttacagaataggcttcagtaacaagggatctctcaaaaaatgattaagctttagtagaatgctaaaggtaagtcccaagctatgcatacagagataagatcccatctacccagtgtatatcaaatgaagctctaatggtaatcccatctcccatctcaatacaagaactaaactctaccctttgcattcatgaattttttgtagccctttttcgaatcattcttttctttttctcttaactctaggagaagcttcaacactttgatatatctagcggatttggatttctttaacaactaaggttcctgtttttaacattttaaaaccaagggcttttgccatcttcaatagctaacaagaactctttcttttctttacaaatcccaaaacctttactagactttttctgcttttttagcttacttcacctagagtcctttaccttttctcatcaatgaatcaacccttttttttctttttcttttaaacacatcccaacccaaagtataagcacccacctagtcctatccagtccgaaaaatgcgaactagaactacatgagacactatctctgtcgttacgaacctaacactttctaccaagcttaatcggaataagacctcacaaacactcacaagtgatatagggcttgaaagaaagtctaggtttgggtttgggttaactgctctaataaggagagtcagctacttggattaacaagagtgatcaaaatgaataagagaatccaagtattttagggtatccatgagttcaaatttgatgcagacatgataattaaagatcagattcaggttcaaattgatagggaatggtatcagatcatgaccgtgtggtcgagtagagcaatctaggcatggttcagtttaatttcaaattcattgtctatgcaacacacaactagcaacgagggcactgagtttatccggtgaacaaaaatgcttacagggctatctcatcattatcccctatgcatatgcaacaatcctaaatgaaacactctagactcgatcccaaatgtaatgcaactacatgaacactctttttttttttttgtgaaatcattttctgaaatttttcaaatttttttggtttttctatgccttagatgaatgcagactcaagaatatatacaatgcaacacacacttcgtgagccctcccccaaacttaaatcacatagtcgactgtgtgaataaacttggaagagagtactcaggacaaatcaaatcacagaaataaaaaatgaagaaacaaatcacaacagatgatataatacaatggtgaagtgaggcgcgtacctcaatcgaagaatgaacgtagttgctcgtcaatggctgcctgtgattgctccaaggccatagacgaaccaccttgttctgtatcagctccagcaggtgggtactcgacctcatcagctctctggcggccagcaccgccatgagtatactcgacctccattgttctgctgcggccagcaccacagtcgagtgatctcctgccgtagataagctaaaacatggtcgagtatccttcattgctctgtggtcgagtatagtgttgtactctcagagccagaatccacttcactcagctctttatacttatctcctgaaaacactaaccaaatgcatcaaaaacaacaaggaaaaataaagatatgtacaaagatagacaagggttttgctcccaagtgagcttgttttaagtctctaagcttgacttctcatactcattaggcttaggtg

SEQ ID NO: 22800 - DNA, 3702 bp, Arabidopsis thaliana
ggattgaacgaatttcatcatatcacgagtttaaatacagatcaactgcgtacagaaaagtttgagcctgaagctgactacaaagcgttcttcagggaattgcatgtgccaaccggtgaaggtcctaatctagatgaacttaggcaaggcttagtaatgtgtagagcttggcctcctgaaaagcgtagatggtttgggttattgactcttctatccattggactttatggcttgcatactaactctaggataccatttgagagtgccaaaagagtttttgatgacgaagccatgaagacttatccatggggtcggatagcatttgaagtccttgtcgtttctataaagttcctgaggcatattggcaagacgtacaccatcagtggtatggctttcgtgttgcaggcttgggcgtatgattcaatcctcaccatcggcgagcgttttgggaacattgttaaagcggatgagattccgttggttagatggcgtgcaaccgtacccctgcaacaatagaatcgaccattgctgaagatatcaaagtgaatggtggtgaggtacgttttcggctctgttatgatagtcattgactgagttatgttctgttttttatcaaatatttatgttacggctgagttgtgctcttttatcactgagttaatgttttgtttttttgtcaagtatgttacgtgacgactgagttatgatctgtgaaggctgagttatgttttcttgttttggcaaatatgttatgtgacgactgagttatgttctataatggctgagttatgttaggtgacggctgagttatgttctataatggctgagttatgttaagtgatggctgagttaaacatactgatgggttttattatctcttgtgttgtagctgcgtgttcgtaaaatggttgaaaaggctgagttaagcgagctgtttcattcttggccagaccaattagaagacccaacactcgataacttgatccaagacttacacgagcttacgcttgttaaaggttattgggatgtgaagacgagtgagaagagaaagaaactcgtaaaagatagagaagcggatgtgtctgaatctcccgcaaagaagcagaaagtctttcacagtgagggtgttcattctcctgataaagatgcacgatagatgaagaagaataagaagaaggaagtagctgtcgaatctgatgagggcaacgatgagcaggatggtcagggagaactggagtcgctcgtggatgtggtgtccaacttgatctctcccttaaactcaaggtttgacaccgttgatactagcataaaagaaatgtcctcccgtttggatgtgattggaggtcaaatcgaatcgagggttgaagcaaagtttgaaggaaggtttggatcgattgagaacgatgtcaaacagattaaagagcagctgaaggccatagctgactcaaaatcaagcagttatattagagatatatttttagccaaaccacagccccaaacgcaggaagacaatcctaaggcccaaactcaaaagacaccaaacgttccaaaaaaaactacaaataaccaatctgctactcctagtcctcctccggtaaacttttagttagttatgaccgagttatctgaatattattcggctgcgttataacttttagttagttatggctgagttatctgaattatacggctgagttatctgaatattttacggctgacttatctaaatattttacggctgagttataaacgtttgttagttatggctgagttgttttcatgttataaatttagttagttatggctgagttatatgaatattacacggctgagttataaatttaattagtcatggctgagttatatgaatatgatacggctgagtttagttagttatggctgaggtatatgattatgatacggctgagtttagttagttatgactgagttatatttatacataggtatgagttttcattatttaacgcctgagttttcgttacgtttatgtagtcgaaacaagctgatgttggggtaagtaggaatcttgaaggagaatttgataaggtctccattgtgtctgattttgatttcgttgagactgtttctcctctcaaccgccgtttacgctctaggaagccaccatccccaaatgtgccaaagcacaaaaaggagaaaacattaaatgagctaatccagaaaccgccaacgagaagaggaagaggaagaaagcctttggagcagcctaaaaaggtgcctcctactgcgctaaagattagaataaataaaccaaaaccatctgaggaaacaaagtcaaaagctgaggaagctaaggaaaaagctgagttagattcggatgtagttgatgtcacggataaggttgtatccgagtataatgaaatgcttcctgagttgatgaagatgaggaggaaaccgagaggctaaagagtgtaaaagaaattcggctcaaaactgttaagctggccccggatgggagctcattgattaacctcgaagatatgcccactcacacttttccagttattggagacaacgggctgagctgcatgagaaagggttgtctgccttcacgagcaatctatgatcctctggcaccggttgatccggccaaactgcagaagcttaaggcttatttgacaggtcccgaaaggtatgaccctttatacattactaagttgttaaatacgacatgcttacactatttgtttatattaactttctttattatttgttagcaaacattattacaaaacatatgggttcgacgatgtgctgttctactctgttatcatagccgaaagaaaggactggccagacaagaaacatggatggttgggtgatgatgtaagttattgttatgttccgtctgagtttggctaatgttatggctgagttatcgtgtcgttatgtctgagttatagtagataatgactgatttacgatgtaagttattgttatattctgtctgagtttgtctaaggttatggctgagttatcgtgtcgttctgtctgagttaatttagctaatggcagatttatttaggtgttaaggctgagttttacttggttacggctgagttaatgttgtgttttgtcttggttttatttttgtccagcacattgctgcgtatgtgaaagtcctcaccacgaggctcctgcgagatcccaccccatactacagcgaacgcgtcatgattctagacccgtggttcacgtcaatgtggagtagggattacgcacagtggaagatgaagccgaagagggtttctttcaaaggttctacgtatgaaacttgggtcaacggtacgggtggagaagacccgacaaacaagaagtggataccagatgtggatcacttgtatactatcctccaaaccggaggtaatcattgggcgaccatacacgtggacttgcctaggggtcacgtggactgctatgattgcatcgtcggatgtcatacaaaggaaagcgatggaaaaatcctggaacactgtaggccgttcacgaggatgattccacagatcaagagcgaaattatccctcccgaagtccgtgtcccgcaatacgaccaattttcattccagcggagggaccttaaaaaggtcccgcagaatactatcaccggggactgcggcgtttacacgttaaagattcttgaatgtttattgcttggtgtttctt

SEQ ID NO: 22801 - DNA, 535 bp, Arabidopsis thaliana
tggacgagtggtgatggataaccatagcttcgagacgatacggaacctcacagcagatttagcgggcagtctcaagagtatatcaggaatcatatcaagaggtatcagctcgaaaatcttaccaagacggctctcgtcttctttagattgatttcttgttcccttctcaccatatccagtttcttcttcttcttcttctcgtctatccatcggcggcgacccactctttttctttagtttttaactttttataaaaaatgtctaacatatataccaagtaagcaaaaatacgaacctaaacgatgctgtaacgtgaacaaaaagaaaaaaagaaacaatcgatgtacattattcttcttcgttaatgtgttacttcaatagagaaagtttcaaaaagatatagggattacgtcattcgacttactcgcaaaccactctcgtttaccaatattcctaatttttacgatgatatagtagtaaaaaatggcaaatgctgcttgcaagtcttcctttttattaaaagctactttttagt

SEQ ID NO: 22802 - DNA, 3713 bp, Arabidopsis thaliana
tggttcaaattacgtagaactactctctcaaataagagatcaattgcagtattttaggatcgaattcacggagttcttttgttcaaacagtgaattaaatgtcgagattaagctagcagggtatgagtgaaatagtaagaaaacaacaagatgattgtgttgtgaacgatttaataaagaggtaggaacagggtatcctcaggaaactattggttagtagatctaatgaaagataggttgttatcgaaccattcttaaactcaaactctaattatggaataaccggtgagcgtgccgcaaaactcccaatatctatagctaataataaccggagaagccgagaaactatcaacctaaatatgcattattaacgagttcaattgttcatcttagtagataggccgattcttattacacacctataaaccagactcatcaaataatagatccaactacagatacctatggcggacatatctattgtctcgattcaaaatctagttaattactctagatctagcattgggcataattaaagatgaagaattctacagataacttagcaaagggggcaatatactaaaccatatgaatccctaatgagaaaccctattcctaacaagcagattactcagacatattgatatgaaacaaacaacataattgagataaaaaagcataaacacaatgaatagagaaggggaaagaagggatctcttcactgtatatagatctgaatgaaactctgaataacaatggatgaatagcttatgtctcttacaatagggtttgcaaagaacttgataaaagacttgataaatgaaacttaggtctaaaaacaatatatatagaccctaaaaacgtccagggactataatgcaaataggaaaatcttctggggcaaacttgagcttctggaaactcaaaagcgtctagggtttttgctgggccgaaactggtgtcgatcgacaccaagagtgtgtcagtcgacactcctcgctgattcctgaaccaaaatcgcccgtagcttccttttccttagcttttgctccaaaatgtctccttatctccattgttatctcactgcatagaatacctaaaaagacactaaaaagactcgagaaataacataaagactcaaaatcctatacctaaaacatagataaaatcggtgaacccgtggaagaggttttgaaaacaaaggaactcccaacattctctagcctattgccatgattattcaaactaagtccatatgcctaacaagtgtaatcaaatcctaaccaacatgtacttctctacaagcttacacaacattctagattccatacctaagttccacaactatatccaccaggctttcatcgctgggtctcatcaaacaagccaacattcaagatccttgtagactcattcctgtacaataccatgataaattgaccattctttatattttttttttctttttcggtgttctttctctcccccagacttattatttttagagaataaacaaatgggaactcgcatactggatcgacacctcggcatttttccacctttgtaattgatcatccaaataatgtataataatgaggtcataggaaacattcatacccctatacactatccgaaagtcgtctcaatctctcgtgatttaccgtttgaagaggtaaaaggaagagcagtgagattagctccagccttagtggttgagttggaaactaggatatcctcaagtctgttggtttgccatctagattttccaatagtcggattgactcgaacctgcagcactcatcaatcaggcaataaacaagagaaatatagatcatgattcctaactaaactaaagaaaacatgatcatgaagggaaagaaataaccaaatgaattgcaaaataagaaacaaaaataaaagcatcattagtaacaacctcccccagacttaaacgacactgtccccagtggcattcaaatccagagaaagcaggaaaaataaaacaaaaataaaagaaaagaaaagaaagggaaaagataaatcaaaccagtgggttgcctcccactaagcgcttgttttgagtcaatagcttgacttggcggagtttaggatatgggtggagtggtggtggaagatttctgctgcctcctcgccttccaaggcggtgtgtaaacggatctggttggagcagcttctggtgtcgatcgacactcagtggtgtgtcgatcaatactcatctcgtcacctgcaagaacaacaggagaaacaagctttcgaggaactctaggcttgttatctagtgaagcagtcttcgaataatctaaagaattaatcaaagataaaacaggagaagagagagaagagaacttatcacataggtccttaagtggtgtgggttgaagagaatgtgcagaatcatctgtctgtgaaacccgagggtgtcgatcgacagggatagtggtgtcgatcaaaaccgttcctctgcaactgtcattggcgagctgaacgtgttggagcgttgtgtgtggctctgtggtgggattctgatcagtctgaggaggtgtgtttgtgctggaggcaatgcaactgataggcttagtaagctctgaaccatccatgccaaacttcatctccaaatcacaaaccttgagaaagattctccctctcttcacatcaaacttagcactagctatagttaggaatgctcttccaaggataaggggatccttgagttccttctcatagtccaggaccacgaaatcagcagggattatggagttaccaaccttaacagaaacatcttcaaagattccttcagggattcgcttggaacgatccgcgaagagaagagtgatgcgagtaggcctgtactgagtcatgcctagtctctcaacaacagacttaggcatgaggttaatgcttgatcccagatcacacaaagagcggctgaatctgcttgtggagatagagcaatcaagaacaaagctacctggatctaaaagcgtctcagtggtctaaccaggagtaatggtgcggatgtactcagctatgtctactctctgtaccttctccttcttggccttaggcagcatgattgcactgatgtctctggtaagtagcttagcttcatctaagctaattcctttgtcaacaagtcgcttgacatacctgttgagtgaggcggaagatgtctcagaagcatccttatgaagagtatggaggatcttctccattatggctgtgcacttagcagcatgaatatccttcttagaacgacgcttcctcggataagggataggaggaatgtaaacgggctcgggctgcataggtacttgcacctcacaaggtgcagtccggatccagtgtcgatctacagtagaggggattcgatcgatatcgtcgtattgagtcgtctctgattaaaggttcccgtatggtgtcgatcgacaccatctctgcaactgcgagctccaactcgtcttcaatgtccaattcctcacacacatcttctccttctctgatcaagatggcattgcagctcttctttgggttagcatcagggtaaccaggaagaaaaccctcttgtctcttgatagattgtgcagtttgagctacatgtacatctagcttcttcaagtgagaacttagattgtcgatcttcccattaagatctatgtagacatcatcaaacttgccattaaatggtcatcggg

SEQ ID NO: 22803 - DNA, 2682 bp, Arabidopsis thaliana
cggacccatgaaatcaattccccatacatcgaaaatctcaacctctaaaatcgggttctggggcatctcatttcttctgctgatgtttccccttctctgacgagcgtctttgaacatggttggccaccaaaatcctgcttgtaggattttagatactgtcttgaacgttgcgaaatggccgccatagctagaacgatgacagtgctgcaagataccgtctatttcatcttctgagacacacctcctatagattttatctttgcagagagtgtagaggtatggctcatcccagtagaagcgatttatgtctttgaagaacttctttctttcgtaccctgacagattcggaggctcttcaccacatgccaagtagttgacataatcagcgtaccacggaagtttctcctctactgcgagcatctcatcccaaaactggctgcttttgaattttttgttcacttcccggatggccataagctgttcctcaggcatggtgtcgtcaatagggactgcatcttcaattctcattcgcgataagtgattagctacaccatttccaatcccctttttatccactatctccatatcgaattcttggagcagcaaaatccatctcagcaacctcggcttggtatctttctttgcatagatgtgccttagaggagcatgatcactgtaaactgtcactttagagcctaccaggtagctcctaaactttacgaatgcaaagaccacggccaatagttatttctccgtagtggcataccttacatgtgcatcatccatcgttctgctagcgtagtagatgacgtgcaacttcttatcaatcttttgtcctagaaccgctcccacagcgtaatccgaagcatcacacatgatttcaaaagggtgatcccaaataggtgcttggactattggggcatagatcagtgcttctttgatcgatttgaaagcaaccagacattcttcatcaaacgtgaactcagcctctttgcacagcagcctggtgagtggcctagccaacttagagaaatccttgatgaatctcctgtagaacccagcatgtccgagaaaacttctgatgtctttcacagtttttggtggttgcaactgcaccatgacatcaacttttgcccaatcaacttctatcccattttctgatattttgtgccccaagacgattccttctctgaccatgaagtgacatttttcccagttcagtaccaggtttgtctcttcgcatctcttgagtaccctgcacagattaagcaaacaggaggagaaagaagagctatacacagaaaaatcatccatgaatacctcgaccatctcctctatcaaatcagacaaaatagaagtcatgcagcgctgaaaagtggcgggtgcattacaaagcccaaaaggcattcgtttataagcaaaagtcccatagggacacgtgaatgtagttttctcttggtcgtttgggtggatagggatttgaaaaaatccgctatagccatctagaaaacagtaataggggtgattggctaatctttctagcatttggtcaatgaaaggtaaggggaagtgatctttcctagtggctgcattaagcttcctatagtcaatacacatcctatgtcctgttatggtcctagtgggtatcagttcatcttttgaatttttaataactgtcatacctccctttttaggaacacaatgaactgcagatacccaagtgctatcagatattggatagattacacccgcatctaatagtttaagtatctccttttttactacttctttcaagtttggatttaatctcctctgaggttcaatgctagaataggattcattttctagatggattctatgagtgcacaaagtgggtgaaatccccttgatgtcatctagtgaataacctatggctttcctatactttttcaattcaattacaagcaaatttacttgttcagtatctagttcatcattcactatcacaggataggtggaattgattccaagaaaaacataccttagccctttcggaagcggtttcaggtcaaccttgggtgccttgagctcggactaatcatcaggtggtgattcagcgtccgagatggaatcgtgatcgagtgaagcgatcgagtgatgtagctcaccttgcgatcgagtgacgtgattgagtgggtcgttggtgcgatcgagtggtctcaactcctcaaagtcttctgaggaatcaacttccctgctcatatccatcagcttctggtatcccaaagtttccacatgtaagtctttttctctactgtttttggtcagggcgctctgtaagtggtcctcatctgctagttcttctaaaaacttgtcagctagcaattccgtctcttctatccagaaaactttaccctctattgtgggctttttcatcatgttggtgatgtcaaaagtcatccgaagatctttcccgaggttgaggtcgatctttcctttcttgacatcgatgatggctcctgctgtagctaaaaatggtcttcccaaaatcaatgggtctttcggctcttcgtccatatccagcaccacaaagtcggtaggtacttctatagaacctatcttgacgggtaagtcttccaacaggccatgaggtatcctgatggatctgtccgctagaattagcgaaatgttgcaagttttata

SEQ ID NO: 22804 - DNA, 439 bp, Arabidopsis thaliana columbia
tcacagaccaagagaaggcaatcaatagccaatccttaaccacaccagcaacattcattgttaaagccgaggtctttccaacgaggaggaacacagcaaggttcaaagcaaatgcacatacggaattagtcccaaaaatcacgaaatcaaagtggaaactcgaagtttccctaagaatcggaagctcgacgaagatccaagggaagaagaggaacaccaaacaacaaggagcaacgtagtacaatgaagtgattggattaagattgattcctttagaagtgagcaagatctgaatcaaaaccaacctcgttgcttcgaaagctacagcaccaagctgaagcataactccccaagtatcgaacttagcctcaccataagcagcaatcgcaacaccgaaagagatcgagagcatattagtcatcgtctccgatttgaacga

SEQ ID NO: 22805 - DNA, 518 bp, Arabidopsis thaliana columbia
gtcaactaatcctataaatctggtgattacaggccacctactaggatggataacagttctgatgaagagtcagagatcagtgagtctgagatagatgtctattatgaaaaaccttacgagaaactgatgaatggggattacaaggttaaggtgaaggacacattcaggtgtcccttttgcgctgggaagaagaagcagcattacaagtataaggagctacttgctcatgcgtctggtgttgccaaaggatctgcgagtagaagtgctaagcaaaaagcaaatcactttgcgttggctaaatacatggagaacgagcttgctggtgatgctgatgtcccacgcccacaaatcccctcttcctcaacggagcagtctcaggcagttgtggatgacatttatgtctggccttggatggggattgtcatcaaccctgtaagaagaactgataacaagaatgtgctccttgattcagcctactggttgaagaagctcgctaggttcaatcctcttgaggtgaa

SEQ ID NO: 22806 - DNA, 545 bp, Arabidopsis thaliana columbia
  unsure (1)..(545): unsure at all n locations
tnnnnnnnnnnnnnnnnnnnnnnnctaaagtatgtctctacaggcagcccgacacactgcatgctgtatttgatcagtgagacaaacggtgtttcgagggcgtaaatagcgggcagttgtagtagttttttattcagcgtcgcagcggtcgccagatcgccttcacgccaggcgcggtagatgccgacggagagttccggagcaaagttagcgctggcggttatcgcaccgtcgccgcccagcagcatcgtattcagcaaatgatcatcgtaaccgcagaataccgaaaacgacgggcgtaccgacttaactgtgttgatcatcgtacgcaagtgaccaacgctgtcgatggtgtctttgatgccaacgatattctcgttttgcagaccagacgcgtcacggtttccggggttaagtcctgacccgtcagatccggaaagttgtacaggatcaccggtaaggtgacgctacgggcgatctgctggtaatagtcgtcaagatttcgtggtgcgactttccagtagtaggggttgatggcgacgata

SEQ ID NO: 22807 - DNA, 479 bp, Arabidopsis thaliana columbia
tggatccatctccggacaataaaattttggatccatcgatctaaacaggatccatgtgatcacaaacctagttagaaatccttaccagaagaaatgttgtgaccatatgtcctgaaaacccagaagatgatggaaactgtgtacaaatcattttcaccgtccatcatctccaccatctcttgggaacaacctttgacactctcctcgatctcatcctcgaaatgatgagcgagaccaagactcacaagcaaatatatcaaaaacaaattcttcttgttcgacttcattcctttgaaagacatgaacatgtccctcactttcggctttagtgcctcaatctctctctcaagcgcatccatttccttataaaaaaggtattcatcttaaaaaaagaaacatgcatgagttcatatcctctatataatggcaagagacagagacttactgagagatcaacatgagcaaaaaggaattgattg

SEQ ID NO: 22808 - DNA, 865 bp, Arabidopsis thaliana
tgcctatgaaacatcagccaaaaacgaggtttcattcgacgctacagtcttcatccgcgtctatgtcattatcgctgctgtttctattgttcttgtgtgcctccgggcattttatgtcactcacttaggcctcaagactgctcagatcttcttcaaacagattctcaacagtctcgtgcatgcaccaatgtcattcttcgacaccacgccatcgggaagaattctcagtcgggttagtagataactttctccatttaaaatctagaaaaccagggagatttcaacttaaagatagtaatctctataatatgtttttgcaggcatctactgatcagaccaatgtggatatctttatcccgttcatgataggactagtggccacaatgtatactactcttctcagcatcttcatagtaacatgtcaatacgcttggcctactgttttcttcataattccgcttggatggcttaacatttggtaccgggtaagtggctaaaagagattatattatttgtttctgattatattattaaaagagattatatcattctgctgtttctactgttttcttcatctgattgagtttttggatccaacagggatattacctcgcatcatctcgggaactaactcgtcttgactcaatcaccaaggctccagtaatccaccatttctccgagagcatagccggagtgatgacaatcagagctttcaagaaacagccaatgtttaggcaagagaatgtgaagcgagtgaacgccaatctcaggatggacttccacaacaatggttcaaacgaatggctcgggtttcggttagagctgattgggagctgggtactctgcatctcggctctgttcatgg

SEQ ID NO: 22809 - DNA, 1173 bp, Arabidopsis thaliana
tttcaactgaaaccatcttgttctcgacaaagcagctcatggatatggcaaagaacagaaccgagttcagggacagtctgtacgacaggacaaccctacattctctgcatcagacccaaagaaaatgcatgatttattgtcccaagggaacgaacattagtatcaactactgaaagggggtttagtgatccttacctggtctgataacgttgctgggtaacaataccataaacaaagccgagatgcagagcacccagctcccaaccagctccagccgaaacccgagccattcgttggagccattgttgtggaagtccatcctgagattatcatttacacgttttacattctcttgtctaaacaactcctgcttcctgaatgatcggattgtcatcactccagctatactttcagagaaatggtggatgatgggagccttagtgattgagtccatgcgtgttaattcacgggaagaagcgaggtaatagttctgaagatcataagcaaagtcacgttaggaacatcatacatatcatacatttaaaaaaaataaaaatcagagcatgagatcaaagagatgcctacccggtaccagatgttaagccagccaaggggaatcacaaagaatgcagttggccaagcgtactggcaggtaactatgaaaatgctcagcagagtggtgtacattgagaccacaagtccgagcataaacggaataaggatatcgacattggtctgatcagtcgatgcctgcaaagttcgaaagagaaaattccttttaacatctctgctaaaatttgtatgtaaacgaactgataaggagaaaagttgtctcacccgactgagaattcttcccgatggcgtggtgtcaaagaatgacatgggagcgtgtaagatactattaagaatctgtcggaaaaagatctgagccgtcttgagtcccaagtgggtgacgtaatatgaccggatgctcaccaaaacgatggaaacaagtgcaataattacatatccgagaatgaaaacggaagcatcaaatgatattgcatttttggctgatgtttcgtatgcaagccagtaatcgctggccattagagatccctgccacgtcagagagaagaacagaacaagcacaattccccaccagccataagcctcagtgcagtactgtttgta

SEQ ID NO: 22810 - DNA, 528 bp, Arabidopsis thaliana columbia
gtataatctcagtcttgtgaatatagttgcattgaaacgtgttacgttaggcgtatatagtgttaaccaaaaaaaaaacagttatttaggctgagaaaattgtcatcattttattcggattggacataagcaaaatagggatctcattcgagtggaggcatacgtaacgctcgacaaattcaatggtgcaatttctgttttgtacattgagttgtttaaaatagttctttatgagtttgtgatttggaagaatcttttattcttagataaattatgggcctcataatgtgggtattagctccaacagaaacctgacaaaactgcttttgggtttttttcttgtttgaatagctaaaacataagaaagtatgattatgaatcacctgattttgactttgagtacttgaaaacagatgttcagtgtgtcttggggactaccaagcagaagagaaactccaacaaatgccatcatgtgggcaccttttcacatggaatgtattgatctatggctcacatcacacacaacat

SEQ ID NO: 22811 - DNA, 545 bp, Arabidopsis thaliana columbia
cggagcttgttcattatatgatacacttgtgcctcttgttttggtttttggtctaattctttatgccaattgggttatgttacagtcaaatccagttcttgaggcatttggtaatgcgaagactgttaagaacaacaattccaggtaaacttagctcttttattatcgagtgcttccgtttctccttccttcgctttgctcgtctcctgtctcttttacctgctgttagatagatttatcactgctaataataaatattaatgcttttacttgttacagccgttttggaaaatttgtggagattcagtttgatgacgtgggccgaatatcaggggcagccatcagaacttaccttttggagaggtcacgtgtttgccaagtttcagatcctgaacgtaactatcactgcttttatctcctgtgtgctgctcctcatgaggtaggtcttcttagttgttctcatcttttattaaatgaatattgaagtgatagatgatataaaaatttgcaggatgttgagaggtttaagttgggggatctaagca

SEQ ID NO: 22812 - DNA, 492 bp, Arabidopsis thaliana columbia
ctagaggatacaggatcaccatcggaaagattcgcttattcctactaagatattcttttcagctggtaacttattcaatttggaaagagagaaacagtagaagacatggcgaaaatcataacacccaccacccaattaatgaaacgactagacaaaaacgttaaaaacaggataccttccattaaagagtaaggagatgaaagatatgagaagcatatgatagtttggtttgcaatgagataaggagatggctcttacttttatctgattagcctatgtatatatacggttcgtaccggtttggtaatattgttgggggacacctgagattactttcccttactacacacatgtgtatgtttcccaaatttctcgggttctaaagcgcgtgagttacgctattctcgcggctctcaccattgtttccctttagtttctcttttcagctttgcaaaaaatccagagcgatctttttttgaagtaaccattgaa

SEQ ID NO: 22813 - DNA, 535 bp, Arabidopsis thaliana columbia
tgtgctcgacgtttgcaggatctgcggtcatgattccgtaagccccaccgaaccaaattcctcggtaatgaaacgtcccaccagatctgaccacgcatctggtgcaccaagtaaacagatcgtgtttgtttagcgccaacatcggtatgattcccaacactggccacatcactggcccacctttgctcactaacttctcacgcaagtaactaagaagaaaaagccctactagggctaaagctacgtctgataaccttaagtgagtgtatacccataccaccgcagaaatcaacacgttcatcttcgtcacctcagatttgttttcagtatacagtggaaaaaacacaaaggataaagcttttgggtgagttgcaaatgtagatttaagatggcaagggtaataaataattcaattccgagttatgaaataacaatattattaaatgatcacaccaacttcattagaccctaataaactttattaattcagctatatagttttactgaatgaggaatcataattataatagtgggg

SEQ ID NO: 22814 - DNA, 267 bp, Arabidopsis thaliana columbia
ttcatcacaagcctcaatctctttgttcttctctgcgttggctagcaaattgttcagatctctttggatcgggaagggtacatccactagcacatcgtaacatgctgatacggccggattatttcctgagagcttgattttgtgttctaagtgaataggtggtggaggcgacaagtgatgagatatcttctgagagaccatagtgaatttcaacttttcttctccaaaaacttactgaagtgcagcatcacagttgaagagagaggg

SEQ ID NO: 22815 - DNA, 472 bp, Arabidopsis thaliana columbia
ttcttcgagcaggtgtgtgaagcttgtgagctgagctagagtagtctggtacaaccgaatagagcgaaaactcgagcactgcaactactctaagctcttcttcaagtttctcaactcttgtctccaaagtctcaaccatttgcatcaacatttcttcatcctcctcaaaattatcatttttatctttgacatcacctgcctcgttctcacttccaccgcttagaccaccattcgaagcatcatcccaaacttcgactaccttatcaacattgacaccttcgcaagtatctggagaagatacagaatctgtcttctcgtgagctatagcatctaattctttgctttcttccttctcctcctcatcttcatcatcacaagccaagccatttatagtctcttccttctcagttttctctgtagagtctttcactgcatgatcatcgtcatctgagggctttgattgtgtagttgt

SEQ ID NO: 22816 - DNA, 387 bp, Arabidopsis thaliana columbia
gatggttgctagaatttgcaaacttttataattaattccctatgtactgcttgccggcgccctgttttatacaattgcattattgtttagcttctagtgtctacacttaatatgtgtctcaccctaatataccattacgtagcaggatttatcaaaatccagaccatcgtcccatgtttccatgtgcaaaaatagtttgggaaggcatcaaaatcagcctactggttaccgacctgtccgtgttgactggaaagatctcgataagtgcaatgtctgccacatggatgaggtaaaggtttttttttggtttcacatgggatttcaaccgttccccttaagtaagtcctgattaaaaaatttttggccgccggagtaatgggaccaatt

SEQ ID NO: 22817 - DNA, 533 bp, Arabidopsis thaliana columbia
tgcagcttggcttcgctatgctctgtgccggttccgtgagagccaagaatactatgaacatcatgcttaccaacgtcctcgacgctgcagccggtggtctcttctattatctgtttggctacgcctttgcctttggatctccgtccaatggtttcatcggtaaacactactttggtctcaaagacatccccacggcctctgctgactactccaactttctctaccaatgggcctttgcaatcgctgcggctggaatcacaagtggctcgatcgctgaacggacacagttcgtggcttacctaatctattcctctttcttaaccgggtttgtttacccggtcgtctctcactggttctggtcagttgatggatgggccagcccgttccgtaccgatggagatttgcttttcagcaccggagcgatagatttcgctgggtccggtgttgttcatatggtcggaggtatcgctggactctggggtgcgctcacgaaggtcacgacttggccggttcgataacggaggccgtgcatc

SEQ ID NO: 22818 - DNA, 1298 bp, Arabidopsis thaliana
tctctctatttcctgtgggtcgattcatgtaagtctctcacccgaactaaaaatcttccatttccagataatgacttaccaaaacgttactcagaacaattggaatccatatatccactagttgataagctttatcgattcgtcttgctaatttacattttggtttcagacacaccctacacaaacttgcttcatgtcatcagttgatctacacacacactactcgtatcaggtaacaaactccccttatcaatatctctatgttaatcacttatgatgcgattatagtaaaaccatcatctatatctattgtcccagataatgctaccggaggcggtggcaatcgtaatggcaccaacagacgaatcaacacctcatggaatattccatctctctgatccatcaggcgtatctgtgatccgaaactgccagcaacgaggcttccacccacacgaagaatcagaagacggtaacccaatctacgagcattgctcacacgtcttcctcaatgccaaactcaaatatgaagtcctcgatctccgctaaaagccaacctccatcaccatgttattatttttcctggagtcttaactttaaagagacattaaaaagacctcagagatcagatgtctcagccgtacatatatgtgtatacttcttaaaaaaaccttctctttaaagttccaaacttggctgagccgtcttaagtaatgatgattgtgtttatttataacgagtacacttttaaattcgtatgcaccatttcacaaagccagatgtttgattaaaaaaacataagtatttttttctgacgattttttcatttaaattaaaattcattatagtctgtgggaaagacctgataccatgaaagttgaggtgaaaatctgttattagctttcatcagataagaacggagagagaataacagattttcacctcctagataatgctaccagaggtacttgcaatcgttatggctccaacagacgaatctaccccaatatatgagcattgctcatacgtcttcctcaacgtcaaactcaaatgcgaagttctctactctagactttcttaagacgaatataatatacttttaaaattactttcacaaaaccaagttttgccaaaaaaaaaactgtattttattttaaattaaatttagtcggtgcgaaaagactaatgaataaacaagtcaacttaagtaaattaatggtctctgtatcgaatcttaaaatttagatttaccaaaatgtttttgtaaccaacgaaattcaatctttctctctgtgcctttt

SEQ ID NO: 22819 - DNA, 249 bp, Arabidopsis thaliana columbia
gaggatgtaacgtccgccagtgtgctttaaaggataatcgagctttatcgtccggtgccgccgctggcttatttgccgctgatggtgatctggtttggtattggtgaaacctcgaagatcttactgatctatttagcgatttttgcaccggtggcgatgtcggcgctggcgggggtgaaaagcgtgcagcaggttcgcattcgtgccgcccagtcgctgggtgccagccgtgcgcaggtgctgtggttt

SEQ ID NO: 22820 - DNA, 507 bp, Arabidopsis thaliana columbia
tagccttgtaggcatcccacatttccaacatactttcttacaaaaaaaatgggataactgttagctgcccacaaaaactatcatcttggaaacataggttctcaactttttcttccttttggcttcttaccagcttggctagtagctttctcttcagacttcctctttattgcaggctttgtaccacggcctttgggtttcacaacttcttcttcagcctcgctatcatctccatcatcgtcgctctcttctgtttttgtcttcgatgcaggcttcttaccacgaccacctctgggtttctgtcctttcttcgatttagcactctcatcttctttctcagtctcttgttcatcttcatccccatctccatcgtcttctttgggtttcacactcgtatagccggtctaaccttggctgctttctctgcgtctttcccataaagtttctgcagttctggaacataagctgttgtctcaaaagaagaaaaccagacacagaaacattagt

SEQ ID NO: 22821 - DNA, 487 bp, Arabidopsis thaliana columbia
actctagccgccagtgtgctctcgaattcgtaatccatcaatgcttctcttaccctatatgtgagaatgtgtgcatatattatatgcagctttaaggttataacatatatagatgaaactagcatctaaactgacgtccagaaccttaatatcaaagaggtatttagttaatagctgaaaaattgctccaataacatatttgtactcgaacaaggcaactagtcgagtatcttagtatgaaaaactttgtaggatattcttacctcatcttacgtttcaccaccaatttgagatgcactagcacggaacgaaaattccacaacctcatttcccaatccataaatttcaaatatttgtgctccacaataactgaaaagagagagctcaggtgttaaatcggaagtaaacagatacagtgataaggtcgaaaaccgaaatagatagttcagaaactgaacctagagaataacgagatgcccatcttaga

SEQ ID NO: 22822 - DNA, 575 bp, Arabidopsis thaliana columbia
ctagtcatatttgacgatcatttctctcatacatataacaagatagattttgagtttatcattacgtatgtggaatcaatggacgtagctcttgttttgatctgaaaaaggattgtatcttggccttacactgacttggtgggaccttagaagggatgatcccaccgttgacctcaccgtagacctattaatttctccatcatccacttcttcttctgcgtaatttgctcaatgtgggtgactcactcgtgaaggtccttgtcttgtttccatccgtaaacaaatgtggttgatcttggacggttctctcggtgagtgaagctaacggcctaattctctgttttcgagaaacagaggacatataccctagaggcagattttactaggacttatccatggctagcttactagaaaatttaatctgtcaggagtcaggactacaagagaagaatgaaacaatttgtgaagtctctaagtctctagggggtagtggatggttacataatacgtaagcacacggacggtggaaactaaagtttgatcattcctataatcatactagaaaactgtagaaa

SEQ ID NO: 22823 - DNA, 526 bp, Arabidopsis thaliana
  unsure (1)..(526): unsure at all n locations
gcagttttccatattggcttattctcagtgttttatgtaagggtatcatattctcattaaagcttcacccttctgaactccattcgaactactaggaaaacgtccacttgctgatgtatgggccttggatactgccgccaagccttatgaatggcgtaagttggaaccagaaggggaaggtccacctccctgcatgtaagtttgattagactcctttatgattgtgagctttctggagtaattgtttatatctgtttgtacgttgtaactaggtatgcaactgcaagtgcgcgctccgatggtcttcttctcctctgtggtggaagggatgcaaacagtgtggtaagtgaagagatttattacagtcatacccaattatctctttgaaacaaacactgagccacttatagaggcatgattctattttggcttttgcttttagtgtgagataaaaatgggaccgtgagatttagcaattaatttatagaggttngagtttgtcactgagcagattgaaaagtattta

SEQ ID NO: 22824 - DNA, 514 bp, Arabidopsis thaliana
  unsure (1)..(514): unsure at all n locations
tctcattgcattttctcggtacacgcattctgcgagggctccatgtttgccctcctttctgtggaagtttctcaatgattttgacatcttttgagagaaatgacataaaccaatcaacatcgaaaatgttcgagaagtcactggcatatataaaaagcacaaaagtatgttaatactaaataagatgcataatgttttgatttttacgagagctagtacgaacctggcatctttccagtaggatttctggtccaacttcggaataacaagcgtagtntntagaatccttgcagcaacaacagcatctacaatctgaaagaagtaattgcgttgtgaaactcagaccaagatctaagtaacaacaaaaagatcaccataaaaccagagaaacctaaaggaacttacaccagtccgttgttggtttaaccgccactagtggaatcgccaagtatcgatcatttctagtaattgctttacatctgcagtaagaaaaatcgaaatgttgtagtgtgac

SEQ ID NO: 22825 - DNA, 516 bp, Arabidopsis thaliana
acataagatataatacatagattctaatttttaatacttaccttatacgatatttattactaaaacttaactactaaataacatttaaaaaataagcactttcaaaaaaattaaggagagagtttaattatggattttattcaaataatgataatagattattttttttggtagggattaatgataatagattttaaagtttggtgttgtttaactaaatttttaaatagttaactaaaatctagtgttattcaaaactgaagacttgttaaatctttgtatattaaaatctttttggtgtttcataagtatattattaggaaacagaggaacaatgtacttcataatctgcagtccatccctcctctgctcattttcaattccatcgatcgtgaggtgcgcaacaccatctccgctgggcgtcataggaagctttggagaaacctaatgcttctctggatccgataattctctttttaagccatacttattgtaatcttgctttttatctttttt

SEQ ID NO: 22826 - DNA, 524 bp, Arabidopsis thaliana
ctttgtaaccttcgttggggttgtagttgtcaagcaatgaacagaatctggcgaaagttggttttctagagacttcctcgctcacccaagagaacagtagtccttcagccatatcagctctctcatggacccttttcccatctccgcagtcgatttgataatcccttccaggaacaaggcggtttaaatcgagctcccacagtttgttgcaagcttctgagagacctgagagctctagttgtgagggttctaggtttccataagtttcaacttcgtctgagtagtgttgttcacttgctgggcgtttgtaatcttgccattgctccttctggacctgcggagaaagagagtgatcacacatcaaatcagtggaaaaaatgacgggtaaaatcagcagttagggctctgtctcggtttcgaaaattcaaaccttatgtgattgccttgcaggtttctttttgcccacagtttcccaaccatcattttcctcttgctggctctcctgtacttggaatcaaatgcca

SEQ ID NO: 22827 - DNA, 500 bp, Arabidopsis thaliana
cataagagtgaaccggcagaggaagatgcggtccaaatctttctgctgtaaaatcaaaacagagtaaataattctcaatctttgcatcctttagtaaatcttgagcaaaaaagtaagtatttcccttcaaagacacgcggtcgctatgtaaaaaccagacgggattgatctcaaccagcctccatgaactggagttaaaatcatagatttctgagtattgtggacatgctgttttgtcataaacataagaaacttcatgattttgtggttacgattactgttgttgtatcccagactaaacatgttagattagccgaattgttttctggctcgaatccatctgatttgccccaaatacgggttccataccacgagcctccagtggtccttggtaacgcatagcaataagccgtcggagtgaaagacgtcatatacttcaacattggttaagttcacttctttcgacaatgtggcatcggccagttttcaggtgaagtccg

SEQ ID NO: 22828 - DNA, 514 bp, Arabidopsis thaliana
cttacagaggaggaagagaagacgactcggcatcgaaatcggttccagagggattgggaacatagaagcaagaagaaacgtcggtggcgacttcggtgccattgccagagctcaacgaagaattactgcctcgttggccctccatacccgaagaaaaagagagattgtagtagatctgatgaacaaatttgccccagaaatttgggcagagggagagagagagatggggagacgagagtcacgggagatttttaattgcctcttctcattcaatacttcacgattcacctgattttctaattatttttcgttttcagaagatgagaccaaggaggaatctcaatcaaataaatgaacaatgactatagacgtgcttccacgtccgtttgccatggttgtgctccaacaccattaacaaatcttaacacaattctgctctgctgctttggtgtcaattctcaaatacaataatgatttatgtaatgtatgcaagtcctattcaacacaagtgttg

SEQ ID NO: 22829 - DNA, 4115 bp, Arabidopsis thaliana
taatatcaagaataccgtccgctgtaattgaacaattctgttgttctttgagagtctcgcaaagatccattttttgagaaaccctaatacaattttgattgtgcgagtttcgactctcacaatttggccctagtaggagggtaaaatagatttctcttactccaagaacacagaaccaaccgatcaagcaacaatgaccaacaaccagatcccgctaccatcgttgacgcagagggaaacccggttcctccagtctaggcaaacgcccctgaagtcgccgctcccgcagtcctagtagagctgaggagcatgatggtacaactccagaagaaggtgaacgattaggagcaagcaaaccagttcctggcccagcagatcgaggcggttacttctcaagggcaggtaaggaccactcgcttcggcgcacgacactttcatgatcggcgagcagcagcagatctcaatccaacgagactcatgttcaacacacccggtaactcaacgaggccattttggctgcgcagacgtcggcataacctgaacagaaccaacagcctcgggagaacagaacatgacgaccagagtggaggaagcctacccacgggtcccaattccccgagccgaaattgacgagactgaccagatcgaaatctctgatggcgaagattcggaagaaaacattagatgcgctgaggaataagctatggagcaggaaataaatgccatcaagctctccctagccaaagcggaaaacgagatgtagctcgtacgatcacagatgcataacgcagtctcctcggccctaacaatcgatcgcattctagaagaatcccacaacacgcctttcactcgcaagatctctagcgcgataatttcagatccggggaaactaagaatcgactacttcaacggatcatcctaccctaagggtcatttgaaatctttcaaaatttctgtggcccgagccaagttcaaaccggaggagagtgatgctggtctctgtcatctgttcgtcgagcacttgaaaggaccagtcctagattggttctcaagacttgaagggaattctgtcgacagttttcaggagctatcgacgctcttcctcaagcaatactcggtgctaatcgatccgggcacgtctgatgtcgacctttggtcactgtctcaacagccgaatgagccacttagtgatttcctcacaaagttttgatccagcctagctaacgttgagggaataaatgacgttgcggctctctccgctctgaagaaggcactatggtacaaatctgaatcgcgaaagaaattaaatctgtttaaaccaaaaacaatccgggacgccctgcactcagcctcagattatgtttccaataaggaagaaatggaagtgctatcgaaaaggcacgagccgtcgaaacaaacgcctcgtggcgaaaaaatcccaacctagcgctgaaggcgagaatttagtacactatgaggggcgatacttctctggagctcacaattatcaagtcgatacaccccgaggttgagggcgaggccgcgattgaggtcatggacgagaatcatatacttggacgaaagatcaacctacgggaaatgagcaggagtactacgagttatgtaagagctacgaccatcacacttttagatgtcgtaatctcggtgcgaagttggcagccaagttcctagctggtgaaatcggtggatgcttaaccattgaagacttagaagtagagaaggcgaaagacgaacaggtaaatgccgtggcaaaccatgaacaggcagtgtagtgacccgcgtaaggacatcggccacgggcaagagtctgaatttttgaaaattgcccgaatgcatggccaattgaccttaggtgcccaaaacaccatagaatatcaaagggcaagtttgggcaagtttgggcaagaacgggcgtgccacgggcgaaagtttgccccgccgggcgttgaccgaccgttgaccacgccaaggacgcgtggctcggctaatttggggcccaagcaaagttgcttggaaccgaagtttaggtggccacgtgtcactcatccgcttgagtagcgaacgtgtcatcgcgggtagatgacacgtggtttggtgactcgcccatactcatgacacgtggacatgctgactcgccattcccttgcctataaaagcccaactccatcccatttgattggtgaagagaaattgagcgggagtgagaggctgccgagtttaaaccgtccgttcgatccaagttagggtcccatagccgagaactcttcctgaatcgttagaagctttccgttggttactgagttagttatggacaatggtttaagtttcataatcatatcgtcatgcattcttgattattttcatgaattatatgaattgtgtgaatggttatattagactgcatatgtgatctttagattcttatgttgttgcttatggttgagaggttgtgctgagatattgatgattctatgtgttgatttaaccgtatgttttataatatcttaaactttggggtcttggtacatggtgcttgtggtaggaggcaaagaccataagcgtgccaagatcgtgatatgaatggccttcgtagtgaatcgtgctattgtggggtcttgtaaagttgttacttgattgccatgaagtgcgaataactcggagagagcgggactagctaccctggcagagtgtctacacgacggtgtagcgtttggtagtgatgctccggttgcataccgttgtggttgtaacgcgggagatcacaggagtgcgtgtttggtgttgggtttgaaggcagcatatcaagccctatttaaaagatttaataaaactggagtcctaatgcattccatatttatgtagttgcttcggcaagctacctttcgttgccattctctgttgcgtgtttcatgttgggtatttgtgttggggtaaactaatgtttgttgcagggaatcccgagcgcactgagtaatcttagattactcatgattctacttgttttgcaggaaacccgtagtgggaaatagagggcgtggtggacattaggaaacccggagtagttttgtgccttttgtaaaacaagtatgtttctaatatgtatagtgcttttggcactaggccttggcgatgaaacttataaatgtttggtaacatgttgtgtaatatttatacttatgaaataaatcgggttttcttgtacaaattgcgagtaatgactgataatgacttaatcctagtcggcacaacacttaaatatcgcgagggttggcaagcataaacgatgtttaagtgggagagtggtcgtctatacactggccaagggttgggattggttctcgaacctcggttggatattgatgatcaatctcaatgtggcatttttggggagcccgtgacttgtccggtcatagagcatctcgggggcgttacagtccccggtgtgagaataagcattgggatgaatacgtgagaaagataagttataatcaatgtcaccttgtatgtggtgactaaccggatggtctttctccttgcttaacatcggccatactcggcttagtgaggtcgaattccatgatattgatctccattcgcttcttccttgaaacaaaaacctaaaaccactaatagctttaacgaaacaaaataaataaaaacatacctaagatagaattgatcttgttgttgtcaatacgacaacaaataagatcaaattcgtggtgacggatggcgtgaatacattatagggctgttgcgttgtgatatgtctataatttgcatgatttaggcattccctgcaccactttgtcattgtttcatccacgtttcatctcattaggagttgttttagtgtgttttgcatacttaggacgattttgcattaggattgtatgtgcattgcatatatggttgtttttaggtacttttgatgcttttggagttcaaacagaggagaaacagaacataaagtccgaatgcccaatgacgcctgcaacaaaagtactctattgcagcctcggagtcctgccagggcaaatcactctatcgcaaccccggagaagctagcagctcagtttcactcaatcgcgaag

SEQ ID NO: 22830 - DNA, 1062 bp, Arabidopsis thaliana
tcgtgttttgctcatgatcatcttaattctttcccaagtttatggtttgattcctactaatgatctcgttgttgtttgactctggttttgtgtttgtaacttttcagcttttattcctatgagtgaattctctgacgctgctgtgatgaaaaagtatgcattgaagccagatgctgaaacccttgacattgtcaatactgccgctaggaagaaaacggtaagctacttcttctttcccttttaatgaaagaataatccataaaacctctctgcaactggaaacacttttatgcttacaacagttttagtttactaatgttcacataacaatacctgaatcagagtattaagattatgattcccaaagatggtgatcttccagttgcggatagtttatgaatatgcatcactgaagagtaccgataacttgtacaaaataatggtctatctctggtgttctagacaaattaatctgaggattggtgggactatactctattgaataacctgtaacggtactgacattgaatatgttacattacatctatcatagttttattcagaagttcattgaaagctttatgttgccttgttagttgtgactaataagtgaacattgtcaatccatatgaatgtgactttctttaccacaattgtttggttctgtatttaaccaaaattcaactgttgtgaaacatgtgcagattacagtagtgatgaagatatattggggagatcctcgtgagaagatttgtgcagcagctgaacagattcctctctcaagccttgtgatgggtaacagaggccttggtggtcttaagaggatgattatgggaagtgtaagcaaccatgttgtcaacaacgttgcatgccctgtgaccgttgtcaaggctcacatctgagtttgctcggagaactctaaataacaccacccgtgtattctataatttgtgtttttgtggtcggaatttctatttgttactgttgtgtgactggtgttttgttcatctgtatggataacaacactcaccttctaataaatacagactctttgatttttgg

SEQ ID NO: 22831 - DNA, 516 bp, Arabidopsis thaliana
tcagctttcagtttagtagaaatgttcttctcataagctgaaaccagggtttcttttactgtcttctgttcttgttccgaggtctccttctgagtatcaggtgggattcctgaggtttgccaagttttcatgaattagaaaggagtttggtttttcctcatcttctagaagcttaaagagaaaggtagcttaccgttggcgaggtcaagtaagaggtcagctgggttaactgtcaaggaagtggagaatcctagagaactgaaatattccacagcagaagaggcagcgctatagtagatgggacttccttcagatagcaaaaccaccttgtcaaacatatggtagatgcggcttgatggctgatgaatggttgtgacgactgttcttcctccagaagccaaccgtttgattgtggtcacaatgcgatgagcagtggttgaatcaagacctgaagtgggttcatcaagaaggagcaagctaggattgatcagcatttcttgaccaatgctaaccctt

SEQ ID NO: 22832 - DNA, 557 bp, Arabidopsis thaliana columbia
atccccgtccaccaaagatgaacatatgacaatcgattgtaatagcaacatgaaacgcacgaggtgtaggacccacttgtccttcagactcgctgccagtacattctggctcaaaccagagtttgttttctagtcgacagtgtaaaaaacaaacaatcataagacaaccagttttcacatatgatcaacgacgaagaccagaaagaaaccatttctacagatactcaagatatccatctaattcatcttcaagtatatcgcaattaaaacaattatatgataaaggtatcagaggatgatgatgatgataccaatatcataaacaattatatcgctgaggaatttcttatcgacgagaccaccgaacaccaccaccatggattttccgacattgacagctgtatgtccactgatacacaaacaccaaaaaaatcagctgaattcaaaaatcgagagctaaggacaatagaattatacctccgagcttgcgggaggagtccactgaaatcggaagaagaagcttgaacccagtgatgcattttaagccgatgatgacg

SEQ ID NO: 22833 - DNA, 428 bp, Arabidopsis thaliana
ctggcgttgatacaagtaaatatagcatttccagcgcagtgagttcatctagtcaaggatcaacttttgcagacttgaagtctctctgtgatgtccttgtctcgggagaaagtattggagatgggccattaggaggtggtacccgcaccagtggcagcagctcatctctgatgactgattcctttttacccagagtcttgaaatcacatgtggcacttgactgcacagagcatttcttgcggtaccaattatgcagtgttagtaacacagcagggacagacgtacagccggggagaagaatctggtcgcaggttaggacatggagtttgttcctatgttccacacccaaaacttgttgatgaatttaaccgatcaccggtggagttagctgactgcggggaatctcatacatgtgctgtaacagcctc

SEQ ID NO: 22834 - DNA, 2330 bp, Arabidopsis thaliana
ccggtttcatcgtctttgtcccttagacttagatcgatcctttactcggtcaagacatgcatattgttcgctaaccattctaggcctaacaatcgcatattcctttatcctattttcacggtcaattcccaaacgtctatcctaactagtaagctagatcgttacatacattggccaatatgcggatttgattccttagcccgtttgtcgccttattctattcattcaacgattcgtatgcgatcgtgtattgatggaccaatccctatcgttacttagccatacaaccaaccaaccccactggtctaagtacaacgatagagattggggatagtacgattcccttggttcacgatggccgaatcaagccaattggtccatccgttctccaaacgtacgtccctccggctacatggtgaacgattgagccctcggcttatcgaactatccatgtttccgatccggtcgtttaacactacgaccgctcacggtttactaaccgtttacccgtccggtccatggtggtcgataaagctttcggcttaatgatccatccatgcggtccgaatgatatccttatcacacccaagggtccgtggattcatccaccggatcatcgtaggctagcccatgaaatccttcctccgtcggccttaggtttgctcgcaggtccaacatccgttttgtccatcgaatcccaccgtggactttcccgttggttatccgtcgagtcaccatttggtcttaccgatctccgatcggtttcaccatggctgaggagatagatacatgaagtcagccgcgatattggtcctatatggtgaatcacgttccttacccattcttggtgctttctccctttatcggtaagattgcatctatgggcgacccttgggtgtgttcggatgcacttatccttgtgcttcctcgaacacttttctcgatccatcccatccgacgatcggtctgtccgacccgttccgtcagacgatctgcctgtcccatccgacccgtccgacgatcggtcagtccgatccgtctggccgatccgatccgtctgacgatcggtctggccgatccgtctgacgatcggtctggccgatccgatccaacgatcagtctaccagatccgattcgtctctaagacgaacggtctaccctctccatcctctacactccatcgaaccgttggatcgagaggtagcatgcgcatcagttcggtcgagttatactcaccgagccgcaccccctttccgaccaacaactctaggatgtgttgggactcctttaagaatgttttatggtgttttggatgttgtgagatgatgtgagattgcttgggcgtcctcccttatatagggggcgaatggatgcttcccgaagcatcacatccggtccttgcacccattcgccgaaccgcgccggaaattggaagagaccgagcagagtcggcaatcttgggaaatcgggacacgacgaccgaacagaaggaaacgatccacagctccctcttccccgagcagaaattgcttaggccgatcagatcagggtctcggacgatggagattcagaagagaacgttcgatgggctgaggaatacgccagagaataggaaataagcgctatcaagctctccctagccaaggcagaaaacgagatgaagcttgtgagatcccaaatgcataacgcagtctcctcggccccaaatatcgaccgcattctggaggagtcccacaacactcctttcactcgcacgatctccaacacaatatctcagatccaggaaagctaaggatcaaatacttcaatggatcctccgacccgaaaggacacttgaagtcattcataatctctgtggcccgagccaaattcagacccgacgaaagagacgccggtctctgtcacctgttcgtcgaacacttgaaaggaccagccctggattggttctcaagactcgagggaaattccgtggacagttttcaggagctatcgacgctcttcctaaaggaatattcggtgctaatcgatcctggcacgttagacgccgatctgtggtcattgtctcagcagccgaatgagccacttcgagacttcctcgtaaaattctgatctaccctagccaaagtcgaaggaatcaacgacgtagcggctctctctgctctgaaaaaagcactatggtacaagtccaaatttcgaaaggagctaaacttgtccaaaccacagacaatccgagatgccttgcaccgagcctcagattacgtttccatgaagaagaaatggaactactatcaaaaagacacgagccgcctaagcaaacgcctcgtagcgat

SEQ ID NO: 22835 - DNA, 1884 bp, Arabidopsis thaliana
taaaagagacaacgatcttcacccgaggatactatgaagtcctagtcactaatcactagctatacgtccataatttgtttttttttacgtccataatttgacacacacacaaaaaaaaagaaaaaaaaaactatattcgtgtcgagttttatagtagtcacgtacattatgtgtgatggtaactctagtatgtgtgtatttttaggaaaagtcggtgaacaacttcgacaacattaatagaggacacaaaattgtaaagtatataccttatcacaagttctatatatagtaataggaaataagaataacgtagttggtaatacgtccacatctaaaaggcttgaattaacaagtcatgttttttaccactatggctaaaagtacggcgttggcatgcatgcaagtcgcatgatctaagggcctgactggtttaaacgcagcgggtgcggttgcggttgcgggagtttgcggaaacgggcggttgcggtttcaagcgttatcaagtgttttgaacgactggttgagcgtttggttatgggtgcgtttgcgggagttttatgactggtaaaccagcgggtgcgatagtaattaaataaaaaataaccaaaataaatataatatattactattaaaagaaaaaaaaatacaatatattattatgataaattgataatatttgaaaaattaaacatacttaataattaaaaccataaataaaactaaaaattcaaaaataaataaattttgtaagaaaaagtttaatactttatgcatttggtacatcaccaaaaattgcatcaagtagtgtgataaactgtaaataacgttgaactcgcgggttttccggattgcctctatacatatgataaagtttcttcaagatatccaaacgatttttaacacatctccaactcaaattttttccaaacgttaatattcttaagaatattttctttttgaacatcacttagaaatctgattttggggtctttggattcttccgtttatttctccacaataacccgttgaagtaacgcaaatgtggtctcgtttgaccaaatgattttctaatcgagaaaacaaatcaaaacatgtattcaatcaaaaaactcaaaaaaaaacaaaataaaaaaaaacaacgatgccatgaaatattccgagaattacactagctaatgaatggatgaaaggatagatcatacttacgtttgattcttgattttgactttgatttttgtcagtttgggtggatgccataattgagagaatagggtttcattgattagggttttctgataagaataagtataaggtttgggtggaagacataattattttaattaattaatatatttccctcaacctaaccgctaccgcccgcaaccgcaaacgcttgcgggaatgagcttttgaaatctggcgatttcgagcggtccaaagcggtatcgagcggtttctatgattggtgccaatcgctaacaaccgctaccacccgcaaacgctgcgtttgcgggtggcagagggagaactaatcaagccctaactatatgttagattaacttgtcggaaacatgttggaaaatacgtgtaattacttaaatatccacaaaaatctttctctctgctattttcttaatttatatattttatttggctattcaataatattacctatctattaaatcaaaaataaaactaaattataatttatatagtaaatgtttccaaattgttttttataattactttagagcatatattattgaggtaagcatttggaaactctattctttcaccaaaagtgtggattagtatggattggtcaccaaaatattaatacaaaaatgatagaatctttattttgtagtgaaccacttgctttag

SEQ ID NO: 22836 - DNA, 2901 bp, Arabidopsis thaliana
catctctgcgcataagtatttggtgtaccccgagaatgcgtccatgaaggacaatagttcttgtcctgcactagcttcgaccagtcggtcgatatgcgggagtgggaagctgcctttaggacatgctttaatcaggccgtaaactcgatgcatactctacacttcccatttttgttttaacgacgactaggttggcgagctagtcagggtattttacttcccttatcgatctgatcttgagcaaccggtcaacctcattgttcacagctttagccctttcgggacctagcttgcgatgtttctgctttataggtcggtaggttggatcgacgttgagttcgtgtgaggttacctcgaggcttattcctcggaggttcgcgctcgaccaggcgaagctgtctttgttttcttggtgaaaggttatgagatcctctcgtaattctgggtcaaggtcgtgacctatcccaacgcatcgtttgggatctgattcatctatgcagacctgcgttatccacgattttcgaggtccacgttgagaagggtcagaggatctgactgttttcatttctgcgagtttgtcctttatcattagtactatggggtcggcttttttgatatacttgtagccacccatatagtattttggggagctccgttggctgccgtatacgactgctatccccttgtcggaagggaatttaatgcattggtggtaggttgatgggacggctttcatgacgtgtagccatggtcttcccactattgcgttgaaaggagctttcttatcgaccacgagaaagtttgtgagttgtcttactcctcgtgcgacggttgggagctggatggttcctagggaaaaggtcgtatctccagcaaacccggtaagtggcgttttactgccttgcaactcggaatcgaggtgccctatttttttgaaggcgtcgtagaagtgtacgtcaactgagcctcccgtgtcaatcattatacgggagagttcgtagttgcctacgtcgatttgaataacgagagcatcatcgtgaggtttatcgaggtcggtggtttcactttcccagaatgcgatctggtgatcaggtcccatcatcgggcttttgccttttgtgtaggaatctgccttcctctgatgagttttgatcgaattgattgagtcgttgcagagctgagatcctcccatgatgaaatcgatgcgtttcagggagaggtgctcagttgcgtttctgcagaattttaagaggcgtaatgggaacctcgtgtttttattttgcggggcgggaggaggtgtactgactgacctttctgtcctgccacccagatcaagttctgcaaagattaggtctatgcgctctttcctagcaggtggaggagagtcaccttcctccggtgttcggtcccgtttctttcgtttgggagtttgctcctccttctgctcatcgggaggaggggtttcggctttggggtttgaaccttttttagttttgcccccagctgcgattaattttttaacggcgcgatattcctcggtggaatgtcttcttttttttgtggtacttgcaatattttccgagatcaagttctggactctcgtcctcagctgcctcttctattgcgaatagggtatgctgcccttgcgtttggttttcctttttgaagggggttttaattgcaagaggagcattttgcgttttagattctttgaactttaaggccagcacagcgagctcctcttcgcctttggcgaagtggagagctttgtgaagggcatcgtctaaagagattggttgcctaacagtgagttcctcacggaatctagaggaaaaccacagaccgttacgaagggctgctatggctacctcctcgtttaggtttcgcaatcttcgatttaattgctttgaatttttcaacgtaagatcgatgggattcgttttgaagtagagtgagactccagagatcggcttcagacgtcctttgttcgataagtacagaatcctgttttaagaaagcgacctgccagttgttaggaggtgtgacgtctatcgaggcgaagtctagacgagtctttggagtaggatcggtcggggagacggtacctgtcaaatctatgggaactgggcatggaatcctagtttcgcggggtgggaacttccttacccgcggtatcgcgctctacctcatgtcccaagcgagtggagtcgcatctttgctgacccacaattgcggcgaggttgcgatgcgcaatttcttggtttttggttaagttgatcaagttcatgatcattgcgcggagctcagccaattcgctggcaggtcgcggagggacctgattagacgggttgaccgggttatctccatttggaggttgtatcgtgacgttttgttctccgccccttgtttgcggagggggagtgatttggtcagatccagaagaattcgagttttgggagatgtcctccgcatcagcgttatggacagcatcaaccctggttcggagagggagatccgttgggaggtgcccgtccgtaacgtcatcgtttgggatctgaactggtaagccagatcccgatgaattggatgaattgggatccatgatcgttggtcacaattgatgtgttagttacggtgttggaatgatctatttctgtccccacagacggcgccaaatgtgggttctgaaatccacactagagatttgtaattgagattatgagaaaggagggctagatcttcacagaaaccttgagagttatattgctaagaacgaatggactttttgtattgataatgtgaaaggagattacaagtgtaaaagtatgtgtgtgaatataagcagaattgaatgtgtcttccaagttgtccttgctcccttatataggtctacgcacgtgg

SEQ ID NO: 22837 - DNA, 3064 bp, Arabidopsis thaliana
ccaaacctcaccatctctcttcctctccaaacacttgaccgcaccatcacactcgacctcaccgttcactcgatctctcccctccgacttcaccatccctcgctgctttgtcgccctccctcttactcgaccaaacctcactcgtcatctctctcaccgcctcccattcactcgattgcaacgtcctcttctccatccgccgcttactcgacctcgccgtcccagctctcaccgctcacgcctccgccttcttttcactctccttcactcgacgatagcactccaccctcgtcgttctcttctttctcaccactcgacgttcactcgaccactccgccctttacttcgccgaaaacttcaccgtctcatcatcgtctccttctcactcgaccgctactcgacctcatctccgcttccaccattcactcgaccacatcgcaatttggacaaagaagctcttcattcgattttcgacaaacggccagagtttctctctctcgttctcgcgagccaactcgactttgccggagcttctcgccgttcactcgacctcgccattcactgcgcctccattcgtctctttactcgaccgctcctcaaaccgccaccgtcttctctaaatttgccgtttactcgaccacgctgttacgtctctcattcgtgtacactcgaccgctatacccgaagccacaatctcactatactcgaccgtttcactcgaccgcgtacttgactggtttagtatttgtgtttatttgaactaacatattgatatttggttttgagttacattctttttcagggaatcaatatgagtaactacagtggcgaatcctccatggatgcggattacaacgtcgatgaagctgaatcttggtcaactggaccagagagagagcaataggcttatgagagcttcagagctgagacccaacgctcagtagctcgacgcaatgaaaggagagctgagattgctagaggaaagagagcgatgaccagcagatatgagttgatcgacgaagatattgacgtcgagtatgagcctgagtcatggcacagagaaaagaagctgttgaacaagcctgatgaagttatagtgaaggagtacatcagacttttcgagctgaacgacttctggggaacgaggtacccctgttatgagactttagcccagctggggctactggaggacgtacaacacttattcgagaggtgccatctggagacactgatgtcttacccgtacgtcgcttacaagaaggaaacaatagagtttctctccactctgcaagtggagacgtatcagggacttactgcagttgagctggagagtgaagggttggggttcttgacgttttcagttaacgagcagcgttaccagctatctatcaagagcttggaaggattatttggttttcccagtggaaagggaactaaacccaagttcgagagggaagagttgaaggatttgtggttaaccattgggaacgatttggcactcaactctgcaaggtctaagagcaaccagattcgaagccctgtgatccgctactatcagcgctcagtagcgaatgttctgtaccccagggaatctacaggcaccgtgtctaacacacacatggagatgattgattatgcactcaagggcattctccggagaacaaaggggaagaaggtcctaaagggcgaccttaatgatacaccaccggttatgcttctgttgatccacctgtgtggatacaggaagtgggcgcacaccaacgggaagaagaaggtgcgaggagccctttgtgtaggtggcgttgtgacaccgattctgattgcatgtggtgtacctctcacgtctccggggtttgatccgaggatgatggatttagatcatttgcgtcgttgtgagtttctggagcacgacatggttggcgatttctatcgctacaaattcgagcactccttgacccgaacagccaacattcggcttccctgcatcgaggccacaaccatacttcagagtgaaaacattgacttcaaacctgcgcgtgattacctctacattgagagcgctcatccgactgatgacaaacgacggaagctacagaggatgagattgctgagacagatgaggatagggagaaggagtacgatacgagcatatatcatttcagagagcacgtacctccagcgcgggagagcaagagcttgagcgaagctcacagaaacaacagtaagttgcagaggtggtgcaagaaacaagataggctactcatcaagtgcttcaaggccatcaagtttctgacagacaagctaagctgctcctcttctaccacagctattccgcagggagagcctcctcaggacatgccctcgaggagatatgatgcgccagagccaagtcgccacaggcctgagccaagtcaccacaggcctgagcctagtgatcgagcagtcccaccagtccgtgcgaggcattcatcattcgagcctcgggagctcgggagaaaaaagaaggctgcactcgctcggtctggcagtaggagtacacgacttctcctgtcgcgtagttacgcgaccgcggtgctggtcgcagcagaagaagagaggtcgagtatcatcagagcggtgctggccgcgacgaaggagcagaggtcgagtacccccagggggaagctgagacacaacagggagattcttcgatggcctgggagcaatcacaggcggctattgacgaccaaatccgctgcttcttccactgaggtaagcacctcactctaccattgtaatataccatctcctgtttttattttgtttctctgatgtgttttgtcctgagtactctcttccaaatctggtcacacagtggactgtgtgatttaagtttggcggagggctcatgaaggtgtgtgttgcattgtatataatcttgagtctgcattcatctaaggcatagaaaaaaccaaaaaaattgaaaaatttcagaaaatgatttcacaaaaatagagtgttcatgtagttgcattgcatttaggatcgagtctagagtgtttcatttaggattgttgcatatgca

SEQ ID NO: 22838 - DNA, 3118 bp, Arabidopsis thaliana
ttcctgatagaaaagccttcttgcaatcatcccaggtggtgattgagtcatggggcagattcttctcccagatgtgtgctttgccacccaaggagaatggaaacaaacggagcttgaatccgtcgtcactgacaccattgatcttcgttaggttgcagagcctatcgaattcatcaaggtggtcgagtggatcctccattggcagaccatggaatttgttcccctgaatcatcgagatgagaccactcttaatctcaaagttgttgttctggatagcaggaggtgcaattcccttcctctgacggtgatcacgtggtgcatctccagcaccaatgttggcagggccattttgttgattctggtcgtcagccatttcgagtggttgttgaggtacagggttgactgtggttctcctttttttgagttcgcgagctgtgcggttgatgttgtcgttgaaaaggaggttctggttgcctgttgatcgagttcgcatacagcagagctgtacctggatcaagaagacaacaaaaaaaacacacagttagtaactgaaaagaaaattgaaaaagaacttgatctaagcaagtctgaaatcttaaatgtaacaaacaaacacccaattggcaacggcgccaaattgataataggtttttaagtcaattatcctaaaacaccaatcatatctttgtagtattttaggttgtcaatccaaatgggtgtgatgctaacaatcaagatgtgatcagaagtcactaagtcaagccaagcataacaggttttggtgtgttctaccagtcctaagtgaacatgcagaaaacagaaaatcaaacagaaacagtaaaacactcgaccaacacagctctttgcagagcactgggtgaggtcgagtgacaggtcgagtaacagacagaaaatgaaacagggatactcgactgcacagtctgttgccagacaactgggtggtcgagtatcaggtcgagtaacagtaaagaattgcagaaactaagcaacagatgacaggatgcagtacacagcagtagagtaaacaataaaatcaatcagataaagaattcctaaggatgggatagttgagtagtttcgtttcttcagtttacaggtgattaacatgctcaataaattaacccagacaacatgtttattaaccaaatctaagtgccaccgcaacagagactctcaagctaacctagtcccagactcaatcaccattgacgagagctaacttaacaggcattacgaatcaacaagttatagccaaatcgctccttgcaaccaataccttggtacatggccacgaatctctggaattagtggttcagacatttcatcgaacaccttttgggcgcggaaatgtctgggctcaaattccagttgatcagaaagcaataggcattaagaacaacttatccagaagggatctatcaatccatactcaaccacctagcaaactgagaattctacactactctaacccatccttagaaacctattcactactcatacatcattgcagagaacataaacgttgaacaggatgaaaacatgataacaaaagtgtaatagcaaaacgataacaggatgaacaacagtaaacgaaatcaagaacaaatactgaatgctgaatactgaatagataaagagaaatccggattacaaaaggtctagaacacagtgtctgcggaataaaactagataaaaaacttgttctcgaaaatgtagagtacatgctacttattgtggatgtcggattcacacacttaagtatttatttatttagtgagaaggattattcttgaggacaaatatactagaaaatagatagatgattatagagaaaactatgagttttgtagagaaaatgtgtatagctaatttgcacaaaaatgtgtgtgtctttacatggtctttgacccataatttatacccaaagaatacatttaatcctcatttacacacaattattctaccttaaatgtatccgtttctagtctttgaattaattattcaacgttcgaatttgaaaccactccgggcctcctggacttcacccttcggcccatttgtcttcttcaattcgagtagtcctaacttcgatgttgcacccacttcgccaatcgacatctcacccatactcttactttgaagaatcttacgggcttttcatcttatgggcctcccatacttgtgtagcaatctttggccggtcccgagcccatggtgcgggatccgacaccaacacttatagcaaaatattccgaaaccctaatacttaaaacgacgcagtattgggacggattaagaactgtactcgacccaggtggtcgagtgggaggtcgagtgaatagatggagtcttcttttcttccttatgctcgagtgtcgggttgagtgcggaatgaagaagactctgaagcttgccatcaagtatgtagtcgagtggtggtgatggtgatactcgagttccaggtagagtggtgtgatcgagtggtgatctggtgacggagatgaagacactcgaccttggggtcgagtgaggtgatcgagtggtggtcaggtgatggagatgaagacactcgacctcgaggtagagtgatatgatgaaatcgagaagtcctctactcgaccagggggtcgagtggtctcttgaggtcttgaagcttctactcaacctcggggtcgagtggtttgacatgattaggtccgcttcttccagttagctcgttaacagctccaactcacctgaaatcaatacaaatatgcaacatgcatgcaaacctatcctaaacatgcaaaatgatgagaaatggtataaaacagtgatgatatggtgctaaagtgatgacaaatggatgctcaaaacatgcaaaatacacacttatcaactcccccaaacttagtctttgcttgcccttaagcaaacaatcaagaacaagctagaggcgatgtttgaaagcggggactcagaaccaaagcaccatataaacaagatgaaatcaatgtccaagttgatagttctaagcttcgatatggtcgaattctactcaaaaacattagccatgccttattatcaatcaatccgactcatatgctcgacctacaca

SEQ ID NO: 22839 - DNA, 591 bp, Arabidopsis thaliana
  unsure (1)..(591): unsure at all n locations
gcaccagtttccgttgccggagatggaaattccggagaagtggaagctttcttacgaacaagaggctattactgctccggcttgtcctcgttgtgcatcgtccaacaccaagttttgttattacaacaactacagcttgtctcagcctagatacttctgcaagggttgccgtcgttactggacgaaaggcggttctctccgcaacattcctgtaggtggaggctgtcgcaagagaagtcgaagcagacagaacagtcacaaaaggtttggccggaacgagaatcggccagatggtcttattaaccaagatgatggattccagtccagccctcctggttctgatattgatttggctgcggttttcgcacaatatgtgactgatcggagcccttctagtacagataatactactggatccgatcaagattcaccgataacaacaaccactcatgctttagaatctttgagttgggatatctccaagaaactgatgtggatcttggattctacggggaattcaataatctaactcagaagaccanagaggatcaagaagtatttggtcagtttctccaagaagatcgagaggag

SEQ ID NO: 22840 - DNA, 3527 bp, Arabidopsis thaliana
ttttctttacagattctattttctttttatatattcaacagaagttatatatgtatatatatatatattatggtgtatatatattcggtatatgtttttattaccaaaatatatactaaaattatattatagaaaacatttaattatataattttgtgtggtatattttgttatattattatttggtaaaatttatttatttattatttttaagttttaataaaaaaataataaaaaaaaagttttgttttagagaaaatattttttgggtcaaaattgggttaaaatagagtcaaaatcgaatttctggaaaagtcaaaccggaggaatcatcaatcggttgattgatcggttcaattggaaccgtagttttaagaacaaatccgaaagtatatgtaggtttatcgagtgtaaagtattttttggttgtctttcaagtgccaaaaagtttggggtggaaagctgagattataactactatagggctgaaatttcaggcaacctgtcttcatttgaagcatgcttggagaacctttgcaaggttctggctagatgtgaagagaagaatttggttcttaattgggagaagtgtcatttcatggtaggtatagttcttggtcacaaagtttcagctgctggtattgaggttgataaagccaagatagaggttatgacaagtttacatgcacaaaatagcgtgaaatctgtgaagagatttcttggacatgttggattttacaggaggtttgtcaaggatttcagtaagattgtcgagccactaacagctttgcttcgtaaggatgtgaagtttgacttcaactctgagtttcatgctgcttttaataagattaaggaggccttggtgagtgctccaatagttcaagctacggactagaatttatcttttgtgatgatgcaagcgattctgcagttggagctgttttgggacagaggaaaggcaataaacttcacgtcatccactatgctagtagaacacttgatgatgcacaacggaattatgcgacaacaaagaaagaattgttagctgtggtttttgcttttgagaagtgatataaccctatttttactacttttagctatgatataggtataaggaaagtaaaggtgtattttctcccaagcacatttctcgagagaccaccttcgcaattggtttccggcaccggtagaccccttgctcatcggcgctgggatctctctctctttaatcgatcttctctcacgcttcttcccttatggttctatctcttgctttggttttcttttcactcctttcagaaactctccctaatatccaaactcttgtccggcgacgaacctgaactcttatctccattggccgtcagatcccttagctctcaccctttcgcgattctcgcagatcgagtcactcaccgttccgcctcgcaagctgcttctccatcctcctcgcaagctgcttctccatcctcctcgtcatggaattctttatcaagtgttctactcggttgtggcggaaccagaggctcgagttgtcgctggaaccgatgaatcttagttcggcggaacaatcaaccaaagtagacgttttatcttgttcagcagcagctacaactcggttagcttttgtcactattcttctggtttggcttcttagcatcatctccaatctgccgctgttgccattgaactacacgaagaaggagctaaacctaatgttgctttgtctctctcttaatgggcctagcccaagaagtttcttctttccctgaagcccaagacgaatcctatctcagcccaagtttaaactaatgggcttaagcccttattctttttggtcttggtttgatctctcatttctcttgcttagtctaatgctagaactattctattcgttcacagaaggcaatggagacctttttgtttcaatagcaatggttttagcttggtcttgtcattatcattctcgaaacctactagatagatttgttcgattgatttttgttggaagacttttgtcctcccattgcaatatgcctgttagagtaaataagtccgacattatgatcccgcctctatggagtagggattaccgacgctttttcaactctctttccccattacctctgattaccgagctctatcacgcgaccatcatttgtttggataatttgcaaacttttgttagtttgggaagtcacggcattatgaccccatctccaagaggtggttaccgtatctccttcaaattgttctaccttttagcatctcccgtggagcaccttctcaaaggctcatatgcattgtttgcaataaccgtctatgaccacaagttggtcgaagatctcgcgaagcccgtcttcatggtcgaatccgccaagggctcaatagatttttcaaaccttgtaaacttttttaaaagtgaacacctctttgcaaaactcatgaagcctatatctttatttccttgttctatcctatttgtaatttgtatgaacttccctcttttgaggcttaagtgaatggaaattattgtttgacaaaaaaaaaaagctatgatttaggcattagctttagagtctatttgttatttcgagagtcttttctagtctttttcaggttattacatgtttgggattcatttggagataatggagcattctggaggaaaacggaaaatatatgctgctaaaaaaatcctgagactaaaaaccgcgtaggtgtcaaacaacaccacccctgtgtcgagcgacaccaatactgacggcacttcaaagacgaaacttattgatattttgaagatttccaaatccggctcagaatctttgtactatttttaatcaattcccatcacgtttttaagacatatatagtttttaggtcaatgtttagaccctaagcttggagaggctattctccttttctcttttgtttttgggagccaaaaccttgtggagactcccttttgagaagatctttctaaactctattctcttatcgtttcttactttgatttctactttatacatgttttgttctttcataatcatgtctaagtagttctcttggttggtttagggattcttagttagagatttggatgaattagtagatcgaaaacccagttaagataatatatttagaattcttcatcttagattgttcttaatgctagttttagagtaactaactagaacttgattttaggataataggtttacccaccataggtatctattactgaaactatcttagatgagctttaaatgcgtgctagcgtcgattacttaggtgaacttatcaaacttgattataatgcttgcttagttctagggatttacaagagagttgagatcaatactattaagcatagtgagtagcacggcacacccccagttacattatattagtgatttgtgttttagaatagttcgataatattcataatttactgctagatctactattctgatattttttgagaattttcctaaacccgacgccttaataatcttaatctacaacca

SEQ ID NO: 22841 - DNA, 2756 bp, Arabidopsis thaliana
  unsure (1)..(2756): unsure at all n locations
tcatcatcctgtcccacttgaaagggtttgtctcaaatctgaagatctgcaaaaaatggtgaagatcagaaacgtgaaactaccattcgcattatacttaccttggagatcgagtctgtaggcgttgttgatgatccgtttgagcactttgaatggtccatcgattcttggcattagcttggatgatcgcacttccggaaaacgtgttttcctaagatgaacccacacttgatcgccttcgttgaagatgacttcttttcgacctttgtttgcatacttcttgtattgcttcgttcgagcctcaagatttagtacctgttgtactaaatcggctttcttcttaccatcaagacttgatctttcactcaaaggtaaaggcattagatccaaaggagatgtgggtttgaacccataaacaatttcaaaaggagaaaacttagtcgcggaatgtctcattaagccacctccatgagcttcccttagaaacaattctcgcaaagaagagtgaggcacacaaagtctattttcaaagaacaaatacccatcatatcgataatattttccaaaggcaaacttctcacaagattgaaatattttgctaaaatcagaatcattagcatacaagtcttttatttgctcaaaacccaacaatcttgcatccaaagaagtaagcaaaacatacctccgagataatgcgtcggctacaacattatctttaccttttttgtacttaatcacgtatggaaaggtttctatgaattcgatccaccgagcatgacgtttgttgagctttaagtgcttgagagactcgtggtcggtatgaatgacgaactttttcggccatagatagtgttgccacgtttgtagtgcgcagaccaatgcgtaaagctccttatcgtaggtcgtataattgtgagtcgctcctcctaacttctcactaaagtaagcaatgggcttgtaatcctgcatcaaaacagctctaatacctaacccggaggcgtcacacacaatctcaaaagttttcataaaattaggaagaattagaacgggagaattagtgagcttctctttcaaggcttggaaggcgttttcttgtgcatcttcccatttgaatccaatgtccttcttgataacttccataagcggggcgacaatggtgctgaaatctttgacaaatcgtcagtaaaatcccgctagaccgtgaaagctcctcacctcgctcacattcttagggttcggccattctcgaatcgccttgaccttttcttcatcaaccttgattccatctgcacttacaacaaagcctagaaaaacaagattatccgtgcaaaaggtgcacttcttcaagttcgcataaagtttttcttttcgaagcaagtccaaaacgagtttaagatgcatgacatgatattccaagtttttgctataaaccaagatgtcatcaaaataaacaataacaaatactccaatatgcttcctaaggacatgattcatcaatctcatgaaagtgttaggtgcatttgttaacccaaacggcataactaaccattcatataatctttgtttagttttgatagccgttttccattcatcaccttccttcatccgggtttgatgataaccacttttaagatcaatttttgaaagatgctagaaccatgcaatttatcaagcatatcatctaatcgagggatagggtggcgatacttaaccgtgatattgttgatggctcggcaatccacgcacatgcgccaactcccatctttctttggtactagtaagaccggaacggcacacggactcatgctttctcgaatatgacctttgtccataagctcgttcacttgtctctcgagttcttttgtttcggtcgggttggtgcgataagctggtcggttcggtagagcggctcccggaacgaagtcgatttgatgctcgatcccacggatgggtggtaaacctatgggattgtcttctggaaacacgtccttatactcttgcaaaatcaactcgatcttactcggtagcaccggtacgggattagttgaacaagtaagtgtttctttgaaaacaaagagtaaactatttttacttaccttgttcttgccttttgtatcgattggttcggttggtttgatggcccgttgtttcatacttagctggtctagatagacttcgtgcggagtcatcgggatgagagttgtctttcggccattgtattcgaaggtttgtcggttggtgaagccatcatgaagaacttttcgatccgattgccatggtcatccgagaaggatgtgactagcgtccataggtagaatatcgcacatgatctcatcatgatacttcccaattgttagtggtaccttgacttgttctttgacggacatctcacccgtttcattaagccattggagcgaatacggtctcgggtgtttaagcacttctaaaccaagtttctcgaccatgttcctactcgcaacgttagtacaacttccaccatcaataattaaactacataccttatctttgaccaagcaacgtgtatgaaacaagttttccctttgcccttgttcttcggccttagttagtgattgctcgagtaattaccgaaatatctaaccgaagtagaatattcgaggtcgatcacaaggaccaaagatactctaaagatttccgagacacgttcttagctaaagcggaaagatggtttttgtntgagttacagattgtaaataaaaatcaaataaataacgatt

SEQ ID NO: 22842 - DNA, 2197 bp, Arabidopsis thaliana
ctataaacttttttgaacattgagtaaaactaatgctaacactaaaatatcaaattaagggaatatagttggtaaatcttattctttaaccactgcaacatggacaaaacctaagaccaaatttccaccatgtatgtaaagatcagatagaaatcaactattatagtttgtgtgtatattgtttccaacaagacatgcttctatcaattgatattttgcccacattttcaaatttctgattcaaaaaatattgctcttagtttattgatttaagaataccaccaaaagttttagtttccaaaaatatcacaaacacaaaaattaattttggaaaatcaagacttaagtggtatatttggaaaaccaaaattaaaagtggtatttttgaaattgtattaagtatttttatttttatttttaatagaaccttaaatattgattttctttgatggcttgtctttttttttttaacaactcttaaagacttgactgaatatccaaaaaaacgttaataccaggacatttaaaaaagttgtaagacagaattctatataagaaaagtaaacttattattaaatatcaaattaggtgataacacctttttattttattaagcataaacctttactccgtgttacagattacttaagtgttacaacgataaacactcaatattggggatttagtttttaaacttggcctcaaggtctttgacaacattgacatctaactgaaacgcctgagccaaaatatctggattaatcggaggcgttgatccaaacactgtatctgcgatcgtgatgacaccagcattttgactacttagtccagcaaaggccactgcgggggtcttcccgatattcacttgaaaatggatcattcctatggggaacacgaacacgtctcccgggttcagcactttggcgaataaacggttgttgtcttgattcgaagagacaaaaccaacatataatgttccttcaacaagaacaaggatctcagtggcacgagggtgtgtgtgaggcgggttttgaccatatggcgcatagtctatgcggaccaaggatattcccaaagtgtttaaccctggaatctgatcgacattgactgttgtcacgttggattggactttgttattagtgattcctgcttggttgaggcctgaggaaaagaaatcttctgcctttgcttgctttggatccttgcaaaacttaccattcacaaaaactgcaagtagaaatattgtttcgaaaaatcttttattacaacttcaaatttagtcattaataaaggagaataataattaattagtagagagttaagaaaccgagttatatacgcaccaccatttttagggtcatcaatggccacacagaagtcttgaagtggacttggatcatatgctttggcaatggtgaccaaagctgataaggttatcaggatgagagacatggacaccttcattttcaaacaaaggtttttttttgttctaatgctttctagatatgtagtgtgttgtttgtgaatgaggaagcattcgagctcagtatttataggaaaaaggccggtgtcatatttgacgtggtccaagttattcatatacattttgtaactcacatgtttcaaagtggcagttcaaaaacgtttaaccagtctatcgataatcaatcttttattaaaattggattttacacaattcaatgaccagagcttgcagtttattgatttgtaatattgttttctttgtatcatgcaccttctagtttcaagtctggtagaatatatgtgtgtggtaataatttctagtactatctttttcttaagaaaaaaaattagagtagtgtagcagtttaatggtaaatacgtaaattccatcctacgtattgtaaatgcacctcactattcataacattttttattagttgtttatcactaaataaagttattatttacttgttaatgaacaattaataacttcatttattttcaaagatagcaacctttaattacaaaaaataatgtttctaactaataataaagtcaagcatatatatgagatattttgacatatttctgacagatttagcatagcaatatcaagcgatgagtagagcatatagcatagcaatattacgaatttatttcatgtttgcttgatatatcttgtcaaaaaggagatgaagatgtaaaaagacgt

SEQ ID NO: 22843 - DNA, 699 bp, Arabidopsis thaliana
cttatctcccagtaaacatgtaacatgaagagtgacagaacaatagctgcatgtgtagaaccacttttgtgcatctatttctgattcacaaatctcgcaccaatactggagatcttttgtcttttcttctccacagcaaagagtgagtggatgtttatcgtacttgtagtgagccaccagaggcatagtagcacaagtaagacacgaaaaggacctgcattcaatacattctaagtactttcttaatccggatgtaatcttacaaaccatgcattcaccttcggtcaaattgaagaagagagggtgatcatgtggatggcagtcatggattataggatcaggaagcgaacgacaccttgcatctagttgaaagtcacaatccttttcacaacacttgtacatgaaaccacaacattctcggctacaaccactacacgcgaagaaacctaggtcatagtatttagactggacctcgttgagatgaggatagtgtaaatggtagagggtgagcgggtgtttgtgtagtggatggtgtcctatgcgaggaaggcctgcacatgtttcgtggatgacaaaatcgcattgtacacagctatagaagctatccgaaactgttatccgaagatgcaagctctgcaaaacttgtgttcatgggtgtcattcccatgatgaatctttagatagtgatggtcatgactg

SEQ ID NO: 22844 - DNA, 620 bp, Arabidopsis thaliana
tgatgatgactttctctgtgttcccatcgcctaaggtgtctgacactgttgtggagccttacaacgcaacactatctgtgcaccagcttgttgagaacgctgatgagtgtatggttcttgacaacgaagctttgtatgacatttgcttccgtacactcaagcttagcactccaagttgtaagtattccaatgttcttcgattatgagtcaatgttgttactgtatctgtctctgtggtttattgtttcaggcttagttattgattagtattgaaacttcactcacatatttttttgtttgttttctgaattgtgcagttggtgatctgaaccacttgatctctgcaaccatgtctggtgtaactgctgtcttaggtccctggtcaactgaactctgatctgcgaaactagctgtgaatctgatcccattccctcgtctccacttcttcatggtgggatttgccctctcacctctcgtggatctcagcagtaccgtaacctcactgtcccagagctcactcagcaaatgtgggatgctaagaacatgatgtgtgctgctgaccaagacacggtcgctactcactgcttcacgcatgttccgtggaaagatgagcacaagga

SEQ ID NO: 22845 - DNA, 2973 bp, Arabidopsis thaliana
gcttgcagagaagtacatgttggttaggatttgattagacttgtttgcatatggacttagcttgaatgatcatggcaataagctagtgaatgttgggagttcctttgttttcaaaacctcttccacgagtttggcttttgtgtttcgcttaagggcaagcaaaagctaagtctgggggagttgatataaccgattttcaccaattttatctatgttttaggtataggattttgagtctttatgttatttctcgagtctttttagtgtcttttaaggtattctatgcaatgggacaacaatggagataaggagacattttggagcaaaagctaaggaaaaggaagctaaggacgattttggttcaggaatcagcgaggagtgtcgatcgacacactcttggtgtcgatcgacaccagtttcggcccagcaaaaaccctagacgccttcgagtttacaaaagatcaagtttgccccagaagatttccctattagcattattagtcccttgacgtttttagggtctatatatattgtttttagacctaagtttcttttatcaagtcttttatcaagttttctacaaaccatattactgagagacataaaccagtcgtcgattgttttcagagttttattgagatctatatacagtgaagagatccattctttccccttctctatttactgtgtttttgctttcacactcaaatatgttgtttgcttcatccagtatgtctgagtaatcttcttgttaggaatagggtttctcattagggattcatatggtttagtagattgtcccccttgttaggttatctgtagaattcttcatctttaattatgcataatgctagatctggagtaattaactagatcttgaatccagacaatagatatgcccgccataggtatctgtagttggatctattatttgatgagtctggtttataggtacgtaataagaatcggcctatctactaagatgaacaattgaactcgttaagaatgcatatttaggttgatagtttctcggcttctccggttattattagctatagatatagggagtttcgcggcacgcccaccggttattccataataagagtttgagtttaacaatggttcgataacaacctagctttcattagatctactaaccaatagtttcctgagaataccctgttcctaggtctttattaaatcgttcacaacacaatcatcctgctgtctttttactttgttttcttttattttcactattaccctgctagcttaatgtcgacattcaacttactgtttgaacaaaataactccgtgaattcgatccttaaatactgaaattgatctcttatttgagagagtaattctaggtaatttgaatcatatcaaatttggcgccgttgccgaagttcttcggaatcatcattgagttttgtttagagatttcgtctagtttttacttctattttgttactcacgcgtttcttgttttcttcttttctgcgtttcatgtctatgccttggcaaacaaggagcagaaaacagaaggagcttatcaacttgtctgttctggactttggaaaacttgaacgcacaaaccaaaaaactcagaaattagcaatggctgacagagtcatcagagctgatgcagaaggagttttgagagatgtggatgggcaagcctacaatgaagttggtcagagattggatgatcatggacttatcctacatgagaacgccaatgaggatcaagcgcgcctcaatgcgcaattagctgcaagagatgcagcagggctcggtgtcgggcgacaccaactgggtgtcgaacgacacaacagaggtgtcgatcgacaccaacaccagattccttcagctattcctccagctgcggaaccacgtcgtactcttggggatttcaacaggccagacttgttctatgctaatcgtttagcgattgtacccccaccattccagaggaacgactatgagttcaagcctggctactttgctttagttggccagcatcctttccatggcttatctcatgagcagccaatggatcatatcgagagatttgaggaccttgttctgagcatcaaggctaatggagtctcagaggactacctactttgcaagctcttcccttattcatttgctggggaagcagctacttggctgaaacaacttaaagcaggttccctcaagacttggagaagcatcgagatagccttcttgaacaatttctatgatgatgctaaatctgaggagttgaaaaacaagttgtctaccttcacacaaagtccaactgcagctttcaaggctgctttggttcgtttcaaggagtatcaacgggactgtccacatcatggtttcagtgaaatacaacttctaggtacctttttcagaggagttgattggagataccagatggctcttgatggagcgagcgatggtaacttcaatacacgttacccagctgatgctacagctctgatagagaacctcgctagtagcaacagtaccaagaatgctgactttgagaggaagaagattgttggaactatttcaggcaatcaaatggcagaggtgaatgctaagctggattcggttcacaacttgcttacaggaaagaagcatgtccactttgcagctgagaaagcgactattgagcctgagcctgagtcagaagaaggagttttctacatcgatggtcagggctacaagaagtttgggcagccacaaggcaacttcaatggcaacaggtttacagggaaccagagttcccccaactacactcccaagccggctttccagaaaacttttcctcagagcaactttcagaggacctatggcaattcagcttaccaagccctcccccctccaccctcatcaaagacaagaatggaatctatgcttgagcagattctagagagccaaacaaagctcgttgtgtagtttaatgacaagtttgat

SEQ ID NO: 22846 - DNA, 528 bp, Arabidopsis thaliana columbia
cctcaacctttgtttgttttctctcctcaattcaattaccaacaggttggcctagcaaacatcttggaacgcatagtggacacactaagactaaaagaagaagtgtcacgtctcttcttgaaaccggtatccaagaaggaagctccagattatcttgatatcgtggaaaacccgatggatctctcgacaatccgagataaggtacggaagatagagtacagaaaccgagaacagtttagacacgatgtctggcagataaagtacaatgctcatctttacaacgatgggcgtaacccaggaataccacctttggcagatcagttactggagatttgtgattacttgttggacgattatgaagatcagttaaaagaagcagagaaaggtatagatcccaatgactgagaaatttgtaagatagaaatctgtaaccctttctttaggcccccaaaaatgggtttcttagcttagttactattttgtacgaatagcaacattccatacccatatctgtgtaagaatccaagt

SEQ ID NO: 22847 - DNA, 714 bp, Arabidopsis thaliana
tccttcaacgccttgtcaacgcttgtctccattccaagaatttcgataaagtcccccaactgttcgacgaaattcctcagaggtacaataagatcatccctgacaaaatctcttacggtatattgattaagtcatactgtgactctggtacccctgaaaaagccattgagattatgagacagatgcaaggtaaaggcatggaagttactaccattgctttcaccaccattttgagttcattgtataagaaaggtgagctcgaggtagctgataacttgtggaatgagatggtgaagaaaggctgtgaattggataatgcagcgtataatgttcgtataatgagtgctcaaaaggaaagccctgaaagagttaaggagttgattgaagaaatgagtagtatgggattgaaacctgatacgattagctataactatcttatgactgcgtattgtgagagaggaatgttggacgaagctaagaaagtgtatgaaggacttgaaggtaacaactgtgctcccaacgcagctacttttaggacattgatatttcatctttgttatagccgattgtacgagcaaggctatgcgatcttcatgacgagtgtgtatatgcacaagattccagatttcaacactttgaagcatttggttgtgggattggtggagaacaagaaaagagatgacgctaaagggttgattagaacggtgaagaaga

SEQ ID NO: 22848 - DNA, 467 bp, Arabidopsis thaliana columbia
gagaaaactaatctctacttgcacctatttaaactcatcatgagtccatgtggtttcactttattcaagaagcaaatttgtaacacaccaaaaaatgggagaagagctttctgtagggtttcggttctatccgaccgaagtagagctccttacgtattacctaagaatccagcttggtggaggaaatgccaccattcatagtctcataccgatcctcgatgtgtttagcgttgagcctactcagcttccaagtacgtatgcaatcattagctatataaataatgtcgatgatatatttgtcgtatatatgtgtagtctttcactgtagagttttccttcttgcgtttcttgagtagagtaacgtgactaacgttatcttgagattgtatgcatgagatttaggtttgtgtttcttgatttcgtggttaattataagttcaaaaaaaaactttacaaacaatcacatt

SEQ ID NO: 22849 - DNA, 544 bp, Arabidopsis thaliana columbia
gtataaatatagagcgtcacactttttactcagcgtcgtcttcatcgctcactccagaaatgagacctcgcgggtatcaacgagctccgtcaatgcagaaaccaacagattatccgacggataagacgcttcatccgaattacccatttctcatgtcctctcatggtctcaagtcctttgaatcggacgacgaagacgacgactccgactcctccaacgatcaattcgctttcactatcaacacagagttgcttgtcgatgtcaaagacatatctataggggacttcatcggcgaaggttcatcatctactgtctacagaggattgtgggtttctcgtttctcaatctcctacttcgaaattgcttctgggtttggtgcaaaaattgcagattttgttttcctgtttatcctttcttgatttcggtatttattcgaagagtataggtttcagggtatattggtgatttaattttgggtttaccttgaaatttggaatctttcatgctggttagtgttaggttttgtcactcttaggtttatgta

SEQ ID NO: 22850 - DNA, 522 bp, Arabidopsis thaliana columbia
  unsure (1)..(522): unsure at all n locations
tnnnnnnnnnnnnnnnnnnnnnnnctaaagaaccatataacattagtatgttgtaactaaatgacgcataaaaaaagcgcgacatcatgccgcgcaaagggataatcaaatattttactctatataattcggtttacaggaaggcggcaagtgaatgaatcccaggagcttactaaagtaagtgactggggtgaatgaacgcagccgcagcacatgtaacccgaagtatgacgagtaacggtttattttttagaatgccgaccatataccgcccaggtaatcactacgcaggcgatatagaaaatcaaaaataccttcattgcgccgactgggaatcccgttaatgccagcgagctaccaaacgctttcgggatagagaagccaccaatcgcgccaatcgcagagatgaaacccagcgccgccgctgtgtcggttgccgcttcacgcatcgcacgttcgtcagacccccttctgctttcacgcgatccattgtcagtttacggaagatccctgaaatcatct

SEQ ID NO: 22851 - DNA, 784 bp, Arabidopsis thaliana
ccaatccttcagtcaaatgcttacaagttttgaaatccggaatcttgtgcactatcgcgctcttcttaaacaccgttaaaccttgatcatacaacccgtttatacacagatgaaatatcaatgtcctgaacgtcgctgcgtttggttgctcaagcccttcatacactttcttggcttcactcatcattcctttcacgcagtacgcagtcataagatagttatagctaacagtatcaggtttcaatcctacactactcatttcttccatcaattccttaactctctcgggactttccttcgcagcattcataagtctaacattataaactgtgttatccaagtcacaacctttgttcaccatctcaatccacaagctctccgcttcatcgactaaaccattcttatacaaagatcctaaaatggtagtgaaagcaatgatagtaacttccacacctttaacctccatatctctcataatctccatagctttttcaggcttaccagagtcacaatacgacttaatcaacataccgtaagagattttatcaggagtgatattattatacctctgaggaaattcgtcgaacagttgggggactctttcaaacaaatcagaatgaagtcaagcagcgagtaaggcattgaaggaaacaacggttctgggtgtgcaagcttatccactcctcgaacatcttcatagcatgatcaaacattgaagctcgtccataagatctgataagtgtagagagaaaagctctgttttgactttgggttgtttttgtga

SEQ ID NO: 22852 - DNA, 591 bp, Arabidopsis thaliana columbia
gctcttcatcggtggtatatcttgggaaaccagtgaagatcgtcttcgtgactattttcacagttttggtgaggttttagaggctgttattatgaaggatcgtgccactggccgtgctcgtgtggttggtttcgttgtctttgctgatcctaatgttgctgaaagagtcgtcttgcttaaacatatcattgatggtacaattgtaagtttcctcctgctatataccaacatacattgcttccaatttcaacaatcttcctgcttacttgcttcattttgaggttgctgcttctcaaagcaaagcaaagctactcacttttattccttcctgttttagttagtagactctattgtttacaatcagctttgccgctctgataaatgcatatctttgtcagaagttgttcatttcacactcacaaataaaaatgtaaaacttggatcgtttcatatcctcatgtgaaagaaagtggttccaatgaatgaataactgctttctttgagttgtgtcgtgtgttgatttccccatgatatacaggttgaggcaaagaaggctgttccaagagatgactccgtagtatttaataaaag

SEQ ID NO: 22853 - DNA, 539 bp, Arabidopsis thaliana columbia
gtaattagcaataaggttcttgttaggcaatggaagattcgtcaccggtgatgtatctttctgtctcagccattcctctatagcttcccgatcgtacgtgtacccatccgcagccacgcacggctcgttcattactccctgttgccaacaccaaatataattaggttaaaatcaatgaggaaacaaggtttcttgtgtaacaagtaatcatggttttagggcttattttgaaccttcaaaagtgggcaaatgaaatgagatggaggaccagacggagttctcgaaagcaagttttgagctttgtcggcgactttcctgagccgttccaaagccgggatgatttgatctttaagatccggtctgtctctgcgtctcatttctgtacaacacagtcccaaagcggctaactcacgagtatcactgatgggccaagacccagctttcttatccaagattgccataaattcagcatcgtctccgatagcttcttccaccatatgagtaatcgctatggcgggtttcgcggttattagctgcag

SEQ ID NO: 22854 - DNA, 309 bp, Arabidopsis thaliana columbia
tgatacgtcagaaaaatctagaaacaaactgaaaacagataatcaaaggaggaacatgggaaaaataaatcaccatgatcgaagagctctcctagggggctagaggaatttgtccttcttgcttgcttcccatcaaccgcatcaaatgtctaataaaagctcaaaaggtgtaagataaaaaagacttcaaaacaccttcaccagcacatataacagaaagttaaacttttgaagaaaaagagagacgcaaacctgatacaagaagagaagtaaaccatgtgcgaagtgaacccatcgtggaggaggaga

SEQ ID NO: 22855 - DNA, 508 bp, Arabidopsis thaliana columbia
cctgctaaactcgacttcaacattgagattctatcaagcagcttcaccacctctcttttatctgcactagccttgcttttccatgctgcagcttctttctgtgccgactcaagcatgtcttgcagactcttgagttttgcatcatcagacttgcttttctcgacttcctttctcatgataccgttttgtttttctgcctcccgaagcctcaggcttgtaattctcagctcttcagacaaagtctcaatgtccagttcttgagttgaagctgccccttcgctctgttcatcatccaacccagatggcaagtatctagcaagctgactctttaaaatatagatttggtcttctgaattctgtaacttctcatttacatctttcagttcttgctcacaagcagcaagttttgccgggaaatcaacaaatttagtctcacttttcaccctcggcaacaagctctcagtgttccttcaagttgcacctaagtctttctttggcttcacgtagc

SEQ ID NO: 22856 - DNA, 512 bp, Arabidopsis thaliana columbia
ctatcttagttatgaattgtgtgacttgtatatatttatttacaggatcgtgattaataccacaaagaattccaaacattagctgatttacctcaaaatcagttagacaatgaaataagtaacaatctcgtgcaccataataactaaaaagtggtggttaaatgactatctaagtggcaaaatttatcaagaagacaagataaaaatttgaaaaaataatatgagcttttgaacaccaacctcgtagtattgtccacatgggactaattggtgaggtgagagagttgaacaacaccttatttattcccattccatatataatacgattagatgacaagggcgacaacaaaaacatcggttccccaccctctcgtgcacgcatctctgccaataagtaatcatcaccagacggagtccagaatttcactagataaattgggatctttgtcagtgtgctccaaacagaggatgatccgctggttggccgctgaacgaaaacccggcattgaatg

SEQ ID NO: 22857 - DNA, 571 bp, Arabidopsis thaliana columbia
tccatggaacattgttgatgacgatgttccttcgttttgccatctttgtagagcttgaggtaaactcatgttcacatcgattccgaaactctcttcttcttcttggcacgacggtttccacttctctacaagtggacctagcacgtttactgcgtggcccatgtcgggtctttgttgaggttcgcgggctgtgcagtgtccagctagctcagcaactctgtaaatgctctccattgtttcctcgtctgcttctaaggtttggtcgagtgcctttgggatgttttctttgttgattaggattcttctgaaccatgtgactagatgagatctctcgtctggtaatgaatcatctaaagcttttcttccagttagtatttccatgagaaccacaccaaatgcatacacatccactttcgtcgttactcttccagtagctgcaaccatatattataacatcaatatccagtgcaaccaatgcagccgtaatggcagaatgtataaactctttgcatagtaagatacacagactaagcacattgtgaaattaacattagtagagatgagaagaatg

SEQ ID NO: 22858 - DNA, 499 bp, Arabidopsis thaliana columbia
acaaactcatagcttcgagatttaagctcatcaacaagtttctaagaacctcaaaagctaaacccataaacaaaaccctcaaaagtgaaaccaagaatatgaaaagcaacgattttagagctcaaattcatcattttgtaaccttaatgtgaagtgtgccgccgccgaattcggaaccggacttgttattgagctccaaccaagctttgttctcataaaagcaagcacctttccactccacggcgtcgtttctaacagaagcggacgcgatgaaagtagggaggagatcgacggcagtgttgagagaattgactaccggccacgagacttgcctcggaaaaagcggaacgaggtctcgagggtgaaatggtaatttcctggatgagaaagtgagaagcagcaccagtaaggtagtggcgaagaagatgcacggagacgatgaagcagccattgttaagtcggttactgtctcgcttccgtgttgaattcgcaagtctcg

SEQ ID NO: 22859 - DNA, 585 bp, Arabidopsis thaliana columbia
  unsure (1)..(585): unsure at all n locations
tacagtctggctccgatgaaggtggagagttatgattgacttggtttaacttggcagattctcgtaagacagggacagcttcttcttgttcaattttctgtggtaatgcagctgtatcgaactcataagaaccaatgggaacgccatttccttcttttcctgtcaatttggttgaggggatgctgtgggagaatctaagcaactcatgaggcggaatctgaattgtgtctgatccaccacctggtgcaattcgacagaatacacttgtaaagccttttattttacgcaagaacgcaacctgtattgcaaccccttcaacatattctgacaggatctcaacaaattcatactcatactcatgctcatgggaagaacgccgacgaccagaggaccaattgatgtcccagttcttgaagagagcccatgtttctcctattcttgggtatactctgacagtatccttcatgcttcctaccttaaagtagatcatatgagagaaacatggagttttctctatgttctcatttccccaagtttgaacttgccaatagagatgggcaagtntttacgaacccacaggtttgc

SEQ ID NO: 22860 - DNA, 749 bp, Arabidopsis thaliana
tcatcgtcaagaattttgggagaagatgtgacaatttctcaagggaaaggacaagagaaaggtgatgtgaaattagtggatcattcaggagatcgcgtcgattattacataagatcttccattaaaaacgcattttctaaggtaaaaacacaaaattttatttttgttttcatttcctctctgtttttagggttctgatttttttatgttacaggtgatagaaaatacaaaagctaagatcgcagctacagatgaaggagaagaagctgctggaacgttgttacagctagctaaagaaacagaggagctagcattaagggaacgcgaatgtttcagtccgatactcaagagatggcactcagttgctgctggtgttgcctcggtgtcacttcaccaatgttatggctcgatcttgatgcaatatttagctggaagatcgtttatctcgagagatactgttgaggttttgcaaacggcagggaagcttgagaaggtcttggtgcagatggtagctgaagattcagaggaatgcgaggacggtggaaaggggcttgtacgagagatggttccttatgaagtcgattctattatattgcgtcttctaagacaatgggtcgaagaaaagctcaaggcagttcaagagtgtttatttagagcaaaggaaactgaagtaagttttagagattttacttgtgatccaagaaacattacttcatctaatggtgtttgctttctatctttgtagacgt

SEQ ID NO: 22861 - DNA, 544 bp, Arabidopsis thaliana columbia
ccttcctcttaaggtgaatacaattcagaacaatttctcccccatgataagctacacgaggttcttgcctatcatataaatgaagcacctccagggatctcaattgaccaagagatgacgatagagtgtcactagacccgtcagtaataaatagactgagctcccttagcttagtcatatggaggaggtccatcacactagcgtactttgttgaaaaattcatcaaagactccaggttcactaggtcactcaattccaactttgttttatcatgcattgacataggtaactgaaggtacctcagttcttgcatctctttcaaaacatttggcacatgaaccatcccattgaagcccaagttcaaatagagcagaagcttaagattccgcagagaagaaggtagatgagatatccatgcccggtgtaagctcaagaatctcaagtggatgagatctccaatgctggaaggtaactccctccttcaaactttacccgagaaagatccaacacctaagcaatggtaacttcggagcatggggttgtg

SEQ ID NO: 22862 - DNA, 530 bp, Arabidopsis thaliana columbia
tgagaacttaagagatttacaattctatatctgatcatatgtattagctttcttcacgaaaaaaggaaataattgctactccaagtatgatactataggaactagtacataaatgctggaagtcttagcattataggtcaccaagctttgtgcttatttactacagaaacgcgcaccaacctttaatcttaatcactctagagtctagccgttatcataacatactagtccctatgaactttccagtactattggctgattctacaatgaagtaatatgtaactgatatgttttgatcttgaacagatactaatctacacaatcaagtaatatgttttgatcttggtttagaatatgtatctgatgtgatgtgtgttttgaatttaacagatactctcccaacataaaggagataaaagtggtaagtcacaggaaagtgagaagagcaagactttactatctgagggacaaacttcctcgtctctcaacttttaaatgatcacaacccaacaccagtcttgtcttgtgtt

SEQ ID NO: 22863 - DNA, 542 bp, Arabidopsis thaliana
ttccataaatagaactcacacttcacttcccacgaccacatcagttcacatctttatcaattcttttactttcattctctttatatattctctctacgctataatatatattacacagaatatacatggaaccgtccatcaaaggagatcaagaaatgttaaaaatcaagaaacaaggtcatcaagatcttgagttggggttgacccttttgtcacgtggaaccgcgacctcatcagagctcaatctcatcgattctttcaaaaccagctcatcatcgacttctcatcatcagcaccagcaagaacaattggcagatccgagagtgttctcgtgtaattattgtcaaagaaagttctatagttcacaagcgctaggcggtcaccaaaacgctcataaacgtgagcgcaccttagccaaacgtggacagtattacaagatgactctctcctccttgccttcttcagcgtttgcgtttggccacggttcagtcagcagattcgcaagcatggcatcgttaccattacatggctcggtgaataca

SEQ ID NO: 22864 - DNA, 577 bp, Arabidopsis thaliana
  unsure (1)..(577): unsure at all n locations
ttgcctgtgatgcacattctgggaactaaccgatctaagagagattttaaggcttgctggtgaacccttcttcaatgcttgaatggtagctgagatccaaccatctgcttcttgagtggcctctctctcctaagcaacacatatgatggtagagtgcgttgtcaaaggtaaatcagtcaactcaggatcgcaagtcaacatctctatatataaatgaaaagcttacaagtgcagatataatttcttcgactgttctccttgagaaacacctatcaataacatctaacctgcgcaacaaacggggagataaaaaataactgtcctctgcacttttataaattttcaattaaagatcagatgagaaatgagttctgtaaagagcgattgaaaacctgacagcaatacgaaattganattatagaaaaaatgtgttataatcatggtcaataaccgagaaaatgtaatcaggtaaaccatactagtagaaagagtaaaagagataaaaatcatatagacttgcctgcggtaagactctgctgttcaggcgcggatctgggtgtatgcacgagaattgtga

SEQ ID NO: 22865 - DNA, 476 bp, Arabidopsis thaliana
caaaaggaatttgtttggtagcagcatctagtttaaactgaagctcctggatccgaacagcagaacttggctttgagactcttttccacttagatatttctcttctacagcttgcaattttctccatcattagagcatttgttttcgtagattgttgggaccagaagttacacaatagatccttgaaaccctctctctgtacccatctcttgtcatacttgaaaccggcccatttcctccagttgtctcccacaagattattaatgagcggactgtgatccgaacagattttctgtaaataagtcgctttagcctggggaaagagctccatccaagcttggtttgctactgttcggtccaatctgcactgcactaactcatcattgcgattccataccatgaaaattgatagcctgaatgattaacttccacaatccacacgagttcagcatttgtctaaattcaaggcaggatga

SEQ ID NO: 22866 - DNA, 942 bp, Arabidopsis thaliana
cttctggaaatgatgcgagtaatgaccttatacatagtagtgcaacaatccacagggcgaaattgagttagacgatctgcccctgttacctttggaatcagagtgatggctgtagcattaaagccccttggaagattcccagagataaagaattccctgatcgcagccacaacactagacttcacaatcgcccaagcttcgatgaagaattcaactggaaacccatctggacccggtgctttgttacggggcatagagaagagcacctgagttatttcctcttccgaaggaatagtagtcaactgagaagccaggaaggaatcacaacgaaaggggagaagacctttgattttttcaacagagaatggggtgacattctctgaaggaatgccaagaagatgcgaataataagcaatcaacatcccttttatctgatccacattctcgaccctaaaaccatcatctcctctaagaaacttgataagattagtcgcttggtgagcaatcacagctctgtgaaaaaatctagtattagcatcaccttcatgaagccatcttattctggatttttgtcgaaagaatgactctaaagcagcagcaaagaagatccattgcttgcgggcaacatgttcccgacgaaaaagagtatcagaaggtgacgtgaggagttccacttgaatgtcctcaagccgagttagagattgggctgtcctttgttgaatattgctgaaacggagcctgttaagagtcctgcaacacagcttagcaacttttaaatgctgcctcaaagaaaacatgtgagacccaaccaaagtattctcctcccaagcagtagacaaagccgccaaataagaaggatgagaagacaagaaggagaaatacttaaaggacttcttagaaggaggaggctgattatcgattaagatgatacaaggggcatga

SEQ ID NO: 22867 - DNA, 510 bp, Arabidopsis thaliana
caacccttttactgaaaatggcggcaaagtttctgactacgagatgttgaagatgttaagaaacaagacgatcatcatgttggcccttcagcttccagtgaaagggactttcaagattttacaggtaatccagttcaagttcaggcaacagattctcagagctctgcatctttccctatgatcgagtctccccttttatctgaaaaatcaagtctcaaagtctcattcactccatcaccatctccggttgttgcacttgcatcctggctaggctccaactataacgaatctaaaagttctaccttgggttctccttcccttgaatcttatgtgtctgttagtgaagttgatgcatcttcagagcgaaagtcaggctcccaaggatcttcggctgccaatgcattcttcacagttagcccaaaacttctccttgaaacagatgaaactgggtatggtggcgggccttgttctgctggagcgagtgctgtattagattttatggcagaggca

SEQ ID NO: 22868 - DNA, 2572 bp, Arabidopsis thaliana
gtcttcctggtcctcttcaccagcagttaccaaacttttcaacctttgctgcttgcagtgatggccagggaaccatctatcgccacagttcctgcagggattggtgttctttggttctccacttcctgaagcacggttcaggtcgttactgggatcatatggacgtttagactgcgtcctctccattgctctggatccggatggcgtttggctagctgagaacgatggtctctgttggggtctaacttgataactttggttagtcctctcctgtgcttcaataagtcttgctatctccacaatgtcattcaagttgacaggacgacatctgaccacctggtctttaagacttctcttcaatccattcaagaacgctgactccactatgtcaatagggacatgaggcaactccaccaaaagctcttcgaatctgcctcgatactcatcgacagtgcttgtctgtctaatgttcagcaagtgatccaccactgagcttcctctgctcggtctgaaccttattttaaacttgtcttggaagtccttccatgtgtaaatcccttctctttctttagcacatctccaccacgttacagctggaccagtcaaacaagatatcaccttttcgagcttgatgtcttctggtgtgttatgagttaagaaacactgctccacgcggaaaatccagtcatctaggttttctcctttgtacagcggtagctcgaggggtctcaccggagcctcgtgcctctgtctcggtgaataaccctgttgttccaacgctggcggtaggaaacgagtctccacttgtctcatttgcaggttctggagtcgggaaaggcagaatagcctctctgtttccacgctcggagtttggaggtggtgtcgcttggaaagctgggccaggagaaggactagcgaacgcagctggtaagtttccttgaccttcacgaggtggaccaaagatctggttccttaagatctgggttaaagcttcccttatgtaaaggagctctttttccaccatttctactctgttatccagcggcggtaaggttgcagcgggagggttacttggttctggtgatcctgactgagaatcttcaccggcggccattgtgtttatgggggactctaacaactgaaagcaccaatgataaacttgacagttaactcgagagtgtaacaagaagaaataggagggagatagtattgcgccagatgcggccgagaggaaagagagagagattagaaaatagtaatgtttttggtaggtaatgattgaggaggccctacaacgggaaaccctcctttaaatacagagtgtatcaaaacccttacataaaacgcaacacttgaattaaaagacaacaatattaaagtgaccctctttctccttcagtgtctcttgtgcactctagccactcttgagtatcttcttcagaagcttctcccagactcttgccttcttccctccagctctcagtcttcttctcatacaagctaggggaatcatgagtcttctaagagtatctatttgagctgctagcatttccctaatgagcttctctatctcatttttctgttcataagagtatctataaggtctcaagttgattggtgaggtacctttttccaatgtaatcgcatgttccctgtttctcttgggaggcaaggcctgtggcatttaaaaaacagtctggtgttgatccagaacacgttgcagaaccggcgtcacttcctttggtttctgctgttcatcactctcaaacagtgtagccaattccagcaaataggcttcatctgcatgtttgatctccttttccatggtgcggaatgatacttgttctctgcacaactccgggtctccatggatagtcacccacgtgcgcccaatctgccagctgagtctcaatcttccccaattcgctcttgtttcacccaacttagcaagccaagcaaaccctaacactatgtctagatctcccaagtcaaagagcaggaaatcctccatgattcgataccttgaatctccagaggtaccttaacacacatgcctctgcctttaatcactctacctcctcccactttaacgcagaaccctctagtctcagtactcggccagcccctttcatgaaccaagctctcatctataaagttactagtagcgcccgaatctaccaacaccaccactttagctcttcccacatagcctttgagcttcatagacctttctctttcaacatcaaatagtgatcccaatgtatgagtcgccaaggtttcttcttcagcttgctcttcttcatcattctgctctacatattcttcttcaggtgggtcttcctggtcctcttcaccagcagttaccaaacttttcaacctttgctgcttgcagtgatggccagggaaccatctatcgccacagttcctgcagggattggtgttctttggttctcacttcctgaagcacggttcaggtcgttactgggatcatatggacgtttagactgcgtcctctccattgctctggatccggatggcgtttggctagctgagaacgatggtctctgttggg

SEQ ID NO: 22869 - DNA, 572 bp, Arabidopsis thaliana
gtctgattattaagccaaaattggcacacaatagtgtaaaccagaaaggtctgagatgcatacatcgcaagtttgagaccaaatcttttggtgctaatattctgccattagcttgacgggcagtcctgacatgtttctggatcgcacataaagcacaaaatccagcaacatgacctacaaaaacgtattcaaaagaacactgaatcagacactggaaacaagactaccaaacacactcgctaatctagaaaacataagtggtttggctgatcaaaaagcaacaaaaattaacattttgagcatctaaagcaacttacaatatttctgatgcgcacggctttgcagagtagcagctaaaggctcagtgtatgtcaaacattgcaatacggaattaagaaaacatgtattcccgagattctgcaaacccgcaccctacaaaatcacaaacaccgttcacatatacacaaagtcaatgagaattatgacaagtattgataaaaaggaagcattcttacgctaatcagttgatcaaaatagagataggatggctaaaaggaagaatttgtacgata

SEQ ID NO: 22870 - DNA, 2814 bp, Arabidopsis thaliana
aatctaggcatggttcagttttatttcaaattcattgactacgcaacagacaactagcaacgagggcactgagtttatcaggtgaatcaaaatgcttacaaggctatctcatcatcatcccctatgcatatgcaacaatcctaaatgaaacactctagactcgatcctaaatgtgatgcaactacatgaacatttttttttttttgtagaatcattttctgaaatttttcaaaattttttttttttttcggtttttctatgccttagatgaatgcagactcaaaattatacacaatgcaacacacacttcctgagccctcccccaaacttaaatcacacagtccactgtgtgaataaacttggaagagagtactcaagacaaatccaatcacagaaacaaaaaaggaagaaacaaatcacaacagacggtataatacaatggtgaagtgaggcgcttacctcagtcgaagaatgaacgtagttgctcgtcaatggctgcctgcgattgctcccaggccatagacgaacctccttgttctgtatcagctccagcagatgggtactcgacctcatcagctctgtggcggccagcaccgctctgaggaaactcgacctctctccttctgctgcggccagcaccgcggtcgaatgatctcctcgagtgaatgaggcgtgatctgctgctagatcgagtgagtgtagccttccttcttctcttgtgttcccgagattcgaatgacgaatgcctagcctggacatgtgggactctctgctcgctaagctcaggcctgtgcgcaggtgcattaattctcctcgatggcatttccataggaggttgtacctgtggaatagcagtggtggaggaagagcaactcagcttgtctgtcagaagcttgaaacacttggcgatcagcctgtcctgcttcttgcaccacttctgcaatttactgttattcttatgagcttcagtcaagctcttgctctgcctcgctggaggtacatgttcagcaaagtgatacatgctagtgtcgaactgtactgctccatcttcatccatcccatccgaagcagcttcttcaagaagatcgtcctcatctaatggtggagcgttctcatagtagaggcgtccaatctcaggcctaaaatcaatgttatctccctcgattatccgtgtgacctcagggctagggagaaggatgttagctctcctgtctgtagagtgctcaaacctgaacctgtggaaatcgtcaaccattgcaaactccaggaattcgcagtgacgtaggtgctcgatatccattgctcgtggctcgagtccagcagaaatgagtgggactccacaagctatcagaataggtgtcaccacgccacctatgcatagagcgcctcgtgctctcttgcggttattgctgaccgcccagtttttgtatccacacagatggatcagaagaagtatagagagaggtgtgtcattgacttcaccctggagggacatgccatttttagtttggcgtagagttcctttgagggccattgcgatcatctccatatcagagttagtgacagtccctgtaatctctcgggagtagagtacgttggctacagaacgctggaagtacctgatgacagggctgcgtatctgattgctctttgacctggaagcattcaacggtacagagctgccgatggtgatccacaagtctttcaactcttctctttcatactttggcttagatcccgttccactgggaaaatcaaacaatccttccaatcgcttgattgataacctgtactcatgaccatacacagaaaatcgcaagaatcccaatccttcacaatccaactcatcagaggtcataccttggtagagctctacttgtagtgtggagaggaattgtattgtctcatcttcatatgctacatacgagtaagccatcaaagtgtccagatgacaactttggtacaggtgctgaacatcttccaacaatccgagttgtgcaagtgaggtcgagcaaggatacctcgtgctacagaactcattcagcttgaaaagcctaacatattcctcagcaggcaatatgtcgggcttgtgcagaagtttggtagctctgcgagtctgttcaggcatgcactcgtcctccagatcttcgtctataagctcatacctctctctcatcgctctctttcctcgggctatctcatctttccttctgaaactttcgtattctctctgttctctctctggccttgaagatgacgattctgtctcatccatgttgtagtcaggatcaacagaagaactgccactgtaattgctcatgattctcctgtagggatttagaactcaaagctcaaatgtcaataggttagtctcaaagatagcaatgaagcaaaattattgtcaataggcaatgaaacagattgaaaaggtcgagtacaattccgtactcgagtaacctgagctgttcctgagcttagatgaaatggatcgagtatcttctcagaggtcgagttgtggtgcttcagtgggtcgagtgaatcgtagagatagagtgaatcgtgaaagctagtggtcgagtagcttctctgaagttggaaggctctactgagttcacgaacaagaagccgagtataatattgcaggggtcgagtgcttttaggaggtcgagtgatttcttgaagtcggctaggacggcgtcggtcgagtgcctcgacgagaccgggaagcgaggtcgatcggtttcttttgaaagagatgacggttgatgcgaatgaattggtcgagtatatggaaggaatcgagtgaagtggttt

SEQ ID NO: 22871 - DNA, 491 bp, Arabidopsis thaliana
tcagtatagaaactaaaattgaattgtatttaacaacaatgcttgaacaaaaaatatattgaatccccctcttcctagttccttcttgtgttcactatttcaaaaatgaataaatcaatataaatagtcgccatcatcatcatcaataaaagaatggtatcaaaaatctcgaagcagcttcctaacttgctccaacgtaacgaagagaacaacagtgaaaggaccttgcctacaaactgtaggaacaaagcctttataaagagccatggctccttccgctttaaccgtcttcaccgcacaatcccacgcgccgtcgtacgctcccaccttcatattcatcactctcgtctttatcacatccaccggattagacgcaaccgaagcaacaaaccccgccgcaaaactcgctaccacgtgagtccctagcccatcattcatcacaccattctccaatatcccttccttgaactgatcgtaagacgctagctgag

SEQ ID NO: 22872 - DNA, 967 bp, Arabidopsis thaliana
ctaaagccaacgcttgctacaacctgctggaaaaatgcattaacggcatcactgctaacaaagaagtgtgcgaaggttacgtttacaactctatcggtatcgttacttacctgaacccgttcatcggtcaccacaacggtgacatcgtgggtaaaatctggtgccgaaaccggtaagagtgtacgtgaagtcgttctggaacgcggtctgttgactgaagcggaacttgacgatattttctccgtacagaatctgatgcacccggcttacaaagcaaaacgctatactgatgaaagcgaacagtaatcgtacagggtagtacaaataagaaaggcacgtcagatgacgtgccttttttcttgtgagcagtaacttagaaataacaatctaatatcaacttgttaagagacaaggaaggctaatatgctagttgtagaactcatcatagttttgctggcgatcttcttgggcgccagattggggggaataggtattggttttgcaggcggattgggggtgctggttcttgccgctattggcgttaaacccggtaacatcccgttcgatgtcatctccattatcatggcggttatcgccgctatttctgccatgcaggttgctggcggtctggactatctggttcatcagacagaaaagctgctgcgccgtaacccgaaatacatcacgatcctcgcaccgatcgtgacctatttcctgactatctttgctggtactggcaacatctctctggcgacactgccagttatcgctgaagttgcgaaggaacaaggcgttaaaccttgccgtccgctgtctactgcagtggtatccgcgcagattgcgatcaccgcatcgccaatctcagcggcagtggtttacatgtcttccgtgatggaaggtcatggcatcagctacctccatctgctctccgtggtcatccgtccacctgctggcggttctggtgatg

SEQ ID NO: 22873 - DNA, 2559 bp, Arabidopsis thaliana
gctttttaaactaaagatactctaggtttacaagatttatatataaatagtaattaaaacgtataaaaatgagattttgagaaaacagcgaaagatggccgcaaaattaggtttgcagaaaaggatacacaggttgaagatgactgaaaaattacaattatacccttcattaaatttcttctgtgtacgtatattcaatttacagtgtacgtacacaaagttatttagtcgaacgtatatggtacgatttctaataagtcaagctattttattacgtattcttatatctcaataatctccatacatacataatagttaaatagatatagatggtgaaataatatttgttcctcatattgaaaattatgtacgtatatgtgtaatgtacgtatatttttgttggtaaattaatgtatgtacatgtgtaataatatacgtacatctttgtttgtaaattaaattattaagaaaattttattgatacaatattaaaccaatattggcagtgggcgagatatattctaagacgttcatacgatgtgattttgaaatattcttaattcttgacgacttgagcagtcaaatgtcatggacaagtatcatcaacgcataccatcaccaatcttgtaggatatgacctaggttgcttgtagcaaaaagattgtttgattgcgagataagacattgtttgttgtatgacttttctgttcttaaaaacactctccaatttatagtgtacgtacattggtacaaaccatgttgacacatagttcttggagtcacagctggtgtacggtcacccgggtgagaaatgttatctccgccaggtacacgctgacttgtgtacgtacactctgccaacagaagactgaattcccttggatgttgaacagtcagctgtgtgagaatgatgttctcctcaacattccctattccatattcttctacaatttcatcgttccacttgttgtaatcataatcttcgccactactttcactaccatcaatagtaggatcgatggtacttccctcatagatccatcgtcacactgataatcatcatacccatcaccatcttcgttgtccccccaacttcatcctcatctgttttatcgtcttcaatgtcgtcttgctaatctacggcctcattattttcatcaacatttaaaacactatcacacacacggtcactttcagcatcgtcaccatgagtcctagagacattattcccgagtgtcttgacggttgtaatgaaagagacaaacaaattgagagaaggatacccaccacgaataaaaaaaatcgtatcccaccctcacttgactgtcaatgtagacaggagggcgtttagtatctatcatcactaacatctctcccggtatccattaactaattatgagattgatctctatggacttcaaactgaaagtctcgcttagtgtacatacaaattccgtgtacgtcatgttttccttaacatgtacacagcgaccaaacatgtcttcctctggttcaaatttccattttttttctttgcatctccactcaccgaccatagtaaatacgagattatccattacccaactgcatcataaatttaggagaaacccaataaatgcaactgaaaacatgattatatcgacaaaaacaaatagaatttcgatatacacacttataaacataaatatctacacatttaccatttttaaccaacaaaattagaaataaataaattctggatttttctataaaaaacaaaattgatttcgaacacaatgaagatcatagtgtattataacaaaacaaatctttaaaacttcattacttacacgataatgcttgtcttggccccaaacttcgtaaataaacaagatcaacacatcttcaacatcaatgtacgttcccaattaatgtttgtttctgggttcatctttaactcaacaattattatcaataattttataatattataacatgtaatgatgattttgcattaattgtgacaagagtcaggtcgaaactttttgggccattaaatgttgatgtcatttagtttttaaagaaaaaaatctcccttctaactgtacagccgcgctcctcaaagtgaaacaaaaatatttccaactaaaccggaacagtgtacctaactaaatctgactaactaaactgtacattcaatagtttctcaactgtaacagcaagggtaaaatggtcaaattttagctgaaaagacaaaacgtgaaaaccacatcagactttgccaatccctgaaaataaaacatggtcaaagggtgtggcctgcaaattaccctttacatatatatatatatatatacccaaaaatagattgtttgaacatatcaactttgttacacaaatccatcctgaaaaatattcaaaagaattcaattttgttagaaattactcggccccattttggaaacaatgaaataacattcagaagatttcaacataacagatattacacaaaaccatttgaaatgttttactcaccggaacgtgagagtccgcgcgcttcttttggggtcagaggcagag

SEQ ID NO: 22874 - DNA, 3396 bp, Arabidopsis thaliana
ttttctactaacatagagtatgttacctttgacgtcctcaacaatacaccgcttaaagaattgtttgaaatccactcatgctcttctgagtaatacccattgtcaaattgtatgaatgtgtgcttgttcttcatcgtctcctgtaattacaaataaattataaaaacacaattacgtaatcattcagatttagacataattgtacctatattataactcactaataccatttgtaccacctgtcctattgtatctcaataaaacacttgtaccgcttatactattatatctcagttttaccatttgtcccagttcgtcaattctgggtttcacaaatcgtaaatttcgattgaacactcactaaactctctgattcaaaacgatacaacagcccagaatgaacaatacaacaattttatgttattaacaactaactccaacaagaaattcacattaatctacaaatcaaaacgagatcggatttacttttgtcgttgaagaggaagctcactttaggagcagattatcggcttggaagctacggcgatctcggaagctaactcgccggtgaaattagagctcaaatcgccgacgaaatcggagctcaagtcgccggtggcgaagtcggagaaaatcacgtcggaagtcggagaaaatcgcgattttggtaacgaccgtttttcttttttttttactcaatgatttactctttattttgaaattctccttcagttattctttaaggagagagatgtaattgcacatggtcgagtggtactcagaataaaagatggtacgccaaaatagtttttacgtaatggtggccgtattggaacgtggctagtatgtactcaacatgtgaaccccactaaaaaatattttgtctttttgcggcagaaaatactcatagttgtaccattgtaccatcgtattcatagttgaactttccacagttttcataatttacagttgaactagacggtaaataattaattataagttgaactcacactttgtctctattattttgcatttccaaagttttcataatattacatcggtaaaagcttagttttcacctattttacttcatataaggtgatcatatactaaatgttccttgtattagaaggggtgtattatatgaaaacaacattgttttttagaaaatattaaattttattgcattgatataaaattatttatttatagctttagatattcgtatataattttacgtgtataataaattatcaatttaaaaaatttaaacattttagcgttactaaatcgaactagttgaactaattatattaaatgttactacgaaaaccaaagaatagacatttgaactagttcacctaattaaattaaaaattatcacggaaacaaatacatacatgtttttaatctaatccaataagttgaaccaagttaaactagttgaattgttcatataaatccgagaaatataaattcaaaacacacaaattaatttttgaataattcactctaatgcccttttctcaatgcccttttgcaactctacccttttttttcccactttcatttctaccctttctaatacttttctccccaaattacccttaatgagctacccacagacctaattcatttcttcactctctctcttcttcttccatcggaaattgtgaatgccgttgaatcccatgccgtcggaaatagtgagtttactcgccgtgaaaacccatcttcgccgtcgtaagtagagctgtgtgtcgccgtcgaatctcttacgtttcccaggtttgattttataatgttagcttaaatcttcgttttcgaattggtttattcgatttttgttgttgattatgtgaattcgttatttgaatcctgattcaatcgacagtttgacatttgcttcagcttcgaatttgaattttgtttgagatttgatgattgaatttgtttctaaaatccttgtacattcgttatactgttctaaaatccttttaaattcgttatactgtttcgtgatagatttgcttatgtgaattcgttatactatttcgtaatagattttggttctgatttagtgtttacctcttttgcatatgctttcgtgatagatctatgccacttacgctttaaaacgatttgtaaaccatgttaaccacttttcaaagcttttaaaatcccttgtaaattattttatgctacttacttacgctttaaaacgatttgtaaaccatgttaaccacttttcaaagcttttaaaatcccttgtaaattattctatgttacttacttacgctttaaaccgatttgtaaaccatgttaaccacttttcaaagcttttaaaatcccttgtaaattattctatgctacttacttacgctttaaaacgatttgtaaaccatgttaaccacttttcaaagcttttaaaatcccttgtaaattattctatgctacttacttacgctttaaaacgatttgtaaaccatgttaaccacttttcaaagcttttaaaatcccttgtaaattattctatgctacttacttactctttaaaacgatttgtaaacctttcttctctttgtagtgacagtgtttttgtggctgttgattttgttgttatttatcttatcaggttataatgctagaattgtattctgtttgtgccttgtggaagttgacaaacaatatgacttgggaatttgaattagacattgaattaggagcttctttagtgctcattgatgagcacattacctatcacgcgttggttgatattcttgtagaggattttcaaatagatagttcaaccaattctttgaagcttagttacaagttagtctccacgtctacaaccatacaatctcatcctctttatattaggaacgatagactgcttgcaacttttatgcacaaattctcacagagtggaggattgcttcagttatgtttgactgtagagcaaatttctgtgacagttgagcaggtttttcaataaccttcttgtgttataattttaaaaatccttgtaaaatcatattaacgtttttaaacctcttttgcgaatccctgtaagatcattattaacgtttttaaaccccttttaaaaatccttgtaagattattattaagtcagtgattatgtttattacaggctgagacgacttcaaatcctttctgcttctcattctgcatctactactcaggtaataatccttttaaaaaatcttgtgaaatcattattaaggtgtttaaccccttttaaaaatccttgtaaaatcatgatttaagatagattgatgtttgaggtaagctcttaattttggcagccgaggttcacctctaggattattgaggcgtgtgtatctgaaacatctagtattcttgatcaacagt

SEQ ID NO: 22875 - DNA, 3161 bp, Arabidopsis thaliana
gatactcgaccacctagttgtctggcaacagactgtgcagtcgagtatccctgttacattatctgtctgttactcgacctgtcactcgaccacaccctgtgctctgcaaccagctgtgttggtcgagtgtttatttgtttctgcttgattttctgttttctgcatgttcacttaggactgctagaacgcaccaaaacctgttattgcttggcttgacttagtgacttctgatcacatcttgattgttagcatcacacccatttggattgacaacctaaaatactacaacgacatgattggtgttttaggataattgactaaaagcctattatcaatttggcgccggtgccaattgggtgtttgtttgttacatatgagttttcagacttgcttagatgatgttctttttcaattttcttttcggttactaactgtgtgtttttcttgttgtctttttgatccaggtacacctctgctgtatgcgaactcgatcaacaggcaatcagaacctccttttcaacgacaacatcaaccgcatagctcgcgaactcagaaaaaggagaaccacagtcaaccctgtacctcagcaaccactcgaaatggctgaagaacagaatcaacaaaatggccctgccaacattggttctggagatgcaccacgtgatcaccgtcagaggaagggaattgcacatccagctatccagaacaacaacttcgagattaagagtggtctcatctcgatgattcaggggaacaaattccatggtctgccaatggaagatccactcgaccaccttgatgaatttgataggctttgcaacctaacaaaaatcaatggtgtcagtgaagacggattcaagctccgtttgtttccattctccttgggcgacaaagcccacatatgggagaagaatctgccccacgactcaatcaccacctgggatgattgcaagaaggcttttctagcaaagttcttctccaacgccagaactacaagactcagaaatgagatttttggcttttcaaagaagactggtgaaagcttctatgaagcatgggagcgtttcaagggttacaccaaccaatgccctcatcatggcttcaagaaagcctctctgcttagcactctatacagaggtgttttaccacgcatccgaatgcttctgaataccgccagcaatgggaatcacaagaacaaagatgttgaagaatgctgggaattggttgagaacctggctcaatcagatggtaattacaacgaggactgagacaggaccattagaggcacaggtgactcatatgacaaacacaggaaggagatcaaagcgccgaatgacaagttggacaaaattcttctgagcctgtagaagcatgtgcacttccttgttgatgacgagtagtatcaggtccaagatggggagggtaccagttagaagaagttagctacatcaacaacaaccagggtggctacaaagggtataacaacttcaagaccaacaactccaacctctcttaccgcagcaccaacgttgctaacccacaggaccaagtgtatctccacagcaacaatgataagcaggtttttacgcctacttatatgatgaatgttgtgttcagttcagttcaattcctctaaaacacaaacatgtcgatgcagttatagagggtgtcaatccagtccactgtattgctagcaatcaagatgtgtacagaaacaactaagtcaagccagattataacgatggtgggtttctactaataatcctaggtcaggattcaaacaagtaaaaatgagaactttagagccctactcaatcactgggtcgagtagaaccaactagtgacaaaattaagaaacttaaatgcaatcaacaggggataaaaataggggatacaaataacaggtaaataaaagtgcaatcatcaggggatacaaataaatctaatagaatttctaaggatggatccattgataagggcaactctagggttcatcaaatggctaataggcgaaagatagatacccatgacgatagattcaaaaatctggtcaatccactgtcgtgatagagacccccataactctaccacttcctaatctcaactgtcgttgatgaaacatagcagagcagggtttaagaaacaatctaccaaagccaataagcagacaagccaatgtcttggtcgagtctacaaatctctggaattcgtagatttgacatccatttgaacgtcttttggacgctaaacgtctatgatcgaatctccacattagccaacgaaaaccgcatatgggccaagcgaacccagaagggttctaacctaatcttaaccacctaacttacctagagattaccctaatctaatccatcctcaagaaccttaatcactactcaagcaacattctcaagaacacaaacccagaaattattaaaatcataccaaaatgtagatctaaacaagttaaacaaatttacttaaacaactaaatgcaaaaacgaaatagattaagagtaattaagttttgaagattcataaacacaaagaaaaactaaaggataaaagatagattctttggacaaaccccaaagtgatcaatttatagtaaaatgttgaaaccctagattcactagaagacaagagacttgaggcggtttgggaggatgctcgatcttggggatcgagtaaagagggtgctgcaaagtctgcgcctttgtgtctatgctccgagtaatcaattggtcgagtagatgttccttcctctcctatatatatgcttagatgtctggttgagtggggaatgaggaggatccaaagacgctttgatagatcaacaagtcttgtagagttggtcacccttggtcgagtaaatgggtcgagtagaggatcaagtaggaggggcgagtagataaatctgctgcttccactgaggctgccttgagcgactaaaggggtcgagttaattgcagtctcctctgtagctgcctggatcgagtaaagaggtcgagtgaattgatgcctcttctgtagctgcttggatcgagtaaatggatcgagtagagtccttttagctccttctgcacctgaaaacacaccaaaacatgcaatgcatatgcaagatgatcctaaatgcctaagaatgcaaaataagctaaaatggt

SEQ ID NO: 22876 - DNA, 2151 bp, Arabidopsis thaliana
ttcagagggtcaatccacaaatccatttccaaactagtcaacctttacacacttgacctttctcatttcaacacccaaggctcaataaactttagcatcttctcggatctcaagttgctcgtggatcttcacttatcccatttgaacacaacaactacaattgacttgaatacattcttatcaagtttcaagtcactagatacattggacctctcaggcaatcatatttcagccataaacaagagttcagtttcaaatcctgtaacgaccgcgtcccgcgttcataaagaggccaggttgttttaggagaaaactataccatggtcaagaaacggactaaaatacttcgtcggaagaacgagaaagttcaagctgaaccagctaggtgagctggacaagctaggatgaactagctagctaagctaggtgagctaaaccagctggaagactagctagctcagctaggtgagctgaccgacagctcgattgagctcagtgagctgatcgggtactgacccagctgggtggtccggtcagctgacactcgagctggtggactgtggtagctcacgggtgaagaggtgtctcggccaaaaggtgtaaggtcgagcgggtaccaacgaacggttgcatcgcccaatagatgcaaggaacggatgtgaccttttggaaggatgcaaggaatggatgtgacctttcggaagggtgcaaggaacggatgtgacctttcggaagggtgcaaggaacagatgtgatgcttcgggaagcatccattcgccccctatataagggaggacgcccaaggcctttgaaataatctcacatcatctcacaacatccaaaacaccataaaacattcttaaaggagtcccaacacatcgtagagttgttggtcggaaagggggtgcggctcggcgagtataattcgaccgaactgatgcgcatgctacctcccggtccaacggttcgatggagtgtagatgatggagagggtagaccgttcgtcttagagacaaatcggatctggtagaccgatcgttggatcggatcggccagaccgatcgtcagacggatcggatcggccagacggatcggatcggccagacggatcggatcggccagacggatcggactgactgatcgtcggacgggtcagatgggacaggccgatcgtctgacagaacgggacggacagaccgatcatcggatgggatggatcgagaaaagtgttcgaggaagcacaaggataagtgcatccgagcacacccaagggtcgcccatagatgcaatcttaccggtaaagggagaaagcaccaagaatgggtaagaaacgtgattcaccatataggatcaacatcgcggccgccttcatgtatctatctcctcagccatggtgaaaccgatcagagatcggtaagatcaaagggtgactcgacggataaccaacgggaaagtccacggtgggaaccgatggacaaaacggatgttggacccacgagcaaacctaaggccgacggaagaaagatttcatgggctagcctacgatgatccagtggatgaatccacggacccttgggtgtgataaggatatcgttcggaccgcatggatggatcattaagccgaaagctttatcgaccaccatggaccggacgggtaaacggttagtaaaccgtgggcggtcgtagtgttaaacgaccggaacggaaacatggatggttcgataagccgagggctcaatcgtccaccatgtagccggaggggcgtacgtttggagaacgaatggaccaataagccaagagcttgatttggccatcgtgaaccaagggaatcgtacgatctccaatctctatcgttgtacttagaccagtggggttggttggttgtatggctaagtaacgatagggattggttcatcaattcacgactgatgacgagtcgttgaacgaatggagtaaggcgacaaacgggttaaggaatcaaatccgtatattggccaaggtatgtaacgatctagcttattagttaagatagacgtttggtaattgaccgtgaaagtaggataaaggaatatgcgattgtttggcttagaatgattagcgaacatatgcatgtcttgaccgagtaaaggatccatctaagtctaagggaca

SEQ ID NO: 22877 - DNA, 2690 bp, Arabidopsis thaliana
atgtaaatctcatatatatcaaatattacttccaaatggtataacaaattatgaatgagaaggaattacataaaatattattttaaatagtataagatcataggaaagtaaattattcctaactttctccttcgtagtcttcagtcttcactaataaattaattgccaaaatcttatttgtcaaagttctattatgtattaattaaattaccaatttcatgctccaaggcacaatatataagcatccaaaccaccacatacagatatcataacgtgttttataaactctaaaccataaataatcctcatatccaaatatttcaagctaaagacatggccgcatcaaaaactacaatcttcatcgttttcgttctttgtctttcatgttagcttctctctctctctctatatatatattgattaaatcaatctaagagactaaataaaatgtggtatatgtttgcattttataggcacgctgttggtgaatatatctggaattcaagccactagctcgacattaaaagagagtctaacagctgagattaagccgacgaaggtggatcggtgcaagacggatcgtcgattgtccccaatctcatcgatgccaaaaagacttttattatggttgcgttgttggagaatgtatttgtagagctgtttgaggaagcgttggaacacctaatcgcaatctagatgattgtaggcgatttaaacgttcatatatgctataagaaatgaaatattgtgatttataaataagaaattctaatattttaaaatagaatcaaagctcaaacaaacaaaatatataaagaataatttgaaataccaaaagtaaaacatcaaaaaaaatatcataaagagaattttagacaaaagatccatgaaaaatcaataatattaaatcataaatcaataatgttttacggtcttaattaaatcattcaattggggaccatatattacgtgttatggttttgtgaagatgaaaccttgatgatcaagctactagtcccatcaagatgatgactcattgggtttaaatgttttactgaggtgaatgtaaatgagaccatgatgaaactgcttttgggaccacagataggggaaacggctacattgacagcaaggagtccgtactcgttcgtcctctggtgctcccaattggttaaagcagtctttgtcttgatttggtgatggcgactcctatgagctgtgctcagcgacaaagtgaaaggagcggctgctttaggtcattgcataggttacctcttgttgctatataagaggcttgttaggtttgagagagtgtagagtgagattgagtgatatagactaaggagagaatacttgtaataagcttaaacttttcttgtattctctaaggctagaaacacatagagtgaacatcaagtgctagtgaagggcattggtgtgcgtcacttattgtttctaggtgtaagttctatattgaacctagtggattccgagtatcatactcgacccagacgtagctacttcggtggtgaactgggttaacaaactctctgtgttcttcttgttatctcacacacaaaaacactcacctattgatctgttttctctgtctctcattcaagctcttatccgtcctttctgttcttggttttgtggggcttactctcaagttaagtcgacagcttgaggtcaagaaatccttacagagtggtatcagagccataggttcattgttctgtggatctctaaagattcaaagatcctgaactatgtctgcagcaagaatagaggttgaaaagtttgatggtcgtggggattacacgatgtggaaagagaagctcatggcgcatctagacattctaggcctgagtgtggctcttaaggaagaagacgatttggtggagaaagttgcagagatgcagcttactgaagaagaagagaaggaagaggtactgagacgagagctcttggaagaaaaaaggagaaaggcgagaagcgccattgtgctgagtgttactgatagagtcttgaggaagattaagaaggagcagtctgcagctgctatgctaggcgtgcttgacaaactgtacatgtctaaggcgctaccaaacagaatctaccaaaaacagaagctttacagcttcaagatgtcagaaaacctcagcatagaaggtaatatagatgagttcttgcgtattatagctgatttagagaacacgaacgtgttagtttctgatgaagaccaagctatattactactcatgtcattacctaagccgtttgatcaacttagagatactctgaagtatgggttaggaagagtcactttatcgttagatgaggttgtagcagctatctactctaaggaactagagttagggtctaacaagaagagtattaagggtcaggctgaaggtctctttgtcaaggaaaagactgagacaagaggaaggactgaacagcgaggcaacaacaacaacaacaagaagtctagatccaaatctagatctaagaagggttgttggatttgcggtgaagagggacactgtaacgaatcgtcccgcgttcataaagaggccaggttgttttaggagaaaactagaccatggtcaagaaacggactaaaatacttagtcggaagaacgagaaagttcaagctgaaccagctaggtgagctagacaagctagga

SEQ ID NO: 22878 - DNA, 3333 bp, Arabidopsis thaliana
ttagtagttgtattggaaactaggatatcctcaagtctgttggtttgccatctagatattccaatagtcggattgagttgaacctgcagcactcatcaatcatgcaataatcaagagaaatatagatcatgattcctaactaaactaaaaaaaaacattttttttttaattagaaataataagagaaaatgactcaataaactcaaaaactaaaactaataagaatcaaaaataaaagcaatattagtaaaaaccttccccagacttaaacgacactatccccagtggcattcaaatctgaagaaggtgggaaaaagaaataaaaataaaagaaaataaaagaaaaggaaagaaaaaatcaaaccagtggattgcctcccactaagcgcttgttttgagtcaatagcttgactttgcggagttcaagatgtgggtaggatggtggaatatttctgctgcctcctcgccttccaaggcagtgtgaaaactgatctggtcgggcagctgcaggtgtcgatcgacactcattgtggtgtcgatcgacactctcctcgttttctgcaagaacaacaggggaaacaagctttcgagaaactttaggcttgttaacatgtgaagcagacttcgaagaatctaaggaattatcgaaggtaaagcaggagaagagatagaagagaacttatcacagagggccgcaagaggtgtgggctaaaggcaatgtgcagaatcctttgttttgtgaatcccgagggtgtcgatcgacatgagggatggtatggatcgacatcgtgctctgcaactctcattggcgagctgagctggtgggagcgttatgtgtggctctgtctggggattctaaggggtctgaggatgtgtgtctatgctagaggcaatactactaatagtctaagtaaactctgaaccatccatgccaaactctgtctccaaatcacaaactttaagagagatcctacctcccttcacatcaatcctaccaccagctgtagctatgaatgctcttccaagaataagaggatccttgggttccttcttatagtccaggaccacaaaattagcagggattagggagttatcaaccttaacatgaatatcttcaagaattccttcagggattcgtttggaacgatccgcgaagagaagagtgatgcgagtaggtctgtactgagtcatgcctagtctctcaacaacagacttggacatgaggttgatgcttgatcccaaatcacacaaagagcggctgaatctgcttgtggagatagagcaatcaaggacaaagctacctggatccggaagtttctcagtggtcagaccaggagtaatggtgcggatgtactcagctatatctactctctgtgccttctccttcttggccttaggcagcatgattgcacagatgtctctggtaagcagcttagcttcatctgaactaattccattgtcaacaagttgcttgacatacctgttgagtgatgcggaagatgtctctgaagcatccgtaggaagaatatggaggatcttctccattatggttgtgcacttagcaacatgaatctcctgcttagaacgacgcctcctcggataggggacatgaggagtgtaaacccggctcgagctgcataggtacttgcacctcacaaggtgcagtccggatccagtgtcgatcgatactagagggatatcgatcgacaccgtcgtattgtgtcatctctgaaaagagcatcccatatggtgtcgatcgatacatgagggtgtcggtcgacaccatctctgcaactgcgagctccaactcgtcttcagtgtccaattcctcccacacatcatctccttctctgatcaagatggcattacagctcttccttgggttagcatcaggattaccaggaagaaaaccctcttgtctcttgatagattgtgtagtttgagctacctgtacatctagcttcttcaagtgagagcttagattgtcgatcttcccattaagatctatgtagacagcatcaaacttgccattaaactccacaacaagctttgtttggctctccagaatctgctcaagcatcgattccattcttgtctctgatgagggtggaggggggggggcttagtaagttgaatttccataggtcctttgaaagttgttttgaggaaaagtcttctggaaaggaggctttggagtgtagttggaggaaccctggttccatgtaaacctgttgccactgaagttgccttgtggctgcccaaacttcctgtattcatgaccatctatgtagaagactccttcctctgactcaggctcaggctcaataatctcttcctcagctgcaaagtggacatgcttctttcctgtgagcaagttatgaaccgaatccagcttagcattcacctctgctatctgatttcctgaaatagctccagcaatcttcttcctctcaaaatcagcattcttggtactgttgctgcaagcaaggttctctatcagggctgtagcatcagctgggtaacgtgtattgaagttaccattgctcgctgcatctagagccatctggtatctccaatcaactcctctgaagaaggtacctagaagttgtactcactgaaaccatgatgtggacaatctcgttggtactccttgaaacgaacctaagcagccttgaaagcttcagttggaccttgtgtgaaggtagacagcttgtttctcaactcctcatacttagcaccatcgtagaaattgttcaagaaggctatattgatgcttctccaagtcttgagggaacctactttaagttgtttcagccaagaagctgcttccccagtaagtgaataatggaagagcttgcacagtaggtagtcctctaagactccattagccttgatacttagaacaaggtcctcaaatcgctcgatatgatccattggctgctcatgagataagccatggaaaggatgttggccaactaaagcaaagtagccaggcttcagctcatagtcgttcctctggaatggtgggggtacaattgctgatcgattagcatagaacaggtctggcctgttgaaatccccaagagtacgacgtggttccgctgctggaggaatagctgcaggaatctggtgttggtgttgatcgacacctctgttgtgtcattcaataccgattgcatccgcgttctgctcccgaaggtgtcgatcgacaccgagccctgctgcatctctagcagctaattgtgcattgtggcgcgcatgatcctcattggcgtcctcaggtatgatgagtccatgatcatccaatctctgagcagcctcattgtaggcttg

SEQ ID NO: 22879 - DNA, 3028 bp, Arabidopsis thaliana
atgtaatatatatgaatatagtcatggaaatctgtatataacgattaccagaagatctacatctgaaactcttgcagacacattagatggaacttcttccatctcggtgtcaacagtagcttcttccacaggcctctcttcctatgtaacatagacagtcccagacattgaacctaagaagacactcttaccaacaacaatatttcctctatcctgaaacatagtttaactaacttcttaagcgaatatgtacgtacaccatttaaacagattgttaagagtattagtagacgacataccagatgggattgtgtggatccagcataaggaactattaaaaatccagtgtctaatatctcttcttcagcggccgaagaatccaatccatcatttgcagtaaaatcactttcattattagcgccatactgtatcgaagcagacagtacagttatacatatggattataaaatatttagcaatgtacgtacatgacttacctgttcatcaatgaatccttgcatatcttccttattggaatcaggtagctcagtagtgtcaacagcaaaagaaacatttttcttcggctttgaaggttttcttcttccgccgacagcagtggtatgtactccagggacatccaaatcttcctctttggaattacagccaacagaaagtgcaggagtgtccacatcatgagaaacacgagtcagccttgaagactttctcgttccagtgcttccttttgtagacatccttctcgatggcttcttcccagtaaccggtgccttatccatagaagtaggtggttcccgcgaatcatgggaaggtatggtttgttctgtccttttgccttttggatcaggggcagcacgtatctggtcacggacaaagtctttcatatcttcatgcatttgatacatttggtcttccagctccttgaaagacctcctcatttcaacaataaacctctcaggcacaggctctccaaaacaatcctcagcattctcttctttatcacagtccatttcagatttctgtattttcatagcaggttctttagggctcaggcccggtgcatttcgttttctcttaacatctacaatataccagttgctgctattaattggttttcttctgggtgcaataccaaaaaaatttgtaaacaacctttatacttatacttacctgtctcttctagttgtggtgggcgcacctgctttggtactctagcatagcctccaacccagtcatcctcttgccactggtgcccatctatcaacagtgcctcaatgtaatcaacccttggatcatcaacttcatcatcccatgaaagagatggaggacaaacattatcagctggtttcacaatatagttgacctcaacctacacaaataagtatgttaaccatagataatgtacatttacttattatgtacgtacatacacaatttaacacacctcatcagcagcctcacactccaaaatgcgagatgtccggattgctcgcagagaggcaagacgatggatagacctctcagcaaatgtcctgttaggtacatcatcaggtcctagcttagcaattgatgggattgtttcgaaagctaaaagctggagagctaatgggaagccatggagtgcataagaccctacaagtaaaccccttattagttgttgagcatcgtaaggagtttggaaatttgctatcctccccaaagtacgggtaaaggacacccttccccatgggtatttgcagaagaactccaggttcttagtcatctcgacagtcttcgaagtaggcctgttggggttactgtgggccgctaccacaccgtcaaccaaaataataagagatagtgccagttgcttccacccctccatgctttcctcctcctgcagccagctcaccaaatcagcaattgttggaaccgtgttcccaaacctctcatcaaacagagtcttccaaacactctcacactcaggtttcacactgataacatcatcaacgtctttcttcttgagatacttcccacattccagcctagttaggatactaaattctcttaatccaaatctgattggatgaccgccgaatacaatccacatctcattcaccttctttgtcactaactgacggcatattagtccaaggacaagcttagcattgaaagatgccttgtttttgggtattttaaaaagttccccaaatggagaatcgagaagaaactgcatctctggtttcccctttagtacatttgctatgtcagaaatgtactccggtttagagtacgcgttcatcttcgtctcggaaggataccggtctagagcaaagagtcttggtggtaactcttcaactgtaagatcttcagtcggagcaacacttggactacctgcaattaaaagtcatatactgttaagcaaaccgaagtagtgtatgtacacagacattttccagattataactcaaaatcatatttttggcggaaacagagatttccaattctacttctcaatttttcatcctaaagatatgctaaattccgacaaattctaaccctttaatcaaacaagctttacaattctgatacacccaaagacaacaaacggtaaattagagattctaacccagttcctccgttgcctttgtcgaagagcgttttctccgcggggaaactcttaatacccgcttctccttccctggaccatgctgcttcctcgggacttcgtcgttagctttattcccagccatagctaaagatgctatctcgctggaggttcaaattttgccggaataaacagtaactttctcttcgttcgccgggaaaaacagtaactttcacttccccggatgtgggagttcagtggctcaattcaactacccaacaattcgaagttatgtcgaattttgaagcaatggatactgaatttcgtttcgctttttgattctctctcaaatctctccgttattctctttttcgttttcgtcggtttcttcgtttcagttttttttttttgtctttttcaaaactg

SEQ ID NO: 22880 - DNA, 2840 bp, Arabidopsis thaliana
tcctattttctggaaaatttacgtaaatttccaacatctctacctaggtcatttgacctgatacaacatccggaatcttaccaagtaataacatttaacctcgagagacgagctcgtgtaaagttgggaattcgttaaggagttgttgctttgttagtgtagaaacacttgtgtagaattggggattgtctttttttggagtgatttaggggagggtcgaatcttagcgacaaagggctgaatctcagtggatcgtggcagcaaggccactctgccacttacaataccccgtcgcgtatttaagtcgtctgcaaaggattctacccgccgctctataacgaccacgtcccgcgttcataaagaggccaggttgttttaggagaaaactagaccatggtcaagaaacggaataaaatacttagtcagaagaacgagaaagttcaaagctgaaccagctaggtgagctggacaagcaagctaagctaggtgagctaaaccgacagctcgactgagctcggtgagctgatcgtgtactgacccagctgggtggtccggtcagctgacactcaagctggtggactgtggtagctcacgggtgaagaggtgtctcggccaaaaggtgtaaggtcgagcgggtaccaacgaacggttgcatcgcctaatagatgcaaggaacggatgtgaccttttggaaggatgcaaggaacggatgtgacctttcggaagggtgcaaggaacggatgtgatgcttcgggaagcatccattcgccccctatataagggaggacgcccaaggcctttggaataatctcacatcatctcacaatatccaaaacaccataaaacattcttaaaagagtcccaacacatcatgaagttgttggtcggaaagggggtgcggctcggcgattataactcgaccgaactgatgcgcatactacctcccggtccaacggttcgatggagtgtagaggatggagagggtagaccgttcgtcttagagacgaatcggatctggtagaccgatcgttggatcggatcggccagaccgatcgtcagacggatcggatcggccagacggatcggacagaccgatcgtcggacgggtcggatgggacaggccgatcgtctgacggaacgggtcggacagaccgatcgtcggatgggatggatcgagaaaagtgttcgaggaagcacaaggataagtgcatccgaacacacccaagggtcgcccatggatgcaatcttaccgataaagggagaaagcaccaagaatgggtaaggaacgtgattcaccataaaggctcaacatcgcggccgccttcatgtatctatctcctcagccatggtgaaaccgatcagagatcggtaagaccaaagggtgactcgacggataaccaacgggaaagtccacggtgggaaccgatggacaaaacggatgttggacccgcgagcaaacctaaggccgacggaagaaagatttcatgggctagcctacgatgatccagtggatgaatccacggacccttgggtgtgataaggatgtcgttcggaccgcatggatggatcattaacccgaaagctttatcgaccaccatggaccggacgggtaaacggttagtaaaccgtgggcggtcttagtgttaaacgaccggaacggaaacatggatggttcgataagccgagggctcaatcgtccacaatgtagccggaggggcgtacgtttggagaacaaatggaccaataagccaagagcttgattcggccatcgtgaaccaagggaatcgtacgatccccaatctctatcgttgtacttagaccagtggggttggttggttgtatggctaagtaacgatagagattggttcatcaattcacgaccgatgatgagttgttgaacgaattgagtaaggcgacaaacgggctaaggaatcaaatccgcatattggccaaggtatgtaacgatctagcttattagttaagatagacgtttggtaattgaccgtgaaagtaggataaaggaatatgcgattgtttggcttagaatggttagcgaacatatgcatgtcttgaccgagtaaaggatcgatctaagtctaagggacaaagacgatgaaactggtacaagagttggttagaattaaaccaaggttagaaagacttccgctgtgtaataagagagcgattatagaatttagcctcgtaaaggcaattctatgttgaatcgcgaaaaattaagaggttcggacgggaagaggcgcgaacttgatatcacaagttgacggggtctcacaagttggtattagagcatgccttatcctaggatggataggtgctcgggaaaacgtcatagtaagggtttggcgtctatgagtacaacttgtccggctcacctagctggttcagctttgaactttctagttcttctgactaagtattttagtccgtttcttgaccatggtctagttttctcctaaaacaacctggcctctttatgaacgcgggacgcggtcgttacactaagctcttactgagggtcggcaatcgggcggcgggcgcatgcgtcgcttctagcccggattctgacttagaggcgttcagtcataatccagcgcacggtagcttcgcgccactggcttttcaaccaagcgcgatgaccaattgtgcgaatcaacggttcatcaagccagatctacagaagaatttcattctgtaaaactgaaaaactacaccccatcaaatagccacaccgcgtcatacaccacatctggtaaccctggtaaccaccattctcctttcttttcgtatgttcttgattactttaaaaacctcatacatga

SEQ ID NO: 22881 - DNA, 572 bp, Arabidopsis thaliana columbia
caatggtaagctctctttgtgggattctcagaaaaaaataatatattttttttattatttatttcataaaattgaaaaagattttaatttataaaatattaaacatacaatatattcatacatttaaaataaatttgcaaaaaaaataaaaatgattagttatcctgttgattgttgcgaaattttctccatatatgctcaaccaaatcactttttcattgttgatgcatattttgatcacgaagttgatttcgcatgcccatcatattctcgatatttagaggcatacctgtagaatacgataaatcgacttgtggagtttggtttccttcaacttgtaggaattctgaaacatcaaactgaatgttgtacccatctcgttcgtcttcgactatcatattgtgcagtatgatacatgctttcataatatttccaattttttccttatcccaaacaagagctggatttttaataatgtgaaagcgagcttgcaatactccaaatgcacgttcgacatctttacggtccgcttcttgatgtgttgcaaataaagtggctttccgattttgtgg

SEQ ID NO: 22882 - DNA, 409 bp, Arabidopsis thaliana columbia
tagtaacctgcgccagtgtgctttaaagatattcgccccacctaaccagtttgcaccaaccgcataggcctcaccgacactatatggggtgacggtcataaatgctgcaacggataacaacccagccgccagcgcatcgactttacgctcttctgccagcgccatgccaataaagaacggtgccattaaagacattattcctaatgttccgttatatacgttgccgccaatacctttcagaccattaagtgtttcaatggttgaggcgtcgaggcgaatacctaaggaataacaaaacgacccctccccaaagcttagaaaaacgttgttaattaatacaaacatggcccccgcaaggtgtaacggcattatgcgagtaaagccactttgtgactgcattaacgtgtgg

SEQ ID NO: 22883 - DNA, 403 bp, Arabidopsis thaliana columbia
tcgactttcctttcccttggaaatgcttcgtgacgttattgttgaagggttgtgatccgaattttttaggtccttggttatccgtgggctcaaatttctttgtagggaatgtgacagtagggttcgcttgcttattccttttcgaaagatctcttttttatcttctacttccatccagttgttagcacgaaaaagcgcatcttggattgtatccggcttgtgaagtattagatcctctttaaaccttgaatcgtgccacaaacctttccaaagggcggacaatgctgattgttgtgatactcttgggagctttgaaagcacacccttgaatttagtaaggaaagctcggatggattcatttggtccttgtgatatattacacaggtcggtgtccgaagtgctt

SEQ ID NO: 22884 - DNA, 466 bp, Arabidopsis thaliana columbia
  unsure (1)..(466): unsure at all n locations
gaggatcccctttgctactgttacttgttagatacttcttgttcttgcattcaggttatacaatgatatgagagaatattttgacaaaagaaaatgggctatataatggttcaagagtctggttgtgttctgtttcattgagctaattagtttcaagatgaatactctgcttcattctacattatacttgggagatatatgactttgatcttgtaggtatgagttgtgaattacttccatgaatgctcattattaatgtattaccatgtacaagcaatgactcaaagagtggcaacaacaaattcctcaaaagaacttgacttggggactgtgagcaaaatatcacaccactcaactttcccatacgtaggaagccaacgagactgaggcggaaaactacgacttgtaccgacaccattagattccttgttgtgcgactcttactagactanaacgggaagtgaac

SEQ ID NO: 22885 - DNA, 543 bp, Arabidopsis thaliana columbia
cgaaaacgaattctgttcggtaagaagcagtttttcggaatgttgcatgagtgatatcagcatagaaggatacatgacagcgaaaactgagttctcaaggagttcaagcttgaaaggtttagagctggagaatcaatggaagatgcattacgttaatgaaattaagaaaggatcagtgattcaagagttctgtcattgccaaggatggccatttggattgggacgaaaagctgcgttgcttccaccgcttccaaagtcacctgcagagtcatggtcttggaggaagcctacaagagttactccagttccttttgtttgacaaaaaggtagctcaaaatattgaatcattataaacaaaagatctctcataaaaggaaacagtaacaaatgaacacaaattcatgtgagtttatttttcaattggtgttaagctctaaattttaaagcttcatttggaggaaacaatgaacagactcacctgatatgtcttttggtcagattgacctttattatgtgctaagacaaaataacgcaataacaaca

SEQ ID NO: 22886 - DNA, 454 bp, Arabidopsis thaliana columbia
gaagatcagctggaagtttctgtggtgttctctctatctacttgatctaatctttgttttgtgtttctgttatgaactttagatgtagagagaaacaaaggaaagaggcttcacggcttcaagctgtgaatcggaagttgacggcaatgaacaagctcttgatggaggagaatgacaggttgcagaagcaagtgtcacagctggtccatgaaaacagctacttccgtcaacatactccaaatgtgaggattctactcctgcaatatcttcatttttctgatcttaataatcactagaatgttttctttaagaataataatatccttttaatggtatgtgtatcgatttgtctttttttttcagccttcactcccagctaaagacacaagctgtgaatcggtggtgacgagtggtcagcaccaattggcatctcaaaatcctcagagagatgcta

SEQ ID NO: 22887 - DNA, 447 bp, Arabidopsis thaliana columbia
taagatagtaataatcatactatttgataagtccataaccaccggtctaatcagcgatagccagttcatgtcgttctcaaatatccagtgacaaacttcgatccgacccggttttgacccgagagctaagaaagctccatgactcggaccccatgatgacgtgtccatgtgacagatggcaatcccgtggttaatcttcttcttactattcaactctagaagatcagcttcgtatacccgaacctttggtacggagtggcagtaatacaatagatacgggtacaaactctgatgacacgacacagctttcgttaatttcccaccgttgattccgttgactttcccgatcactaccttttcctttgacccggctacgttctcggttgttctaagcaccacgctacgacctaacaccgacgtcgcgaaatcgatcatatcctccgctga

SEQ ID NO: 22888 - DNA, 386 bp, Arabidopsis thaliana columbia
tagtaactgctctaaagatttgaatttcgccaccgttcaggcgacgcatcaaacgttccagtgcgggaagatcataaacatcttgcagacattcgcgtagggtttcgagaatgaccggaaaatccggatatccctgagcgatttccagcaactgactggcgcgcagcgtatgttgccacagcggggtgcgatggcccggagtgcgccccggcattaataatgcccgcgcggcgcattcgcgaaaacgggcggcgaaaagtgccgagctgcctacctgctcgctgacaatttgcagcaacttttctggttcaaacaaaaaaatcgcggcatcgggcaatttaccatcggtgtcaggaatacgtgcatcaatgccgtcatcactggcg

SEQ ID NO: 22889 - DNA, 568 bp, Arabidopsis thaliana columbia
cagtgtgctctaaaggggcgctcgcccgaatgccgcttggctgaactttgtcgttagctcgaaagcgcgcgccaaaattcgtcagttgctgaaaaacctcaagcgtgatgattctgtaagcctgggccgtcgtctgctcaaccatgctttgggtggtagccgtaagctgaatgaaatcccgcaggaaaatattcagcgcgactggagtcgcatgaagctggcaacgcttgacgatctgctggcagaaatcggacttggtaacgcaatgagcgtggtggtcgcgaaaaatctgcaacatggggacgcctccattccaccggcaacccaaagccacggacatctgcccattaaaggtgccgatggcgtgctgatcacctttgcgaaatgctgccgccctattcctggcgacccgattatcgcccacgtcagccccggtaaaggtctggtgatccaccatgaatcctgccgtaatatccgtggctaccagaaagagccagagaagtttatggctgtggaatgggataaagagacggcgcaggagtttcatcacgaaatcaaggtggagatg

SEQ ID NO: 22890 - DNA, 549 bp, Arabidopsis thaliana columbia
ggaaactcaatgtctcttctccggcgacgattcgtgaaacaatcagttaattgcataacattccttcaaatcctcgccgagcgatccttctccaccgtgaagattcctccaggtcgtcgcaaaaccaccgaattcgacaaacttatcaacgaagctggcagctccggcgatttcgagaccgtacgccgtctcctaaacaaccgtatagttctcggatctttcaacacgagcgacacattcaaattcctcaccaacaccgcttcatactcctcctatttagaagatctccgccgcgttttgcctcagatcgacggcggtttctcgcggaaaaacgcttacgacattttaatctctcgtctctgtaagctcggacgcatcgacgacgctttaatcgttatcggagacatgtctaacgggagattaggcttaacgccgtcgacatatcacccgatcttgtgctcgctcacgaggaagtacaaaatcgaagaagcttggagagttgttgcatcgatgagatcaaatcggtatcgatggatgtgacggcgtcaa

SEQ ID NO: 22891 - DNA, 686 bp, Arabidopsis thaliana
ctaaagctgatgcgcacccaccttcgcaaaaagtttgcgtactggtgatatcgaagccgtattccatgccagctttctgtaataacaagaaatcgccttcacgaccagcgccaaagcggaaatcatcacctacggcaagaaattttacgcgcaaatgcttcaccagaagatcgctgatgaaattttgcgcggttaacgccgcgaaacgcctgtcgaaacgcacgcacagcacgtaatcaacgccacactctgcaaggtaacgcagtttttcccgcagccgggtcagtcttgccggggctttatcggtagcaaacagttccagtggttgaggttcaaaaagcatcaccatcaccggtaagttgcgcttgcgccttcttcctgcaagccctgtaacagcgcgcgatgaccgcgatgcacgccgtcgaaattaccaatagtcagcacacacccttcttgcggggcctggctgagattatgtatgccgcgtatcagcttcatgtctggctcaaaacagtgaaaatcgtccgagtataccttgtacagcggtcaaggttaaccggcgattgagtaccgaaatcagaaagaagtggcttttcattgccatggcgcaaatcacgggaagaaactgaccgcctgctgcaatttttatcgcggaaaagctgtattcacacccgcaagctggtaga

SEQ ID NO: 22892 - DNA, 502 bp, Arabidopsis thaliana columbia
ggctttcctgttatcttcattcctctgctcttctcttacattacccggcgcagaagcaacaatgtgggtgatagtacaagtttctttcttatcaaaccgcgtcttcttatcgccgctgttattgtaggcattctctcagggtttgataactacttgtatgcatatggtatagcttatcttccagtttctacagctgctcttatcattgcttcacagttagcttttatagctatcttctcattcttcatggttaaacataagttcactccttttaccatcaatgctgttgtgttgttgactgttggtgctgcggttttgggaatgcataccgaaactgataagccagttcatgagactcacaagcagtacataactggtttcttgattactgtagcagcagctgttatgtatgctttcatcttgccattagtggaacttgcttaccagaaagctaagcaaaccatgagctatacccttgtgctcgagttccagttgattttgt

SEQ ID NO: 22893 - DNA, 526 bp, Arabidopsis thaliana columbia
cccgtgttagatactttgagttttacctttctctacgatcttgccttgatgaatcacagcaatcatgtctgcatttctcaccgtactcaatctgtgagcgacaacgacggttgttcggttaaccatgatcctgtcaagagcttcttgaacaatcctctcagactctgcatcaagtgcgcttgttgcttcatctaaaagcaagattcttggatctttcagaatcgctctagctactgcaatcctctgtttttgcccacctgaaagctgagttccgtgttctccaaccatcgtgtctaaaccctgcaatgtacagttagttaattcagttacatttacaagcttcatcaaaatgacagcagagacacaaaaataacagaggagaggtgaatttaatctcaacctgaggaagcttgtcaatgaatttagacgcgtttgcgagctctgtggccttacgaatctctgcgactgttgcatattctttcccgtaggcgatgttttcctttatgcttgaagtgaacagaaccgg

SEQ ID NO: 22894 - DNA, 434 bp, Arabidopsis thaliana columbia
aaccttcgagattgccactctttttcagggtgaatactcacagcctttcctcaaaccacctcacttagaacaaccaatctccactcttgtcctctctgaatcaacaatggcctatggacgcattctctcaagtgacaacgaaggcaacttcagaggacctttgacactctctctcaaacaagggtaaaaataatatcaaaaacctctttctttaactccaagaaaaaggtcggtttcgcttcattaacattgtttgacctgatctttatagatctttgttggtgatgagagggaacagtgcagacatggcaagacatgtaatgtgtccatcacaaaacaaaagagtaagcatcacattctttcgtattcgacctgacacatatcataaccattcacaaccaacagtcctcgcaacgacggtgtcatgacaatgt

SEQ ID NO: 22895 - DNA, 829 bp, Arabidopsis thaliana
cgactctggccgccagtgtgatttgaagcaaaaaccaataaaattggtcgcttcgcaaaaactgagatctgagttcttccttcggtggaaagagcaaattttacttttaagaaatttgaaaacaaagtttcattaaacagattggtgggattttaaatttgaattttgatcagtgaatcaacgataaacgattcgtcgttatggaaggagttggtgcacggttaggtaggtcctcgacacggtacggaccggcaacggttttcaccggaccggtgaggaagtggaagaagaagtgggtacacgtctctccttcctctaagaaagacaataataatagctcctccggttccgccgctgctgcagcttccgtcgttaacggtggttcgaattctgacggtagtaatggatcgcatttgttgctgtataagtgggcaccattgtctcagaatggtaacggcaatgaagatggtaaaagtgagagtaattctccgagcgaggatacggtggcaacggtggcagaagatcctccacggcggagattcaaatacgttccggttagtttttggtttttggttcaatgttcttgttgcattggattgagctataaggtttttgctagaagtttgattaggtgattgttacagtgattagggatttaatcaccgtattaatattgacaaaaaaagggtcagttttgagcattgttgaaggagtgcttatgtctctgttttgccattttgattccttggagtaactggactggattagtgtttttagtagctgtgatttgggaatgatttgtaagatggaatcataaggtttatcactg

SEQ ID NO: 22896 - DNA, 592 bp, Arabidopsis thaliana columbia
  unsure (1)..(592): unsure at all n locations
cccttaccgaaaagatgacgtggagaccggccgtgaagcggntgagagatctctgtatccgactatgcttgagagccccgaactccgatggggtttcatcagaaaggtatattccataatcgcattccagcttttagcaaccatcgccgtcgcctccacggtggtttttgtccgtccgatcgccgtgttcttcgccactactagtgccggtctcgctctctggattgtcttaatcatcacgcctcttataggtaaccaaattatcaatcattaattcgatgattatttgatttaggtttttggtttaatttgttattgttttgctgttgcagtaatgtgtcctttgtactattaccaccagaaacatccagtgaattatttgcttctagggattttcacggtagctttggctttcgccgtcggattaacatgtgctttcaccagcggtaaggctttccttgtgaaacactctagttctctttattcgtttctgtcctttcaagggtcggtcttattaattgcttgaaacacacgcttaagatataatataaaattagtctgtgagactccaacacatttgagctgggtttga

SEQ ID NO: 22897 - DNA, 544 bp, Arabidopsis thaliana columbia
tgtcacttttacctcttaaggtgacagatatagaagtgatgaaagaagccaaaccagacttttatatgacacacattctccctatactactcaagaacagagtaatccattttgtcggattcggaaaccgcttagcctttgatccattaccgtttgagttacaggtagacattttttttactctacgcgcttctatatatctctgattatagcttctttatctaaacctttttggaagtagaggcttcggtgcagatgtaactttcatgcgctaaactttgtcccgaggatacaagaaactgcggcattgctcgtgaagagattacggggcagtggatcttacgttgcaccacttgatctacatctcctcggtccaaaatatgcttccttaatcttggacaataagtctgattctccggtgcaggaggaggcggcttcttcttcttcttctaagtaccttgctctccatttacggtttgaaatcgacatggtggctcattctctatgttacttcggaggaggtgaacagaacagaaagagttgg

SEQ ID NO: 22898 - DNA, 354 bp, Arabidopsis thaliana
gatatgtcagagaaagtattgtttggatttgttggctaattctggtctattaggatgcaagcctaaatcagtgcctatggatccgaaggtggttcttacgaaggatttaggtactttacttgaagatggaagaccttacagagaattgattgggaggttactgtatctttgtgttacaagaccggacattacatttgcagtccataatctcagtcaattcttatcttgcccaacgaatgttcagttgcatgcggcacatcaggttttgaaatacctacagaacaatccaggtcaaggtttgttttcctctgcaggaacagaattgtactctaatggcgtttgctgatgccgatt

SEQ ID NO: 22899 - DNA, 478 bp, Arabidopsis thaliana
ctgaaattatattttatatgcataaacatgatcaagagcggaaagatgaaagaacttcatcgttccaggctaccaaagcggataagaaaaatacaatatgttggtttatatgcacttacatagtcgccataaccgtaatataaaacacaagatgaccgctggccatccctgccagcacgaccgcattccttgattacaaataatatagcttatgtgagtttctagacgagataacagtatctagccttatgtggaatcagtttaataagatttacatgattgattgtataattaaaaatacctgatgatagccttctatagactttgggagcgagtgatgaataacaaagcggacatcaggcttgttgattcctgaaatgtgcaatgttaatgggcagcaacattttcaatggatctaaacaacattagcaaaaaccagtacccattccaaatgccacagtagcacatattatattga

SEQ ID NO: 22900 - DNA, 517 bp, Arabidopsis thaliana
ttaaattttattattaaaaaaaaaaatcctctttaaggaataaaagaaagaaaacctcaaatcacactaattgacacgtgaacaatcccttcgaatctcaccagcattaccagtcaaaacaccaacccgacctaacttcgtgatcgctgtgatgaaagcttgtctaaaagctccttcactattggcaaacgaattaactgtagatcttgaccgttgatctgtgaacaagatttgatctgacgtgaacaaaccctttccttgttggagattcttgaaataagcattatcgaaagtacgtggactggtcggatccatgttgattgcgattcttacgtcgacaccgatcgggcacatttgcttaagctgaaccacgtatccacggtttatactcgggtcgatacgtgttgtagggctaaaattgtatattctctttgacattttccacaatgtgcaaatcctatagtgtgtgccctgaattataacgcacaataacattaatactatccataagaatttg

SEQ ID NO: 22901 - DNA, 2426 bp, Arabidopsis thaliana
gcatcagctggtaacgtgtattgaagttaccattgcttgctgcatctagagccatctagtatctccaactgactcctctgaagaaggtacctagaagttgtacctcactgaaaccatgatgtgggcgttttcgttggtactctgaagaaaggtgatctatatgctaagtctgtgaaagtctctcgaagaattagaaggtttcaagtcgagctaaggagatcgcgacacgtggcttaatcgtggtcgttcatctctgacagaagattcttatctctaactcgtcttcttcgttttctgttttaagtaacttcgtttttcctcttctcattatcacgattcagagtgttaaattgagaggttttgagagagagagagaacagaataattgtagagagagagagctctgttttgagctaagaagtttagtggattccagagatatctccggcgagacgtaggattccaaattggaatccgaactcgtaaaattctcttgtgtccgttcttacttttctcattgttttgtatcgaacgagtgagaaagatagagagatcgaacggtgttcttgaggatcaaaagctcacatactccttggaacaaacccaagcagccttgaaagcttcagctggaccttgtgtgaaggtagacagcttgtttctcaactcctcagacttagcatcatcgtagaagttgttcaagaaggctatcttgatgcttctccaagtcttgagggaacctgctttaagttgtttcaaccaagaagttgtttccccagcaagtgaataagggaaaagcttgcagagtaggtagtcttctgagactccattagccttgatgctcagaacaaggtcctccaatcgctcgatatggtccattggctgctcatgagacaagccattgaaaggatgcaggccaactaaagcaaagtagccaggcttcagctcatagtcgttcctctggaagggtgggggtacaatcgctgatcgattagcatagaacaggtcaggcctgttgaaatccccaagagtacgatgtggttccgcagctggaggaatagctgcaggactctggtgttggtgttgatcgagacctctgttttgtcgtttgacactgattgcatccgcattttgctcccgatggtgtcgatcaacacccagttggtgtcactcgacaccgagacctgctgcatctctagcagctaattgcgcattgaggcgcgcctgatcctcattggcgtccttaagtaggatgagtccatgagcatccaatctctgactagcctcattctaggcttggccatccacatctctcaaaactccttttgcatctgctctgatgactctgtcagccattgctaatttctgagttttttggttggtgcgttcaagttttcccaagtcgagaacagacaagttgataagctccttctgttttgtactccttgtttgcctaggcatacacctgaaacacagaaaagaagaaaacaagaaacgcgtgagtaacaaaatagaagtaaaaactagacgaaatctctcaacaaaactcaataacgattcccaagaacttcggcaacggcgccaaatttgatatggttcaaattacctagaactactctctcaaataagagatcaattgcagtattttaggatcgaattcacggagttcttttgttcaaacaatgagttaaataccgagattaagctagcagggtagtagtaaaaataaaacacaacaaagtaaaaagacagcagattgattgtgttgtaaacgatttaataaagagctaggaacatggtattctcaggaaactattggttagtagatctaatgaaagctaggttgttatcgaaccattcttaaactcaaactctaattatggaataaccggtgtgcgtgccgcaaaactccctatatctatagccaataacaaccggagaagccgagaaactatcaacctaaatatgcattcttaacgagttcaattgttcatcttagtaaataggctgattcttattacacacctataaaccagactcatcaaataatagatccaactacagatacctatggcgggaatacctattgtctggattcaagatctagttaattactctagatctagcattaggcataattaaagatgaagaattctacagataacctagcaaagggggcaatctactaaaccatatgaatccctaatgagaaaccctattcctaacaagcagactactcagacatattgaatgaaacaaacgagataattgagttagaaagcttaaacacagtaaatagagaaggggaaagaaaggatctcttcactgtatatagatctgaatgaaactctgaaaacaatcgatgaatagcttatgtctctcacaatagggtttgcaaagaacttgataaaagacttgataaaagaaac

SEQ ID NO: 22902 - DNA, 578 bp, Arabidopsis thaliana
tgttgagcctgtttacaacaaagctggcgagaaaatcggtataaactacatgggaatggaagtaactgatcaggttagttagctaaagatttttgaactattctataatctatgttctcattttcacatcttcactggatcttcctgtgttacaggtagtgaaaagggagaaaatggcgaaacttagagaagataacgctgtgagaaaggcgattgaaaccagaactgaacaagactattcacattacaggtttgttcaagttaagcagtgaaagttttagaaagattaatgagaaaactagacttaggtgttgtgttttttcttttgcagaggagacaatgagagcaaagcagatgctagcgacgatgtctcatgagataaggtcaccattgtcaggagtagtgggaatggctgagatactttcaactacaaaactggataaagagcaaagacagttgttgaatgtcatgatctcttctggtgatttggtgcttcagctaatcaacgacattcttgatctctccaaggttgaatcaggtacaatatactgttttcaaagtttttgatcttgtggtgt

SEQ ID NO: 22903 - DNA, 3276 bp, Arabidopsis thaliana
gaaagctccttttaacgcaatactaaaaagaccatcgctacacttcatgaaaaaggtcccatcaacctatcaccaatgcattaaattcccctcagataaagggatagtagtcgtatacggcagccaacgcagctcccaaaaatgctatatgggtggctacgagcatatcaaaaaagtcgaccccgtagtactaatgatagaggacaaactcgcagaaatgaaaacagtcagattctctgacccttctcaacgcggacctcaaaaatcattgataacgctggtctgcatagacgaatcagatcctaaacaatgcattgggatacgtcaagacctcgacccagcaatacgtgaggacctcataacctttctcaagataaacaaagacagctttcatggtcaagtgcgaacctccgaggaataagcctcgaggtaacctcacacgaactcaacgtcgatccgacctaccgatctataaagcagaaacgtcgcaagctaggtcctgaaagggctaaagctgtgaacgatgaggtcgacctgttgctcaagatcggatcgataagggaagtaaaataccctgactggctcgccaacccagtagccgtaaaaaagaaaaataggaagtggagagtatgcatcgacttttcggacctgaataaagcttgtcctaaagacagtttctcactcccgcatatcgaccgacaggcgaagccaccgcaggacacgaactattgtccttcatggacgcattctccgggtacaacaaaatacttatgcgcccagatgaccaagaaaaaacagcttttattaccgaccgaggcacctactgttataaagtaatgccctttggtttaaaaaatgctggagctacctaccaacgattggtgaacagaatgttcgctgactagataggtaaaccgatggaggtctacatcgacgacatgctggtcaaatcagctcacgaaaaagaccacgtcccacaattaagagaatgcttcaaaatccaaaacagattcgaaatgaagctaatccccgagaaatgctctttcggagttccatcaggagaattcgtcagatacctagtaagcgaaagaggcaacgaggacaatcctaagcaaattgcagccttcatcgaaatgccatcaccaaaaacggcacgggaggtccaacgactaactggccgtatcgccgccctcaaaaagttcatatccaggtctaccgacaaatgcatccctttctaccagctcctccgaaaggagaaaaagttcgactggaatgaggactgcgaacaagccttcaagcaattgaaagtatacctgactgaaccacccatattcgcaaaacccgaagaaggagaactgttgtacctgtacacgacagtctcctgaaccgtgataagcggtgtccaggtgagaaagatcacgaacgacaaaaaccgatctattacgttagtaaatcgttgatagacgctgaaactcgttatccagcaatggaaaaactggcactggccgtagtcatgtcagctcaaaaaatgagaccatatttccaatcacaccccatcgtagtgatgacgtcccaaccaatctgaaccattctgcatagtctgacccaatcaggacgacttgcaaaatgggacatagagttaagcgagtacgatatagaatatcgcaccagaaccagcttgaaagcacaagtcctagccgactttgtaatcgagctcccgttagccgacctggatggaaccaactctaataagaaatggctcctccacgtcgacggctcatccaaccgacaaggatctagagtaggaatacaactcacctcccccaccgaggaagtcatcgaacaatcgttccgacttggattcaacgcatcaaacaacgagtctgagtacgaagccctcattggtggcattaagctagctcaagaaatagggatccgcaaaatacacgcccacaacgactcccaactcgtcaccagccagttccacggggaatacgaagctaaagacgagcgcatagaagcgtacctcgaactggtcaaaaccttgacccaacagttcgaatcgtttgaattaacctggaactggctggtgacgagttgggagacgccttggcagctctcgcttctacctcagatcctttcgtcaaaagaattatctaggtcgaaggaatagaacacccgagcatcgacctaacggtcaaacatgctgggatggaaaccttcgacaacttgcaacttcacgcgagtaacccgaagcaccaccaccacagctagagctctcgtagcagccgtggaggcaaatgcaacggaggaggagccggagctcgaaacccctgaacaaccgtacaacgaccggagaatcccaatcatcgattacatcgaactagggatcacacctcccgacaagtgggaggccagaaaactcaaagcccagagtgcaaggtacaacatcatggaagggaggctcatgaaacgcagcgtcgcaggtccctacatggtgtgtacctacgggcaacaaacaaaagacctcatgaaaagcatgtacaaaggacaatgtggtagccactgcagtggacgtaccctcgccctcagaatcaaaaagcaaggctacttctggccaacaatgctagacgattgcatagctcacacactcaggtgcgataagtgccaacgacacgcacctactctacatcaacctcccgaggaaatgtcctcgatctcttcttcatactcgttcatgaagtggtccatggacgtcgtagggcccatggaagcctctggtgggaagaagagactaaaaacctgttggtcctcaccgactactctaccaaatggattgaggctaaaaccttccaacagctaatcgagaaacaagttgaggacttcctgtgggaaaatatcgtatgccgacatggcataccatatgagatcgtcaccgataataagactaacctcacctcgggaaaaatcaaagcattctgcgacaagtggaagatccgtcttaccacatccaccccctgttacccacaaggtaacggacaggcagaagccgccaacaaagctatacttagcaacatcaagaaaagacatgattccaaaaaatcaatgtggtccgacgtactccacggagttctctgggtctaccaaactgcacctcgcaaatcaacgcaagaaacacctttctctctcgcctatggtttagaagcagtaatccatgtcgaaaccatagtaccaagcgtgagaaggaccaccaatcctgttaactcggacctgaac

SEQ ID NO: 22904 - DNA, 630 bp, Arabidopsis thaliana
taacggccgccagtgtgctctaaagaatttacgcggacttgccaaacaccttgaagcggtcctcgatgggagcaaaggtcttctccagaggaccagaggtgggagtaccaaaaacgagctgggcatcaagcttccagttggcagggatattccactgcttggcgatctgctcgtcgatcaggggactgtagtgctgcaggttggcgccgaagccttcagaggctagggcggtccagactgggagagaccgtcagcaaaaggatcatattaaacatactgcctgcagattgatgcatacccaagtactgagacatggcattggactcgagagcaaaaggatcaaacttgtcagcgtagatggcaaacttctccttgatgtccttgagagcgtcgtagtcgacgaagaagaggacctaagcttgtcagccactacccatgcattttgatatattattggccgggtagttaatcgtacagttccgtaaccagcacggaatccctctagcttcggcttggtcgaggactcaaacgcctccttgggcagcgcaccgcagccacgagaccctccattgcctggaggcaatgtccagaccttctggtgttcatcttcagcagcagaccacgcgcgag

SEQ ID NO: 22905 - DNA, 466 bp, Arabidopsis thaliana
gatcccctaaaacccaaaaacaaaacagaaaaatattcaaaaaagtttcataaacaagatcaaatcgagtttttctggaattttattaggaaaatgataaacgatataaatagggtgtctcccacagttatcttactgggaacagaagaatccgcaacggtctcattacaaacataacagaagggttgaaaacggaacaacgcttttgatgatgatgtgtggtttttgtttcgagaagacatgccacaaggaacaaaaccactgtgtctctctactaacctgacaaacaatataagaagatcccggctctatgaagagaccggtgaaaaggggaagaaagaatcatgcggacttcaagaaccgcactcttttctcattcggctctggactgaccagctcgggaggacaaaatgatcccgacgatgagaccgtatagagcaagagcttcagcgaaaatgaggataag

SEQ ID NO: 22906 - DNA, 4055 bp, Arabidopsis thaliana
cctaattgttttagaacgtttgaatcaggcttaggcatatctttgaactccgtgagtgttttttcatgttgatgcaagagtagctcaatctcaatcaaagtataatgatgcagctcatgtctttgaatttcattctttgattcccaaaagggcgtcgttgctttgcaggtatgtcttctgacattgatttccaagagtgttcccacaaccgtgatgagtttgctacttcacaatagattagtagaaggacaaacagatgccgtagttgaatcggggttgcccattgatttgcttcatccatcccatgatgccactctttatcgtcgtctagcaaccctctagcatgacatgatgccttaaaactgtcttttatttctccgtgaactgtttttaactcatcgtagctttgtggccctgtaacaacattgagcaggatccgaaggtagtatagctccccagaggttgggtggatattgacaattctaccaattgagaaaccccgttgtcttttacgccagagaaggctgttatcgcttaacatgtactggatgtgtcatattcgtgtgttgacactttgtcgattttagtgtgtaaacactcgtttagttcatgttccagataatacttagactcgtttcaagtccaagttatttcggatgtgatatggtatgttcttcgtaggttcaaacttaagtgagtttgagttgttttgtctcgggaacttgttgaagtgaggtcacacaagggacctgccagattttgggagctgggcttgtggtatcgccaggtcgcgaatgaaacctttgtttcttccttgtttactatgttatctgttgatagcgcaagagttagatatggttgtagtaggtgagctccgatgaagccgaagtgatgtgttcttataagtttagttcactatcgactttttggaagcgggatcacaaaatagatccgtcaacattcgggtgttgggctttgggtatcgtaagattacgaatgagttttaaatcatagtgtgaatgattgtttttgcgaaacatgataatgagtatcaaaattttcttttattcttatctcgtaattgttaagtacaaaaagaggtaaagcaagcgacgatctggtgtttgatcatcgagcagggacctgctcgataccaaggggtgattgaactgtcaggtgagcagctgatcttcgttgatggaagatgtgatgtttgtttcccttgttgaagtttcgtctttcaaatggaagggttgagatggtaattgcgtttgtggagggaactgcctgcatacctggttaggggattaagcccttttgtgatttgattgaagtggtggctgcgctcttggggagagctgcctacgtaccctgccaagggatcaagccttatcgtagttcaattatttttgagtacctattcgtggtatttcttgagatgcatggcattccaaggccgtaactcaggtactccgttgataacttttacgagcttattgacgccgtcacgtaccacctcggtgattcgatagggacctttccagttagttctcagttttccagcgttaagctctctcgttttgttgaaaacttttcgtaaaacgagctctcccacttcgaatctccgaattttgatattggagttatagtagcaggcgacacgttgttgatagttttaaactcggatcattgcctgatctctgcgttcatcgatgaagtccatattgtcctgtaatatttgcgtgttcaggtccgagttagcaagactggcggtccttctcacgcttggtactatggtttcgacagggattactgcttctaaaccataggcgagagagaacggtgtttcttgcgttgatttgcgaggtgtagttcggtaggcccagagaactccgtggagtacgtcggaccacattgattttttggaatcaagtcttttcttgatgttgctaagtatagctttgttggcggcttctgcctgtccgttaccttgtgggtaacgagggtggatgtggtaagacggatcttccacttgtcgcaaaatgttttgattcttcccgaggtgaggttagtcccgttatcggtgacgatctcataaggtatgccatgtcggcgtacgatattttccaataggaagacctcgacttgtttctcggttacctgttggaaggctttaccctcaatccatttggtagagtagtcggtgaggactagcaggttttttagtctcttcttcccaccggaggcttccatgggacgtacgacatccatggaccacttcataaatgggtaaggagaagatatcgaggacatttcctcgggaggttgatgaagagtaggtgcatgtcgttggcatttatcgcacctgagtgaatgagctatgcaatcggctagcattatgcagcggagggtacgtccactatagtggctaccacattgcccctcgtgcatgcttttcatgaggtcctttgtttgttgcccgtaggtacacaccatatagggacctgcgacgctgcgtttcataagtctcccttccatgatgcagtaccttgcgctctgggctttgagttttctggtctcccacttgtcgggaggtgtgatccctcgttcgatgtaatcgatgattgggattctccagtcgttgtacggttcaggttcgtacgaggcaagttgttcgggggttccgagctcaggctcttcctccgctgcacctgcctccgcagctgctgcgagggctctagccgcggtggtggtgcttcgagttactcgcgtaaagttgcaagttgtcgaggtttcgatcccagcgtgtttgaccgttaggtcgatgcttgggtgttctattccttcgaccggtataattcttttaacgaaaggatctaacgtggaggcgagagctgcaaaggcgtctgtagaggtgttttctcctctggggatcctggtcaatttgaacgattcaaactgttgggtcaaggttttgactagttcgaggtacgcttccatgcgctcgtctttagcttcatattccccgttgaagtggctggtgacgagttgggagtcgctatgggcgtgtatatcgcggatccccattccttgagctagcttaatgccagcaatgagggcttcgtactcagactcgtttttttaatgcgttgaatccgagtcggaacgattgttcgataacttccccggtgggggaggtgagttgtattcctactccggatccctgtcggttgtaggagccatcgacgtggaggagccatttcttattggagttggttccatccaggtccgctaacgggagctcgattacaaaatcggctaggacctatgctttcaagctggttctggtgcgatattctatatcgtactcacttagttctatggcccattttgcaagtcgacctgattgagttggactgtgcagaatggttctgattggttgagacgtcatcactacgatgggatgtgatttaaaatatggtctcagtggccagtgccagtttttccattgctggataacaggtttcagcgtctatcaacgttttactaacgtattagatcggtttctgtccttcgtgatcttctctcaccaggacgccgcttatcgcggttcgggagactaccgtgtacaggtatgcgaggtatgcgaggaattttcctgagggaactccgaaagagcatttctcgggatttatcttactctcgaatttgtttaggattttgaaggattctcttaattgcgggacgtggttttttcgcgagctgacttgatcagcatgtcgtcgatatagacctccatcattttacctaggatgtcggcaaacattctgttcaccaatctttggtaagtagctccaacgttttttaaaccaaagggcattactttataacagtaggtgcctcggttagtaataaaagctgttttttcttggtcatctgggcgcataagtatttggttgtaccggagaatgcgtccatgaaagacaatagttcgtgtccgcggtggcttcgaccagttggtcaatatgtgggagtgggaactgtctttaggacat

SEQ ID NO: 22907 - DNA, 2413 bp, Arabidopsis thaliana
gagtgaaagtggaaaaagagaactatcaagacttgactcgaagaccggattgtacccggatgattcgaaacagggcggtgctggtgctggtgctggtgctggtggttggctttcttgttgtctctgtttttcggtgaaaaattgaggttattactctttgtcatgtcaattatttaggtcatagctgtccaagagacgcgagacattagacaaggtaattaccgattgtatcctatatattcctatgtaacgaaattcagatactacgtaatcttaatgtgtcgatggaatgaaaaaataaagtattctgtaaatattttctatatattatttagcatatatacgctttataaattataaatttggtccctcccaaatacatgaaaacaatgtagtgataaaaaaaaaacaaattctgtatatatgctatttttataacataacaagcatttttcttagtcggttaaaatttcaagtgtttaatacttttatataattatgaacgtaagttataatttatgttttttttggtcagtccattattgattattccattcacactatatgcaacctatattcttcctatgaaacttttgatcgtgtgttaaataataatacaaattttatttcatctaataggtgggtggggactctctaattacgttctttgacatctactcatcaacatttggctaatctttctaaaggaattccatctaccggtcatttttgtttaaatgctctcttgtaactaaaagtccgtaccaaacttgtgtaatttcattaaacattaattatttagtccattccatgtcaaatatgacttatatgctcttgtcctataaatgttaaagcaatgaggattcaccaagtatacatgcataacaaattaagagcgagcaataatgagggtttctcaatctcttgtcccttttgccataattgctttggtcctttcctttgtcaatgcttatgatccaagtccactccaagacttctgtgttgccattgatgacctaaaaggcggtacgtaaagaaatctccggttatctatttctctacttttctccttatgattaactttgacgtagtaatataatatatactctttgatattatatttctacatgcagtttttgtgaatggtaggttttgtaaagacccgaagcgagtcgatgcaaaagattttttcttctcaggtctcaatgtgcccgggaacaccaataatcaagttggctctaatgtgaccactgttaatgttgatcagatcccagggctaaacaccatgggaatatcattggtccgcatagactacgcaccgcatggccaaaatccacctcacacgcaccctcgtggctcagagatccttgtccttgtcgaaggaacattatacgtcggttttgtctcttccaatcaagataacaaccggttattcgccaaagtattgcaccccggtgatgttttcgtgttccccataggaatgatccattttcaggtaaatgtggggaaaattccagcagttgcttttgcgggattgagtagccagaacgcaggtgttatcacaattgcaaacactgtgtttgggtccaatcctccgatttatccagagcttcttgccagggcgttccagttggatgcaagtgttgtcaaagaacttcaggccaagtttgggtccatatgaactgatcatctaagtcgtttaagagtatttatcatcttttaccaaaaaaaagaaaaaaaagtatttatcattgaaacacttaattaaaggaatacactactatgaaatatttatgtaacaaaataaaacctggattatgtaccaagtttctatattataatatatcaacttttcccatatagattttagtcttacattttactaattatgtcttttagagttattttactttattttttatttttggggtgaagaactgcaagaaaagtctttcacagttggaaaagctcctcgttaactttataatataaggtttggataaaacaatctgtaagaaataactttcacactttcatagttgaaaagatacttagttaaattctgatatattttgttggatataaaaaacttcaaaattgatgtacatattcaaagtatcatcttgatggaagcatgagttgtagaaagcttgcgtgtcttgttgaaagaagataaacacaaattgaatcacggtttcttgttttcttgatgttgcaattacttgtaatagttcaaaagtgggatattcaccaagtagttattgctttccacgtgaattacttttcctatattgatcttttttatattattattcctatattgatttattcttgcatttttgtaagagaaaataatcctaaacaggcaaatttaaatagctaaaatgatcaacttaaacaatttcttattgtt

SEQ ID NO: 22908 - DNA, 890 bp, Arabidopsis thaliana
accaccgccaccactatttccccagcctccatctgcagttccagtatcattattaccccaatctccgttaccatcttgtctatcactattcatatcatccctccgtcctctgcctcgaccacgtccacggccaccatatggcctaggcgctccacttggatgtccatcacgtccaccaccatttctgtactcaccgcctctccctacaatacagttgcacagttacttaagagcggacgtccagaagtatagtcaaggagacaacataaataatgttaatatataaatacttctcggcatctaaaatccagattaccagaagttaaattaaaacataaccccgagaagtagaacaatgaccacacaagcttttctatgcaagttaaaaaaacaaatttaaaatgcattacctgagcctgaacgatccgagttacctttccagcctccttcactctgagaactaccccaaccacttcctccagatgatccatggtctgctgggcttctcatcggtaccttggcagcaatagacctgattgatggcgccgattcttgcaatgggtcatcaatatgcctctggaagtatgccacaagccgatcaatgtcctcaaacatccttttcctgaacttaaatcccttgggatataaacctatatactcatgatgtgggtttgtgctccttatgtaagacagaataaaagtgcctggatgttcgtgtgaaatcccaaaacaataaactattcttgaaggattttcgcccttctcgatcctaagaagatcatctacttctgatttggtccccttacggaatttccgatagttgagcattgtcttaagatgagataccaaaggatcaacatatcgatccatgacctgcagttatgagatgg

SEQ ID NO: 22909 - DNA, 3087 bp, Arabidopsis thaliana
ccccgtaaacccgtgatgttcccgccaaaaatgaaaaccatgatttttccgtcaaaaacgaaaacccgtgattttcccgccaaaaatgaaaacccgtgattttcccgccaaaaacgaaaacctgtgattttcccgccaaaaacgaaaaacatgtaattttccagccaaaaacaaaaacccgttattttctcgccaaaaacgtaaacccgtgattttcccgccaaaaacgaaaaacatgtaattttccagtcaaaaacgaaaacccgtgatttttccgccaaaaacgaaaacccgtgattttcccgccaaaaacgtaaacccgtgattttcccgctaaaaacgaaaacccgtgatttttctgccaaaaacgaaaacctgtgattttcccgccaaaaacgtaaacccgtgattttctcgctaaaaacgtaaacccgtaatttttccgccaaaaacgtaaatccgtaaacggtagaatctgtaaatattctaagtttgatgataatgaattaataattattaataatgataatttttattattgttttataataataattaatgtggttactagttacatgggttaaccatttaacaactcaacctatcaaattaaatgagttatgggttgcccaacccatttaacaaaatgagttggtcaacccataactcatttaagcctaaactcatttgattatgagttgagttgagttgggttactataacgcccgcgtccggtttgttactacaacccataagaggccggtttgttttagggaaaaacaagatcatggtcgaggaacggacgaaaatacttagtcggaagaacgagaaagttcaagctgaaccagtgaggtgagcttgacaagctggatgaactagctagctaagctaggtgagctaaaccagctagaagactagctagctcagctaggtgagctgaccgacatctcgactgagctcggtgagctgatcgagtactaacccagctgggtggtccagtcagctgacactcgagcttgtggactctggtagctcacagatgaagaggtgtctcggccaaaaggtgtaaggtcgagcgggtaccaacgaactgttgcatcgcccaaaggatgcaaggaacggatgtgacttttcagaagggtgcaaggaacggatgtgatgctttcggaagcatccattcgccccctatataagggaggacgcccaaggcatcaacacatcatccatacaccacaaaacattctcaaaacagtcccaacacatcttgaaattgttggtcagaaagggagtgcggctcggcgagtataactcgaccgaactgatgcgcatgctatctcctgtgcaacggttcgatggagtgtagaggatggagagggtagaccgttcgtcttagatacgaatcggatctgatagaccgttcgtcggatcgatcggccagaccgattgtcagacagatcggatcggccagacgaatcgaatcggacagaccgatcgtcggacggatcggatgggacaggccgatcgtcggacggaacaggtcggacagaccgatcgtcagaggggatggatcgagaaaagtgttcgaggaagcacaaggataagtgcatccgaacaaacccaagggtcgcccatggatgcaatcttaccggtaaagggagaaagcaccaagaatgggtaaggaacgttattcaccatatatgataaatatcgtgaccgccttcatgtatctatctcctcagccatggtgaaaccgatcggagatcgtaaaaccaaagggtgactcgacggataaccaacgggaaagtccacggtgggaaccgatggacaaaacggatgttggacccgcgagcaaacctaaggccgatggaagaaggatttcatgggctagcctacgatactccggtggatgaatccacggacccttgggtgtgataaggatatcgttcagaccgcatggatggatcattaaggcgaaagctttatcgacgggtaaacggttagtaaaccgtgggcggtcgtagtgttaaacgaccggatcggaaacatggatgattcgataagccaagggctcaatcgtccaccatggaaccgaaggggcgtacgtttggaggacagatggaccaatccaagagcttgattcggccatcgtgaaccaagggaatcgtacgatccccaatctctatcgttgtacttagaccagtgtggttggttggttgtatggctaagtaacgatagggattggttcatcaattcacgatcgcatacgaatcgttgaacgaatagaataaggcgacaaatgggctagggaatcaaatccgcatattggccaaggtatgtaacgatctagcttactagttaggatagacgtttgggaatcgaccgtgaaaataggataaaggaatatgcgattgttaggcctagaatggttaccgaacaatatgcatgtcttgaccgagtaaaggattgatctaagtctaagggacaaagacgatgaaaccggtacaagagttggttagaattaaaccaaggttagaaagacttccgctgtgtaataagagagcgattatagaattaagcctcgtaaaggcaattctatgttgaatcgcaaaaaattaagaggttcggccgggaagaggcgcgaacttgagtccaacgtcgccggacgccgagacgtccggaacggggtctcacatcatcgggcttttgccttttgtgtaggaatctgccttcctctgatgtgtttgatcaaattgattgagtcgttgcagagccgagattctcccatgatgaaatcgatgcgtttcagggagaggtgctcggttgcgtttctacagaatttcgggaggcataatgggaacctcatgtttttcttttgcggggcgagaggaggtgtagtgactgatatttctgtcctaccttccagatcaagtcctgcaaagagtaggtctgtgcgctctttcctagcaggtggaggagactcacctcctttcggtgttcagtcccgtttctttcgtttgggagtttgctcctcctcctgctcgtcgggaggaggggtgtcggcattagcgtttgaaccttttttagttt

SEQ ID NO: 22910 - DNA, 3291 bp, Arabidopsis thaliana
cccattctttgacaacgacagcttcactttcttgtaccggacgtgcaagctcaacatattcttccctaacatcactatcagaatcttcattaacaccattctctagcatcggcggttcaataacagtttcagtaactccattctctagcatcagcggttaagtaactccattctctagcatcagcggttcagtaactccattctctagcattagcggttcgataataggttcactagctgtctcatgttgttcctctggttcaataataggttcataaacactcagatttcctataattcacaccgcataaacttcttcgctctactattggaacttgcctattattactttcaaaatcactgcataactctacatgcaaaactggtctaagcccctctttattcaataacgttaaatatatcaacacatcctcatcatctacaatataagactctcttcgtgctttagatatcatgtaactcaatttcagcttccgtttctctccatctagagcaatctttttacagatcttatctactaaatccgcatatgttattctctccaaaaatgatgtcttaaatactatgccgtatattgaatttttgcaactccactcatggtctgttgaatagtaccctccatagtcaaaatgtatgttcgtctagatcttcttcttcatcgcctcctataaatataaacaatatattatgaattgtatcagtcaaaccacgatttgtaccagttgtctgattcaatttcagatcgtccattcattttattctgcaactattgattgattccggggagtaacacaattcaattctgataagtgtgtattttgcatgttttgagcatccatttgtcatcactttagcatcatatcatcactgttttataccatttctcatcatttgtcatcactttacatgtttacgataggtttgcatgcatgttgcatatttgtgttgatttcaggtgatttggagctgttgacgagctaactggaagaagcggacctgatcatgacaaaccactcgacccaaaggtcgagtaggagcttcaagatctcaagagatcactcgacccccaggtcgagtagatggcatcaccacttcacctcaccactcgaccacgaggtcgagcgtcttcatctccatcacctgaccatcactcgatcacatcagtcgaccctgaggtcgagtgtcttcaccaccattacctgatcatcactcaaccatatcactctacctggaagtcgagtatcaccttcaccaccactcgactacaccctcgatagcaagcttcagagtcttcttcattccgcactcaaccagacactcgagcacaaggaagaaaagaagactctagttattcactcgacctcccactcgaccacttgggtcgagtacagttcttaatccgtcccaatacttcgtcgttttgagtattagggtttcagaatatttggctataagtagcatgtacttcacattttcgcagacaagtttttatctagttttattccgcagaccttgtgttctagaccttttgtaatccggatttctctttatctatttagtattcagtattcagcttttgttcttgatttcgtttactgttgttcattctgttatcatcctgctgttacactgttgttatcatgttttcaacttgtttaacgtttatgctttctgttatgatgtctgagtagtgaataggtttctgaggatgggttagagtagtgtagaattctcagtatgctaggtgattgagtattgattgatagatcccttctggattagttgttcttaatgtctattgctttctgatcaactggaatttgagccgagacatttccgcgtccaaaaggttttcgatgaaatgtctgaaccactaattccagagattcgtgaccctgtaccatggtattggttgcagggagcgttttggctttaacttgttgattcgtaatgcctgttaggttagctctcgtcaatggtgattgagtctgggactaggttaacttgagggtctcagttgcggtggcacttagatttggttaatgaacttgttatctaaggttaatttactgagcatgtcaatcacctgtaaactgagaaaacgaaactactcaattaccccatcctcaggaattctttatctgattgaattctttgtttactctactgttgtttactgcatcttgttatctgttgcttaatttcttcagttctttcttgttactcgacctcatactcgaccacctagttgtttggcaacagactgtacagtcgagtatctgtgtttcattttctgtctgttactcgacctgtcacttgacctcacccagtgttctgcaaagagctgtgttggtcgagtgttttactgtttctgtttgattttctgttttctgcatgttcacttagaactgctagaacacaccaaaacctgttattgcttggcttgacttagtgacttctgatcacatcttgattgttagcatcacacccatttggattgacaacctaaaatactacaacgatatgattggtgttttaggataattgactaaaaaacctattatcaatttggcgccgttgccaattgggtgtttgtttgttacatttgagatttcagacttgcttagatcaagttctttttcaattttcaaatcggttgctaattgtgtgtttttcttgttatcttcttgatccaggtacacctctgctgtatgcgaactcgatcaacaggcaatcagaacctccttttcaacgacaacatcaaccgcatagctcgcgaactcagaaaaaggagaaccttagtcaaccttgtacatcagcaaccactcgaaatgcctgaagaacagaatcaacaaaatggccgtgccaacattggtgtcggagatgcaccacgtgatcaccgccagaggaaaggaattgcacctcctgctatccagaacaacaacttcgacattaagagtgatctcatctcgatgattcaggggaacaaattccatggtctgccaatggaggatccactcgaccaccttgatgaatttgataggctctgcaacctaacaaagatcaatagtgtcagtgaagacggattcaagctctgtttgttctcattctccttgggcgacaaagcacacatttgggagaagaatctgccccatgactcaatcaccacctgggatgattgcaagaagtcttttctatcaaagttcttttccaatgccagaactgcaagacttagaaatgagatttctggtttccacagaagactggtga

SEQ ID NO: 22911 - DNA, 497 bp, Arabidopsis thaliana columbia
  unsure (1)..(497): unsure at all n locations
nnnnnnnnnnnnnnnnnnnnctaaaggctccaattttctagtagcacaacgtaccgcagcttcggcatgattgagtcgcacaccacgtgcaagacgccgctgggccaaaaagcctaattgtgagatggcgagcttatcgagctactcatgcaacgaacagtcagtaaagagcggccaagcgatttgatgatggaagacacccagaatccagattccgcactgcactacatacttccttcggaataaggtgcatattgccacgcttgcctatgtatcctgccttttctttttttttctgttttaccccctcagcctgcaaatccaaaccgccgatacccggattggagacgagattggccaatcaatggcagtcaatggcgaagttggagtatattctggtagtacgctgcggtgagaagtgtcgtcgataatccgttcgggtaccttcctctcctcaaagcttccctcgggggcatccaggaattaaaaaagagagg

SEQ ID NO: 22912 - DNA, 2836 bp, Arabidopsis thaliana
tccctccttcactctacctcgaaacaaccgttcgccgttcgcgccacctccttcactctctccttcactcgacgacggtactcgatttcgccatttcttccttctcaccgtcgcctccttaccactagaccgcaactcgacctctccgtgcttcatcttcatcttcatttactcgacttcgccggagcttctcgccgttccacgttcgcatactctctcaccgtctctcgtttcactcgaccacttcacacttcgcctcaacatcttcgccggagtttctcgccattgtccgtgcttccgtcatcttcgttcactcgaccaccggaccggcttcaccatctctcaactatccaccattcactcgacctcgccattcactacgcctccattcgtctctttactcgactgctcctcaaaccgccaccgtcttctctaaattcgccgtttactcgaccgtttcactcgaccgcgtacttgattggtttagtgtgtgtgtttatttgaactaacatattgatatttggttttgagttacattctttttcagggaatcaatatgagtaactacagtggcgaatcctccatggatgcggattacaacgtcgatgaagctgaatcttggtcaactagaccagagagagagcaacaggcttatgagagcttcagagccgagacccaacgctcagtagctcgacgcaatgaaaggagagctgagattgctagaggaaagagagcgatgaccagcagatatgagttgatcgacgaagatattgacgtcgagtatgagcctgagtcatggcacagagaaacaaaactgttgaacaagcctgatgaagttacagtggaggagtacatcagacttttcgagctgaacgacttctggggaacgaggtacccctgttacgagactctagcccagcttgggctactggaggacgtacagcacttattcgagaagtgccatcttgagacgctgatgtcttacccgtacgtcgcttataagaaggaaacaatagagtttctctccactctgcaagtggagttgtatcagggacttactgcagatgaactggagagtgaagggttggggttcttgactttttcagttaacgagtagcgttaccagctatctatcaagagcttcgaaggattatttggttttcctagtggaaagggaactaaacccaagttcgagagggaagagttgaaggatttgtggttaaccattgggaacgatttggcgctcaactctgcaaggtctaagagcaaccagatttgaagccctgtgatccgttactatcagcgctcagtagcgaatgttctgtaccccaggaaatctacgggcaccgtgtctaacacagacatggaaatgattgattctgcactcaagggcattctccagagaacaaaggggaagaaggtcctaaagggcgacctcaatgatacaccactggttatgcttctgttgatccatatgtgtggatacaggaagtgggcgcacaccaacggaaagaagaaggtgcgaggagccctttgtgtaggtggcgttgtgacaccgattctgattgcatgtggtgtacctctcacatctccagggtttgatccgaggatgatggatttagatcacttgcggcgttgtgagtttctggaatacgacatggttggcgatttttatcgctacaaattcgagcactccctgacccgaacagccaacattttgcttccctgcatcgaggccacaaccatacttcagggtgagaacattgacttcagacctgcgcgtgattacctctactttgagagcgctccaccgactgatgacaatgtccctacgacggaagctacagaggatgatattgctgagacagatgaggatagggaggaggagtatgatacgagcatgtatcatttcagtgagcacgtacctccagcgcgggagagcaagagcttgagtgaagctcacagaaacaacagtaagttgcagaggtggtgcaagaaacaagataggctacttatcaagtgcttcaaagccatcacgtttctgacggacaagataagctgcttctcttctactacagctattccgcagggagagcgtcctcaggacatgccttcgaggagatatgacgcgccagggccaagtcatcacaggcttgagccaagtcaccacaggcctgagcctagtgaccgagtagtcccaccagtccctgcgaggcattcatcattcgagcctcgggagctcgggagaaagaagaaggctgcactcgctcggtctggcagtaggagtacacgacttttccaatcccgtagcttacgcgaccgcggtgctggccgcagcagaagaagagaggtcgagtatcatcacagcggtgctggccgcgacgaaggagcagaggtcgagtacccccagggggaagctgggacacaacagggagattcttcgatggcctggaagcaatcacagacagctattgacgaccaactccgctccttcttccactgaggtatgcacctcactccaccattgtaatataccatctcttgtttttattttgtttttgtgatgtgtttttgtcctgagtactctcttccaaatttggtcacacagtggactgtgtgatttaagtttgggggagggctcaggaagtgtgtgttgcattgtataatcttgagtctgcattcatctaaggcatagaaaaaccaaaaaaattgaaaaattccagaaaatgatttccaaaaatagagtgttcatgtagttgcattgcatttaggatcgagtctagagtgttcgtttaggattgttgcatagcataggggatatgatgagatagcttgt

SEQ ID NO: 22913 - DNA, 3349 bp, Arabidopsis thaliana
ttttcaacgatgaaatatgtgcgcacggttaaaggatcgccacgcaaagtgtagattccacgtatggtcgtgaattttacgcattgacggtaagttgatgcgacagccttcattttatgcagccatggtgtgcccacaatgacattgtaaacgataggcttatcgacgacggcaaagttaaaacaatgcattgtgcctccaacgtaaaccgggagcaggatcgtaccgactgtcatcaccgtgtctccatcaaatccagtcaacggctgaacattgtgttcggttgcgagcagatcgacctccatctgtatgaggaaatctttaaagacgacatttacagagctgtcggtgtcaatcaaaaccttggtgacattgttttcatcgattatgagttcgacgacgagtggatcgttatgcggtcctcttaggccagctgcatcagcctctgtgaaggtgattggttcagtattgtcaaccgcaggtgtgctactggcgatcaagtcgcgttgtacttccgcctggcgaagataatttctaatggaacggacagaatctcgacaagacgttagaccgcccattatcatgtgaatcgttcgtcgaggaacaggtcttcatcattgcgcgtcgcttgggagggcctggaagttgttcatcttcccgaacttgctcgatgcgggcgggcttttgtagacgttctcgatcatcgcgtttgtgttgatcgttgagatcacctccgtcagcgttgtctctgtgagaattcaggcagtgtcgatcgtgttcgacttcaatgctgtcgttcttaaacttagaaagtagaagaagttgaagttgccgacagtcgtcggtggaatgaccggcgaatttgtgaaattcacaataagaacgtttcgcgtcagagtcgcggtagtagttgttccaaggtttgtgcggttgttgttggtctcgattgttgatggcgaatgccgagcctttctttcccttatcgtttctagcgtagtcacgatcatagtgctagcgctgttcatagtgttcgtcgcgagctttctcttttggggtggatgtcttaggttggcgttccaccattgcggccgtctcttttttgatttcgatgtatcgattggcacggtgcaaggcatcatccaaagttgatggtcgagcaatgattaggtcttctcgaaaccgtgatccgaaacttaacgcgtttcgtagagccccgatagccgcatcgtcagttatggctatattcgagacaaccttcttgaatctttcaatgacatttctaagtggttcgctttccttctgagacatggtccacaagtcggcgtttgtggcctccttaatcatgaaaaccgagtggtgctgcaggaataaagatgtaagttttcggtagctatcgattgaattggcttcgattcgcgataaccagttgagtgcgtctgcagtcaggttttccacgaacatttggcaacttctagcatcactttctttagcagaaaaaatgtgcaccattgatggctatgcacattgatttaaggaagatcttggggtcggtaagaccgttgtacggtattagcttaactttattaacatgacgaacgcgtactaccgagaaacgcgccgtgaagggcgagcgttgtgtttcttccaacaccctctctagctcgggggccgcggtggtggcccgatttattttggaagacatatctcttgttaccgcgttcaaccgtgcaagttccagatcgcgggatcggttttcaacttcgatgggtcgatccgaaaagattcgcctgcactcgagagtttggttattcggaaaatactggtcccttggcagatttttacctctcgcgagatcgtggtcgttcagattatgactactctgcggatagatggtgttaggcaacatgttgtgcacgttccgcaggttggagccgctctactcgttgtggccgttctgctggttgtggccgttttgcacgttgtggccgctctactggttgtgtttgttctgcaggttgtgaccgctcggcaggttgtggccgctctgcaggttgtgaccgcttcaaatgttgtggccgctccgcatattgtggtcgttctgtaggttgtggtcatcttgtgggctaccgcgagaatgctcgtcgatgaatcctacgataactgacgctggtctgcggcgatgggtctctgagcgctcggcgactggggttcgcggagactgctgtccatcgtgatcgtcatgaggttgggaggtgcgttttcggcgtcgaagccgctcgatctgactctgggaagtgactggtgctgccacagctgccacaaaggcgtcaatccattcggtagttcgtgcttcctgtccgtcgagtcgatcaagaatggtttgaacaaggtcatctaaatgggtgcctcgttctgctgctgtggtacgtctttgagcggcgtcttttgctgctgctgctgcagctgcggtcgcttcgtcggctggagctactgcgaggggggtaggcgcggcaggaggtcgtgcgacctgaacatgatctgtttctcctcctgtgtctggtgtgaacaagattcggcgcgagggatcctgctcggcacggatggctgctaggttgagcggaggtaagcccagcgcgtcgggcgcttgaggtatgccaatatcagtttcttgacgctggaagtatctatcatatcaccgcgaatcgtgtgagggtcaggatgcataggctcgtaaaaaaaggatagcttcgatcaacggccccacagtgggcgtcaattatttgtactggggggtgaacggagctggtcctttttattaacgataacaaagatcgagagattacagcaaactaatttcgtctcgccagttatagactatcctgccgagccgagaacttaatcgtaaaagcagaaagacaaagtacagaaatgggcgaggcaccgatgtcgggctaggcaacgaggtcgggcaaggcaacgattctctttgtctctcagctaataacctgtggatcggatcttgctcccaatagtgtttctctctatttatagggaatctgaaccctaaattccgttctgtctcccttgcaaattatgattttgcccttctcgacctaatgggcctttttaatggcaaaaggccctcttctttgttgatatctgttttgggccttctaacattgaaggggcaaggcctatgtccaacaatgacactcttatgtaaattcgaatttgacttctttacagagtaaagcggtcaatggtcttgcaattttcctaaaatctttgatgaactcctatagaaacgagcatgtccaaggaaactcctcactgctttaacattatcggg

SEQ ID NO: 22914 - DNA, 303 bp, Arabidopsis thaliana columbia
ggtatcttgaccagcacatcaattagactgacatgggtcatgatgctctacggactgaggcataaattcagctagttggtctcgcaacacactctcatgctcttccatctgagagccattgatgataaggtaagacattgcctacatcgtatatagcagatgagatatctatcaatgcctacctctaaggacatcgtcattgcacgggcaatgtcttcatctccccggttactaacctctcttggagatcagacgctagatcgattctggattcatgttactaagccggagttgcactatgtg

SEQ ID NO: 22915 - DNA, 634 bp, Arabidopsis thaliana columbia
cttttggtattgaaatagttatgatgttcctgagtgattcggtttttgttgagaatctaccaaaatcgaattagtttttggcttgagattatgcttcgattctatttagctaatctaaattggtttaatcaagaattcggacccctcaatgttgaaccttgattaaaccaatcaagaactacattggttaaattggttttatgaattgatgacaagctcatccctatttcgcacaagtcaggacactagaaagcagcagacggaggattaaaaaaaggagttttactaatgtccgcgggccagcccgtctaaccgatgggctctgcggggcgggttaggactcgctttgtcaagaccgcggtcgttggcaggcaggtccgtcgcggatcagaagaaaagcgggcaggatgcggatggtccatttgggcgcggggaggccgattgacaacctaatcgtgtccaatatttttcgaattcttcacaattaaattaggtagcataacaaaacaactaaaataatagaaaaacaaattggtaaaaaagaaaaaaaattaacacacaagccaatgaacttaaagatacattaagttctcaacatcatccattccaacgacttcccaaatattgttaagat

SEQ ID NO: 22916 - DNA, 346 bp, Arabidopsis thaliana columbia
ttccaaaccaaaaccacgattgcaggacaaactgctgctaaaaccgcagcaatcaccaccggtttcttcaccgccacagtaagaaaagctcccacaagcaatcccatcgccgccactatcaaaaccgcccaaaccattgcttttggtactttaaacccgacccgaaccgggtctacgttaagactcgtcaccgacgacccgtatttaggcttgctcgacgctagattactcaattggtgatccaattgacccgaccttctagacccggacaaaattggacccgaagaaccaagagaaccggaggtaattaaaccggttggctgaagctgagagagtggacctgaga

SEQ ID NO: 22917 - DNA, 455 bp, Arabidopsis thaliana columbia
gtctaccatatccgtcctataatcaataaaacgtctctgtggggcaaccagtattcataaaagtacctttttagggtcagcaagcatcccaactatagcagcatcaatggcatcttggttttccagtctagaggcttgagctgccattagaactactgtatccgcatccactcctttcgtgaaaacctatatacaaaaaacttgctctcattcagaaatcagctaccgggatcctaggaagatgtgtttatttgaacaagcccacattacctcgataagatttttgtcaacagtaagtttattcactgttacagttccggtcttgtcgctgcaaagcacatccatgccagccatttcctcaatcgctgtcatcctcttggatattgctccctgcgatatatattagaatacaatcatatagccactaaagcatagagatatttcaagacaaagtt

SEQ ID NO: 22918 - DNA, 517 bp, Arabidopsis thaliana columbia
gaagccggccgtgaagggatgcctccacgtagctagttagcaggctgcagtagcagggagagatgaagtcgggctacgaagaggagttgttgcaccaactggtgtcacagatcttgaaggttcttgactcggtataggtgtcatttcggttcccatatctctcatacataccgaacgaatcgcaggaccaccttcacatatataaacacttatcttgtcaagctccgaaagctctaataattaaaacaatttcacaaaaaaactagtctaattctttacctgttgtatgatcatgtgatgaatccgcaagatcattgctttgtgtggattggtcaatcaacgagtctcctccatactcttgagttagaataggatgtggcgccgagggaacaacattagggaacttctcaaacccatcaacttgtgaggattggcacagatccatcctagatttgttatgctcgtaacctgcattatcaggcacaattctcacaggtattcggtcccttgaccgttc

SEQ ID NO: 22919 - DNA, 440 bp, Arabidopsis thaliana columbia
cgccagtgtgctctaaagaacatcgccatttttacaatgaaatcaatgggcgcaaaattgccgtggcgtgaagtcatcggagcatttcaggttacgtatggcacgcaaaacgtctttgtgtcgcttgccaaagtaatccgccaccttgagtgatgtggtggttatcttgttgtcgagggtcgtgaccatttcgcggaagtcgaaggccggaataactgacggattattcatagcgtcttgaccttttagaaagtgagcctgtctcacagaaaagccgcccgagagaggtcgccacctataacgggatttctcaggctcgcttactgaaaggctctcggttaatatgcgcgtgagatgcgcgtttactgcagacatgaaaaagccccgcatcgcgaggctcattaaattggctttgtgagttgcataaaaatgatgtcagg

SEQ ID NO: 22920 - DNA, 501 bp, Arabidopsis thaliana columbia
ttagcttgacattgatgttgggtcttcaactgttgcaagaggtgtaaccaatcttgttcttgggtatctcaacaatttggttatagaaatggcatttttgatacaggtaagcaaaaaaaaaaacagaacaatgttttcgtattgtaagatttattattcagtttaaggatcacataatgatcattttcaatgttgttacaaaaatcaggcaaatacagtagaggaactaccagaactgctactaggaacttgtcggctcaattatcttgatgtttcaaaatctgtaaaagaaaggtgagacatccttaacaacaaacactattgcaggagcagaggatattttcgatttttgtttctttgtaaaagctgtgttttaaactgtgattcttgttatgtcaactcgtttttacactcaaactgatgtatagtcaggatcagtagtttggttctctgtgttgtctgatccaagattgaataaataaacttgttgataagacatga

SEQ ID NO: 22921 - DNA, 462 bp, Arabidopsis thaliana columbia
taaacaattctgaattctcaaagcattatgtagaaaaaatgaatgacataaaaatatggattggataactaaactttgaactagtctgaaccagaagtatataaactaaacactgaaaggaataatctatctatttaagatggcaagtattcaacctctggtgtggccaggagtttccataatatggacttcatggccagcaaacatccatttgtcagcatctttcaaggctacatcaattccaggaatccggtccctatctgcagctgagccgatcacctaagtacatccaccaatatagtgtgcaattaataattacaacaaaagtctttgaagcatctccacacaatatggacagagagagagagagaagtaagatccgcctacctttgcaccatacctgtcttttaattccaaattgccaccagtgtgatcataatggtgatgtgtatttaatatata

SEQ ID NO: 22922 - DNA, 254 bp, Arabidopsis thaliana columbia
gaagcctattctctaagggaccatctttgtctcttgaccttttaccttagccacatgagttcattgatgatgcattgcttgattcacgttccagaactaatgattgttacagggattggtagatttgataacatgtgtaggtcgagcatatgagtcggattgaatagatctgaacccgtgagcacgatgacgtgtagtaatcgatctcgacacgtaaacagtttctcggacagatagaggtaatcacgttgatc

SEQ ID NO: 22923 - DNA, 590 bp, Arabidopsis thaliana columbia
atcaaacagttacctaatacctgttgacaaacaaaaacaaagatacaagttgatattcttagattaatacaatatatttagggattggttttagactttcagtacttaataaatattttagttaaacaattggacataaagaaactcaatatttcttttaaatactaactgtgatcgttattcaggattttaaaatgctttttcaattattggatttacagatttttggtagacaacattccggttaggcagtttccaaaccggggagccttcacaagcgcgtacccgtctaaaccgatgtctctatacgtcaccgtttgggacggttcagagtgggccactaaaggtggtaagtacccgtcaactacaagtacgcccctttcgtggtttccgttgctgacgtggagttaagtggctgttccgttaacaacggctcctctaccgggtccgggccatgtaccaagtcgggcgggtcgatttcgagtctggaccctgttgatggtcaggattttgccacgttgtcgaagaatcagatcaatgccatggattgggctaggagaaagctgatgttctattcttattgcagtgat

SEQ ID NO: 22924 - DNA, 589 bp, Arabidopsis thaliana columbia
cacacgtaaatgttatccacgaacccgttctctctagcatagccttctaatcttcggccaatctccaattcccccagattcgcacaagcgggtgagtacactaactacagtaatatggtttggtttcacggacttgtctttctccatacacgaaaacatctttaaagcgtcagagtaattcccgttctgagaaaacccagaaatgacggtggtccacgaggttacgttcttacgaggcattgaatcaaacaactccatcgccgccttcatatcacctcgtcgttggtagcccgtgatcattgcattccacacgggtacatctctcttagacatttcgtcgaacactctgcgcgcacaacacaaagctcctagcttcgcataggcagtgattagggtagtgcagcagaacgaatcggactcagacccagatctagaaaactgagaatgaagcaaccgtaaaggtcgagcggaagaaaacgaagcagaagctgcgaaaatgaaattgaaagtgtggtgacttggacggagaccatcgaaggagtggagattatggaggccgatagattcatggggttggtgatgacatagt

SEQ ID NO: 22925 - DNA, 664 bp, Arabidopsis thaliana columbia
  unsure (1)..(664): unsure at all n locations
caaactttcacctaagatcgatcaatggccaagggaagaggcagtgcatcatggtcggctcgagccatagtgactctcatggctgtgtcagtgttgttgcttcaagctgactacgttcaagctgcaacgtacacggtcggtgactctggtatctggacctttaacgctgtgggttggcctaaaggcaaacactttagagccggcgacgttcttggtatatacttcacatccttttaatcaagcttcagtaattattatactatcttgttacacttaaaccacaagcagttaagctttctaatcttcatatccactagggatgtatccatatcatggctgcttctaagtatgggcaagatgtgcttttgtataaagcacacgacaaataaaaaacttcctatagtttaaaggttacaaatatgattgataaatgttttgcatacacagtttaaatagtgtatatcttttacatgattgagcctgtgatatattttactatattatagatatgtatgtatacatcttccttctccaaaattttttttctagtttcgattatcacaaacgctgatttatgtgtatagcaaaattcatgtgcgtttanatttaacaaaaatattttggatatcataaatagtacactaacgtaatttttaatttattt

SEQ ID NO: 22926 - DNA, 540 bp, Arabidopsis thaliana columbia
tataaaagaaggtatttctagacttcttcaatcgagggtaacaagcaaaacctgcagtgtccataacagttgacttggacgtggtattgactggggatagaaagcttccacccgttttgagagaaatacccatggaggatctctcaaccacattcaaggctgaaacgtattgttgtgttcttcccactcttctttgctagacaaaagagttgatatccaccttcgtgtcactggtagtgattcgtaggcttgagtgggaggtccataacgcttttcaaatgcttttgtaaggtaatcaaagcctgctggtccttgcaaaaagggtttcatgattgctatgcgacctatgcctatctctcgcttaagttcctgttggatatagaataaaaaatgaagaaactgataagtggacaagcaaagcaaaagtatattttttctttctatccaaagctattgctgatgaagaggaagaatgaagaaaaaagagcttgtacatacagacctgaatttgctcaagaatgaagcggatccccttgacta

SEQ ID NO: 22927 - DNA, 441 bp, Arabidopsis thaliana columbia
atccccggcagtgggtgatttggatgaaacgagtagcaatgaagggggtgttaaagattttacggctgttggagagagccatggtgcgggagaggctgaatttgatgttttggctactaaaatgaatggtgataagggggaaggaggtggaggtggttcttatgataaagttgaatcgagcttggatgttgttgataccactgagaatgctacatcaactaatactaatggttccaatttagcagctgagcatgtgggtattgaaaacggaaagactcattcttttttgggaaatggaatcgcctctcctaaaaataaagaagtggtggctgaagttatccctaaagatgatgggattgaggaaccatggaatgatggcattgaagtcgataattgggaggaaagagttgatggcatacagactagacaagaggttgagga

SEQ ID NO: 22928 - DNA, 594 bp, Arabidopsis thaliana columbia
tttaattataatttgttaatctaaaaccaaaccaaaaaggatcaaatcaaaattctcaaactaaacaataaaaaatctctacttaattcataaattcaccaaaatcgaaaaatctagtctcttgacttaagtatgaaataacacataccaggggcagtagcaggaggatctccagagacagaaactgcaacacaacaatttcaaaagctgattcaacaaagtgaacaaatatataaaaccaatatgaaatttctgataaagaaacttacggccacaacgagcagaaggaggagcagcaactttacaaacagaaggaagagaagcagctttagaaagatcaagagttaaaccaagagaaccactgttcttgaaagcctcacatagacattctggtcctgtcctaaccacagtcttaagccctgaacaacatgttccttccggcttgacaactgtactaccactagtcacaaacgacaaacaatcagccatgtttagtatcaacgatgagcagtcactgctgcatgagctctctcgccggacattagtgcaccaccgagaagacatgagaatagttcatatgcattgtgatgatga

SEQ ID NO: 22929 - DNA, 502 bp, Arabidopsis thaliana columbia
tgcagttccgtagctgtttctgaattctcaaatgaagcagctagtggcagcacattgacttctataagtgaagatgttacgccacagtcgataaaatatcctttcaagtcagaagaaagagtagctagtactgctgcttcttcaaatggcagagtgatgcttattgatgggacatcgattatatacagggcttattataagcttttaggtaattctgctactcatgtgtacatcaaatgttaattttttttcctcccgatctcacacttattgacatttgattgggcatgtgcagcaaggttgaatcatggtcatctggctcatgctgatggaaatgcggactgggttttaacaatattttcatctctttctcttgtaagtgatatcttgagtattgttctccagatgttcatttttactgtacttaaatctgatggttgagaaaagcttcttgtagcattaacgatggctgaccaagtaatcatggttgcgtataattatg

SEQ ID NO: 22930 - DNA, 477 bp, Arabidopsis thaliana columbia
tggttggccaatatttattgatttggattctgattatcccgggggtgatttcagtcatcgtctcgatgcatcttcaactctcaaattgaagtttccatgggaggccacgaaggtttcagcaaccaactcctctcctccgccacatggttctctcatttccgtgcttcagctctccgatctaaatcactgccccctccgtcctcgcagactgccgttcgctccacctctggcgactctctggttcgtcgcctcggccttttcgacctcatactgttgggcgtcggcgcttccatcggcgccggtgtcttcgtcgtcaccggaaccgtcgctcgcgatgctggacctggtcagttgaatgaattacgtttttctcaccaccgtccttgattcgttcagaatcgcttagtgattattgctgccgttgcgtgcctaggagtcacaatcagcttcttgctagctggagcatcgtgtgtgttg

SEQ ID NO: 22931 - DNA, 561 bp, Arabidopsis thaliana columbia
cacaagtagatatcattctgccaaaaccaaaaagtaatgatcagagaactattagacagagttattagatggaaattttattgagagttgacttacaattgtaagcacacaaccagtgtcgtcgttaggaccgcattctgctcttttactccaactaataccaggatcttgaggagttgaagttgcatcagcgagcaactttaaaccctgagaaaaggtattgggtgggaacagtgaccaaagtgccctgatcatacgagaatacttcttggcatagggaaacccacttgatgttgcaagctgcagttagattatatgattagcaacacaattgttaattcgaagaaacagttccagctatttgttttttgcatgagagaaaccgcacctgtgttacaaagccaaccagaaacacaaagaaaccgacagttgttgctgaagttgatttactgataaaagctgatagcatgaatgctagtccaatctagcaccacaaacaatgaagttaataatttaactgatgtgccaaaagaggtgtaacattagtcttagcaagagagt

SEQ ID NO: 22932 - DNA, 566 bp, Arabidopsis thaliana columbia
  unsure (1)..(566): unsure at all n locations
tagccattgcatacagaaaccataataaatactatatgataaaaacacactgatgaaaagtgaatcaattaagtaagtagaatgttggagtcgtaggtggctccggcagtccaatcagcgggaatagcgtttggcgattggatccaattgattcctgcgcttccgtagactaagaacctcaatgtgagagtgcctctaggtggattctgcaaatcatgaaccgctccaaacactcttctcatacgtctccactctttgcaatcctcctaaaatcatacatatacatgcataccatatcataacgtttaactttgtttcacaaaatcatctaagagtaaactatatattttgatcctcaaaaacatatatctaagtttctcaacatctttgattaaatttacctgccagacttcaacggcgaggatgtcattaacaccaccaacgtacaagacaaggatggcaagataatgaggattgtagcttttctcatggatcttatacaccagattatacctgcgtatcggcaagggatctttggtcncaacgttgactcaccgaagagtaga

SEQ ID NO: 22933 - DNA, 508 bp, Arabidopsis thaliana columbia
cagagtatctcaaacgttttctcgatggaagctctgataaagagttgttcaagaagaacgtaccggtggtgagctacaatgatgtcaagccttatatcgaacgtgttgcgaatggagagccctcggatgtgatttcaggtggaacattacaagattcgtccaaaggtacataaatatatcattatgattaatcaatggatcaagtactagttttgatttggaggtgatggttgtgtgtagcacgggaacttcaggagggatacataaaatatttccagtgaacgataagtacatagagaatcttggataccttttggctgtatcctctctcattacttccaagtaagtcctttcttaaccgttgctacacaaattataagttataaatattggctcatagattttaatgatttagagatccaaagaaaaatcgtgttagtttcaaatcgtttgtggaatcatttattcattaattgattcaaaatttaattaatagatatttattttg

SEQ ID NO: 22934 - DNA, 365 bp, Arabidopsis thaliana columbia
aggtttggcaaagaagagaagttgatgctggtaatgaaaagggtgtgatttgagttgaggaggagccaaagcacaaaactcatggagctgataatcacattcttgacacacgtacctaacccctgctccctcttctttgcaccctgcgcacgtgtaaatatccggcaactcaactttaaccaacacgtgttggggatgtccgaaatggaccatctcttcaccttgtactagttgaggagatgtcgggaactctactgaacgaggtcgcggttttatgttaagatcatttgtgcgtacctctgcagctgaaggggtagtgtttgagagcgaacgtctcagagctgtcgttgcggaaatggtggaag

SEQ ID NO: 22935 - DNA, 500 bp, Arabidopsis thaliana columbia
atccccatctcctaataacccaataagatgttgaaagagggaatgattgttacctgtagagaagcaacggcagcttcactgtccttgagtttttgctcttgttcaccctccagcactgtcttgggctctagaacaaacctgttcaccatacaaactataatcagccttcaaaattctctaaaggcctctagttggactgactaataaccaccactcacgttcttcctgaaaacaagaataaaacacaaattagaccaaaactttactagtccttgtctcaaaaccagagaattgaatcacttgcctattgacttgtaggtgtttgtctcttcaggcaatggcctcagctcctccaaggttaagaaagctcgctttctatctccctctttgttgcgcatctgattctgcacctatatataaaacccatgcacattcacatttcagtttttcagcaccacatgacaataacctaggaaagccaattttgtcattacacaaca

SEQ ID NO: 22936 - DNA, 351 bp, Arabidopsis thaliana
tatccgcgtatcctcttcattaggagccaccactgagaacccttctttccatttgatcactcctttgctctcacgttgtagagttctaactcttaatcccttgaaacccaatcatgttgagacccttcttagacgagctgtagatgattccgagagaggactccccaatagcgttgacgttgatgattctgtcatagagttcatggctaataactgcgatggtgatgctcgcgtcgctcagaatgctttggaaatctcagctactatggctactaatcgagccggaactgatgctgttgtgtctattgatgatgcgaaggaggctcttcagtgcaaaaatttgggatatga

SEQ ID NO: 22937 - DNA, 3369 bp, Arabidopsis thaliana
ccgtcactccttccagctgagcgtgagctttgggcgagctgacccagctgatttctttacgatcctagcttagcctgcatgatttcccttttgtccgagcttatggccagctccttctcacttgtccgagactccaccttcttctctcggaccaatgtcctagccaacgatcctattgaggatcgcgggcgttacagattcgcgtatgtgggctcatcagttgcgtatgtcctctactttgcttatcttccttcatcaggtgaccgagcttatcaggcccaagtacccattcgcgtatgtgggctcatcagttgcgtaggtcctctacttggtggccttggtgggctttgtgggctggcttggtattttcgttgggggattcctggaggggaatccagctccaacaactactcaagcaacataactaagaacacaaacccaaaaattactgaaatcataccaaaatgtagatctaaacaagctaaacaactttactcaaggaactaaatgcaaaaacaaaatagattaagagtaattaagttttaaagattcaagaacacaaagaaaaactaagggataaaagctagatcctttggacaaatcccagagtggttacttgggcctgataagctcggtcacctgatgaaggaagataagcgaataacaacctaggaactaacgaggagatattcgcggacggaccttgatatctcggaactgaccagccgaatatccaggagaatctctatagatcccggacggagctaccacgtgcgtagacctatataagggagcaaggacgacttggaagacacattcaatccagctttacattcacagacatacttttacaattgtaatctcctttcacattgtaaacgctttgtcataatcaatagaaaagtctattcgttcttagcaatataactcttaaggtttctgtgaagatctggcgcgatctatggggacggaaatagattattcgaacaccgaaactaacacatcaattgtgaccaacgatcatggatcccaattcatccgattcaacgagatctggcttaccagttgagatcccaaacgataacgtcatagacaggcacctcccaacggatctccctctcggaacccaggtcaatgttgtccatggaattgatgcggagaacatctcccaaaactcgaaatcttctggatctaaccaaatcctcccccctcgcaaacaagggacggagagcaaaacgtcacgatacagcctcctaacagagataacccggccaacccgtctaatcaggtccctccgtgacctgccaccgaactggtcgagcttcccgcaatgatcctgaacatgatcaacataagcaaaaaccaagaaattgcgcatcgtaacctcgccgcaatggtgggtcagcagagacgcgactccactcgcatgtcacaggaggtagagcgcgataccgcgggtaaagaaattcctccccgcgaaactgagattcctgcccagatccccatagatttgacaggtaccgtctccccgacagatcccactccaaggactcgtctagactttgcctcgatagaggtctcacctcctatcaaccgggaggtcgcctttttataggcaccactgaacacgctcgtggaaaacccaacaacaaggaattagacacgtacaacgcctacctttccaaggctaccactcccacttgtactactgctaggctactcgcccctgaggtacacgtggacgagaaaccaaacaatcgcgtccacctcccactttctcgggatctcaacccaacaacggatgttcattgtcaatccaccatccgttcaacgaataccagaaagcgacctccttaacggtccaaccgatccccgagcaccgatcgatccgcgtaacgtcgtggatatggaaacattccgcaattacgcagctcaaacaaatgcgaacatggctcaaatactttcacgaatgcatctagtagtgagagatgctcccgacatagatctagtgatcgaagtaaccaggcgcaccccattcacgtataggattgcccattgtcgcatccgagatgccaggagattccgtttcccggagtacgacggaacgagcgacccaaaggctcatctgagagccttccgtctggctataacacgagcgtacctgacggacaaagaaaatgaagcaggtcattgccgtttcttcgtagagaatctcctaggtcacgccctcgaatggtttgctagtttcgaagggaactctattgataccttcgaccagctcgccgccgctttcttaaaacagtactcggtactcattgtaaacaggacgtctgaagccgacctctgggatctgacccaacttcagaccgaatccttgcgcttttacggcgaaaacttcaaagcaatcaaatcaaagattgcgaacctaaacgaggaggtagccatagccgcccttcgcaacggcttgtggttttcctctagattccgcgaggaacgcactgttaggcaaccggtctctttagacgatgcccttcataaagctctccacttcgccaaagccgaagaggagctcgctgtgctggccttaagattcaaagaatctaaaacacaaatcgctccccttgcaactaaaaaaaccttcaaaaagaaaaacgaaacgcaaggacagcataccctattcgcaatagaagaggcagctgaggacgagagtccagaacttgacctcggaaaatattgcaagtacaacaaaaaagaggacattccaccgaggaatgtcatgtcgttaaaaagttaatcgcagcagggggcaaaactaaaaaaggttcaaaccccaagccaaaacccctcctcccaacgagcaggaagaggagcaaactcccaaacgaaagaaacgggactgaacaccggagggaggtgactctcctccacctgctagaaaagagcgcatagacctagtctttacagaactcgatctgggtggcaggacaggaaggtcagtcactacacctccttccgccccgcaaaagaaaaacacgaggctcccattacgcctctcgaaattgtgtagaaatgcaaccgagcacctctccccgaaacgcatcgatttcatcatgggaggatctcagctctgcaacgactcaatcaattcgatcaaaactcttcagaggaaggcagattcctacacaaaaggcaaaagcccgatgatgggatctaatctctagatcacattctgggaaagtgaaaccaccgatctcgataaacctcacgatgacgctctcgttatccgaatcgacgtaggcaactacgaactctcccgtataatgattgacatgggaagctcagttgacgtactcttatacgacgccttca

SEQ ID NO: 22938 - DNA, 588 bp, Arabidopsis thaliana
tgtcgtcaagaagttcacttttaacagaatcaatagagattaccataagaaaacctcgtagttttcttaagatgcaatccactaaggttgtgatagtacccattgagctgaaaaatacactatgtactggaactaagccattttggcataagatgagcagtgaagcaaattcttgaagaacgtataagccacttagattactggctacggttattggtttccttggtacagagttcggttccaaaatcatgtcacagaatgaaactgcagaagtgtctgtacgccctttccttgcacttgcaaaattgaagagccacatttccccctgctgtgcttgatttgcttctctaagaatctcatatatctggatttgagtgacagcagagatttagatcaaatcaaacagcatctacacacttgtataacatgtaatggaacagtggcagactcacatgatgacagagacttccagaatgcaagtcacactaaaacaaaagcaacctaaatctactaggaatttaatatttgtatagacactctagataagggaatatttagttagatctctatactagtgaatcattttgt

SEQ ID NO: 22939 - DNA, 542 bp, Arabidopsis thaliana
acaactctgcttaatgatcagtgttgtggtatagtagagcaactaaacccaaaatttggctcaagagctgcaataaaacaaaagtttagatcagaacacacagctccactccaaatattcaagttaattcaaatctgatattacttacttgtgttcttggtccagagaagttgagtatcaatcaaagaatgattcttatcatcgagccgtttccaagttttgattgtatcaacagctccccaacgtccatacatagtcttctcaagctgagcctcaactactcttactctccttgcccaaccaacctgtccgtacccatgatacctaaaacaattaaaagaagcgtgtgttacaagtaaggcttttatgagaaaagtagcgtgtggtacaatttacccggctccgcatgcgtaacaaaggttgatccatggagttcggcacagaagtcgttgacgtggtcgtgaccactgaaaacacctttgacttcactctttcgacaagtttggtaaagaaaccagagttgataggtggagacaagtaga

SEQ ID NO: 22940 - DNA, 3141 bp, Arabidopsis thaliana
cctatccatgatggtgtgtcgggcgatctgccagtaaccactgtcccggttagtttgataacattattagtatcagatataactaattcatcattcgttgccaattcgataacttttgctcttgttttggttttaataggcttttggcaggggtgccccttctgctgtttcatctccccgccaggttttttttttttttttttcttgtctgctaatcatattgttactgagttaaatttctctcatgtaaattttcaatttgtaatcgttcgtccatgcgccgtggttggtttgcgcaggattcagatgaggtatttcgtagtggttgcgctgttaattctttggtgatcgattagttttcctcattaatgttttccatttcaggatttcacaactccacccccttctaaaaaagcgatggcccccctccaggcatttaaattttttttttttactttagctcatggagctctgtttttatattttacattttaactacttggcaaacagaattatggaaatgttgataatgtcgagggtatgcgtggaagaagaagtaaaaggctccgtactctctctctagcaagttagatggtcggttccagtacgacaagaaaacgaaattgttagttgggcatccatcccctgttattaatcaggtcaacgtcgaccctgaggagcgattccaaaactcactgaagaaactcaaggcgataaggttgttttatcctgttttctaattgtttagtcaatacatattttgttatttttaattatttccaggggtaatctttcagcttgttttctctatagttctattagcatttgtggtgggattgctctatctaataaagacattttggacttaattgaccgcaagaaaaatctgacttccaaggtattatgtctgcgatatatatgcgcatttaattttaaattgtttttctcatttacttaattttttcgtgttttactcgtgcccacaggtaatggatgctctcataagatttagtcgtcatctgttgcgtactgatgatgtggacggcgaaaaacttcgtctcgaagttcttgattcgaaatttgtttcattgctctgccggcatttcacgaagttttcctgatgtaactcaaaaacagagttccagttccctttacctctaattgatattctctccgcgttggcgaatctgaccgtgtgcagttattcacggaggctcattacatatatcagccttttaacttcgacaaaaaacactgggttgctttagctgttgctctaaaatgccggaaaatcattgttttggattcgaatatccaacgccgcaaggattctgccattcatgatgagcttatgcctctcgcagtaatgctgccatatgtaacgaccgcgtcccgcgttcataaagaggccggttagttttaggagaaaactagatcatggtcgaggaacggaccaaaatactaagtagtaagaacgagaaagttcaagctaaaccagctaggtgagctggacaagctagatgaactagctagctaagctatgtgagctaaaccagctggaagactagctagctcagctaggtgagctgaccgacagctcgactgagctcggtgagctgatcgagtactgacccagttgggtggttcggtcagctgacactcgagctggtggactatggtagctcacgggtgaagaggtgtctcggccagaaggtataaggtcgagcgggtaccaacgaacggttgtatcgcccaaaggatgcaaggaacggatgtgacctttcagaaggatgcaaggaacggatgtgacctttcagaagcaaggaccggatgtgatgcttcaggaagcatccattcgccccctatataagggaggacgcccaaggcctttgggatcatctcacaacaacatccatacaccacaaatcattcttaaaagagtcccaacacatcccgaagttgttggtcggaaaggggatgcggctcgaagagtataactcgaccgaactgatgcgcatgctacctcccaatccaacggttcgatggagtgtagaggatggagagggtagaccgttcgtcttagagactaatcggatctggtagaccgattgtcagatcggatcggccagaccgatcgtcggacggatcggatcggccagacggattggaccggacaaaccgatcatcggacggatcgggtgggacaagccgatcgtcagacggaacgggttagacagactgatcgtcgggtgggatggatcgggaaaagtgttcgaggaagcacaaggataagtgcatccgaacacacccaagggtcgcccatggatgcaatcttaccggtaaagggagaaagcaccaagaatgggtaaggaacgtgattcaccatataggatcaatatcgcggccgccttcatgtatctatctcctcagccatggtgaaaccgatcggagatcggtaagaccaaagggtgactcgacggataaccaacaggaaagtccacggtgggaaccgatggacaaaacggatgttggacccgcgagcgaacctaaggccgacggaagaaggatttcatgggctagcctacgatgctccggtggatgaatccacagacccttaggtgtgaaaagaatatcgttcggatcgtatggatggattgataagctgagagctttaccgaccaccatggaccggatggctaaatggttagtaaaccatgggcggtcatagcattaaacgaccggatcggaaacatggatggttcgataagccgaagcctcgatcgtccaccattaaaccgaagggacgtacatttggaggacagatggaccaataagtcaagagcttgattcagccatcgtgaaccaatggaatcatacgatccccaatctctatcttaggacttagaccagtggggtaggttggttgtatggctaagtaacgatagggattggttcatcaatgcacgatcggatttgaatcgttgaacgaatggaataaggcgacaaacgggctaaggaatcatgaccaatatgtatcagatatggaaaagttcaagaaacagcttatggagttatttgagaaaggttttgttctatctagttcattttcttaaggtgcacctatattgtttgtgaaaaaga

SEQ ID NO: 22941 - DNA, 2282 bp, Arabidopsis thaliana
ggcaaaactatggaagtatacatcgatgacatgctagtgaagtcaaccttatctacctcgcacttcgaccatttacagcaatgtttcgacattttgaatgagttcgagatgaagttgaatccttcaaagtgtactttcgctgtcaccgaacgcggaatcgaagcgaattcgaggcagataaacgctttcccggttaatgacctaacctcgcagtataagggaagtccaacgattgacatgtcgagtggcagcactgaacagattcatatcccgatctaccgacaagtgtttccctttctacactttactgcgaaaagtaagcaaggggtttatctggaacgaaagctgcgaggaagcattcaagcagttaaagcgttacttgtccgaaccttcggtcctcgcaaaacgtgagttcggggaacagctttttctgtacatcgctgtttcagagagtgcggtaaccggcgttcaagtaagagtagagcgaagtgacaagcgtcccatcttctatgttagtaagtctttctccgacgcagagaccagatatcccatgatggagaagctcgctttagccgttgtcacggcagctcggaaacttcgaccgtatttccagtcacatccgatcgtcgttttaacatctttacctcttcgcaccatccttcatagtccaactcaatccggacgattaggaaaatgggccatcgaactgagcgaattcgatcttgagttccgagctcgaacaagtttaaactcaaccatggatacttcacgtcaatggggcttcatcaaaacatgggtccggagtaggaatttgtctgacgctcccaccggtgaggtgctggagcagtccttccgcctagcattcaacgcctctaataatgaagcggagtacgaatcactacttgttggattacgactcgccgtcggggtaggagtcagaaacctgcatgcacattatgactcgcagcaaatcgatactctggcgagtatgaagcaaaagatgcgtgtatggaagcatacctgaatttagtacgtgaggtgtcaggaagattcgagcagttcgagttaaccaggatccctcgagctgaaaattcggctgctaacgcattggctgccttggcatctactttcgaagtaaccttacctcgcgtaattcccgtcgagacaataagccaaccgagcattcgtcttgatgaaataagtttcgttaccacccgtgccatgcgaagaaggctagatgctcagtcagcagagaatggtcttcatcagctcggggatgatgaggaaatttcggacgcagttcaccccacggagatcgtggaaaatcaaagtcttccagataatcataatgcgccactccctgatcaaccacctcatgattggggggcagactggagagaaccaattcgggattacattctcaacggtacgcttcctgccgagaagtgggcagctcgaaagttgaaagccacttgtgcacgtttctgcatagcaaacgatattctctatagacgaatcttctcagctcccgacgctgtgtgtatcttcggcgaacagacccgaactgtgatgaaggaggttcacgacggcacatgcggaaatcacaccggaggtcgctctttagcctttaaagtgaggaagtatggttactactggccaaccctggtagcggactgtgaagcatatgcccgtaaatgcgaacaatgtcaaaagcatgcaccactcatccttcaacccgcagaactcctcaccacagtttcagctccctatccgtttatgaaatggttaatggacattgttggacctctacacgtgtccactcgaggagtacgcttcctactcgtgctgacagattatttctcaaaataggttgaggccgcagcttactccaacataactcacgtccaagtttggaacttcatctggaaagacataatttgtaagcacggcctgccttatgaaattgtcaccgacaacggatctcagttcatctccgagcaattcgaggtattttgtgaagagtggcagatccgtcttagccattctacacctcgctatccgcaaggaaatgggcaagccgaagcaatgaacaagacaatcatctcaaaccttaaaaagaaattaaacgcttacaaaggcgcgtggtttggagaattgcaaaatgttctttgggcagttcgcacaactccaagaagagcaaccgatgaaactcctttctctttgatctatggaatggaggcagtcattcctgctgaaatcaaggtcccaagtgcgaggagaat

SEQ ID NO: 22942 - DNA, 2441 bp, Arabidopsis thaliana
tgagtatcaaatcacgcaataagtggtaaatgcgaattgaaagggaaagaaaacgatacccttcgctatagatgtgttccttggagaaaccaatcgcgatctctcctttttcaccagcattcatgatatgaacctcgaagtagtaagcaagacagttagtcggcgccggattttcagtctgaagaactacgccgtcgtgatcagggcccgtgtattgaccggagagcccatcgggagaaacaaaggtaaattcgtctgaaccaccgaccgtgtatagcgccgttggccgcaattcttcttcctcttcgttttcctccatagcttctctctggtcagaatcccccaattcgtccgaatctattgaatcgtagagaaagaaaccctagaaatgcgattgaaatgaaacccccaaatgttgttgaagggcatcaaaaaccacttcgcgcccaatgttgtgtttgccaacaataaatacgattaaaccagatattttttagttaaccggtaaatcaaataaccgtatattattaagtaaatagatgaaactcggtatattattaagtaaccatttctatgtttttttctcttttggtttttactttttagagtgcttttggggtgaatttacaccttatgtgaacactgtttattaatgtttattaatgtttgtcaatatcaattatacaataaaaatttattaacataaacttttctctctcggttctagggatggtattctcatgtgatctcttacttccaaatgatgccatgcttctttattcagatccggaaatcagtactatgacgaaggatatggagctcctccatcacacaagcctccttctaactgtggaagtccaccttacgaccctgctccttcaacttcatcacacattgatatggggcttgcttgttccctgtggcactgttggaggaggttttggtacagtcagtactcccagtagcattccagagtttgatcatcacatgaaccttcttcaggcactttccagacacccgcaccgatcccattcgtgctctcttccgtcaaggtacaactttgttggggtcggattcccccacaagcaagaccgagccaaacagtctaagaataacaatcacctcatggttaaacatatgattggcccctagcctagaacaaagcacctcgggaccttattcgatcgaccgtcccgaagagagtttgtaaaatggctcgggtgttaatcatatgaacacagcccgaaccaatcgtgagaacgctgcgggaaacatctatatcggctcgggagacagccaactgagcttaatggacagtcatcaagcgcgccccgagccggtacataccgtttgccccgaagccacctctcaaacgaccaccgagccgtgaagaacacgcgaggcaaagacttgtaaaaaccattcattctccaaggatcatttccggtaaaatgggatcttttatgggactttcagaaatgataaaggagaatctttgaagataatgttgaaatcaggaaatctccccaaaacctccgaagaataaggagaatatccttaggacgattatcctctataaccgtgctaaggataaataagaatcttccgaaaaatatcgctaggggggcggtttaaggatcctatataaagtgcctcagggacttcacaaaagggagatctttggatacggagaagaaacacataactttatacctattgagaactacgaatggcttgatcccttcacagggtacgtaggcaatccatcatggatgcagctatacctttttaaaaccctaactctttttctgttcttgagcaaaaccctaatgtatttcataagagattagaacatgttttgtaatcgagtcttggatagaatacctaatgaagagaaattactagatttgttttccctctctaaacaaatctattgtgtgaatccttggttcaacagactcctagtccacgaaaataacctcatcaattcattcacaaaagacttgtagttatatgatcacgcgtctacgtaggtttcttacacacacacgccacaagaagagtctctcgttctttcttcaatcacttgttaatactttttgttggaggatgttgactcaatctgtgtatagattttgcgaatatataaccgtttctattttggttacctccgttgctgtcttctctgtaagattcgccactttgatcatcataagtccatggtatcgccaccgcacttttacgttccgccggtggagagcggcggcaaacgatgattcgtctccgcctttctgcgccgtgtgtctacaagaggcggaggaaggagagaagatgaggcgattaacgatttgccgtcactgtttccacgcggattgcatagattgtgaattgtttgactaaaagtgatacttcattaacgagaaaagatggctttaaatagc

SEQ ID NO: 22943 - DNA, 2713 bp, Arabidopsis thaliana
tctagttgtctcctaaaacatcctgccctctttatgaacgcgggaccagtcgtctacaagtctaccccccttaaactgaattcgtcctcgaattcggcgtgtgtaagatcttggttactccctaactcgagacacgagcgttacaagtctaccccccttaaactgaattcgtcctcgaattcagcgagtgtaagatcttgtttactccttaatgctttcccatctttagtctctccaagactttagatatcacgtttgatcaaatctctatttccgagtttgatcaagtttcccgatctttgtctcttacgacactcgatcaaattcctgatcctagtcctctcccggacttgatcattatttccctgatctttgtcctttcctggacttgatcaatgttttctgatctttgtcctttcttggacttgatcaacgttttccaatctttgtcctttcctggacttgatcaacgttttctgatctttgtctcttccgacattcgatcaaatttccgatcctggtcctttcccggactcgatcatattctcgactaaagtctttttccgactttgtcaatatttccgaccctggtccccaccggactcggtcaatattcccgacataggtctctttccaaccttgtcgtttttccatgatcttggtcaatttctgataagatcaaaaccccagaaatagtcaaatcccgactaagtctgtacccgatcttagtcaagtttcgactagatccaaatttcattgatatcggtccatctccgaatatatcaacccacttttccgtcatgtttgagttttgactacaaggataatatcttggttcctgatcgtgagttgggtaactatttccgtttccgtacacaacgatcccttaacttccttatccgccagaaccttactatgacgttttcccgagcacctatccatcctaggatcaagcatgctctgataccaacttgtgagaccccatcccggacgtctcgacgtccggcgacgttgtactcaagttcgcgcctcttcccggccgaacctcttaatttttcgcgattcaacatagaattgcctttacgaggctaaattctataatcgctctcttattacacagcggaagtctttctaaccttggtttaattctaaccaactcttgtaccggttttatcgtctttgttccttagacttagatcgatcctttactcggtcaagacatgcatatgttcgctaaccattctaagccaaacaatcgcatattcctttatcctactttcacggtcaattaccaaacgtctatcttaactaataagctagatcgttacataccttggtcaatatgcggatttgattccttagcccgtttgtcgccttactccattcgttcaacgactcgtcatcggtcgtgaattgatgaaccaatccctatcgttacttagccatacaaccaaccaaccccactggtctaagtacaacgatagagattggggatcgtacgattcccttggttcacgatggccgaatcaagctcttggcttattggtccattcgttctccaaacgtacgcccctccggctacatggtggacgattgagtcctcggcttatcgaaccatccatgtttctgttccggtcgtttaacactacgaccgcccacggtttactaaccgtttatccgtccggtccatggtggtcgataaagctttcggcttaatgatccatccatgcggtccgaacgatatccttatcacacccaagggtccgtggattcatccactggatcatcgtaggctagcccatgaaatctttcttccgtcggccttaggtttgctcgcgggtccaacatccgttttgtccatcggttcccacggtggactttcccgttggttatccatcgagtcaccctttggtcttaccgatctctgatcggtttcaccatggctaaggagatagatacatgaaggcgaccgcgatgttgatcctatatggtgaatcacgttccttacccattcttggtgctttctccctttatcggtaagattgcatccatgggggacccttgggtgtgttcggatgcacttatccttgtgcttcctcgaacacttttctcgatccatctcatccgacgatcggtctgtccgacccgttccgtcagacgatcggcctgtcccatctgacccgtccgacgatcggtctgtccgatccgtctggccgatccgatccgtctgacgatcggtctggccgatccgatccaacgatcggtctaccagatccgattcgtctctaagacgaacggtctaccctctccatcctctacactccatcgaaccgttggaccgggaggtagcatgcgcatcagttcggtcgagttatactcgccgagccgcaccccctttccgaccaacaactctaggatgtgttgggactccttttagaatgttttatggtgttttggatgttgtgagatgatgtgagatgccttgggcgtcctcccttatataggaggcgaatggatgcttcccgaagcatcacatccggtccttgcacccttccgaaaggtcacatccgttctttgcatcctttcgaaaggtcacatctgttccttgcatcccttgggcgatgcaaccgttcgttggtacccgctcgaccttacaccttttggccgagacacctcatcatccgtgagctaccacacttctccagctcgagtg

SEQ ID NO: 22944 - DNA, 3035 bp, Arabidopsis thaliana
tcagactgagatcctacagaagatgactagtatgcgatgggaaaaaatttaaatggcaaagcagagtcatagaaggattgtcttcaagggtgatgaagctgaaagattaactatggatgtataaaaaaaagagttaaaaagttttcaaatggtattgatccagagaagatggaaacttcactagctatcaaggaggatgaagatttcacaacagaatggtttgcaccagaagatcagaaaggagttcacttagagaaaagaagcctagagagcaagttgttgagtgaggaggatactcctattccgacttattctccaggagtgcctaaacagcccaccaacccctctgctgaagaagaacacttgattcatgatcctgttgctgaagaacttctggaactctaggttggatacaaagctcaagaggataccattggggagctaacttacaagatggaaggactgaaccatgcaatcttggaacttcaagaaatggttagaggctaccctagttttgaatttgaggattggtaaaaggaacctggttcagaagaagaagattactctgctgatcaggaagaagcttactttgaagaaaaatcaaatgagtactcatcctaccatatctcaagagaggatgcagagtatgattcaagcaatgaaaattcaaccacagaagatgaggacttctctgttcctctcttcaaccttttttctgactaagctctgtaagagtcaaccttagtgacttaaaacaagctcacttgggaggaagttccatgtctatccatgtatataactttctatttttcttgttatttttgatgtttttgtttaagtgtttcaggtttgttttagtgaccctaagggagtcaacggtcgagtaaatttaaaccaagtcaagaaagatctcaaccgttgatcgagtaaccaagggagaaacattctccattgtttgctcgagtgatttcttttgatttattctggtccgtttgatcgagtgattgaagatggagcatttctcaccgtctcatcaagtgaagaaaccaaagagaccctcttcgtagacaccgacgcctcgtgaaccgtctttattgaaacgctgttgtccctttgtcttcttgtcccccccccctcccataatcactttggtccccccattgcaattcccgaactcaacaacctcatctctccacctcccataccaaagcattctcgaatccttacaattctctctttatctccttcacttcactttcttatcaaaaacttttcacaaattcatttgtttcctccatcattcaatctcctaatctactgaattttagttttgagtttctcccaccttagttcttgatgatgaacaggcgctcgcttttgtcaaggattcggaacaaagctctctccccatcgaagaggtaccaaacaccttcttcgcatgcagcagctcgaggaccttctgaactatcacccttggggtcgagcaggagagaacaagcaagtttcgagatcgatcatagtgaatcgagccaagaggaggaagtgatgcaagaagaggagaccttcagctctccagctggaaatactcgatcccgaaggtcgagtaagtcctctacaagggaattctcgaggaacaaggcatatatcactcgagggaagaagcctgtggggaggaggttggagctggtagatgaagactccgaggaagaaatggcttcaccagaggaagatgatcaaacagagaaaggaggcgatgatgattttgaatcaaagaagtgtgcaactcaaaatgagtactacaagctgctgagtttttgggaactcgataccctcatcctgagaccatggagagactcgacatctatgatgatgtagactatatgtttaagcaatgcaacctgaatattcacatgtttcagccaatggaggcgtatgaggaagagaccatccagtttctttcatccatggaattgttcttatatggagagtcagaggacgatgaaatcaggccagacggaattttgggatacttggagttctgtgtgtatgacgtagagtatcggcttccaatcgagcatcttgagctgatgtatggatttccaagtacaaaacacacgagtcatcgttttgacaagagagagcttcagtcattctgggccacacttgggtctaagcatggattttcatcctctagggccaagagcaacgaaataaggagtcgggtggttagaaactttcataggtccttggctagtgcgctatttgcaagagagaggaatggaaccttcgttaatggagaactagagttgatggagacagcgctgcaaaagttgcttggtttaacatcagatggtacagttctagctggagatcagacaaacgctttggtctcattctacctaatcgagcacctgctgggttacagaggatgggctaaagggacttaagaaaccatgaagaatggttgtgagaggagttgtgacaccaattctgagagcatgcaatgtacctcgacattcaaagccgattcccccgagatggattgatatgcaacaccttatcaattccaagagtttttggtcgtagcagaagaatgacctatataaatataggttcgatcaccccacagcatgacaatctattttactcctcccaaatcccgcttccacttcgatcagagatggtggaaacattgagttttgcccaccagtggagaacctctatacttcaggtgatgaagttgtgccgatagaaggagtgaatgatgatgagaccccaatccattattcagataatgaggcagaacctatggacgtgtcttacataacacaacagttttactttgaggagtactccgcaccgaggcaaagtaaagactcaaagtaaattcacaagcgccttggtttcctccaaagctggtgtaagttccacgacaaggctctcgcggcactcaacaagaagtttaacaacctccaactcaacatcaactgttcttcttaaactacggcaatgccacagaacatgccttttgggag

SEQ ID NO: 22945 - DNA, 3702 bp, Arabidopsis thaliana
gaatggttgggaaatttcggtattgatcacaataaaaagttgaacatcatttaaataatttaaacaattttcttttataattaattcattttttaactttttgacaaatttttggtttcgggttttcgggtagaggaatttaagacccaatacggtaaatttttgggttcaatttcgggtctaatttttcgggttggttccgattctggtaatcggtttcggttttttttcccaggcctaaatggttcattcaactctctggactacatttttttgagagtttatcttttaattcttgaagtttctgaaacagatatctttgaacttagttcggctgtcatttattggacttgggacaatctacctccgtctaatataatgctcatatcaaatgagttaatcttctcgagtcttcttgacaagctatgtggattcggatacaacgtcgttcggtcaatatttccagatgatcctcagcaagccgcgtccgcttccacttcccagggccgtacttattctgggaaagcttactggcaagcttacgggcagatgctatgggttcggaggcactagaagaggacaagtgtagtgaaacgtgtgaaactgcctttccttgtgcgcaattcatagttgttgtccaaggctttgaaaatttctccacgcatctcaagagtgaagaacatagaaagaatgtaagcatcctatccaaaaaaagacagacttgttgtgtccatacatttttcattgtctaactacatatgtagggttcttctagttatctgttgccttaatttgactagattttttttccgtccgagcagggacgatacttcgataacgatacaaagcagctgaaagcaagaagaagaagaagtagaagaggatataagacttgatgggtccatatggcgaatgtcaagactcgcttttacttttcagttaactaatacttttataagaaattttcacggaagtggacgaaaaaagatttgctctcaccgtttgtcaaagtgagaactggttttcacggtttgtcttttcattcaatttcggaccaaattacccctgagaaaacttaataattgcacaaaccaaaccgtgcagcagttcgtatcggttaagttgatggcataaaccaaaccctacagcagttcgtttcggtttagtttatgcggttcagttttgaaaaagacaaaaaaaaaactgaaacgaagaaaccgaagaaaaagaaaaagagaagagagtaacagagagattcgagagagaattagaaagcgaaacgaaattcagtatccattgcttcaaaattcgacataacttcgaattgttgggtagttgaattgagccactgaactcccacaaccggggaaagttactgtttctcccggcgaacgaagagaaagttactgtttattccggcgagatagcaactttagctatggctgggaataaagcaaacgacgaagtcccgaggaagcagcatggtccagggaaggagaagcgggtattaagagtttccccgcggagaaaacgctctgcgacaaaggcaacggaggaactgggttagaatctctcatttaccgtttgttgtttttgggtgtatcagaattgtaaaagcttgtttgattaaagggttagaactagtcggaatttagcatatctttaggataaaaaattgagaagtagaattggaaatctctgtttccgccaaaaatatgattttgagttataatctggaaaatgtctgtgtacgtacactacttcgttttgcttaacagtatatcacttttaattgcaggtagtccaagtgttgctccaactgaagatcttacagttgaagagttaccaccaagactctttgctctagaccggtacccttccgagacgaagatgaacgcgtactctaaacaggagtacatttctgacatagcaaatgtactaaaggcgaaaccagagatgcagtttcttctcgattctccatttggggaactttttaaaataccccaaaacaaggcatctttcaatgctaagcttgtccttggactaatatgccgtcagttagtgacaaagaaggtgaatgagatgtggattgtattcggcggtcatccaatcagatttggattaagagaatttagtatcctaactggactggaatgtgggaagtatcccaagaagaaagacgtggaggatgttatcagtgtgaaacctgagtgtgagagtgtttggaagactctgtttgatgagaggtttggggacacggttccaacaattgctgatttggtgagctggctgcaggaggaggaaagcatggaggggtggaagcaactggcactatctcttattattttggttgacggtgtggtagcggcccacagtaaccccaacaggcctacttcgaagactgtcgagatgacgaagaacctggagttcttctgcaaatacccatggggaagggtgtcctttacccgtactttggggaggatagcaaaattccaaactccttacgatgctcaacaactaataaggggtttacttgtagggtcttatgcaatccatggcttcccattagctctccagcttttagctttcgaaacaatcccatcaattgctaagctaggacctgatgatgtacctaacaggacatttgctgagaggtctatccatcgtcttgcctctctgcgagcaatccggacatctcgcattttggagtgtgaggctgctgatgaggtgtgttaaattgtgtatgtacgtacataataagtaaatgtacattatctatggttaacatacttatttgtgtacgttgaggtcaactatattgtgaaaccagctgataatgtttgtcctccatctctttcatgggatgatgaagttgatgatccaagggttgattacattgaggcactgttgatagatgggcaccagtggcaggaggatgaatgggttggaggctatgctagagtaccaaagcagttgcgcccaccacaactagaagagacaggtaagtataagtataaaggttgtttacaaaattttttggtattgcacccagaagaaaaccaattaatagcagcaactggtctattgtagatgttaagaggaaacgaaatgcaccgggcccgagccctaaagaacctgctatgaaaaaacagaaatctaaaatggactgtgataaagaagagaatgctgaggattgttttggagagcctgtgcctgagaggtttattgttgaaatgaggaggtctttcaaggagctggaagaccaaatgtatcaaatgcatgaagatatgaaagactttgtccgtgaccagatacgtgctgcccttgatccaaaaggcaaaaggccagaacaaaccataccttcccatgattcgcgggaaccacctacttctatggataaggcaccggttactgggaagaagccatcgagaaggatgtctacaaaaggaagcactgaaacgagaaagtcttcaaggctgactcgtgtttctcatgatgtggacactcctgcactttctgttggctgtaattccaaagaggaagatttggatgtccctggagtacataccactgctgtcgaaggaagaagaaaaccgtcaaagccgaagaaaaatgtttcttttgctgttgacactactgagctacctgattccaataaggaagatatgcaaggattcattgatgaacaggtaagtcatgtac

SEQ ID NO: 22946 - DNA, 562 bp, Arabidopsis thaliana columbia
ggaagcacaatctctccttgtccttctctgccgggtaagaaccatccggtgtcacaagcacagctccggtgtaagactgtcctgctacacgtgctgctccatggtaatggaacagtccccaacttagatcatcagatacatccacaatagtccaaaactcatttgacaccacaccattgtccaaaacactgaaacgaaacgttgcagggatctttcctcgcttaaccgagtatcttctccttctccacaccaacttctcttcgagcgtcctgacctgaaacacgggctcataccaaaacgacgacttccctttccctctgtagaatagctggtactgacatggaaactgatcataagccgggttttgtccagccacgacacgccagctccattccaattcccctaaccacccaacaaacaagtcttccgctgtatcatgacacaactccttccctcgaaaactcgtcatgggaggcacataaggcttctcagggatctttgcatccagttctaaacaattgtgcttctgtagtaccaaagagagaaggcttcaaagtaagga

SEQ ID NO: 22947 - DNA, 2411 bp, Arabidopsis thaliana
cgagtaacctcagctctacacactcgacgacattactcgaccccctggtcgagtaccgcttcgccacaccacctgaccacactcgaccattcactctaccacgttactcgaccatcctggtcgagtatcatcactcaccaccatcaccatcactcgaccggacactcgatcacgtcttcacagtctactcaaatccgcactcaaccagacaagctgagcacaaggaacaaaagaggagaagacaaagtgtttggaagcggcctggacctccatcggatcacgaagcccatctcggcccattatcactctatgggccgggcgattaggttattggcccgtctactatcattttatttcgtttggtataaatagatgttttagggttctatcctgggacatctagtcgacattgcgtttttgcttcagttttattttcagttttactctgctacgccgcttttgcttctgcaacctgtagttcgcgatttttccaagttattgagattccgcgtttgatttcattagtcatcttgtttctctactctttatctctttacttatgcaaaattatcgtttacctgcgtttatgtctttgagcatgctgtctgagtagtgacttagaattcttatggatgggatagagtagttgtggaatccgtagtctgtagaatggttaagttttagaattgattgaatccctttagaactagttgcgtttactgcttatttctttctgatcaactggaattcgatcccaagcattcccgcacccagaaggtgttcgatggaatgcttgatccactagttcctgagatatgcgtctctatcccaagggattggccgtttagagcgtttattgactttatcagtctgttcttattgcctgcatagttagattccgttaatgggaattagtctgggctaggtttgcttgaggatttctatcacgggagtgaattgatctgttgttgaacctgttgtctagggatagcttgattgcgcttgttaaccattcgaataggctaggataccactctattcaattaccccatccttaggaatttctcttctatttgatttctctgttttatcgttatcgcttaatcgttctcattgcctgtttcttcgttttgcaattactcgaccaatttactcgaccacacccagtgtctggcaacagactgtgcagtcgagtacagctgtcttgtttcctgtctgttactcgaccacacccagtgtctggcaacagactgtgcagtcgagtatagctgtttcatatcctgtctgttactcgaccagttactcgaccacatcctacttctggcatcagcctgttatggtcgagtgattttagtaaaattgttattgcttggcttgacttagtgacttctgatcacatctcatctgtttgcatcacacccatttggattgacaccctaagtactacagcgacatgatagtgctttaggattaattgaccataaaaacatattatcagacatcaccacttcacttcaccactcgaccacgaggtcgagtgccatcatcttcatcaccagaccatcactcgatcacatcactcgaccatgaggtcgagtgtcttcacctccatcatcggaccaccactcgacctcatcactcaacctagaggtcgagtatcttctgacaccactcgatcacatcactcgacccccaggctgagtgacttcatcccattgccagacctctactcgacctcatcactctacctggatgtcgagtatcaccatcaccaccactcgactgcatactcgatgacaagcttcagagccttcttcattccgcactcaaccagacactcgagcacaaggaagaaaagaagactccagctattcactcgacctctcactcgaccacgtgggtcgagtacagttcttaacccgtcctaatactgcgtcgttttgagtattagggtttcaggatatttggctataagtagcatgtacttcacattttcgtagacaagtttttatctagttttattccgcagaccttgtgttctagaccttttgtaatctggatttctctttatctattcagtattcagtattcatcttttgttcttgatttcgtttactgttgttcattctgttatcatcctgctgttacactgttgttatcatgttttcaacttgtttaacgtttacgcttactgttataatgtctgagtagtgaataggtttctgaggatgggttaaagtagtgtagaattctcagtatgctaggtgattgagtattggttgatagatcccttctggattagttgttcttaatgcctattgctttctgatcaactggaatttgagtgcagacatttccgcgcccaaaaggtgtgcgatgaaatgtctgaaccactaattctagagattcgt

SEQ ID NO: 22948 - DNA, 2681 bp, Arabidopsis thaliana
cttccttaggctcgtcatttccttctatgtttagaggtcgtttatacaccaacaattggcgcgccaggtagggtctaccacaagaaaagaagaagagaaggccaaggaagatctgcgagaaggaaggatgccgcgaagtgaaaatgaaagtgaccgtggggagtttgtgaagacaccccagacaggatccagcatgccgccgtcgctccaacaggaggtgagcagggcaaagacgcgacgaacccgatcgaggtcaatcccgtggagaacgaacccacactcaacacaccaacgccgaccgtgggattggagccaggagtacaagggatggaaggacgcccagctctgactccaccagcaaggccagatgatccaggagcattgatgcgtaacattctggcgcaaattcaagctcaggatcgaaagaatgtcgaactgttcgacgttctcactaacgcttacacggacctccgaggtcaaccaacagctcaacattcggaaggattcgcaagcgccatgcgccgagcaaataacacaaggccgagcggtctaaatgccgttggacgtggatatcaagaacgatctcaaaacgaggaaatttaggagctgagaagtacaattcaggcgatgtcccagaaagttcatcaggcaaccagctccactcccgaattagagcagatcctggaaaaaaaccagaagacgccttttgccgtgcatattagtaatgtctcagttcggcatgataacaagatcaagttaaaaagttatgaaggtaacacggacccacaacaatttttatcgtctttcagcgtcgccacacaaagagaccatttccatccgagcgaacgtgaggtcggcaagtgtcagttattctccgaacatctcacaagggcggccttgaattggtttttcgacctacctgctaattcaataggaagttttctggaactttcaatcgccttcctgaagcattactccatgtacatcgagcgcggcacgacacacgcagacctttggactatggcccaaggcccaaaggaaccgcttcgcaccttcattgacaggttcaaggcagtcgtttctcacatcgccgtcccggatgaggcggccatctcggcactacgcaacgccgtgtagcatgagtcaccctttcgcgatgatttgttgttaaaccgaccggtgtatctagaggacgccctccacaaggcgacgcgctatatggaaatggaagaagaaaagctggccttcagcaagaaacatacttctaacaaacagtcgaaggaaaaagttcaagatgactactgcgaaccccgccaacactacaaccacgagtaccggcaggagaccgaaaggaaggctgcatcgtatctcgtaagcgaggcagacccagttgctcagccagccaatttcgataaggctcggcgaacagatgaagagaatagattggatcaatattgcgatttccacaaacgatctggccattccaccgccgcatgtcggcacttacaaagtatcctactgaacaagtacaagaagggcgacatcgaggttcagcatagacaatacaaaagccataacaatacctacgcggcacgtggaggccgagatggcaataacgtgttccaccgtttaggtccacatactggccgtcagcaagaagcaccaccagctaatgaagaagaacgacatcctgacatggaaccccccaaaaaaaatcgagaaaacgaccaacaacataacgacgcaccagttccccgccgaagggttaacatgattatgggaggtttaacccttgccgcgactctttccgatcaatcaaggaatacattaagtcaggggctgccactttatggtcgtcacctgcaacaaaggagatgacccccctaaccttcacctcagaagatcttttcggcgtagatctgccacacaatgatccgttggtaatcgagctccacatcggagaaagtgaagtcactcgaatcttaatcgatactggaagttctgtaaacgtcgtattcaaggacgtcttgcaaaaaatgaaagtccatgaccgccacattaagccatcggtccgccccttaacaggtttcgacgggaacacaatgatgacaaacggaacaattaaattgccgatctatctgggaggagcggcgacatggcataagtttgtagtcgtggataagccaacaatctacaatataatcctaggcacgccatggatccacgacatgcaggcgattccctcgtcatatcatcagtgcattaaaatcccaacaagcatcggcatcgaaacaatcaggggaaaccaaaacttagctcgtacgtgtttcttaattgaatgtaaacttcgaaaggagctggatttatagcaattaaaggacgccgagctcaagggaacagccgaaccgactactaaaaagcgagcttcagaaatcagcacgatgagcccaaacctaagagaagggcagaaaaagaaaattctcctgccagagagctggtaatgcaagttaacatcgatgacttaaactcagagcgatgcgtagggatcggcgctgacctcgccgaggatataagggtcgagctcgtaaaatttcttaagaaaaatgtcgcaacgttcgccgggtcaatagatgacatggtcggcatagatcctgaggtcgcatgtcacgaattgaatgttg

SEQ ID NO: 22949 - DNA, 557 bp, Arabidopsis thaliana columbia
cacaccgtatgtgtctgttgaggtatattctttaggcgatgaggcctttcgtttggatttaggtatcattgtgcctgctgaccatccccttggtatcgaaccatctatttcacccgttacgaccgtgtctataactgtgaaaaggatttttcatgtcgggtccgacacatctgtgtgttcaatcttgaaacaaagaaaatcacacgcttcccaagtctctcgcacttaaagctaaaggatgctcgatggtttctcccgtcttaatttgcttctttctgccttttgttattttatgttatttgcctatgtgatctatttgccaacaaagaaatgcttcccaatggtttctccatgtctcttgtttttttttttatatgaatgtgatattaagaaatgaagaagggtcgtaatttacttaactagctaataaggcttggcttccaaaaaaaaaaaccttacaaaaattttgcattaagtcaccgacgaaggccttcgttttccttcttgcgaagattgtgtcgccttaataagtttaccggtcttttgaaggttgtgtg

SEQ ID NO: 22950 - DNA, 3209 bp, Arabidopsis thaliana
ggcctctcttatgatattcttaatagaaaattgaactttatgagcaaaaaaagatatcaattcattttgaatattatgaccaagataatgatgatgtatttcacgagtatgaatgtgcctaatgtgatcttgcattgttacatcatattcggctatggattcaatcatacctaagaaattaccattactatcttggtaaagtttctcatttgacccacaaaaagctaaattttgtttagcaagatacttcagaaccgtaataattctaatcaaaacaagtctccacctttctttcccttctctaacttctctttgtaattctttatcaatagtttgacttgtctctaatctaactagcatttcattccaagttttcatgtaagccatatgttctacacttctctcatgcttttgaagtctctcgctaagatgtttccaatcatttaaccatcatttgctagcacacttaaataactgataataggtttttagtcaattatcctaaaacaccaatcatgtcgttgtagtattttaggttgtcaatccaaatgggtgtgatgctaacaatcaagatgtgatcagaagtcactaagtcaagccaagcaataacaggttttggtgtgttctagcagttctaagtgaacatgcagaaaacagaaattcaagcagaaacaataaaacactcgaccaacacagctctttgcagagcactgggtgaggtcgagtgacaagtcaagtaacagacagaaagtataacatagatactcgactgcacagtctgttgccagacaactgggtggtcgagtatcaggtcgagtaacaggccaaaatcacaaaaactaagtaacatgtaacaagattcagtaaacaatagcagagtaagcaaataaattaatcaaataaagaattcccgaggatggggtaattgagtagttttgtttcctcagtttacaggtgattgacatgctcaataaattatccttagataacaagttcggtaaccaaatctaagtgccaccgcaaaagagaccctcaagttaaactagtcccagactcaatcaccattgacgagagttaacctaataggcattacgaatcaacaagttaacgcccaaacgctccctacaaccaataacttggtataaagccacgaatctttggaattagtggttcagacatttcattgaacaccttttgggcgcggaaatgtctgggctcaaattccagttgatcagaaagcaataggcattaagaacaactaatccagaagggatctatcaatcaatactcaatcacctagcatactgagaattctacactactctaacccatcctaagaaacctattcactactcagacatcatgacagaaagcttaaacgttgaacacgttgaagacatgataacagcagtatgataacagaatgaataacagtaaacaaaaatcaagaacagaaactgaatattgaatactgaatagataaagagaaatccggattacaaaaagtctagaacacaaggtctgcggaaataaaaactaggtaaaaaaaactccttgcgaaaatgagaagtacatgctacttatagccaaatatcccgaaaccctaatactcaaaacgacgaagtatttggacgggttaagaacttccattagtggcatcacagcttcaatctcgtccaactgcttcgctgcaatagatttgtatctctccatccatgctttcctgaatgtccacggaagagcacgtgagggtagtcgagtaggtttgaatcgttttaccattctctcgattatggcggccttctcttctgaggtggattgagtgagatggcgaaaacaagcagaatggttgaattcaacaacagagacttcaacctgagtagaagcctcccattcttgaacatcactgtccctagtgatgaaatcagggacatgtcgagttggcagctctcgatcatggcagatggtgatggcgtgagcagttgcatactcttttggattctgtatggacttccctggaagtcctgtaactttaggtgcagaggtagatgctgattggccttctaagtatctgactttggtattcaatgcctccactttggcattcaggtcattgtagctgcagtccagcttatggtgcaattcatataatttcttagccatttccattgagctagatgattgtccctgtagcagctgctggaccatctgtttcatttcagcatcacgagcagcaggaccttggttttgctgaggtgcaaacccaggtggtggtggttgctggtagttcccctggaattgctgcttgggaacgaaaccttggttgcagggaacaaaaggtttgttctgactttgttgttgctgcggaggatacacctgatcctgaggattagcaacgtttgtgctgcggtaggagaggttgggattgttggttttgaagttgttgtatcctttgtagccaccctggttgttgttgatgtagcttacttcttccaactggttaccctccccatcttggacttgatattgctcgtcatcaacaaggaagtgcacatgcttatgctggctaagaagaatcctgtccagcttgtcattcagtgctttgatctccttcctgtgtttgtcatcagagtcagctgttcctctgacggtcctatcacagtcttcgttgtaatttccatctgattgagcaaggttctcaaccaattcccaggaaggagctcactaaaacaccaatcatgtcgttgtagtattttaggttgtcaatccaaatgggtgtgatgctaacaatcaagatgtgatcagaagtcactaagtcaagccaagcaataacaggttttggtgtgttctagcaatcctaagtgaacaagcaggaaacagaaaatcaaacagaaacagtaaaacactcgaccaacacagctctttgcagagccctgggtgaggtcgagtgacaggtcgagtaacagacagaaaatgaaacaaagatactcgactgcacagtctgttgccagacaactgggtggtcgagtatcaggtcgagtaacagtaaagaattgcagaaactaagcaacaggtgacaggatgcagtaaacagcagtagagtaaacaataaaatcaatcagacaaagaattcctaaggatggggtaattgagtagtttcgtttcctcagtttacaggtgattgacatgctcaacaaattaacctagac

SEQ ID NO: 22951 - DNA, 594 bp, Arabidopsis thaliana columbia
tgcatattgaggggaaattgcattccaccagtaacttgttcagctccgcagccctgctcacgctcttcacaaaaatgacaacttgattgaagtccaacgcatcaagaaggtcattcaacttgcgatttttctccatctcgctcagtttgatgtagtgctgttacagtagaacagaaaaaaggtcacttaagtatcaaacaacaacatatatttacattgaatacgaagacctcaaaccagttaaacgtacctggacaagtccatgaagagtcaacttggcttcatcatcaacatatatttccattggctgaaaggaacagataccaggtaagaagtattagctagctttcctcaggaaatgatttacactacaaaagtgaagatggatggagatccctgaactgagatcctcgtccaccttttctcttcaaagatgtgagttttgctatgaaacatcaatattgctcggaacattgagaccatacgagcacgatgaaaccttgggaaaacacagtaccccgacccaaaacccacccaccacgtgctagattttcaaagaaattgaaactgaataaaaggttaagatgaaaggaa

SEQ ID NO: 22952 - DNA, 583 bp, Arabidopsis thaliana columbia
  unsure (1)..(583): unsure at all n locations
tgaaaaatttattttccgaataaactatctcataatagtatgatattagctacatatttccagtatagttatgatttgttaacaatctgctttgattaacttcaaaattcgtttgttcgagtttctagactatgcaatggtgtgaataagaaatattaatcaaatttcttttcaatacattgtaatgcaaaatggctcttctacttttcgatatatttttataattatttgtatggtagctaagtacttgatcaacaattataataggcaaaataattgttagctatctatatcagactagggagtaaattaaacgagctttactaacaaaaattgtagaattatgtttttgcctcatttagtttcacccaagcaacgaccacaactacaagaaccgatttaagctatttacaaaaccaaaaaccaaaaaacgtcaagggttcttcacagaaactggctgagccagtggnagtctgcagcatctttctctagctcatctttcatctcacgaaccccgttgaagtgaatctttaagctccattttatcaagtggtatcgctgcaaactctttcagaaacttgtg

SEQ ID NO: 22953 - DNA, 950 bp, Arabidopsis thaliana
tttaaaacatcgtcagggagtgggaatctcatgcttctgtacacgggaaataggctcttcgttaccacctagcgtcccacgtaacagtaatagttccttgcctctcaagttgactccatagtgtacccctttctcatcactacacgttaaacaccgttaaataacgctcatctaaggctcgctgtatcaaaaacagaggagtctgatttacccgggaaggaggagaaccggtgaatgaaacgagcatgttgagggaaccgcaacagtcggcggttaaagaggcggtcatgtcggcgaccaaggcgtccggcaccgcccaaagcttcgaaaccggcgtggcgcattctctagcgaatttcctcaaaattctctgcgtatgttcaaccgccgctctttcctccggatccaccgacccattagtacacctgctgcaaccgccgtaatggttgcacgcgtcacggccagaaccacctctttcctggtcatttttaccacagaatatgtttttttttcgatctctgattaacacagtaacaatctcaaagaaaataagatgtgttcggtgttcctcttgttagctttttttgcgtatcaagttgaatcattcaaacttttttttttctcactaaaccggataactcggtttaagcaaaatttacttttgggttatcagtatgaaatatttttggtttgatttggtatggagagaagaaacatcggtctggttctgtttaagtaaaaaacaaccgcaagtatagtgtttcgtaattacttggcgatatcttcactaggtcgcgattttccatgtgaaacaaatttaagctatcattaaaaaaacgtttttacaattgagttattttattcgtatcattaattgctctctttttcataaacaaagaacacaagttgctcaatcttcgttgagaaattaatgagtaaatatagattaa

SEQ ID NO: 22954 - DNA, 481 bp, Arabidopsis thaliana columbia
taaattataagcaacacttacctccttatccttctcagttagggttggcatatcaatgtgaacttgagagacgtgcaatgtgaataacggaccacccagagtagcagcattccttgaaatacaaatgacatcatctcctttaacttcttcaacctgaaggtttgtttaaatggttagtcttctcacaaaaaaaacatctaaagtctaaatttgaattccagagaacagtgtagagtggttccataagcaaaattcttttatacctcaagccaaactgaagttgtttcactaccagtgaagaggtattgtccaacaaagatagtgtctcctttcttaaccgcctgaatacatcaaacaataacatccatcaaaccctatagacacgaagcaataatcatcttctcccaaaaaataaacggtaagggttatatatagaaaccttcgctaacccatcaaaattaatgggaaggacttcagagga

SEQ ID NO: 22955 - DNA, 523 bp, Arabidopsis thaliana columbia
agtgtgctttaaaggtgctactggcgaccagcacggtggcgatggtgacgatatcgcgcagggaaacgccttcggtcagcagcgcccggtacactttcagcaactggctgtaattgagcgccgcctcaaatcttccgccagacgcggtgccgtcgacgataaacggttatgcaactgcgtaatatcatcatagttaaacaaatcaggaatatagctgcgcacaatcttatttacatgggtagcgatcacgctggcgctgtcgatcacctgataccccatattcagcgccttcgctttctgcgccgcctggatccaggtgaccggcatcccgtacgccgggtcgttcccctgcacgccgtcaatctcgccgtaggtttcgctggagggcagggcatcagtttatccgcggaatatccgcttcatcagcctttatgccgttgatgaaaatggcgtactgactgggcttaaggcggaagttttccgaatgcggatctccggcagcagcacgccgttgccgtcagaa

SEQ ID NO: 22956 - DNA, 547 bp, Arabidopsis thaliana columbia
  unsure (1)..(547): unsure at all n locations
nnnnnnnnnnnnnnnnnnnnctaaagtcgcgccactaagtcacccttaagtacgccgttttccacattgcctttggtttcaagcgtcgtggtaaaacgaaaatcggggccgagttgaatcaacgccgccagcgcagtaatcactttctgggtactggcaggcagcgccatctgctgactgtggtaatcaatagcgggggccgacgcgccgactttttgcaccatcagggcaaggttggcaccagcggggagttgagtaatgtactcatcaacatttgcggcctgaacactgaacgctatacagctggtcaatccgatgataaatctggaaaatcgcataatctcgcgctaacaagctggaatcgagccgtcatactacggcgcaacgccctataaagtaaacgatgacccttcgggaacttcagggtaaaatgactatcaaaatgtgaattgtagctgacctgggacttgtacccgggtcggtatttttttgcttctggtcccggtaaggagttatgccgggcaggctgaacagcctggggtgggtg

SEQ ID NO: 22957 - DNA, 530 bp, Arabidopsis thaliana columbia
aaaaataacgatacagttaccactagtgctccagtaactgcttttaggtgctaccaccacaaacaatattaaacttactggaattaccctttctacggaagcagccactgatactggcggaactaacccagcttcaattgagggtgtttatactgataatggtaatgattactatgcgaaaatcaccggtggtgataacgatgggaagtattacgcagtaacagttgctaatgatggtacagtgacaatggcgactggagcaacggcaaatgcaactgtaactgatgcaaatactactaaagctacaactatcacttcaggcggtacacctgttcagattgataatactgcaggttccgcaactgccaaccttggtgctgttagcttagtaaaactgcaggattccaagggtaatgataccgatacatatgcgcttaaagatacaaatggcaatctttacgctgcggatgtgaatgaaactactggtgctgtttctgttaaaactattacctatactgactcttctggtg

SEQ ID NO: 22958 - DNA, 1092 bp, Arabidopsis thaliana
gctacaagttattaacaaatctgagaaagctattactttgaaagctgatggccttgtaactttgacaccgaatcaagatcaagaagcttcttctgaagttcttcccattaatttcaatggacttgccaaggttctctatgacctttgtataatgagatgacattatatatgtaaacaatggtttactgtttactaatatagacgtgtgatgggtgttcttgtttgatgttttcaggcagtgaagaaaggagacaccatcttcgttgggcaatacctattcactggtagtgaaacaacttcagtttggctcgaggtaaaatatatgaagctgtctaatgggaatttggtggtatctctatgttaaagttttgatttttatatgtgtaggttgatgaagttaaaggagatgatgtcatttgcctttcaaggaatgctgctactctggctggttctttgttcactttacactcctctcaagttcacattgatctccaacgcttacagagaaggataaggaggtcagttttcttctaatctccaaatctcggtgatcacttcctccctttataatatatatttttaatcagagtgtttgaccagattgttttgatttggttatcttctaggttataagcacatggggagttcaaaataaaatcgattttctctcattgtcttattgtcgtcatgctgaggatgttcgccaggtctgtattattaatctgcctttccgttcttgtgtcatacttctatgtgtatcagtgtatgcactattaattctgagcttctgataagcctgaacaataaccaatttttgtttcataacacagacccgtgaaatgcttaaaaagttgggcgacctctctcaaacacaaatatttgctaagattgagaacgtagaggtaagtgctatgcatttatttattatgtatctgtaatcttcctttttcttaagctgctgacattgaatttatttatttatttagggactaacccacttcgatgagattctacaagaagctgatggcattattctttctcgtgggaatttgggtatagatttacccccggaaaaggtatgttggtggttag

SEQ ID NO: 22959 - DNA, 776 bp, Arabidopsis thaliana
tataagtacatggggagttcagaataagatcgactttctctcattatcttattgtcgacatgcagaagatgttcgccaggtccatattctttttcataatatattttttccaccttagaagtatggctacttcgtttgggttctttactcactactaattctgagcttctgatacgcttgaattatcatttttgtgccacaacacaggcccgtgagttgcttaacagttgtggtgacctctctcaaacacaaatatttgcgaagattgagaatgaagaggtaagtgaaatgcatttattttgcctttacatgtttcctctgcaacttttctgtgatggtgctgtactgctgtttatatttaccgatgtgtatttgattttagggactaacccactttgacgaaattctacaagaagcagatggcattattctttctcgtgggaatttgggtatcgatctacctccggaaaaggtatgatgttggtcagtcaaatcaatacgtttgggtccaaacccctacgcactttctatgtagattggtgtgtgactgtgtgtcttattagacgattagtgattttctggaacgaagtactaagttgaccgaaaaacttgtaggtgtttttgttccaaaaggctgctctttacaagtgtaacatggctggaaagctgccgttcttactcgtgttgtagacagtatgacagacaatctgcggccaactcgtgcagagcaactgatgttctaatgcgtgtttagatggtaacttagttctgaatat

SEQ ID NO: 22960 - DNA, 636 bp, Arabidopsis thaliana columbia
ttctgtggtgttgcttattgcaacaaagctggcattcagttactacattgaggtatgtgtttcttgtatctagttctggtaattattaaccatgctgtgagaagagtaagattcgtgatgagacatggaaacaataattatgggattgaattgactgatttttccatgattgccacaactgaagtctgataaattggcattgctcacagatcaggcctttagttgccccaacacaagccattatgaaggcccgtgtgacaaattttcagtggcatgagttctttcctcgtggtaatgcactttcacatacactacatgattgctggaatgaaaatttatcatttattctcacaccatctctacttgatttgtgcagccaaaaacaatattggtgtcgttatcgccctctgggccccgattattctggtaagcatggtcaagtcgaacatgtctgcacgtcctcccctgctttgtgctgttgctaatttgatctcggctacatcttgctgcaggtatatttcatggatagtcagatttggtatgctatatttccacattatttggaggtactacggtgcatccgcgcgttggagaggtatgcatttcagataatctgatgaagctgagtattgtgac

SEQ ID NO: 22961 - DNA, 499 bp, Arabidopsis thaliana columbia
tggatatataaatatctacgtaggaaacgagaggaggactatttacatccatcgttccaagcttttaaagaagcaatattttttgtgttttgttttaagttttaacacacaaacacattacctcgaattcgatacgtcatagtaattagcaactatggaacgatgtcgttctggtcatcatcgcatcatttcttattatctctcttcttcgttgatactattttggtgtattttcgttctcgtgctgttatctacgacaagtactacaaatgctttagtgaaaatcccgaaaaacacgaccgttccggcggtaatagtgttcggtgattcaattgtcgatgccgggaataacgacgacatgataacagaagctagatgcgattatgctccctacggcattgattttgacggtggagttgctacgggaagattctctaatggcaaagtccctggtgatattgtaggttagtttgcctgtaattttattttcattaaaatt

SEQ ID NO: 22962 - DNA, 587 bp, Arabidopsis thaliana columbia
ctagagcactcttctcatcacactcgtctccatagaacgtgccacagccaccatttcaggcagattctgtggtttatgcatgtgtaccagttcctgcatttcacctgtcaggccattcaagaatataccttccaatttctgatcatctaagcctccaacctgtgatgacagatcctcaaacctctgcacatattcagccactgaaccagtctgtttgatgcaaaacaaactctgactaggccctctcagcttcaaattcccgaaccttaacatcaatcctgatttcaacttcaaccaactcacaaaatccccacgactgatagcccaattgtaccaactcaaagcctcgccactgacgctaactgataccaaggctaattgttcagcctcattgtaacctcctgaacgaaaaaacctctcgactctcgcaatccacccatatatcccagatccatcaaacattggcatttctacattcttaagtagattctcgcgaattctaggtctaatcacaccacgacaaggttccagttgagaaacacgtacctggttcctatgatcttgcgatcttggaggaagagtttgac

SEQ ID NO: 22963 - DNA, 485 bp, Arabidopsis thaliana columbia
tgtggtaagaaagcagaggtacagtaccatgtggtggctcagaaatgcccaaactgcaaatcatacaacactcgccaaaccagaggctgaagctttttttgaagttgatttgctatcaaatgcaattaagagcttttcacttgatccaatagtgtcattggatccttaacttgaggactgggtctctcgagtctatctcttctcactctcttcttcaatattctctgagtcgtctcttgttcactagtctatatgtttccttggtgttgtttgatggtctggttagtttccattgtgattcatctcctttgtaattctgcggctttattgaaaagtttcgtttaatctgttaaaaaccctaaaaaatttgaacttgtatgaataaaaaattttagctgctcgcatatattaataggtttagagactcttattaaaggccaaaagcacacgtctcaaaaatatatccgtttcctcgcttagatacg

SEQ ID NO: 22964 - DNA, 698 bp, Arabidopsis thaliana
acatccctgtctaggttcttcaagatccagaagccaaaagagaggagcttcgtacaagagcaagaggtttaaaagctctggggaggatctttcaggtaaaatctggtttcatttccttcttacagtctgacgggtatctgttcaaatgtgatttggggattaagattaaggactaaccaaaggatttaactcatacagagagccaaaacagctagtgagagtgatcctttagaaaatagtgaacctcaaaagttaaacggaaatggaaagaaccacgatgaggatacttctacatcaccaaaatccagtgaagcatctcactccacctctggtcctcaggtgtcatttcacatgaaccttttacttatctttcatctttccatttcactaaactcatctctctccatcttcaacaatggacacatgcttcttatctgacttgtgttagatagacataacattcatacttgtgtgtttagaaataacactctgaatacagtctctttaaatagttaaaatcgaaagtaaactgttttcttgttggataatcttaggaacacaaagcccctacgtggaagaattcaaacttggagatgaacaattcaactattacttccacgaccagcgccacctcctggcgcagggaaatactcttcctctggctatgattgattcaggtgagatcggggcatatatat

SEQ ID NO: 22965 - DNA, 509 bp, Arabidopsis thaliana columbia
cgccagtgtgctctaaaggcaggcagagtccacggcgtggtggtccagattaccagcgagattgggccgttaacgttgcttacggcaaattttgctttcagtgcatcctgatcgactgcctggaaagcaacgtcgatggacggagaagttttgtcgtaatactcaacttccgcttccgccagcgcagaacggcagtcaacgcaccagtgaactggcttcgcgcctttgtgcaggtgaccgttgccgatgattttgcccagcgcgcggatgatgttggcttcagttttgaagtccatggtcaggtacgggtgcgaccagtcgcccagcacgcccagacggataaagtctttgcgttgaccgtcaacctgggtcgccgcgtattcgcgtacttggcgcggaactcggcggcggtgaatttctcacccggcttacagtattcttgctcgactttcagctcgatcggcagaccgtggcagtccagccaggcacatacggcgagtcataaccgg

SEQ ID NO: 22966 - DNA, 720 bp, Arabidopsis thaliana
aaacaagtgacataataatgggaacatatacaaaagaagtaagagataaaagaatcgtgagactacaaaagagccaaataatcaaataaatatgacgaccgtagtgtgttcgcaaggcatcagcgatcagtaatgaagaactggcacgagctcaagtgggactttcttggcaatgacgaaagctccagcttcttccatgttaatgtctgcaatggccattccatagggtaaactccaatcgaagaagtaaagaacgttaaggaggccgagctcaacgatggtcattcccgtggccatcccgggacagatcctacggcctccaccgaatggcaacaattcaaaatgctgacccttgtagtcgatagggctatcaacaaacctctcagggataaactcgttaggatttgtccagcagttgggatcacgtcctattgcgtaagtgttgatctcgatcattgtgtttttgggaatgttgtagccttgaatcttcacatcagacattgtctctcttgggagcaagagaggagcgggtgggtgtagtcggaatgtttcttggatcacaagcttcaggtagtgaactttttcgagatcctgctccgtgattttttctttgttgtctccgagtaattctcgaatctcttgttgaagtttcttcatcactctaggatgtctagttaactctgtcaatgcccatatcattgtgatcctcctgcgttcact

SEQ ID NO: 22967 - DNA, 1669 bp, Arabidopsis thaliana
tctcagacctgagaggtaaactgcattttgaatgagaataccctgagctttgtttctactcgtgggactttcatcatctctaagaagaactgttcaaacaatttcaagaggcatatatggtgttagactctaatggctactccaatgaaactaaaaagtttttctaaagttttgtaccagttcgcattttccaagcttgtccttgtcaccagtataaccctacaaaccgagtatgaaatgaagaaatgtcaaaagaacatacaaaagctagatcacagaacaccccaattttttctagggacttccgactttggaaaacaaagcagttgaacattattctaggagtacacgtcttatacctttagtaactccatctcttctcttgttgggcaaaacttaattaggttctcaacctgatcagcatcaagagccgactcctccaggttaagcactgagttctgtaatattttagagacacttagcttttaattatcatggcagacatagcgacacatagacattgtaccagattaaaaagctatgattacagtacaacctaaacctgtctagctttatattaccgtcaaatcctgtaaaggtactttcacttttgaaagcatgatttcacaattgtaggctcgccggtgttcaatctgcaagattagagtttctcatcatattcagtaatttcaaccatagagaaagtaatcctactgtgacaaaaaaagaaatcagacactatgacatactaaatattaaacataatttaccagttggactttctcgggtttaggtccacgagagctatctagtctcgattttcctgcttgttctggagctgatgcggagaaaagactttcaagctctgtcatgtcaatgtcaggagccctaacaaggaggtaaagtatcaatgaattggaaatcatgcaagaatctgggggcatcagagaaataagtgacaacaagatgaacaatgcatacttagaagcttcactagacatttgtgtttcagcccataagctcccattgacagctcttgtcagtttcaaccagtggtatggctttaactttttggctggactattctttaaattaacacgtaacattcgcccctttcccgatgaaagaggcccagttggtaaagcaggcgttggaggaacattaggaccagatggggataacttggttcctaactttggaggaggagggggtggtgctgatggtgccctagtttgacctaatggtggtggaggtggcgcggttggagggggaggagaggcagaatgggtgggaagccggggaggtgcaggtggtgcaggaggtgaacttttcatagcagagattccattagattgtggtgttggaggagcgggcggaggaggaggaggaggaggaggagggggagaagaggtatgaacaattggtgttgggggtgctggtggtgctggtggtggtggaggggggactttagttactgtggaatgctgcattggagggggaggagggggaggaggcggtcgaggcaaagcaggctttttgtctgaattagatattggaggaggtgacctcgccggttgtccaagatttgaagccacattatcggaagctcctaaatgaggtgaagtagcagcaccaaaaaaatctactgaaacagtttttgatgggttgg

SEQ ID NO: 22968 - DNA, 562 bp, Arabidopsis thaliana columbia
  unsure (1)..(562): unsure at all n locations
ctcggtaccagggannnnnnnnnnnnnnnnnnnnnnnnnnnnnnctaaagatccaaacctgtcccatctcatgctcaagcagcagacgaaccgtttgattcaggcgactaacggtaaaaattgcaggggattgagaaggtaacatgtgagcgagatcaaattctaaatcagcaggttattcagtcgatagtaacccgcccttcggggatagcaagcattttttgcaaaaaggggtagatgcaatcggttacgctctgtataatgccgcggcaatatttattaaccactctggtcgagatattgcccatgctacgtatcgctaaagaagctctgacgtttgacgacgttctcctcgttcctgctcactctaccgttctgccgaatactgctgacctcagcacccagctgacgaaaactattcgtctgaatatccctatgctttccgcagcaatggataccgtaacggaagcgcgcctggctattgctctggctcaggaaggcggtatcggctttatcccaaaaacatgtccattgaacgccaggcagaagaagttcgccgtgt

SEQ ID NO: 22969 - DNA, 475 bp, Arabidopsis thaliana
aggaggagaaagcggcggtgaagttcaaggtgagagctgtggttactgtgaggaacaagaacaaggaggatttgaaagagactcttgttaagcatttggatgcttttgctgataaaattggtcgaaacattgtcttggagcttatcagcacccaacttgatccaagtaagtccttctcttgaaaagcagagcattcacatattttctgaagatcgtgtaatctaaaatgggtttccaaaatactaagaaaaaacaaaactttttgattcaaacagaaacgaagttgccgaagaaaagcaatgcagcagttttaaaggattggtcaaagaaatcgaaaactaaggcggagagagttcactatacggcggagttcacggtggatgcagcgtttggctcgccgggagcaatcaccgtcatgaataaacaccaaaaagagtttttcttggagagcataaccattgaaggcttccacttg

SEQ ID NO: 22970 - DNA, 527 bp, Arabidopsis thaliana columbia
gaaatgtagcagattctaatgagaaacttggaaactttttggcttatggtttctctaaaaacatgtttgttcatacaattgaaattgtgggtatgttactaatttaagcagtgtgatcggatggaagaagtcacaagagtggatgggaagatgggttggctttggaggaaaggagttagtgtgggaaagaaggttcttgcagcatgttttctagtgttttctgcaccgttcctcgttcccgcactcgttgttgcctccacaatcgcgttgatttcgtcccttccgtattgttttttcttggtgagctatgtttgtactgaaaagttgatgagaaaactgcttcctgctaatgcgtttagtggaagatgtgatcatgacatggtgctcaccagaacaagatcagtcacggtgatatttatgatgaagccgttgcgcgagtggctataagtgagcctgttcttgttcagattgaagaagagacaacgatcgcaatagcttatcgggaagatgaggatatgacgaaagag

SEQ ID NO: 22971 - DNA, 1028 bp, Arabidopsis thaliana
tggatacatctgctgtttcgtaaccctttcttgatttctcgtaactcgcttttagtgtgtcaaacaactggattcatccatcatgaaagtcagtttctctgtaataaggccaaataggaaatttatgcagctcagaggaaagaaggaagaaaaacctcaggggaaggttctgagtggaatgaatcatcatcccctttagcagtgatatccagaggaacatcgatccatatggagatcccgtgtctaagaagtgcactgttcaaatatttacgatcaaatgagaacagacgggagagatattaaacagatataagcagcgtgtgtatgtcttctaaaagaatgaactgctagagagaaactagtgaaacttatatagaacatacagatttctcaagctttggaccgcaccatctccagcgcaaactacaagccgacccatagatgatagctgcttcagcacttcagtctgcagaaacatgttagaaagtcatcgtcaaaaaccatttttgtaagtgcgatcaatactctttcaggaactggaccagagatgcatttgtacgataaaaatgcagatcaaacgatatatagtttacctctgattcttgaaaagccttctcatcagcttccttcaaagcttgagcagacacatttccaccagccgcctctgtgatcaaattatcactacccaatcaaagtaaactaaagttagagtaatgtgaaagtacttacaaacattcaatgtgaatttatttcaagacgaggagaaacattatggtggcaacggacaaccctatgttatggaggtaaaggtccaaaagagagagcttagagcttaaagcttaacactaatgctcggataaactggattgcacaaggataaattggattgaaacgaagataaatacagttagtaacagtaagaaatgtctgaaattcaggccactctaaacaactataagggtttcaaaaaaaaactaaaagtagaacttatgatgaacttatgagtgcttacctatcaaagtagtaat

SEQ ID NO: 22972 - DNA, 524 bp, Arabidopsis thaliana columbia
gaaatctgacaacccatgccgacctgtccgccgagttaacgacgtgcttataggatccttaagtatttttattcttatttcttactcattccaacggaccaaaaacgaccacgtcatcttcatacgcaactcccaaaacagacgataattaaatcattgaaatctaaactctcatatactttagcattttcaacatttctattaatatttccatagactagatctctctttcttatacatccatatcaccgatgatgcctcgccgtgacgtcctcttcctctcactcctcctcgtcatcgccaccgtctccgctgtcgcattagccgtaagttttccaaatctgacttgcttcctctcatatatgattttgtctagaactagacacacacattaaccagatttgaatatgtatataatgacacaacatcaatgacattagtttaaactattagactacaaacttctgtttcttcccatttaaaaaaatgactttcttgattcacaggacgatgaagcagattgt

SEQ ID NO: 22973 - DNA, 586 bp, Arabidopsis thaliana
ggactctttccgcctttgaatttgatttctttgaccaatctttcaaaactgccgctttactcttctttggctcattcgtttctgttacaaaaagtttgacaaaaaatttgggtaaattagtccaagttaaaaaaataaaaaaactttgacccaaacccatgttaaattagacgacttaaaaatacccacagtgaaaattagtaatgacttacttggatcaacttgggtactcataagctccaagacaacgtttctaccaattttatcagtaaaagcatccaaatgcttaaccaaagtttctttaaaatcctctttgtttttgttcctcaccgtcgcaactgctctcaccttaaacttcaccgacttctcctcttcttcctccttctcttgttttctaccgacagtgctaatacgcagcgttttaaccaaatcctcgctgatggccgctacaacgccgcttgagttaacggctctcataggtctcggatcaaaagggttgatggagaactgtgttctctgtgtcttcttcttgatggagaaacgcgaatgaaacggagacgcaagtgatgatgatcctcgaagatta

SEQ ID NO: 22974 - DNA, 552 bp, Arabidopsis thaliana
cgtcatcagttccatcatcctccaacctagaactctctgtattactcgacatacctgaaaaaccaataccaaattagcattcttttcgttttagtattagaaaacacagtaaattttcaaaacaacttacctgagtcctttctggattgttgtctagcataagcttgagcatccttaagactcccaactacctccaattcaatactctcctcaaaagcttccttttgtgccaagagctgtgagtatagaacataaagcggaggaggaagcagctcagctaaattatgctgcttcagtttctttgtgtgctgtatacccaagtggttctgtactggaagcgatgctttcttcagagacttaaggtgtagaggaagactcgacaaaaacttcttacgctccgcaatggtttctaataaactcttcttctgttgctccaatctcgctcgatgcttacacaattctttcctctgaatcaaaaaacataaaaaggtaatgaaacattatatcacgttgaatgaatttcagagatggtgatgattaccaacctgatga

SEQ ID NO: 22975 - DNA, 542 bp, Arabidopsis thaliana
catacctgttaagcgtggaattagaccaaggggaatctccatagaaacaggttcgcggacttggatctttcgaggaactcgagtctctctagcttgccggaagcaatttctaagttaggttccttgcaatatatcaacttatcaacaacagggataaaatggttgccagttagttttaaggagttgaagaaattaatccatttgaatctggagtttactgatgaacttgaaagtattgttgggatagctacaagcctaccaaacctgcaagtgttgaaattgttttcttctcgtgtttgtattgatggcagtttaatggaagagttactactcttggagcacttgaaggttttaacagcaactataaaggacgccttgattttggaaagtatacaaggagtggaccgattggtgagtagtattcaagctttatgtctcagaaatatgtcagcaccggttataatattgaacccggtagctctgggtggtcttcacaccttgaaatcgtgggctcaaaatctcagagataaagatagattggg

SEQ ID NO: 22976 - DNA, 4436 bp, Arabidopsis thaliana
ccaacacataattcactaaaggtgactatatcaatcgccctttttccccatattgggatgattatgacactttgttctataatgcctggacgagtgtagaaattttgcctactcgggttacgaattttggtttgatgcagggtttgcagatggagaaatctgttttaggattgctagatgatataggtttggaaccatctgttctaggtagtacgatctgtatcatgagctagttagacaattcatggcttttgttagggtctattatgtgaatgataggaaactcaatgttcaggaaggagcccttatcttcttcgttcgcggtgtcagatacagtctaccattgagagtattgtgcgacatctatggctttgacaatgatctcactggagtttcccttgcttggacagtttaaggatgctcagattttctgaagcaggtttggtaatggaatttatgattccaaggaagcagtacactcagagatccgtcaccctgttctgcggtatttggttaggctgattagtagcacactgttgtgtacgatggagcctggcaaaatgagactttctgagttgttgttgttctatcatgcttttcatgatttctttccagacagcttcagatttgagcagggtgaccgcgatgtcaactttggtgttgtgtttgctcatcacttggtctcgcttaagacaaagccctttataggtagagggcagaaatctgagagagttggcagccttctcactcctgtattcgagcatttccgcatcatctttgagggagaagaggtcaacaccacgcgattcactattgatgagacttacctgaagaactctcactggcttaaaggcaacttactgtggtgtttcagagaagatacatggcagcatatgattaagttacctcgcacttacagagattacaggagagcatgaggagataggctttcatcctgatccttcccttctacatgccgcaccacgcaccaggcgacagagaggtgcaacttccggatctgcgcctacacataccgaggacgaggtcgttgaccttgctgggggtccgagagttggatcttcctcttccgctcttccatataagatgccttctcctccacccatcccgatggagctacaggtctttcaacaatacgtcgtcgacagtttcaagagcgtctggaacgccatagctacactttctcgctgcggttgtgttgctcccactcgtcgtcatcatcgctctcccgcacccacctccggctctaggcatgaggactagccatcctccttatcttgctttgttttctaactttgtttttgctttatttcagactatttgttatttgttttgaaacttgttgcacttattttcctatgctttgttggacctattgataggtgttttagtgattcaacagtctaactggaggatccatgtgaaaacactaaccaagactctacaacaatgagctgaattcgcaaagctaagcgaaacgaccagagtgtcgatcgacacaaccatggtatcgatcgacaccactctcaggtggcaactcacgtttctctaacttttaacttttgattatttttctttcgattcctctagcttaataactctggggacagtgttatctaagtctgggggagtcagttactaactttatcttttcttttcttatgagtcagttgtgtcattctaacttagatagtcgtttattgagtcaaaacttttgtctgaaattatgatctatctctcgagtttattgccaggattgcttaagtactgccgattgaaatcaatccgactaatggaaaatccagaaaaccaatcaataaacttaaggacatccattccaaacataatccacaaaggctggagctaatctcactgctcttccttttacctcatcaaaacggttagtgttcataggactttactccttgttcatacctgataagtcgactaatgtgataaaaagaaagtgttcctctcccctaataaaaaaataataataataaatatataatgagagattgagaagacttttaaatagtgtataggggtaggaatgtttcctatgatctcattattatacattatttggaacgatcaattacaaaggttggaaaaatgtcgagggtgtcgatccaatatgcgagttccctttgtttacactctaaaaagaataagtatggggagagaaagaacaccaaagaaaaaatatatataaaagaatggtcgatttatcatggtctagtacatgaatgagtctagaaggttcgtaagcattcacttgattgatgagacccggcgatgatagcatagtggatatagttgagtgctttggtatggaatctaggatgttgtgtgggctagcggagaattacatggtggtcaagatttgattagaactgtttagtgcatggatttggtttgtatgatcaaggtaataaaccagaaagattgggagtttctatgtttttgaaacctctttcacagattcaaccttttgttttgcttgagggccagcaaaagctaagtcagggggagttgatatgttccggtttttactgatttctaacacagtttcagaatcgtttttagagtctttctagtctttttcgtacgttttgagttatttcaggtacactcacacatctgggaactatggagcacaataaggaattttggaagcttttcagcaataagatcttgaaggacgtttttcagaaactaatgtcgatcgacactctttttcgctgccaagagaatattcgttttccaaccaagtctttgagaagccctgaagtcttacttatttgcaaaataatccctgcacgtttttagggttatatacctaattgtttggtcattgttagacccagtttttgttcttgagctttttttacactttagagaaaagaatccaatccctaaagagaggattctgaactcctttgctattattcttaattcatcaatgaaaattattcagattatgatttgtgtttatattgtcatgtctgagtaatcaccttgttgggtctagggagtttcaatagggatttagatggattagtagatcgaaaaccccttaggattattcttagagttcttcatcttgattattcttaatagtagttttagattgatcacctagaacttgatattaaataataggtatcccgccataggtatttgttatttgaaccatcatagatgagcctaagcatttaagaaagaacaggtaggctcatagaagggctctggtttagatacaaggtgaactaatcaagcttaataacaatgcatgctttagcataagatttctcggcttctctggttatcttagttctaagtatagagaatttagcggaacccaccggttactctagaatcatagtttgagttcgagaacggtgcgataacaatactaatattagctagatctacaatttatctatctcccgagacaattccttagacctgacgctttaatcacttgaatctacaactcgtttacttgcttatttatcttttacattcaattacttcatctagcttagcttattaaacaacatcataagtctattgtgtgaacatcgagagctcagtggaatttgacccttacgtgctaacgacgatctcttatttgagggagtaagcttaaggtaatttgagctatatcaattttggcgccattgccgaagttctcttttacttcaccattagactaggtgtcattttaagtctagatacttcttttctatcacctattcacgtgtttctttatcttttgatatcttgtgttccaggtacattaagattgagaatcacgtttcaatggcagactttcacgatagtatcgatcgacaccatcagagtgtcgatcaacacactctgcagaacgagacagcgacaataggcaactttaacagaactgatcatttctacaccaaccgatcagcattcaagctacctccatttgaaagagaagactttgctatacaccctgccttttatgatctggtatgaagaggaaagtttagaagagctcccgatgcatccccattagatcatttggaagtcttcgaagacatagtgtcctctatcaaagcagaaggtgtaccagctgattaccttctttgcaaactcttgccccactctctagtgagcagaggaacatcatggttgcgtcaactagaaccaggttcacttccctattggacttatacaaagaatgctttcatgaatcacttctttgatgaatccgtgacagaagcacttcgtttgcaaatttctttgttcactcaagctccagccgagtcccttagagcagcttggctcagtttcaggtcttatcagggagaatttttccttcttggcttccaaggagtgatttggtcagatccagaagaatttgctctagagtc

SEQ ID NO: 22977 - DNA, 500 bp, Arabidopsis thaliana
ttcaatacccaaataaaatcctgtcaatgcgacaatggaggaaaatataataaccatgagttcaagaattatttggattcaaatgaaattacagttcgtttttcttgtcctcacacatctcaacaaaatggaaagtctgagcgaatgatacgcaccattaacaatgcgattagagctcttctctttcaagctcaactctcgccaagttattgggtagaagctctccatgtcgatgtccacctattaaacattcttccctcttccgccatccaaaaccaaatcccctacactcgtctttttaataagaaaccaagctatgatcacttgagagtattcgactgcctttgttttccaaacttaaatcattccaatcttcataaactttctccaagatcaagtccatgcttgtttcttggatatccatcacaacatcgtggctacatatgtcttgatctaaaaactaataagatcattatatctcgtcatgtatactttgatga

SEQ ID NO: 22978 - DNA, 3456 bp, Arabidopsis thaliana
tttaacaagcaatgcatagtatgataattaaaagtcaaattaaggttcaaattgatagggaatagcttcaaatcacagcaagtttcgactaaggaaaggtcaaatatatgaattcaaaagatggtgcggttttatttcaagatcaatcggttaagcactagacaactaacaacaagggcattgaaactatctagtgaacattgcaaatttacaaggctatgatcatcattatcccctatgcaagtgcaaaatgcaacaacctatatgataacattctaaaaacagccctattaatgcaaatgcaaactacatgacactctatttttttggaatcattttcgaaaattttcaaatttttatgggttttctatgctttagatgatgcaaaaatttgaataagaaaacatgaaacaatgttagatacatcttgaaccctcccccaaacttaaattacacagtcccttgtgtaataaaaattcaaagaagaattcaagagaaataaccacacaaagcaagaaataaaagaaatgcaatgatatatacagtgaaatggagtgatacctcaacatttagacgaagaggttctggacaaactcgtccaggcggtcttgtgtgtactcaggatctcgtgtggaggtgttggggttgttggggttgtactcggttgaccggtcgagcatgtatcccgagtagtactcctctcggcttgggtcagcgttcagaaccaactggtttactggaccgggtgggcggctgttgaaacggcggtctgagaaggtggagctcctcccgagctcgtagtttgaggctcttggcgggtcgaaacgagcgtcccttcgcggcgccacacttgttaagttacttctcctgaactcgggtcgaggtggtggtgatctatgtcttcgttgcagctcctgaatctgaaccgccatgccatccattgctctcttcatctttctcaccttcttcttcaacccactgaacaacttcctctgaaacttgcccagacctttgagcattcccaacttcttgtggacttgaccgggatctctctctggatcggactcagcataatcctcaaagaaaaactgctccgctgcagcttcgcacgaatcttcttgttcatcaaactgttcagcttgactgaactcagcttgctcaaactcgtcctggccatactcggcctgctgaaagttactcggccgagtataagcttcctgctcagcttcttcttcattccactctgctccttcttcttgagactcacttcctatgctcggctctgcttgtagaggcgcaaagacattgactaagatcgattgaggaggatcaaagtcaatgttgttcccaatcctaatggtggtgaacttcttgcaagggagtgctagcctagagagacctagcgtggagtgcttgaacttgaagtagagttgatccgctggagcagacctatccaagtagcacttcctcttcaaatactccatattgatgtaggttgctatgtgagtgggggtatgaagaggaactccagcggctattaggatgggcgtgatcactcctccagcacataagcttcctccatagccggattggtggattccggctgcatactccctaaaaccaatcaagtgatcaatcaacaccaccgaaagggatgtatcagccctatccccttccatctctatcccattcctcgtgtgccccaaaatgaagcataaggtgagatcaagcaacttcagctctccctcattaacatggccggttgtcttcttcgggaagaaggcacttgcaatgcaaaggtggagatacctaagcaccgggctccttatcaacgaactcttggccctagatgacttgtagaggagtggaccggcgattgtcaaccatagatcaaggagctcgtccttgctgaagttttggcggattccatacttggtggggaacttgaaaatagcatccaactgcctaatgggaaccgagtattgaattccaaacaccatgaatgtgatgtaaccaactcccttatgcagctctctctccctttcttcagcatagaaatggagcttcaaagtggctaggaattggcagctctcagttttgtatccttcatacttgtaggagaagaaggtctccagcttggccatctccatgaggtagtcaacatctctacatatccccaaagcttgcatggtaggtctatggggatatcttgtcccctcaaaactcagctccatgagatattggtagtgctcttctatggtaggttctttctttctcctcatggtgttccttcttctactgctaggaactatcgggacctcttcatcaacttgcacatcttcctcagatgcttccttctctatctcaggcacttcttcttctgcaactggctcggactcccagaccctcttgcctcttgctatttcctcttgagcagcggcagaacgacccacagaggactccggggccatactcggccattgtactcggcctgtcatccgagtaaaaccaggactcgcagctttctgattccttgactgattcttctcgttaatcatctcaaaccctcttgctacggctcgagcagaggctctccttcttgattcctcgggattcatgatattgggatgatttactgcaggtagtcaccacaaaatagccaaaggtaggtcaaagtagaagagaaattgatgtttaaaatgaacaaagagtgtcagagaggctttgaaaaggtttgtaacaagagattttggcaaaatttctgagaaaactagagaagtgagagcaagaacttgaaacgtttggagagaaggagtaaaattcgaaatttttgagcaaagagagagtgtgagtgacttagcttgttaagtctggttttatagacaagaagatttgatcctagccctccaaacaccttagatcctcacccttcatttggtcaaggggacatgtctcactatttgcagcagaatctttgaagggctttgggaagcaggatttgattgctggggcccagcaaattcgaattcaaattcaaatttgaattgtgttgacctcgcacgtgtgaactcggccgacatactcgacgcgcgtgtcgagtacagtgttgggcctgatgggcttctttttctgactcggcttcgggccgagtgctgcatcttgttgggcctttgaacagtgaggtccatactcgactttgggccgagtgttgtggggcgagtactattcagtcttgggtctttggtcaattgaaacccacactcggcctgtagccgagtagtacggtcgagtgtggcctgaaattctctagaagtctttttccctgaaatacttaaacaaaaacatcaaaaataacaagaaagcaatatatacaaggatagacatgggacttcctcccaagtgagcttgtttaaagtcactaatgatcagcctttaaagcacactatgaccagcagg

SEQ ID NO: 22979 - DNA, 464 bp, Arabidopsis thaliana
tccccctgcaagatcagtttgaggctgaagatttcagggaaatggtgtatctgcaagctgctttaacagagtcactgaggctatacccttccgtgccaatggagatgaaacaagctttagaagacgatgtgttacccgatgggacaagggtgaagaaaggcgctaggattcactactcagtctactctatggggagaatagaatcaatttggggaaaagactgggaagagttcaaaccagagagatggatcaaagaaggaagaattgtgagcgaagatcagttcaagtatgtagtgttcaacggaggtccaaggctgtgtgttgggaagaagtttgcgtatacacaaatgaaaatggtggctgcagcgatcttgatgaggtattcagtaaaagtcgtccaaggacaagagattgttcccaaactcaccaccacattgtacatgaagaacggtatgaatgttatg

SEQ ID NO: 22980 - DNA, 1305 bp, Arabidopsis thaliana
taagtaactgtgccgctttggatattcctctgtcagtaccattctcagccatttctattaaaagatccataatccctaatttctgagcttcaatcaaatgttgctgattccatgaacacaagtgcactaataccgcagctgagttttctttgttccgcggtgacccgcttcttataaaatctaccagaactggaactgcatcagcggctccaacctctgatttcccgtccggatgactcgatagtatggctaatatcgagagtgattcatcaaccattccgcttttcggttctgttagtaactcattagcacgggaactaaaccggctctcacagcttttcctttgtttccttgaaatatgcagagattaaacagagcagttgccgcgtcttttttgcctctctgtgatccttcgctcagcaaggtcacaagaggcgggatcgctcctgcggcacctattgtcactttgttctcgtctataaccgagaggctgaaaagtgtagctgctgcgttttctctagcttccatgctacctttctgaagcacatgaacaatacctggaactgctccagatgaataaacaatcttccctttgttctcttgacatatcgagaggttaagaatcgatgtcacagcgtgttcttgagtccgagagtcattagatatcgtgaggagattcaccagaagagggatcgcgcctgaggcagcaatggcgactcggttatgattgttttgttttgctagaagacggatttctcctgcagcagatcttcggtcttcaggctgttgcgatgtgagcttaagtagaagttcttcaatcttgttatgttcatcatcaggggctgacgacgaagatgaggccttactactcggttgagatatgttgggacgctttggaggttcgatgccattggactcacaccattgagctataaggcttcttagaacatagtttggtgtcatgatatcgcttgtcagcgtttcttgcgtctttggacacgtcaagtgtcctccttcaagccacttcttaatgcactcacgttcataagtctacacaggatttcaacgacaccaatcaaaaaaattgaaaatgaattaaaaagacaagtaaagggagaataatgcttttacagtacctgccctgaagaaacaataactggatcagtcatcaattctagagatattggacaacggaactcttcaggcggaattagcatatctcgatcatcatctcgcgacttcggaagcgatgatttcagtctcaatggagcatcatccaagttaggattataagtttgcacaaag

SEQ ID NO: 22981 - DNA, 4327 bp, Arabidopsis thaliana
tattaatgcggttccaactacacttgattcaaatattttgtaatagcctggtaaccgtcatatagggtaattataacgttgatttgacaataaacagcaacagttacgtcctttccattaaataccaacataaccacaatatacccaaccatgtctccaactccgttcatttaagagggggaataagttagattttcaaaaaacttatttcaaattactcaaaatgttgaggaaccacctctatgtacccttattacatgaactttaacacgtacacagacaaaaacgtacatagttatacgaacgtagagtttaaacgtacttacacaacgtacatagttacagatggattatatataaacttacgtacaacgagaaaacaccgaagcgtacactatattggccggcttagaaacttgtcaccagaactagattggatttctgcacgtcttcttgttatgacctgcttgtcgacagcgtgagcactgatttggtaaaagtcttttctgtctctttttctgaagtgacaaagacaggaagttaaaaatctccgcatggtaatactcaaaatacaagtagatgaatgaacgatgttagtacatacccggttttcacctctagatgggatccttttggacagtggtcttcctggtggccttctactgtatggaggaatgagtatcaaatccactatatgttgtgggatgacaacatctttcggatccgcgataggtagaattggttcttggaaagaatcagaaaacgtttgaaggccataccaccatccgacacaagacttcggatcaattccatgctcgattgcagctgctagagcgtgttcacatgggattcttagcttggtgtacctaagacacttacacgtacactggtccagaacgacatgaaaatgctcaccggatttacttgtcacttgatagctccacggtccagacatcttcacagcgtatttacctgacgcaggcaactcttgtagaaatctctcatcaacctcaggtgtcacagaagatttgcacctagcaactttcttcctcctcgatgcgaaccatcgcattaggacatcccgaatgaactcgatcatgtaaataatcggataagtttttgcttttgttaacacatgattcatggactcagagctattgctagacatgatattgtagcgttctcctctacagtgagctcttgtccaatgcttaaatcctatgtcctctaggtattttgcgcatttagcactcttttcccttaacagttcaaaatatttctcgaaatccctgaccctataagctttggcagcgctgaaaaataaagcagacacaccaaacttaccataataggtggagaggtttcgctcaaggtgaacaacacatgctccatgatgcgctctcgggtaaacaacacttaggcctttgtatatagatgaatgtctgtccgagacaatccttaaatcgtcactgtctggaacaatctcagctaacttttcaaaaaccatgtccaagaagcatcggtctcaccatcaacaacaccaaaagctattgggaatatttggaagttcccatcttgggcacatgcaataaggagacatcctttgtaaggtccgactagttgcgttccatctaccacaattaccttcctcatatatatcagacctttgatagaagcgccaagagagacaaagacatacttgaagcgctgcttaccatcatcttctggtgtatagtgtaggtgtgttattgtacccggattagctaattggagaagatacagataggtcggcaaaaacctgtaatttgctatctcatccccccttacattttccactgcaacctcttttgctctccaagcggtagaatatgaaatccgcacattcagatcatttaggagcagctgtggtaaatcgacagcttgcggcccaccctgcgtagaactgtatctgctcctcacaacttctccgaggagcttataattagcatgtttattgtagttcttccgagagtcgatgttacacgtatgtgtcgtagcatacgaagtgattttgaaactttctgaatccttcacgatgcgagcagtcaaatgccatggacaagtctcatcaacgcacaccatcttcaatgttttaggacatgacttaggttgcttgaagcaaaagcattgctttatcgcttgaagatacattgtttgttgcaggacttttctattcttaaaaacacttccaacaaacaaagtttcgcctgttgtgctgatttcaacctgtgtctcatcagctcgaaaattgagtaagtcatcaaacacaggagcagcatcgttaccgagattcgccaactcgccaccatgtaacttaggaaattcattatacacttggtaagcctcagctgcggtaactaccccattatcattcagtgtcccagttgaggaagctccaataccgtcgatcacttcatccccggtgacttcgtctatacaaataagattggaatccctttgcccttcgcagcgtgtaccataaacccaatggagaaattgtttcttcgccaggtacactaagaccagtgtacgtacatgtttccaagagacgactgaattcccctgtatctccgccaggtacactaacacccgtgtacatacacgtttccaataaacgactgaattcccctggatgttgagcagtctgttgagtgagactgacgtcttcctcaagatttccttgtacatattgttctactattacatcgttccacttgttgtaatcgtattcttcgccaataccttcactaccgtctgtggtaggatacaaggtacttcccccaatagatccatccacaccaagataatcatcacacccatcatcatcttcgttgccctcctccacttcatcctcttctgttgtatcgtcttcaacatcggcttgctcctctgcatcctcattattttcatcaatatttgtagcactatcaaacacacggtcactttcagaaacttcaccatgagacctagagacagtattcccgaacgccttcactgtattattgaaaaagacgaacaagttgagagaaagatacccaccacgaaccaaaaaaaacgtttcgagacccatctgactgtcaatgtatacaggagggcgtttagtatctatcagcactgacatttctcccggcatccagtagctaattatgggattgatctcggtggacttcaaactgaaagcctctcggagtgtacggacaaagtccgtgtacgtcatggtttcctgaacgcgtacacaacgaccaaagatgccttcctcaggttcaaatttccattctccttctttgcatttccactcaccgaccatagtaaatacgggaatatccataacccacctgcatcataaattcaggagacacacattaaatgcaactgaaaaatactatacatataaaaaacaaatggaatgtcgatactacacatttataaacctaaataccaattatcatttgactatttcaaacaaacaaatatagattttgcaaattttctgataaaaaaatggagttcgaacacaatcaagatcctaatatgacataacaaaaaacttcttaaaagaacttcattacttacacgagcaatgcttgttttggctccaaacttggtacaaaaacaagatcaacacttcttcagcagcaatgtacgttctcaataattctttgttcctgggttcatcttctttatctcaacaatttttttattaattattatcaataatttttttaatattatttgatgtaatgatgattttgcattaattgttacaatagtcacatctaaactttttgagggcattaaatgttgatgtcacttcggaataatggaaataatctcacttgtaacggaaccgaatcgcgtcaacgtgaaacaaaaaatcttcaactgaaccggaacagtatacgtaactaaacctgctaaactaaaccgtacatttcaacagttactaagagagaagcgcaagggcagaagcgtcattttgcaggcgaaaagacaaatggtgaaaaccacatttgactttgacaatccatgaaaataaaacatggtcaatgggtgtggcctgcaatttacccatatgaataaggtactcaacgtagacattgaagcctcttccgcaaaacatgaccaagctagggtttccaaagacgagattggcttgttctccaagaaattcctttgtcgtcacggtcttaacctattcggaacagctaccacatggttcctcctcgacatcgttttctacagccaaaactagttccagaaggatagcttcacacctttggatggttac

SEQ ID NO: 22982 - DNA, 2846 bp, Arabidopsis thaliana
ttaagatcaattaaacctaaggcactatcatgtcgttgtagtactgaaggttgtcaatccaaatgggtgtttctctaacacccggaacacggaaccaatcacccaattcacaatggtcaacaatcaagtctccagtagcgtagttgatacagaggggaacccaatccctccaatccagacagatgctcctgaagccgccgctcccgcgaccctagcagaactgaggagtatgatggctcaacttcaacagaaggtaaacgatcaagaacaagcaaatcggtccttagcacagcaactcgaagcagcaacctctcaaggacaaatcaggactacccgtttcggcgcgaggcacattcacgatcgacgggcggcagcggatctcaatcccacacggctcgtattccaaacacctggcaataccacaagacccgtccgcagaacggcaccggaaatcggacgggaccgaaccgagccggcaatttcgggaaatcgggaagcagatcgaaacgaaccacaactccgtcctctccgagcagagattaccgaagccgatcatatcgacgcttcggataatgaagattccgaggtgaacgttagatgggctgaagaatacgccagagagcaggaaataagctccatcaaactatccctagctcaaggcggaaaacgagatgaagctcgtaagatcccaaatgcataacgcagtttcctcggcaccgaacatcgaccgcattctcgaagaatcccacaacacgccgttcacgcacaagatctccaatgcgataatctcggatccagggaaactaagaatcgagtatttcaacgggtcttccgatccgaaagggcatttaaagtcatttatcatctctgtggcccgagccaaattcagaccagaagaaagagacgctggtctctgtcacctgttcgtcgagcacttgaaagggcgagcacttgaaagggccagccctggactggttctcgagactcgaaggaaattatgtggatagttttcaggagctatcgactcttttcctaaagcaatattcggtgctaatcgatcccggcacatcagacgccgatctatggtcactatctcagcagcctaatgagccacttcgagatttcctcgcaaaattctgatccaccctagccaaagtagaaggaatcaacgatgtggcggctctttcggctctgaagaaagcactgtgctataaatccgaatttcgaaaggaactaaacttgtccaaaccaccgacaatccgagaagccctgcaccgagcctcggattacgtatcccatgaaggagtgatggagctactagctagaagacacgaaccgaccaagcaaacgcctcgcagcgataaacctcagaccggcgctccgaaccacaagaaaggcgcccaaggtggtacgttcgttcaccatgaaggacgaaatttctccggagcccataattaccaggtcgatacaccccgatgcgaagccacccgaggccgagggcgaggccgcggacgaggacgcggtcgagcatcatacacatggacaaaggatcaacccgcagataagagcaagaatattgcgagttgcacaagagttacggccatcacacgtccagatgtcgtagcctcggagcgagattggcagcaaaattcctggccagagaaattggtggaggcttgaccatcgaggacttagaggcagaaaagggtaaaaccgagcaggtcaacgctgtggccaatcccgagcagaccgcccccgcggcgaaccccgaaggacctaaaagaggccggggtaatcgcgaaacagacgacgatgaaccagaagctgctcggggaaggatcttcacaattttaggggattcagctttctgtcaagatacggcagcatcaatcaaggcttatcaaaggaaagccgacgcgaatcgtaattggacgcggccatttaatggaccaaatgacgaagtaacctttcacgaaagcgataccaacggtttagaccgtccacacaacgatcccttagtcattacattaaccatcggtgatttcaacgtcgaacgagtcctagtcgacacgggaagcacactggacatcattttccttacaactctgcgagaaatgaagatcgatatgacgcaaatcgtgccaactccacgacctgtgctcgggttctcaggtgaaaccactatgactctcggaaccatcaaactaccagtccgagccaaaggagtaacaaaaatcgtcgatttttctattaccgaccaaccaaccgtgtacaacgcgattatcggcaccccatggctaaatcagttccgagttgtcgcctcgacgtatcacctatgcctaaaatttcccacaaacgacggcgtgaaaaccatctggggaaaccagaaaaatgctcgcatttgcttcatggcagcgaacaagcttaggaaccccgtcactgaatcgacggccgacgcgaatcataagaaggccaaacttggccgagccgaagaaaagtcgatctccgagcagttatagcaattaaagatcgaagaagctcgggaatctacgataccaactcccgatccggtcatctcaatttgccttgacgatgcaaagcccgagcgatgcgtagaaatcggcggagatctaggagaagaactaacagctgaactcaccgctttcctcaaagagaacgtcaatactttcgcctggtccccagaggatttgcccggagtaagtgttaacatcgtatcacacgagctcaacatcgatccaacttttaaacccatcaagcagaagaggagaaaattgggtcgggaacgagcagaagccgtaaagcgcgaggtagaaaaattattgaag

SEQ ID NO: 22983 - DNA, 3902 bp, Arabidopsis thaliana
gacagagttcccatatacaacattagctacaatatcaccagttgttggatagttagcctcttaagaaggatatataatcaacataaagcattacaaataaaagtaaatcaaacaattctagggcacataagccaaggagccgcaagccactgtcgagatgtgttttcctcaccgatgttgctcctccggcgatctccgtcactgactggcacttgcttcttaggtgatctctcaggtggcctccttccggcgatgttgttatttccaggtgagtttctcctgagatgactttcttcttctggtcgatttcaagctccttccatcatttcccgatctcttcggtcacttacctcgtttgaggctcctttcgttgttgccaccggagtctccgccagaaccgctagacccactgaacccaccagatcctcctcctcatatctacattttcttcgacgtatctcattctcagccgcatctttccacttttttgatctcattctcctctgacaaagctttttctccttcccagcctccactccccaaccggctaagagaaccagacgctattctcaagctgttcttcaccatggttgctcccactattgctacgcaggcagtagagtgtaacgtgacttgtttggttgtattcacctcaagttctcttcctctttcatattgccaggttatgcttttgtcatgttccgtggactgtattcatatgtctttggttggcaggtctcttgcgcttgtgcgatctcctactgcttatttcagtttcttccctggttccatttcgggtattgattatatgaagatggtctttcttcctttgtggcagattggaatgccttcttttatgtctattcctccgttgactctggttgatttctcctttatggaatatgtctttctcccaaaaattccacttggtttgagtggtagcgttgcaaagaacttgttatcgattgtttcaaatcctaatgctttcagttcgtcatatgtcttcgaatttggcatggatctggaatggcgtttgaatctcttggatcacttcaatggtgactcatgtttaccttgtattgaggtttgtgttagacttgtgctaaccttttatgttgttaagggctttgtcccgattattagcattggcatctattgttttgaagatgtggcgtgggaagtgcagtctctgtttagggttgagacttctcatcttggtacctgccgccaaattctcttcccaaaagtccctcttgtttggagtggtttggatgatcaatcgtctccggtattgaaaggattttcctcccggttgatggtgttctttgcccttatcgcagagtttgtaaccctttgggttgcggtggatgcagttacataggaagcttccgagatcgttcttttcttttttatcttttttggttttctttgttgtgttgtatcttcaatctatccttagtttaaccttcctttggtgttcttttaagcatttattgctttgttatctagtacttttcttcccttttgggtgtaatccctcctcctatatagagtttgaggcttaattttaatgaaagtataagtttgaccccaaaaaaaaaagcattacaaataaaagcaacagaaagtgaggggcatagatataatggcattgattgtattttggcattgactgagtcaagccacttccctcctattagaccttttgttcgtaaataatgaactcatgagcttttcacactattcgtataatcatttcaattgacgcatatcataataaagtcctcacattttgtcttttagaaacataactggaggaaattgatatgacatgattttcactgattttatctatgttttaggtataggattttgagtctttatgttatttctcgagtctttatagtgtcttttcatgtattctatgcaatgggacaacaatggagataatgagacattttggagcaaaagctatagaaaaggaagctaaagacgattttagttcaggaatcagcgaggagggtcgatcgacacactcttggtgtcgatcgccaccagtttcggtccagcagaagtccatgacgttttcaagtttacagaagaggaaatttgccccataagacttccctatttgcattattagtccctcgacgttttatattgtttatatacattgttctagaccctagtttctattatcaagctctttggaaaaccctgttactgagagacataagctatttatccaacgttttcagagattcattcagttttcaatacagaaggagcttatcaacttgtcggtcttagacttgggaaaacttgaacgaaccaaccgaaaaactcagagattagcaatggctgacagagtcatcacagctgatgcagaaggagttttagagatgagaatgggcaagcctacaatgaggctggtcagagattggatgatcatggactcatcctacctgaggacgccaatgaagatcaggcgcgcctcaatgcgcaattagctaccagagacggagcagggcttgctgtcgatcgacagaacagaggtgtcaattgacaccttcaggagtagaatgaagacgagattggtgtcgaacgacacaacagaggtgtcgatcgacatcaatcccagattcctgcagctattcctctagctgcggaaccacgtcgtactctcaggatttcaataggccagatctattctatgctaatcgatcagcgatcgtacccccacccttcaagaggagcgactatgagctgaagcctggctactttgctttagttggccaacatcctttccatggcttatctcattagcagccaatggaccatatcgagcgttttgaggaccttgttctgagcatcaaagctaatggagtctcagaggactacctactgtgcaagctcttaccttattcacttgtcggggaaggcgcttcttggctgaaacaacttaaagcaggttccctcaagacttggagaagcatcaagatagccttcttgaataatttctacgatgatgttaagtctgatgagttgagaaacaagctgtctatcttcacccaaggaccagctgaagctttcaatgctgcttggattcgtttcgaggagtaccaacgagactgcccacatcatggtttcagtgaggtacaacttctaggtacctttttcaaaggagttgattggagataccagatggctctagatgcaacgagcaatggtaacttcaacacacgttacccagctgatgctactgctctgatagagaacctcgcttgtaataagattgcatgagctatttcaggcaatcaaatggtagaggtgattgctaagttggatttggttcacaacttgcttacaaggaagaagcatgtccactttgcagctgaggatgagtctattgagtctgagactgagtctgaagagggagtcttctacatcgatggtcagggctacaggaagtttgggcagccacaaggcaacttaagtggcaccaagtttacagggaaccagagttcctccaactacactccaaagcctgctttccagaagacctttccttagagcaacttctagaagacctatggtaattcagcttaccaagccccccctccaccttcattagagacaagaatgaaatttatgcttgagcagattctagagagccaaacaaagcttgttgtggagtttaatggcaagtttgatgctgtctacacagatcttaaagggaagatcgacaatctgagctctcacttgaagaagctggatgtacaggtaatcttgatgctaacccaaagaagagctgtaatgccatcttgatcagagaaggagatgatgtgtaggaagaattagacactgaagacgagttggagctcgctattgcagagatggtg

SEQ ID NO: 22984 - DNA, 2367 bp, Arabidopsis thaliana
cgaagcatgtcctgagggagatgtccctgcggaatagctgtagtggaagaggagcagctgagcttgtccttcagaaacttgatagcccttaagcacttggcgagtaacttgtcctgtttcttgcaccacttctgcagcttgctgttgttcctgtgagcttcgctcaaacttttgctttccctcgtaggaggtatatgctcactgaaatgatacatgctcgtgtcaaactccgcctcatctatatcatccgtctcatcaacatcttctgttgtagctccttcggtgtgactaaactcctcggttggcggactaccctcgaaataaagatcttcaagcgcaggcttgaagtcaatgttcctgccctcaagaatcctagtagcgtcaatgcaggggagaagaatgttggcgattctaatcgatgaatgctcgaacctgtagcggtgaaagtcgccagccatgtcaaactccaagaactcacatctgcgcaaatgatctaagtccatcatcctcggtgctaaacctggttccttgagcgggactccacaagtttccagaattggcgtcacaacgccacccacgcatagtgctcctctcaccttcttcttcccgtttgtcaacgcccacttcctgtatccacacagatgcatcaacagaggcattactggtggtgcgttgttgagatcacctctcaagacattcttccccttcgtccggcggagaatccctgtaagcgcataatctatcatctccatgtccgtgttagacatggtgcctgtagactccctggagtaaaagacgttggcgactgatggctgaaagtagcggatcacaggacttcggatttggttgctcttagaccgcgctgagtttagcggtagattgttccgtatagtggcccacaaatccttaagctcctctctgtcaaatctgggtttggttccctttccactagggaaaccaaacagttcttctatcttcttgatcgaaagctgataccgctgttcattcactgagaacgtcaagaagcctaatcccatggtatccagctcaaagtctgtgagtgcttcatacatctccacttgcagcgtggaaagaaactcgattgtctcctccttataggcagggtaagggtaagacatgagtgtctccagatgacacttctcgaacaaatgctgcacgtcctccagtaaccccagctgggctaacgtctcataacaaggataccttgttccccagaagtcattcatctcgaagaatctgatatactcctccactgtaacctcgtcgggtttgttcagcagcttcgtctccctgcgccatgactctggctcatactcagtctcgatatcctcatcaatcagcttatacttacttgacatcgccctctttcctctggcgatttcagctcttctctgattatgtcggtctgtagagcgttcgagttcgtccctgaaactctggtaaacatgttgctctctcggtctagcggaccaggactcagcttcatccacgttgtaatcagggtccatagatgattctccactatagttactcatgatgaaaccttgaaacaaatgtaactcaaaaataaacgttaatacgttagttccaacaaaactaaaaacactaaccaatagagtaaaccggtcgagtgaaccaaaaattcttaaaaattttttttttttttttttttttttttttttcggtttggtgaacacgtggtcgagtgatcccttggttgtgcttggcgatcgagtgaccgtgagaggcgagagatggttaagcggtttgaaagacgtcgagtttggttgcttaatcgagtgaagcggcgatgacgagctttcgtggggatgagagcagcggcgatggaaacgatggggaggcgttgagaagcggcgagatcgagtgactgtgcaaggtcgagtatgttgagagatggtggtgagagcgatgaagttgtgaaggagcagcgatcgagtggctagtgggtttgagacgagctgcggtcgagtgaacttgagctcgcggaagagaagaaacggtggtgttgtcgagtgatagctggatttgagagatgagagaacgatggcaccttggtcgagtgatgagagacggtggtgaagaggcgagtgagaagcggtcgagtgcgtggggaagaaagatggtgaggtcgagtgacggagaagaaaggataaggtgaagtgtgttggtcgagtgtttgagagaagagtgtttgaggataagaagtggcgaggtcgagtatttgtggagagaggggcgatgggatagagtgaattgataagatgaggtcgagtggtggggataaggtgcgttgaggtcgagtggtgaggagaagaagaagataga

SEQ ID NO: 22985 - DNA, 718 bp, Arabidopsis thaliana
cagcaatcctattgtgtgacgaagcaacaagtgcactcgacagtaaaaccgaggcagagataatgaaaacgctgaggtcgctagcgagtaacaggacttgcattttcattgcacatagactgaccactgcaatgcaatgtgatgagatattagtaatggagaaaggaaaagtggtggaaaaagggacacacgaagtgttgttggggaaatctggcagatacgctaaattatggacacaacaaaacagtaaattggaggtgtgaattttgtaaaactatgaatcaaaaagccactttgggcctttatatagccttttaagagagtgaaagagcagaaaatatagacaccagaaaaaatttaataaataaaaacgaaaaagatcaagcccaatacacgatcccaattatccaataaacaacgtccacgtagatcccgacaagcgagtcatactcacgcgctgtttcaccgagcgtgaaaaaaacgacggctgatccctttgtttaagacagccaccacctccgaaattaacaagaaggcgaagaaaatcatcaccaccgtcaacttttctcttgcggacaagacgattctccgattatccccaagaggagaatcctcataatcccccccctcgcgattcagattctgtcttccattggtccgtggattgcttcatgaatttctaggtgagaattttcgatccttctccttagcattttgg

SEQ ID NO: 22986 - DNA, 678 bp, Arabidopsis thaliana
acttcaaggactattggtttttatccaattcaatgattccaaaggtaatacaaatagcttactttaaaaccgaataacgaaactttttgatttgtcaaaaggtaattgaaaaaatcggtttggtacctctacgactataaatgattttcccaaggttacaaatatgttttattttttgtaacaaggctacaaagtaccatcaatgatatttgcaaatatatgattccaaaaataagggaagtcagcaaaaaaaaagaattagtgaggcgaaaacagaacccaaacactagctgtctagctcttgagattcacacctccagtgtactgttttgttgtgtccataatttagcgtatctgccagatttctccaacaacacttggtgtgtccctttttccaccactttccctttctccattactattatctcatcacattgcatcgcagtggtcagcctatgtgcaatgaaaatgcatgttctgttactcgctagcgacctgaacgttttcattatctctgcctcggttttactatcaagcgcattcgttgcttcgtcacacaagagaatcgctggtgatttcagaaaggcacgagcaagtgcactctttgtttttctccacactcagcatcagcctctttctcccacgcggtcgaatatttatcggaaatttcatgatcgt

SEQ ID NO: 22987 - DNA, 2395 bp, Arabidopsis thaliana
  unsure (1)..(2395): unsure at all n locations
tgagctttttctacaagacaagtcaacaatgtggagagctccaaagaagtttacaaagactccaaaattccccgaaatgccccgaaaagtagctttcaaaagaagccaatctcgcctcaatcagaaatttacactgaaggttatgactctttctttgcaacagatgcaaccagcgaaacgcagatcctcactgcacgatcaaccaaattagaaagcaaatttctagcaatccaaaagaatnatcatggcgatctgcatatcaattcgaagccccgaggctcagctttctagaaagaccaacctacaccttaacgtcgaattcgacaaagagttatcacagtatttttctctgctgcaaggtaatcactagttgataagaacgactcttcatagacgaacaatgcaactctacctttggaacagcaattctgagctcagcctctcgccatttcttctcccatcaagataagtattcgtgctttacattttttgattgttgaagtcaagctctaaattgagtcccgactcaaaaagcttagttcacctagtatcgaactacattcaaaagataaaaataattcttgcagttaatccgagctcaacgctcgcagtcacacataaattgagccgagctcgacgcttgctattatgtgaaaatgtttcacaaaaaccaagacctcgtcttgctttaagtcttcaaaacaggataagccgagagttcctcgcaccttaaaaaaaaaaaaaaaaaaagagctcaaaagctcacgtatcttgctaaccaaatgataatggcatgtttgcagctcatcgcaacttatgttttttttagctcatctgcccggctatctcgcagatcgcaagacaaaccatctagcaacctatatcccagatcgctcgtcagatcatctgatagcttgccttgcagcttgttagcaagatcatttggtaacctatctcactgctcggctcatcagtcaggtcatttctctgctaggcattcagatcatctaggagagcatcccacagctcctcaacaactcatgaggtccatcagactacctaacccacaagcttagccttgttttatatcgtcgacgcgtgccaagctaaactgacgtatcttggaggttcaacggatcaatttttaattcgcatcttcctaaagtataagccgaatattcacttcttttaattcggaaaaactcgagtttagcatttggattttcccgaactggggggggactaattgttggtgccggaattagcacctccgacaataccggcttaaaccagaggaactacgaattagactgagatttcaatcaaaccagggtatcccggtttagcctgttaatgggccaaaataaggaggtcatttgccgactttagcccgaagtagggagaccgtctagccgacttcctaattcgaagaaaaagaagttttctcctttgaaaataggaagtctttggagataaaggaaattagaagattcaatcctcgaagaaataaaagtttaacaactcttttaaccgtcttaatagtgtataaatagaggggtttgtcctctattctaaggatccgaaatttaatactaaaaaccctagttttcttcattgttcttgggcaaaaccctaactttgtctctaagcaaccttgttcttcttttcattgaatctttggtcactaaatagcgagagagttaagtaaatttgtttaccccctttaaacaaatttattgtgtgattttcagaagaacagctgttgaagaactccaagctgggaaaatcagtccgcccgaaagccgagctcaaagcttgcagatggcttataatttagtcgatctaaaacctaatttcaagattgggaatccgatatggttaatacgtaatcaaccgacggaggttcacaaaaaaaaaacaaacatgaacttgttcttaagggcaaaaacattttattcaaatataaaagtctgaaagataagagtggtcgacataagtcaaccgacctaaagccttcctagctcccagttcgtctagctaacagctcgtctgcacttcgcctagctaacagctcgtctgcagcctttctagctcccagttcgtctgtaggtttccttgctagcagcccgtctgcacttcgcctagctaacagctcgtctgcagctttcctagctccctgttcgtctgtagctttcctagctcgcagttcgtctagctagcacctagtctgcacttttcctagctcacagttcgtctgcagtttctctggctcgtagttcgcccagctaacagctcgtcggcagccttcctagcttgctattgcccgcctaacagcttggagttcttcaactagtcgcctagcagctttcctagctcaacttgtcaacagctaaca

SEQ ID NO: 22988 - DNA, 485 bp, Arabidopsis thaliana
tcaaagtaacagcgccggacagcgacgcggtgacggactgcataatccaattgatccaaatgctgtgaaaaccaaaccactgaaggacctctttgatgaaattccattcgagcctgtcataggctttagaaatatctgtctttcccgccatcaagcaatacttggtggcacttcatgggttatcaagacattatcagagattgctctattcttgataaaagcatactggttctcagacactaggcttggaaggagcggctgaagtctttgagttaagattttagacacaatcttataatagacattatagagagcaataggtctatattaagagactttcttggctccagtgatctttagaatcagactgatgaaagtctcattgattgaagtaggcatggtacccatttgaaaaaagccttggaccttagagatgatagcttgcccgatagaatcccagtgagattggagaaactagcggagaa

SEQ ID NO: 22989 - DNA, 1578 bp, Arabidopsis thaliana
ttcctcttgatggaacaacctttccccgaggtgaaccattgatgagaaaggaataggagacagttgtgacggactgcataatccaattattccaaatgctgtgaaaaccaaaccactgaaggacctctttgatgaaattccattcgagcctgtcataggctttagacatatctgtctttcccgccatcaagcaatacttggtggcatttgactttttgaggtagtggagcacttcatgggttatcaagacattatcagagattgctctattcttgataaaagcatactggttctcagacactaggcttggaaggagcggctgaagtctttgagttaagattttagacacaatcttataatagacattatagagagcaataggtctatattaagagactttcttggctccagtgatctttagaatcagactgatgaaagtctcattgattgaagtaggcatggtacccatttgaaaaaagccttggaccttagagatgatagcttgcccgatagaatcccagtgagattggaaaaaactagcggagaagtcctcaggtcccggcgccttatccgcatgaattcccattagagcatcatgaatttcttttagggatggaactgcaatcaatgccaaattggtctcctccgatacacagggagacagggcttctgtgacagttgctcgtgtatgagactcatccaaatcgtctgagtgaaacatcttatggaagtaggcagaaataacttcagtaatcttgtggtcttcaaagacagggttcccagattcatcttctataactgaaaggcaatttcgtgctctcctttttttagtgacagcgtgaaagaaacccgagttctgatctcccaaacatagccacatgattctactcctttgcttccagtaaccttcccccagcttataagcttcggtgagatctagattgatcttggctagcaaatcgtcattattttcaggacttaccattgcctgttctagctccatcttcttttgctcaataagtttctggctattcctttgtttttccctgctccatgccacaatctctttcctgcagattgctattctctgactgactgagaaggaaggctctctgttccaacactcctttatgagctgagtgacttcagcattgttcttcagtcttctatcataacgaaaaaccccacgtgttttcttcttcttctttgcaaagtaggtcacaatagggcgatggtccgatcccttaaatcttagatactccaagcgtctagaaggaaacagatcagtccaaacagaattggcaattgctctatctaggcgacatctaatgacatgagagtatctgataccccgccaggataaggattctcccgaatgcttgagatcaaagaggtcgctttcagataagaaggatctgaagtccacaaaagaactctccccgtaggagccccttcttctaagccgagtggcacaaacctgatagcacctctccacaaaggataaacatatatgaggagagcggatctccttgtcttattccccttgatggaacaacctttccccgaggtgaaccattg

SEQ ID NO: 22990 - DNA, 518 bp, Arabidopsis thaliana columbia
gtaacgtccgccagtgtgctctaaagcgcaataattatctccatgtacagggagcaccttctcgccatcgaccacgtccagaagctactctatcatcaagtgccgtccgagcaagaaggcaagcgaacccttcgagcacccaccttcttcgtttcccaggaagaccagtcattcaagactgaatttttcccacgtggtagcgacgagagcgccgtatttcgttctttgcccagtcgctgtccaccccgatgcctgagccgctgcctgttgacaacatgcctaccttcaccgttttgattcctcattacagcgaaaagatccttctctctttgcgtgagatcattcgcgaggatgagccttactcccgtgtgactctcctggagtacttgaagcagcttcatccccatgagtgggactgtttcgttaaggacactaagattctggcggacgagacctctcagttcaatggagactacgaaaagaacgagaaggacgcggccaagagcaagattgatgac

SEQ ID NO: 22991 - DNA, 502 bp, Arabidopsis thaliana columbia
gtccataaagcaatgaggtaacgtctaggtcaattaatggatggatcatccaacggttgtaccaaaaaatactatagagattaaaaaaaagcatatctctgaattattattatttacgtccccatctctcttcctctataaatagtataagcagagacaatattcatttcaagttcctctgtataccaaactatcaaaaaaactctctccatttctgttctcaacaaagccaagagttatggtgagagtctttcttctctacaacctctttaactcctttcttctttgtttagttcccaagaagcttagagttttcttccctccttcttggtacatcgacgacaagaacccaccaccgcctgatgaatcggaaactgaatctccggtagatctaaaacgagtgtttcagatgttcgacaagaacggagatggacgcatcacaaaggaagagctgaacgattctctagagaatctaggaatctttatgcctgacaaagatctg

SEQ ID NO: 22992 - DNA, 483 bp, Arabidopsis thaliana columbia
tactccactactttttgattagaagtctgctacttctacaaagtgactgactctaattcggtgaagatgtcagcaaccaatttattcctaacgttttgaattatgttcccttcaaagtttgaatggctggtatacattgagtagcattccataaacttcagcatatagataccagactcttcatttctaggagcctataacgaaaaaccaaaagaattacttaagcaaagaagttatagaagtcaggacttacggaatattcatttctaagactatgatatatttaaagaagttacctgaggaaaagtggtcaggactttgatgctaaatggagagacatccatgtcttcttttttgaggatgttctgaacaatgtatggcatagctatagagtaggcaacaacatattttttcttgacttcttctgttaaataagaagctgcacattcccatatacaaactgtcttctggtccaagtggatg

SEQ ID NO: 22993 - DNA, 462 bp, Arabidopsis thaliana columbia
aaggagcttacccataagagtcgattcaaggagatgcttagccatgataacctcatctgtaggattcactacaccatcttcgatccaacgcttctggatccccatcatattgtacacgctcgtcaccagaagcacaataaccgtcgcagaaaccgtctgaatcaccaccggtccacgaccacgcttggaacgatccaagctcataatcaacagcttcctaatcggcgtcttgaaggaaagcgccattatcacaacaacctcgaagagaacaacagcgaacagtaattgctgcatcgtctttgatctcagaagcgataatgtgatcgtctagggttttgataatttctccgagaaacaaaattcaacagcgaatttgaagaactttcctcgtcggaaaatactaaggaggaaagttgaagtcgtgaggaaattaataagctgtcaaataacattttgcttttt

SEQ ID NO: 22994 - DNA, 480 bp, Arabidopsis thaliana columbia
gatttaccaactggtttagcaaaaatacatttagtagagttaggaatagactccaaattgtaattgtttgattaatgagttgagagccaagaaactaaaacactatttaacctccactaactggttttctaagtagttaacttgagagagtaattcctttggctggatcaacaatttctctgttttaagggcttcaccatacgccgcaatgagcagtgcttcagctcgaccatgatcctttttcctcttaagttgcgaactaagcgatggaaacaactccgctgcaactcgtctgctatcgtcctgtaacggaaaatataaacattgtcagcatttgagagacttgtatttaactcacaaaagtttgacagtaaaaagatcaattaatcacctttgtgcaacttccactagcaagttgaaaatgcctcttccataaagatgcggaaaccggaatagcacaaaagcctgaagcaacaagtg

SEQ ID NO: 22995 - DNA, 135 bp, Arabidopsis thaliana columbia
gacacggcgcatcggcggcaccggactcggcctgtccatctgccgcgaactggccgagcgcatggacggccgcgtcggtctcagcagcgagggccagcacgggtcgagcttctgggccgatttggtttgcccgcg

SEQ ID NO: 22996 - DNA, 535 bp, Arabidopsis thaliana columbia
ccccaaacgacaaacgagtaagtgactaagactcagtatcatcacaaaacctcatgttggtagccgagatgcatttaaaaattccaggcagaccaagcaaaaaagagccacagttgcaggagagatgattatgactattggagtattgaaaattgaaacactataccacacaaaacatgtaaacaagagtccaacgtcgcaatgtgcatgtgttcaacattaaccaagtttaatactgtttagtagctttaaagtttcgaaatttcatatttagcaggtcttttaagttagtaaatgaatctgagaaaacaggaatcatgcataatagtaactgaattctcacccatatactacaaaaaggccttaccttctcatccaaaaatgattttattttcaactctgtgcctttataatcatcctctgcaacggaagagccaccagcaaatgttaagctggttcctcatcacatggaactccagtttggagttgagaagcttggtaagaaagcaggttagatttgcttttcacacttttg

SEQ ID NO: 22997 - DNA, 583 bp, Arabidopsis thaliana columbia
gaatatacaattcctttagtagacctaaaattttacatatgaaaagttccaatgtaagattttgtttacttaaatcagcaattttgttttcttttatcatcaggtccactgtatattttctcaaaacctgtccagagtaaattaatgtatgcctaaagcaagaaagctttttgagtccatttataaacacaactggcttaaaaaatcattaatattgctaggattgaatccaaactctgcatcttaaatgcaagggcaagggactctcccactacaataacgtagacttctacgacatctcacttgtggatggatttaacattcctatggagtttaggtaagaatatcatcaaaatctttcataattttgtttttttttcctaaaaacaaatggaacataaacctacaaacctaaattttctgctcgagaaaaagaaaacaacaatcgaaagtctattttaaaatgttttgaatcgatgatgatagtgttttgttggtgtgaattgtttccagccgacaagctcgaattgccccggataatatgcaatgcagacatagaaggacagtgtcaaacgacttgaga

SEQ ID NO: 22998 - DNA, 439 bp, Arabidopsis thaliana columbia
gtacccttcgctttgtaggatccggaaattcattgcgcacctaataggaaagatggtttggtttgttctatagatatcactgcgccttttaccgcagttttgttctgataagttacttcaaatctcaccttgctcttccttatctgcaataaacataaatcatgtaatacccaaaacaactggccagaccggccttaaaaaagctagtaggtgggctggtcagaatcaggtcgggctagttcggccatggctctccgagcatggtacatattggtactcttttgtatattgtgtgatgtgattcgttgggtaaaatcaagaccgagtttaacttaaaaacattataggcctcaaatgggccaaatcaacaatgaatcgggcttaattgagccggcccataacgatatcctaacaaggctagaactaatacagatgacag

SEQ ID NO: 22999 - DNA, 568 bp, Arabidopsis thaliana
tttggatttttgagaaactaatgactgcctcaagttttttaacggtaaaaacctaactttccctcccttcttccacatataagtattgacttcgaaaccaacttacttttagcaattgatattctaaaaaatcccaaaacattccccgaaaaaaaaaaaaagaatgtggaatggatggaattattcaagcaagatgaataaatatgtcttgttaggcgtcacggctctcattatggcaatggtcatttgtgtagaggccaacgatggcaacagcccgagtaggaaaatggaagaggttcaccgtgaaagcaagctgatgataacaaagacgacggtgagtattatatgtgcctccaccgattacaaacaagattgcaccacgagtctcgcaaccgtgaggtcgccggatccccgaaatctaataagatctgcttttgaccttgctatcatctcgattcgaagtggaatcgacagagggatgattgatctaaagagtagagcagatgccgatatgcacacaagagaagcgcttaatacttgtagagagcttatggatgatgcgattgat

SEQ ID NO: 23000 - DNA, 550 bp, Arabidopsis thaliana columbia
actctctctgtttcaaaataacaaaagtgttattagtttgtcagttcatgttattacaacattttttagtcaatctcgataatgtatccattagttaggaccccaacagctcaagaacataaccgttctaagtgactcttcagattgctttgacttgtcatcatccttactagaagcgacggcgatggatgaaaagaatctgatagcctcagaagcggatctcatgttgttacggatacgttattcactgatcggatcaagtagttccaccgatacattcctaattggtccttggaagcttccacggctccgatgcttgcagctactaactatgctttgctcgttgaacagttgaactcatcttttttattagaaacaaaagcagagaaactatttgctttttgttttgttttgtatagattatgaatttgtgtttgtgaaaaatgttgatgaagaagatgagactctgattagtcttgttatataataagagaaagtagccgctagttaaagtctaaaaccagatcctttctccactagttttcccagg

SEQ ID NO: 23001 - DNA, 729 bp, Arabidopsis thaliana
catatcttcaatatttcccttgtaacatgtcttatattatcttacttgtgatatttaataaaatatagctctttgattgtattattaattattgctactaaacttaagattttatttttgttatttggaaccgaatccgttatctcgtatatcacgtaggtcgctgaatataattatatatatatgtaatgtaatctgttatttctttatattgatgaaacttaacataaaaaaaaacaataaatacattgcattgtgtctgaaaacccaaaaatattattcgatagcaatgtctcttgcaaccacaatgatcgccatctttcttcaaatcattacatattttctcattaccaccacagcctcatcacctcagggcttcactatcgacttgatccaccgtcgctccaatgcatcttcttctcgagtctttaatactcagctcggatcaccttacgctgataccgtctttgatacctacgagtacctgatgaaactacaaatcggtactcctcctttcgagatcgaagctgtcttagacaccggaagcgagcacatatggacacaatgtttgccttgtgttcactgctacaaccaaaccgctcccatattcgacccttccaaatcctcaaccttcaaagagataagatgcgacacacatgatcactcttgtccttacgagcttgtctacggcggcaaaagctacaccaagggaaccttagtgaccgagac

SEQ ID NO: 23002 - DNA, 640 bp, Arabidopsis thaliana columbia
  unsure (1)..(640): unsure at all n locations
tgacgctaaggcttattccaccgcatttgaatttggttacctgagctaaaaatagaggaatcgtttcgatagggtttttatagtttacttgcggcataagattctcgaattccggcgtaggagagaagtctttgaaatccgaaagcttcccctcagattccgcttcaatgaattccactccctcggcgttacaattgagctcgaaccgtccccgagggagccatctgagacggccagccatagggtaaaaatggactagcacacggctcaacgaggtttttaggatttcgactacattgccttggaaagattcagatggcttgtcgtaaaagtaaagggtgggaatgtgagtaattgtaccaacttgatcccactcggctaagggaaacctaccgctccacgttggttcggccggtactatagtgtaagattttctaaaagttatgggagccataacacaaaccccctttctttttctcttctctttttgaagttcgtgctaaagtaatgtttatatagtacacagaatcatatggatcaacgaatttttcttgctgttagcaaaatcanaaatgttttctcgtggtttagtttgtntcttcgaagcacttaatagtggagtgagataaggttagtttgt

SEQ ID NO: 23003 - DNA, 469 bp, Arabidopsis thaliana columbia
acaaactctcataccaactgaagtgtgactaatatggcatcatcagcatcatgtcaccacttccactagcagttgacaatggtcgctttcgaggtacagggagttccagaatgatgaggaaataggaccgttctgattctcggatgtattgaacctcaccgttcattagctttaaaatctttcgacatacgcttagacctaaaccttcagggcttgtccacctgctgctatggaacatgtctcggactagctctggaggcagaccttcacctggacacgccattctgcaaacaacgaataaagacataacaaagacaccaacacatgaaacccaagttttacacttttgagctggttttcatcaatttgaaaacattacattccttgactgctaattctaggcctatggatgtgtctaaaagttcccaagtcgactaaaccgaatacaaaaatcaaactaatctaggtt

SEQ ID NO: 23004 - DNA, 521 bp, Arabidopsis thaliana columbia
agccttcagtggagaatttctatttttcctacgaagtgacaatccattttctctttgtctagtcaaggatccatcattcattgtaatatgaacgttaagaaactgtcacatacatatggaatcaaatccatatttggatttaagccgactagtaacgccccaacttaaccaatgcagttattggacttaacattttggaaatgcgagaagttagagatctcaacaaataaaggcgatcattacaaaacttaaacctagaaagaggataattttggagtgatggtgacgtagaggatgatcgccagtttcttatcatttcaaatgcttgatagaatacatctcctcatagattgagagatagagaatataatattttgtagtggtggtgatgaggaggaggaggattgagtgttatgagagtttcagaccactcttggtgacaatctaaagatcttcctttgtgtactttcttgcatttcaataagcccagatgagctatctcatttccaactacacttaag

SEQ ID NO: 23005 - DNA, 456 bp, Arabidopsis thaliana columbia
atcgaagttatatacgataggatcaagtcgtaactgttatcaaaatattagtttatcgactgcaatttgttcttggttgatgtgcgtgaccaatgactatgggtctcaattccactagctatgtcaactcacaacaaaaaccattttattaacttatataaccagaaagctgacggaaacaaatgacaaattcaggaagaagatgatttcaaaggtctagttcacaaatatcatcaattttttggttgggccttttcgattctcctgattgcatcgctaagttccttctggaccttgggcctcgatggaactatacacaacatcattccaaacagaaccgggtttgcttaattggcttggatccggataaagctcgtaaatggattctgcatccgggttgagactgctgacccgttttagacaatcaatatcctctggatccaccagaagcttact

SEQ ID NO: 23006 - DNA, 523 bp, Arabidopsis thaliana columbia
ttgatgtttcttggtactgcctctgccacataatccgagttcacaagtgctcttataacttctgtcagagtggaaatatacaattgcaaatcagagctacaaagaccggtttcttgaatcaaattcattctttcttcaaatccaagagtagacgccaaaaggacatacatattgactctgtatcatcaagtgtgagctgattgtgaagacaatattcttgaatggttatgctcgccttcgtaagttacaattaacattgaagtttcatcaatacatcgctccacatgcttccttgctggacaacctctcacactgctgcatttatagtatcccctgcaaccgaaacaacaaaaggaaacttatatcaaaatcgacataaagttattgaaatcttagaccagaagatgtttatatatataccgtggatgcggtgaaccctttatcggtttctgtccatacttcctccaagaatactcatctggaggaatgtctgcaatgttgttactgattgcaggcaccttga

SEQ ID NO: 23007 - DNA, 522 bp, Arabidopsis thaliana
tggaaaatatgtttttgcgagaaacttacatgaccaacagcgatttcatgttgcttagaaattctggcacctctccggtcaagttattattcgacaagtccctaaagttaacaagagagaatataataccatattacatccaatttttttttttgcatacacgtaacatttgatcagcaacaagacatacttacagcttttctagtgtcgtaagattttgaatggcagctgttatcgttccagttaaaccacttgatgacaagtttctggtgaaatttccaaaaccatattcaataatatgatcatgatcacttatagatcctgatgtgtatactagtgaactaatggcttacaaagtagtgattcttggtggcgtggttatatctgtgatgctgcagtttaaaccatcccacataaactgttgagggacgcatggatcgctttgccagttgattctactcaattcataggtggcttggatgtttttcacagcagaaactgttatatacatgtattggtgac

SEQ ID NO: 23008 - DNA, 787 bp, Arabidopsis thaliana
tgataacattgacaccatcagcaatggcatcgtcaaacgcagccaacatatcttcatcaaaacaagtgtttgtggcgtatttttccttgtttggaaccgcccaacaagctttgtaaacggcgagacgagctagtgaagcgccgcctgaagccgtacccatagcaataccgcctagtgcagaaacaccgtctactcggcgaccaacggcggttgaagctgtgtgggaaccatgtccatcagcgtctcgtggagacaagaagtctttgttagcttcggcattgaacggtccgtaatatctctcgtaccctcttgcatagtaccttgctccgataattttcttgtgattaatgacgataaaataaagatgataagcattaatattaagttattagccctttctaatatatcccgtagtctaaaggtaattaacgtaataaattattttgcagtatcaaactagtacccatataaattttgttctctttgatatttatgaaaaaagtcttgtggaaaagatgagatataagttcaattatcatgataatatgtatgtactagtactagtgtgcatatactaatttcaatcataaaatttacgttaatttgaacaaaatgtagtgatatcatgacaaaagtcactttttgatgtatttggtgaaaatgttaatgttgaaagaaaaaaaaaactatagataattagatatatagctggagtgagctgagctcatgataagggcatttcatatatacgtatataagatatagttaaattgataacctttagtaa

SEQ ID NO: 23009 - DNA, 586 bp, Arabidopsis thaliana
cccgggactcgggattatcctccgtcactgccgcctccgccgggaaaagtagcggcgggaaggagcaaccgtcgtcgtctttgcgaatcggaggtttaagcgatgcggagatgaagaggaagaagagaatcgcgaggtataaagcttatacagttgaaggtaaagttaaatcgactttgaagaatggattccgatggattaaaaacaaatgctgtcagattgtccatcgtttctgacttctgagttagaaacagcagtctcggtgcatgtccggattaaaaaccattgagagactttttttgttttggttatgttttctttgtagtcctacttaatttacttatttgattagctattgcctagtagtatatcacattgcttccgtgttacttttttcatagacgaaacagtaacggagatgatatgtacttttaaaaatgagacaaatgttttatttattggatgtcctttgtatacctcaatgacccattacagactttttatgaacacgagcctagcccattaataatgaatacgagcatggcccattactgaacctttttttttacgcgaatgaagtttatga

SEQ ID NO: 23010 - DNA, 556 bp, Arabidopsis thaliana
tgcaatccgtaaaacagtagttaacctgagaacaaatgtggcacttccaacatctccatcgaagattattggcgatgggtatacatttctgaaagtgctcttttacttccgtcccatgcttatcttgtatatagcctataagcttttcaaagtctactaccaaaaagtttattttggtcttgtcatccaatttaacccaaatcttcttcaatctatcaaaagaagtatcttcttccccaggttctttctgattatccatagtacctatatcagaaacagccacagtcgcctgcatcttcgttgttgcaagatctatccaattctgaagttctgtctttatcttggtaaaatagccaccatccgtagactttccttgaggtgacgttatggacattcccagctttgctttggacacagctttctcataaaacttgtttatccgaagctgatccccaacttgattagcgaacgagcatagcacgaaaggactcaaagtcaaagcgttaggagacagaagagtagccattgaatacgcatcgacagaagcaaacaagta

SEQ ID NO: 23011 - DNA, 477 bp, Arabidopsis thaliana
taatctaaaggaattcatcgatattaccttctactgacagattttcagacatcttgtagctgtaaagcttctgcttcagatagatcctatttggaaaggctttcgacatgtatagcctatccaaggctaacaacattgcagcggctgtcgattccttctttatcttccttaggactctatcaatgacactaagaactatggcgctcctagcctttctcttcttttcttctaaagctttgaacttttcgagcttctcttgatagtcttcatcaaattcgtctggacctgataactcctcacccttgctctctgattctttgagagcagtacacagacccaatatatccatatgagccaacagttctccttccacatcgtgtaatcacaacgaccatcaaacttctcaacttctattctagttgtagacatggttcaagatcttaaacccttttcagaaccacaaagaacaccaacatg

SEQ ID NO: 23012 - DNA, 503 bp, Arabidopsis thaliana
gagtttatagcgcatttcccaacactaaacatgagccggatcgggagtccggaggccgggaagcgaatgtagggccgcgttggactagtgcctcgtggatgagtttttcgtccgtgatgataatcatcgtacgttgtcccatctgcatggtgaatattggaccatactttttacgtaggtcacgcattaagaagacgaaatggcgacgttggaatatgacttggagtaggtttccgactagtggccatccttttggtcccggtggaatgttcaagctacactggctgcttccggcggaaaagtaccggcgccaccataggttgatgaaatagagagcgaacaagaatatgattacgtcggtgagatccatgtttattattattgaagagagaaagatgggagataagtgaagaagaatgttagtcagagttttgaacaagtttagagtgaatagagatttagggttcttatatagagaaagtatatgtatgggtactgaagtg

SEQ ID NO: 23013 - DNA, 594 bp, Arabidopsis thaliana
ttaaattaacatatgtataatttttctttaagatattttaagtcatggtttcatttggaagcacatttaatttatacacaaacctaagttgcaatgctaattaaaaatcaaggcattaatcttcaccttctgataaaagcagaatacatatgaccacactaaccaaagctatcactatatcatggttcttcttgtttactatttgttttttcttttccaaaatcaggatttgagacagtcacttacatgttagaggtattgatctcttctcatcttcttattcgatttctcaagaatcgccacgcgtaactcttgatgaatatgtatacatagggagagattttgcatgaagactgtgaaggacacaaaggagtaataagagaaggaggattacaatggatgactgcaggaaaaggcattgttcattctgaaatgtccttcttctaattccaatggcattactcacaacaagggcttgcagctttggatcaatctctcctcaagacaaaaactgtaagcttcttcgataagaacatttgcggattacccattgacaatgagtggagtgatcatgttagtttatacctagattag

SEQ ID NO: 23014 - DNA, 2954 bp, Arabidopsis thaliana
gcagcaagtgtcaagaagttctgtgaaatggcgaatcgcagacgaaaatggtggcgtagctgggaagtagctaaggaagtgagagttgcaagcaaagggattaagcagctccgtagagaagaagaagtagaagaagaagcagaagaagaagctgagaatggacttatcttccacatgaatgtttctataatctgtatattgaagatgatcgacgttttgtaaaacttgtattatttagggctaagcattttgtgatattcctaaataacagccacaatattatttagcttgtagtctttgtcctttccttgaatcagataatgaagttaactatagtcaccctccatgttgatccacatttgctgcattgtacgtaacaaggctttagcttctgcttccagcggtgatagtacagttccaatttttgcaaaactcgacaagcagtaggtttgtaacgcccgtgtcccaagttagggagtaaacaagatctctcacccgccgaattcgaggacgaattcagtttaagggggtagacttgtaacgaccgcgtcccgcgttcataaaaaaggccggtttgttttaggagaaaactagatcatggtcgaggaacggaccaaaatacttagtaggaagaacgagaaagttcaagccgaaccagctaggtgagctggacaagctggatgaactagctagctaagctaggtgagctaaaccagctgtaagactagctagctcagctaggtgagctgaccgtcagctcgactgagctcggtgagctaatcaagtactgacccagctgggtggtccggtcagctgacactcgagctggtggactgtggtagctcacgggtgaagaggtgtctcggccaaaaggtgtaaggtcgagcgggtaccaacgaacggttgcatcgcccaaaggatgcaaggaacagatgtgacctttcgaaaggatgcaaagaacggatgtgacatttcggaagggtgcaaggaccggatgtgatgcttcgggaagcatccattcgcctcctatataagggaggacgcccaaggcatctcacatcatctcacaacatccaaaacaccataaaacattctaaaaggagtcccaacacatcctagagttgttggtcggaaagggggtgcggctcggcgagtataactcgaccgaactgatgcgcatgctacctcccggtccaagggttcgatggagtgtagaggatggagagggtagaccgttcgtcttagagacgaatcggatctggtagaccgatcgttggatcggatcggccagaccgatcgtcagacggatcggatcggccagacggatcggacagaccgatcgtcggacgggtcagatgggacaggccgatcgtctgacggaacgggtcggacagaccaatcgtcggatgagatggatcgagaaaagtgttcgaggaagcacaaggataagtgcatccgaacacacccaagggtcgcccatggatgcaatcttaccgagaaagggagaaagcaccaagaatgggtaaggaacgtgattcaccatataggatcaacatcgcggccgccttcatgtatctatctccttagccatggtgaaaccgatcagagatcagtaagaccaaagggtgactcgacggataaccaacgggaaagtccacggtgggaaccgatggacaaaacggatgttggacccgcgagcaaacctaaggccgacggaagaaagatttcatgggctagcctacgatgatccagtggatgaatccacggacccttgggtgtgataaggatatcgttcgaatcgtatggatggatcaataagccgaaagctttatcgaccaccataaaccggacggataaacggttagtaaaccgtgggcggtcgtagtaaatgaccggatcggaaacatggatggttcgataagccaagggctcaatcgtccaccatggaaccgaaggggagtacgtttggaggacggatggaccaataagccaagagcttgattcgaccatcgtgaaccaagggaatcgtacaatccccaatctctatcgttgtacttagaccagtggggttggttggttgtatggctaagtaacgatagggattggttcatcaattcacgaccgatgacgagtcattgaacgaatagagtaaggcgacaaacgggctaaggaatcaaatccgcatattggccaaggtatgtaacgatctagcttattagttaagatagacgtttggtaattgaccgtgaaagtaggataaaggaatatgcgattgtttggcttagaatggttagcgaacatatgcatgtcttgaccgagtaaaagatcgatctaagtctaaggaacaaagacgatgaaaccggtacaagagttggttagaattaaaccaaggttagaaagacttccgctgtgtaataagaaagtgattatagaatttagcctcgtaaaggcaattctatgttgaatcgcgaaaaattaagaggttcggccgggaagaggcgcgaacttgagtacaacgtcgccggacgccgagacgtccgggacggggtctcacagaaatcttatatctctacgtctcggtgtcaagttcggcggtgagcggagtactggtaagagatgatcgtggtgacgaaaaacctatcttctataccagtaaagccctgaatgacgccgagaccagatatccgaccttagaaaagctggcattggcggtgataacggcagctcggaaactccgaccttatttccaatcacattccatagtagtgttcactgatcagccactacgcacagtgctccacagcccaaaccagtctggacgaattgcgaaatgggcaatcgaactgagtgaatacgacgtggaatatcgctctcgcccgagcctcaaatctcaggtcctagcggacttcatgaccgaactatctccagatgtgatggacgttatcccggacgaa

SEQ ID NO: 23015 - DNA, 3776 bp, Arabidopsis thaliana
taaacatgctaattataagctcctcggggaagttgtgaggagcagatacagttctacgcagggtgggccgcgagctgtcgatttaccacagctgctcctaaatgatctgaatgtgtggatttcatatttttgtttattatctttgtttctccatcatctagatgtcgttggagtgttggatgatgttggcgcattgactacagactattacggtctcaaactgagtttcaagataaaagatagatagtaagtgttcttttcatttgttttatttacaatgtcactctaaacgctaactgtccttatttctaacgtagcaatgaagtcttggagtgcgaacgccgcaatcaacaggcggagtacttggatggttactttcagagtttgggtaagggaaattttgttgtcgcactcagcttttggtttctaactgaactgtctaacccgaagctagagagccatagtgctatttcaaaggtggttgccaatccggacagaccagaagttgcggatatctcgatggtggttttttagctagagggaattaaccattattctccgttttaatataatataagactacatttcaattaagttttctttcccagttgttgttgttgtttccataagaaccaaactacatttcagtcgttgttgtttcctgtttccgtttaaatgttaatctaatttgttgttttatgtacgtgccttgttttattgttcaaatcctctcgcaatgtacgtatagtttctggtgtacgctatcgtgtacgtatattaattttggtgccttcaacatcaaaaactattagatttatacttatgttgtgtacgcaatttcccaatgtacgataaaccaagtttaatgtactatatagtgtacgtacacgaagacatctagtaatacttaatgttgtaattcattgaacagccagaaacataaaaaggacaggcagtttatataaagggaaattcataagataaataaactggaacgattcaaaaaacataattttttcaacgaagcatacacatgtgttgcaaaatatgtgtgcatccgtcataccaaaagacttgagagtagagccgagtagagtagcttaaaccttagcagctttgcttctagtagaatatagcaatctccctggcgtaccagtagaaaaaacaaaccctgcagccatgatggaacgtgcattgccctacgcaactcggcgggtggacaaacctccaagacctttcccagcggcgagcattttcagtgtgaagctggctgatgtgatacatcaccatctctgcaaccgcgtggccagcttcaagggtgggtgtcatttcccagaacttttcgctgatcgggaggaaatccaagtgattaccggtacacgtaaggaacaaaccggttgcgaagcaagcaaagggatcagataaagcgaccgttgtcatgactgaaaggccctgagctactttacgaagttgctcgcttggcgaacaccttcaaggtaaaccgccgggatggatccacgttctacaagcagctcgaagtatggccggaagggagacccaggttggagtaacgacggccacgtcatgaattcatcgattgcaagggtgttgatgtcacaactgtagactaagttccttagcgtctctatgggagtctggctgacggggaggtagttgacaagtatgcttatggggtttggcaattggattcctaggtacaactcggttggagggttagcggaggtaggaaaggcattgtttttcaaacgaggaggtttagacggattagtgtattcaactaagtgtgtttgtcatgagttttaaagagaagaataaccatcaatgtaagtgggtgggtgacgtggatgtatatttagtgcatcatattagtaacttttaatttaaacaaattactgtgtacctctcataatcgcgccgtgtacgtctacaaaatactcattacattttctggcagaaggttgagttgacgtctgtttgtatggcatataaggggaacaatatggcttcatgtatagtgctatattaggggtcaacgcatttacttacaatctttttaaataaacattaacttacttattttatctgccaaatcaattgagtacgttgctcggaaaccgtgtacgtctaatagagatattaatgagagtgtgatagaggtcacttctagagtgtatttgacagcaagtaattaatatggagcaaaatcttctagatatgggttatacgacgtcaaatcaaatttcttttcgtcttcatttactaactatatcgtcgctcactatgtaatctttatagttggaattaaactatgccacgtgtacattagcatatatcgtgtacgtagatattttattattttattattattttgtgttaatgatgtctcatattagagtagtttgagttagtatgtttgaatcaattacaaagtggtaattattaaaaacaaacttccattactgataatcaacgtaaaaagctcacatattattgcatggaaaacttataaatatgacaggatcgtggcgaatgtgagctctacagaatctggctaatccgtttagcacaccaccagatgtaacattggttgcaaagattattgaagagtctcgatctcatgtaacacatctccgcgcattcaagagtgcgaacgtcaccacattccgggaacgaaaaactgttagcgtatgtgtattttaaagtattaccatatttctttatatcttctagcacctcctcacaaatgtcacgtgcctcctccgattccaaagcataatggttgcttccgaagagccgaaggtagacaccacccatgtgagcattaccagcacatatgtaaagaattgcgcatgcaagggttgtagcggcgttccttggggcaattcgctctaagtgtaggatagctccctgaatgtcagactcatgtgtaaggagacgcagtccttcatggtaaatagtcgtggggttaccagcttctaagcaccgtttgaagaagggtctatagcgaccttcggagttgatgtcatttggatcgtggcctgccgcgtagaagtcatcgacatcgtcgcacatgctgaaaatgtttgcatctttgaggacattcggacggtagacaatgtctctttcacgaggaccggatttcaacataggtctgaggtaccaccaacatttgtcagctattttcttggctatcttcgcaagcaaatcatcaggaatatttgggtttggcatatttaggagtaaggtgttcaacaaaatgaaattccaacacttaaataagcatcattgaagatatggttgggtaagttatggttgtatttattgcaaaggtataatttgttattgttgttatgagcaacctcttttaataacagcttaaaactagacgtgtacgtcttagtgtacgttttactgtacgtccacatttatatttctacatttccccaacaaacagtgtacgctgtagtgtactatcagtgtacgtccattcataaatatcaccatttatgagacaaaccaaagaccttatatgtttgatatctcatgctagcgtacgtccatatctagttttccgagataaaccaaaaacctttaagtattatttggtagatgcacgtgtacgtagttgtggacgcttagattttaatatccacaatttacatttactacgggaactaaatatcatatgcgaatttggctgaaaaataatccgaagaaacataacacaccttgcaaatttcttaagcaataatata

SEQ ID NO: 23016 - DNA, 673 bp, Arabidopsis thaliana
ccgatatgagcaagcatatgatatctgcagggggggggaaagccacgttgtgtctcaaaatctctgatgttacattgcacaagataaaaatatatcatcatgaacaataaaactgtctgcttacataaacagtaatacaaggggtgttatgagccatattcaacgggaaacgtcttgctcgaggccgcgattaaattccaacatggatgctgatttatatgggtataaatgggctcgcgataatgtcgggcaatcaggtgcgacaatctatcgattgtatgggaagcccgatgcgccagagttgtttctgaaacatggcaaaggtagcgttgccaatgatgttacagatgagatggtcagactaaactggctgacggaatttatgcctcttccgaccatcaagcattttatccgtactcctgatgatgcatggttactcaccactgcgatccccgggaaaacagcattccaggtattagaagaatatcctgattcaggtgaaaatattgttgatgcgctggcagtgttcctgcgccggttgcattcgattcctgtttgtaattgtccttttaacagcgatcgcgtatttcgtctcgctcaggcgcaatcacgaatgaataccggtttggttgatgcgagtgattttgatgacgagcgtaatggctggcctgtt

SEQ ID NO: 23017 - DNA, 3505 bp, Arabidopsis thaliana
cgaataatcaaactcattaagaaaccttctcctcgaaactgatcaagctttagtataatgctaaaggtaagtcccaagctatgcatacagagataagtttccatctacccagagtacatcaaatgaagctctaatggtaatcccttctccaatcccaatataagaacttaactctaccctttgcattcaagaatcttttaagccctttttctaatcattcttttcttttctcttaactctaggagaagctttctcaacactttgatacatctagcggatttggatttctttaacaactaaggttcctgttttaacattctaaaaccaaaggcttttgcccatcttcaatagctaacaagaactctttcttttctttacaaatcccaaaacctttactagactttttctgcttctttagcttacttcacctagagtcttttacattttcttatcaatgaatcaaccctttatttttttcttttaaacacatcccaacccaaagtataagcgcccacctagtcctatctagtccgaaatatgtgaactagaactacatgagacactatctctctcgttacgaacgtaacactttctaccaagcttaatcggaataagacctcacaaacactcacaagtgatatagggcttgaaagaaattctaggtttgggtttgggttaactgctctaataaggagagtcagctacttggattaacaagagtgatcaaaatgaataagaaaatccaagtattttagggtatccatgagtttaaatttgatgcagacatgataattaaagatcagattcaggttcaaattgatagggaatggtatcagatcatgacagtgtggtcgagtagagcaatctagacatggtacagttttacttcaatttcattgactatgcaacagacaactagcaacgagggcactaagtttatctggtgaagcaaaatgcttacaaggctatctcatcattatcccctatgcatatgcaacaatcttaaatgaaacactctagattcgatcctaaatgtaatgcaactacatgaacactatttttttgtgaaatcattttctgaaatttttcaattttttttggtttttctatgccttagatgaatgcagactcaagagtatatacaatgcaacacacacttcctgagccctcccacaaacttaaatcacacagtccattgtgtgaataaacttggaagagagtactcaggacaaatccaatcacagaaacaaaataaagaacaaattacaagatatgatataatacaatggtgaagtgaggcgcttacctcagtcgaagaatgagcgaagttggtcgtcaatggctgcatgtgattgctcccaggctatagacgaaccgccatgttccgtatcagctccagaggtgggtactcgacctcatcagctttgtggcgaccagcaccgctttgaggatactcgacctctcttcttttgctgcggccagcaccgcggtcgcgtaaactatgagactgcataaggcgtctacttctgctgctagatcgagtgagtgtggtcctcctcttcctcccagattcacgaggcttgaataatgaatacctcacagggacatgcggaatctcctgctctctaggctcaggctcgtgccgacttggcttaggcgcgtcatatctcctcgagggcatgtcctgagggagttggcgagtaacttatcatgtttcttgcaccacttctgcagcttgctgttgttcctgtgagcttcgctcaaactcttgctatccctcgctcgaggtatatgctcactgaaatgatacatgcttgtgtcaaactccgcctcatctatatcatctgtctcatcaacatcttctgttgtagctccttcggtgtgactaatctcctcagttggcggactgccctcgaaataaagattttcaagcgaaggcttgaaatcaatgttccttccctcgagaatcctagtagcgttaatgcaggggagaagaatgttggcgattctaatcaatgaatgctcgaacctatagcggtgaaagttgccaaccatgtcaaactcacatcggcgcaagtgatccaagtccatcattctcggtgctaacctggctccttgagcggtactccacaagcttccagaattggcgtcacaacgccacctacgcatagtgctcctctcaccttcttcttccggtttgtcaacgcccacttcctatatccacacagatgcatcaacagaggcattactggtggtgcgttgttgagatcacctctcaagacattcttcccctttgtccggcggagaatccctgtaagcgcataatctatcatctccatgtccgtgttagacacggtgcctgtagactccctggagtaaaaaacgttggcgaccgatcgctggaagtagcggatcacaggacttcggatttggttgctcttggaccgcgccgagtttagcggtagattgttccctatagtggcccataaatccttaagctcctttctgtcaaatctgggtttggttccctttccactagggaaaccaaacagttcttctaacttcttgatcgaaagctgataccgctgttcattcactgagaacgtcaagaagcctaatcccatggtatccagctcaaagtctgtgagtgcttcatacatctccacttgcagcgtggagagaaactcgattgtctcctccttataggaatggtaagggtaagacatgagtgtctccagatgacacttctcgaacaaatgctgtacgtcctccagtaaccccagctgggctaaagtctcatagcacggatacctcgttccctagaagtcattagcctcaaagaacctgatatactcctccactgtaacctcgtcgggtttgttcagcagcttcgtctccctgcgccatgactcttgctcatactcagtctcgatttcctcatcaatcagctcatatcttcttgacatcgctctctttcctctggcgatttcagctcttctctgattacgtcgggctgcagagcgttcgaattcatccctgaagctctggaaaacatgttgctctctcggtctagcggaccaggattcagcttcatccacattgtagtcagggtccatagaggattctccactgtagttactcatgatgaaacctgaaaacaaatgtaactcaaaaataaacgttaatacgttagttccaacaaaaccaaaaacacaaaccaaaagagtaaaccggtcgagtgtaccaattttttttttttttttttttcggttttgtgaacttgcggttgagtgttttcggaaggccgagtggaggtagacgagcggtgattcgagttgttgaatcggtggtggagaaacggaggtgctcttggcgtgaagttgagtggagttatgagctagagaaagctgtgttgaggtcgagtgtattccttggagaggagaaatgactgtttgttgagcaaatgagagacgaagatagatggtgaggtcgagtgattaggcaa

SEQ ID NO: 23018 - DNA, 2760 bp, Arabidopsis thaliana
tatatatatatatatatatataaatgtgatatttttcaaaattaacttgcaaatatattgatcaaatattaaattctttgttgatattctagtttgtatgtatttaaacgtacttgctctttattgtagtgtaaatttcaatattttagaaaataatacaatttttcagttgaaagtatttttttttatttttgtttaaatcagtggtgaaaaataggataattgtttatattaaattaattaataagaataagaaaagataaatctaaccaaaaataatcttaatccgaatcttcggtaaatctggaaaaaaggaaataaacaaaacaaaatcataaagggattagggttcacaaagcattatataaacaaaagaaaatttcacgttataacacccttgtgactttttctttcacaaataggcaaagtgggctgggtcaaccacgttttagccattaggcccaaaatggccgaatttgccctccaacgagaaactgacggaggcggtttcgtttcgtggaaccggttcagtttccttaaccgttttctggtttcaaaataatttaaatatttaaaattattaattttaaaactgaaaataaatcaaaaactgtcttcttcgagaaagcagaacagttccgtcgaaacgaagagtggtttcgaagaaccagagaaattccgacaaaactgaatcacaattccgattgaggctctgttcgagttctagtcgttgctaaagtggagaaaatttcgatagggttcgtgttaaagtgtggaacaataatacgctttttgggtttatcgattaactgttcatagaagagctctaatggcggcgacgaggaagagtagtcggcggcgaggagtttcggatattgatgaggcatcggcggcgacgacaaatctgggttagttttccctaacttcgtttggagaatgattgattcaaaatctaggttaattttagagatttcaactcataaattttcaattgacaaagggattttgtttttttccgccaaaaacagttgattgagtataaaaggtttcggtgtacgtgtatatgaaaatcgagtttatgtttagttggtatttggatatagtgtacgtgttaagaacttcttcgtcttgctcaactttcaggaagtacttctaatgatccgggtgaattaccacagaggttgtttgcactcgatcactaccctagcaaggcgaagataaatgcgtactccagagcggagtacattggtcaaatagcagctgcgcttaaggacacaccagaaatgacgttccttctagattctccatttggtgacctctttaggatccctactaacaaggcatccttttctggtaaacttgttcttggattaatatgccgtcagttagttacaaataaacgttatgagatgtggatggtattcgctggtcatcctattaggctcggattaagagaatgggcacttataactggtttggaatgtggaacctatcctaaagataaggatgtagaaagtgttatgcagcgtgaggaaggtgaaaatacagtgtgggctactctgtttggagatgataaagctaagccaacagttgaagaattaagggatagattgatttctgaaactgacatgcctgcatggaagaaattagctctcgccctaattatcattgtggatggtgtgctaatatgtgacaagtctcctcctttgagaccaaatgagatgacagttgagctgacgaagaaccttgatttcttctgtaaatatccctggggaaggacatcatttctgcttactttggagcgtatcgcaagtttcaaaggagacaccgacgttaaaaaactccggagtggttgcaagcaacattcttatgcactccatggcttcccacttggactccaactccttgcattcgcaactataccgtctattgctagtctcctaccttctgaaggagataccgccgtgtttacagagaggactattaaaaacctttccaaattgcgtccaatcaagacatccaccatattggcgtgcgagtctgctgaacaggtttgtgcagttgttgttgtacgtacattggtataaaaaatgaagtacatacactctgaaattaacaatgatcgtctatgtaggtggatatcacatatattgtggacccagcagatagtaattgcccaaaatcttttgtatggaggaaagaaaaagaggacccaagagttgataacattttaaggatgttgaaatctgagcaggagtggaatgaaaaaatgtgggttggaggcgatgatgcgcctaagaagcaagtccggccctcagcaactggagagagaggtaaccatatcttttcatcgtataacttatattagaattaggttcctctaagagtagtaatgcatgatttaaccgtttaatatagttattttgaagaggcaaagacgggtgtcagatcctgttgaaaacaaaaaaaaggaaaattagtcactctgatgatggtgaaggtggacccagtggtggtgatggtgaaggtggaccaagtggtggtgatggtgaaggtggaccaagtggtggtgatggtgaaggtggaccaagtggtggtgatggtgaaggtggacccaatggtgctgatggtgaaggtggacccaatggtgctgatggtgaagttggagacgaagcgttcgataagtatgcgggcgaattgaggagtttcttcaagaggcaaacacaacttttggataaaaagtttgaagatttaaaagta

SEQ ID NO: 23019 - DNA, 2845 bp, Arabidopsis thaliana
catagcttgacagatttggaggctcttcaccactcaccaagtagttgacgtgatcagcataccaagaaagcttatctcctattgcacatgccagattgagtgattttagaatttgagcgctctcgttcagctgcttaattgccattagctgttcttctagcatagagtcgtcaatagggacctcgtcttcgattctcattctagatagattgttagctaccctcgtggagcaataagatccatctcaacagcctaggcttggtatccttcttcgcataaatatgccttagagcggcatgatcagtgtagattgtcaccttagaacctaccaggtagctcctaaatttctcgaatgcgaataccacagccacaatttccttctcagtagtggcataccttacttgtgcatcaaccatcgttctggtcgtgtagtagatcacatgaagttttttatgaatccactgacccaaaactgctcctactgcaaaatctgaagcatcacacatgatctcaaacgggtagtcccagtttggagcttggattattggagaagtgaccaaagcttcgtagatcaacttaaaggctgtcaaacattcttcatcaaatgtaaacttggtttccttgtagaacactctcgtgagggtctgggcaacttggaaaaatctttgatgaatcttctgtaaaaccctgcatgcccaagaaaattcccgttgtccttgacagtctttggcgactgtaactacatcatcacatcaaccttagccttatcaacctctatcccctcctccaaaatcttgtatcccaaaacgatgccttctataaccatgaaatggcatttctccgagttcagcaccaggtttgtctcctcacatcttttgagtaccctgcacatgttcaacaaataggaggagacggaagagccatacatggaaaaaatcatccatgaacacctctactgatattgataataggttcttaagatcaattaatcctaaagcactatcatgtcgttgtagtactgaaggttgtcaatccaaatgggtgtgatgctaacaatcaagacgtgatcagaagtcactaagtcaagccaagcaataacaagttttggtgtgttctagcagtcctaagtgaacatgcagaaaacagaaacagtaaaacactcgaccaacacaactcgttgtagagcactggatgtggtcgagtgacttggtcgagtaacaggcagtaaacaaaacagagacactcgactgcacagtctgttgccagacaactgggtggtcgagtatcaggtcgagtaacaggagagaaatacaaaaactaaacaacatgtaacaagatggagtaaacaacagtagagaaaacaataaaatcaattagataaagaattccggaggatgggttaactgagtagtttcgtttcctcagtttacaggtgattgacatgctcaataaactatccctagacaacaagttcattaaccaaatctaagtgccaccgcaacagagaccctcaagttaacctagtcccagactcaatcaccattgacgagagctaacctaacaggcattacgaatcaacaagttaaagccaaaacgctccctgcaaccaataccttggtacagggccacgaatctctggaattagtagttcagacatttcatcgaacaccttttgggcgcggaaatgtctgggctcaaattccagttgatcagaaagcaataggcattaagaacaactaattcagaagggatctatcaatcaatactcaaccacctagcatactgagaattctacactactctaacccatcctcagaaacctattcactactcggacatcattagcagagaacataaacgtttaacaggatgaaaacatgataacaacagtgtaatagcaaaatgataagaggatgaacaacattaactgaaatcaagaacaaatactgaatactgaatactgaatatatatagagaaattcggattacaaaaggtctagaacacagtgtctccggaataaaactagataaaaacttgttctcgaaaatgtatagtacatgctagttatagcaaaatattctgaaaccctaatactcaaaacgacgcagtattggaacagattaagaactgtactcgacccatgtggtcgagtgagaggtcgagtgatatgctggagtcttcttttcttccttatgctcgactgtctggatgagtgcggaatgaagaagactctgaagctcgccatcgagtatgtagtcgaggggtggtggtgaagacactcgaccagggggtcgagtgaactgatcgagtgactggtcaggtggtggaggtgaatacactcgaccagggggtcgagtgaagtgatcgagtgactggtcaggtggtggagttgaatacactcgaccagggggtcgagtgaagtgatcgagtatctctcgtggtggtactcggccagggggttgagtgatgagatgaaattgtgaagtcccctactcgaccagggggtcgagtggtctgttgaggtcttgaagcttctactcgacgtcggggtcgagtggtttgacatgatcaggtccgcttcttccagttagctcgtcaactgctccaaatcacctgaaatcaacacaaatatgcaacatgaatgcaaacctatactaaacatgcaaagtgatgacaaatgatgagaaatagtataaaacagtgatgatatggtgctaaagtgatgacaaatggatgctcaaaacatgcaaaatacacacttatcaatgtagctttaaagggtgtgattaggagacaaggcgaggttgaagagagccaagtcaagaacgttgaagataaacacac

SEQ ID NO: 23020 - DNA, 3361 bp, Arabidopsis thaliana
tgaatcgcccctttgtagtcatcgcctttaagtacaccaaatctcctacttggaatgccaattcctttcgacgcttgttggcgtagcttttctgtcgatctgtggcttccattaacttgatttttaagaacttcattctctccgtggtttcttccacgattgtaggtccgaacaaccagatgttcgcccattggcgtccaacacaacggtgttctacaagctctgccaaacaacgcctcatagggagacatacctatactagcttaaaaactgttattgtatgcaaactctactaaccttagatatttctcccagtttcctccccaattcaagacgcatgccctcatgtcctcgagggtttgaatcgttcgttcggactgtccgtccgactgtgggtgataggcagtacttaggttcactcgagttcctaaggccttttgaaaagccttccaaaactttgacgtgaatcttgtgtctcggtccgacactatactaaccggaatcccatgtaaccgcacgatcttgtctatatacttctcggcaatgatttctgctccatccttatccgagatcgccatgaagtgcgcagacttagtcaatcggtctaccacaacccataccgcattgtgtttgcacttgatccccgttggcagtccggtgacgaagtccatcgttatgtggtcccacttccattccggtataggtaggttttgtaacaacccacttggtacttgatctccgctttgaccagttgacaagtcgggcacttggccacccatctggccacgtctttcttcattgctacccaatggtagtaccttttaaggtcgcagtacatcttgtttgacccaggatggattgagaacctcgattgatgggcctctcttaggatctcctcctttaatgccctatcgttcggcacacatactcgaccgttcaccatgattgtaccattgttcgaggtttggtactcggtcttattgtttagtgcccatccttttatctcctcgtcccgttcctgagccagccggatcctactaagcaggtcggcctgatcggcggctcccaaccctaagggttcaacttctttagacaaggcattcacatgcaatgtcccgatcatgttaaccaagtccacttggctccgttccgcctcaacttccgagcgcctcctactcagggcgtcggcgacttggttggccttgcacggatggtacgctatatccaagtcgtaatccgccacaagctccatccaccttctttgccttagattcaactccggctgggtgaatatgtactttaggcttttgtggtcagtatagatttgaactttagcaccatacaagtatgatcgccaaattttcaaggcaaatactaccgcggccatttccaaatcatgcgtagggtaattcttctcatgtttccgcaattgccttgatgcgtatgcgataacactccccttttgcatcagtacgcatgaaaggccccgatccggactgcctaaagtccgggcgagttctctcgacccaagccactaagtgactcggccctaaccgtttatgaggttctttcctagtctaatccgtttcatatgattccgagattcaatatatgagacgaatagagtaaacaaacaatcggatactttattaattaagcaaaggattcgatacaacctatgaatttgcatataagctattacaagtcatataatcgatccctagactatccgaactatcaccacccatcatcccggccttgagtctctcgcgcctaagccaagtccttcccacgatcaccattcgttcctgaaagtcatagagccataagtaatcttatttacttaatcatatgcaagtccatgcaatgctctatatgccatacactactcggatccgtggagagaattcagagaggggaagatcgcgcatcagtctggccgattctcggcaggtcagttaagacccgccggtcctccgccgagccgcgtccccgcctcagccgatccctacccggaccgagtcttgtgtaggatgcacatgacccggatactactcagccctctagtcggtcctttcaaggatccgactactaactcacatcctagaacccttagactcaaagtctaggatcccttaccttccttctcgaggttaggtcgatccgaccctccttctttattgccggccacagcccggctaccgaatcctaagactatttattctcccaagagggagagagttttaatggtgagttttcttgtgttttcggtgtgttgtggtgagtggaatggtcctgggcgcccttccttatatagggggcgaatggatgcttcccgaatcaacacatccgttccttgcacctttccgaagagttgcacctttccgaagagttgcgcccttccgaagagttgcacctttccgaagagttgtatctcttcgcccataaccgcccagttcgtccgtcactcgtccagctacctcgagctcgtccgtcacttgtccagctacctcgagctcatccgtcactcgtccagctgcccgagctggactgtcactcgacctgagtaactgtcactccttccagctgagcttgagctttgggcgagctgacccaagtgatttccttacgatcctagcttagcctgcatgatttcccctttgtccgagcttatagccagctctttctcacttgtccgagactccaccttcttctcccggaccaagtcctagccaacgatcctattgaggatcgcgggcgttacagttttgcccaagaacaatgaagaaaactagggtttttagtattaaatttcggatccttagaatagaggacaaacccctctatttatacactattaagacggttaaaagagttgttaaacttttatttcttcgaggattgaatcttctaatttcctttatctccaaagacttcctattttcaaaggagaaaacttctttttcttcgaattaggaagtcggctagacggtctccctacttcgggctaaagtcggcaaatgacctccttattttggcccattaacaggctaaaccgggataccccggtttgattgaaatctcagtctaattcgtagttcctctggtttaagccggtattgtcggaggtgctaattccggcaccaacaattagtccccccccccagttcgggaaaatccaaatgctaaactcgagtttttccgaattaaaagaagtgaatattcggcttatactttaggaagatgcgaattaaaaattgatccgttgaacctccaagatacgtcagtttagcttggcacgcgtcgacgatataaaacaaggctaagcttgtgggttagatagacgacctttccgtactgg

SEQ ID NO: 23021 - DNA, 4248 bp, Arabidopsis thaliana
gactcatccccgatgaaccatatcgctgcgggcttccaccagagtttcctctaaaggatatagcactcagtgcccgcaccacggattcaagaaggcttccctactcagtactctataccgaggtgccttaccaaagatccggatgctcttggacacaacttccaatggtaactttctcaacaaagatgtagctgaaggttgggaacttgttgaaaacctagcacaatctgatgggaattacaatgagaactacgatcgcactaacagaggcagtagcgattctgaggataggcacaaaaggagaacaaagctcttaatgataagattgacaaattggtgcttgctcaacagagaaatgtccacaacattacagaagaagagcttacacaactccaagaaggggagaatcttactattgaggaggtgagctacctacaaaatcaaggtggctacaacaagggatacaacaactacaaaccccctcaccctaatctctcttacagaagcaacaatgtggcaaacccacaagatcaagtctaccccccacagaaccaaccgcctcaagctaagccctttataccctataaccaaggctacaaccaaaagcagaactttggacctccaggcttcacccagcagccacagcaaacttcagcacaggactcagagatgaagactctacttcatcagcttttgcaaggacaggcctcatgctccatgaccatggataagaagctagctgagctcaccactaggatcgattgctcttataacgacctgaatataaagatagatgcacttaacactagagtcaagaccatggagggacacattgcttctacttcagctcctaaacaccccggacaacttcctggaaaatctgttcaaaatccaaaggagtatgcccatgctatcaccacagtgagtacttctgccaccgcggacagtgggattcaagaaggggaggttttaagaccaaaattaagacaggagattgaactcgacttctttgctcggcttgtcgaacgagcatatgacccgagcaacccaatccctattccacctgcctatgaacctaaaccatactttccagaaaggattgcacaagttaatgcaaggatcttccagaaacacaagatgatgttcataaagtgtatcaaagagttagaagagaagatacctttggttgatactcccaaggaagtaatcatggaaagaccccaagaagctcagcaaatagttgaattgagttttgagtgcagtgctatcattcaaaggaaggtgataccaaagaagctaggtgatccaggttcctttactctaccttgttcactaggacccttagtgttcaacaatagtctttgtgatttgggagcttcggttagtttgatgcctttatctgttgcaaagagattgggatttaataagttcaagcctagcagcattcatcttattctagctgatagatcaatgagagtgcctcatgggatgctagaagacttaccggtaaagatcggatcgattgagattccaaccgactttgtggttctagagatggatgaggaaccgaaagaccctctcattcttgggagaccatttttagcaactgcgggcgctcttatcgatgtgcaaatgggtaagatcgacttgaaccttggtaagaatctccatatgagctttgacattgctaagaagatgaagaagcccactatagaagggcagcttttcttcattgaagaaggaaatttagatgctgagttgttgagtgggttagaaaatcctattccgtactccattccgactcaccacctaggagagcccgaggagcttcttatgatagaaggaggacctagcttagaggttgagactaaggggaaccattttgatgttggtcctattgctagagagcttatggagctcaggaaacagtatggagctcaaggagagaccatggaaaagttggacctcaagatagaggagctgaactacgctatcctggagcttaaggagatgattaaaggttacccaggtcctgagattgatgaatactttgaggaaccccgatcttggaaaagaggactatagtactgatgagaaggaggcttactttgaggaaagatcaaatgagtactccacactccagctatcaagagaaaatgcggagtatgattcagactttgaggattcagcaagtgaggatgaggacttctcagttcctctcctcaatctcttctctacctaaacattgtgagagtcaagcttaatgactttaaacaagctcacttgggaggaagtcccatgtctatccttgtatatattgctttcttgttatttttgatgtttttgtttaagtgtttcagggaaaaagacttctggagaatttcaggtcacactcgaccgtactactcggctgtaggccgagtgtgggcttcaatcgaccaaaggcccaagattgaatagtactcggaccacaccactcggcccaaggtcgagtatgggcctcactgttcaaaggcccaacaagatgcagcactcggcccgaagccgagtcagaaaaaggaagcccatcaggcccaacactgtactcgacacgcgcgtcgagtatgtcggccgagttcacacgtgcgaggttaacacaattcaaattcaaatttgaattcgaatttgctcggccccaccaatcaaatcctgctccccaaagcccttcaaagattcttctgcaaatagtgagacatgtccccttgaccaaatgaagggtgcagatctaaggtgtttggagggctaggatcaaatcttcttgtctataaaaccacactcaacaagctaagtcactcacactctctctttgctcaaaaatttcgaattttactccttctctccaaacatttcaagttcttactcccacttctctagatttctcagaaattttaccaaaatctcttgttacaaaccttttcaaaacctctcttgcaacctttgttcattcttaaacatcaatttctcttctactttgacctacctttggttattttgtggtgactacctgcagtaaatcatcccaagatcatgaatcccgaggaatcaagaaggagagcctctgctcgagccgtggcaagagggtatgagatgattaatgagaagaatcagtcaaagaatcaggaagctgcgagtcctggttttactcggatgacaggccgagtacaatggccgagtatggccccggagtcctctatgggtctttctgcggctgctcaagagaaaatagcaagaggcaagagggtcttggagtccgagccagttgcagaagaagaagtgcctgagatagagaaggaagcatctgaggaagatgcgcaagttgatgaagaggtcccgatagttcctacaaggagaagaaggaacaccatgaggagaaagaaagaacctaccattgaagagcactaccaatatctcatggagctgagttttgaggggacaagatatctccatagatctaccatgcaagctttggggatatgtagggatgttgacaacctcatggagatggccaagctggagacctttttctcctacaagtgtgaagggtacaaaactgagagctgccaattcctagccactttgaagcttcatttctatgctgaagaaagggagagagagctgcataagggagttggctatatcacattcatggtgtttggaattcaatactcggttcccattaggcagttggatgttgttttcaagttccccaccaagtatggaatccgccaaaactttagcaaggacgagctccttgatctatggttgacaatcgccggtccactcccctacaagtcatctagggccaagagttcgttgataaggagcccggtgcttaggtatctccacctttgcattgcaagtgctttcttcccgaagaagacaaccggccatgttaatgagggagagctgaagttgcttgatctcaccttatgcttcattttggggcgcacaaggaatgggatagagatggaaggggatagggctgatacatccctttcggtggtgttgattgatcacttgattggttttagggagtatgcagccggaatccaccaatccgactatggaggaagcttatgtgctggaggagtgatcacgcccatcctaatagccgttggagtcctcttcatacccaactcacacagcaacctacatcgatatggagtatttgaagaggaagtgctacttggataggtctgctcaagcgga

SEQ ID NO: 23022 - DNA, 410 bp, Arabidopsis thaliana columbia
ccccggattagtcgagatgtcttcttacaagtctgcctttatggaaagaaaggcggttcttgaggatcagctccttaggatcgctaaaggaccctcgatttgtgtagctgaattgaagcatgcattgattgggttaatcagacttggaaaaggaccttcagctcaccaattgcttctatagttttacgccacaagcctccgcagaagaatcgaggcctttctcccttcatgtttgacttgcccaaacacgtttcctgctactctctctaagcttgttttctctaacatctcagtggctacaaaagaatccgcagccatgtttggtgacgatgataatcccgcatattccaacaaagttgttcaatgggcagagagggaagttgaatatttggtgcggttggttaaagaaa

SEQ ID NO: 23023 - DNA, 611 bp, Arabidopsis thaliana
cttctggactgtcagccacaaattctttgtttttggatcctatatttgtatcaatcccaaaaaaaataaaaaaaaatgtaagtttcttatttttggtaaattttacttcaagtttgggaagtaatactaaccgaattgaaactaaagaactggttttaatatataaaatattggagaaaaagtaaggtttaatcaactttttcttgaattttctcactaatttaagagtagatgaaattatccatattgaacaatgaccatccatatatagttttcttaaaaaccagctcacgatgaatcaatatcaaaccgaggatttaatttaactcaaaaacgtagttgtatatacctgactgattgcaaagaaagctttatattggttgcctcccaccacagaggtgttcgaaaaaccggtaccaagagcgactctatggtcagtttgaacgaagcctttacattgtatattgtaacatccgttttcgattttatccggctgcaaaacgatttgcggttaaagaagagaaactcatatagatacgtccaggaagacacaaaaataaaaataaaccaactttattgtaatagagatagcaagacatagtgatattgta

SEQ ID NO: 23024 - DNA, 433 bp, Arabidopsis thaliana columbia
ctgaatcaaggtttttgtgggctaaacgtaaaagatcttcgacatctttgatggatacaccattgtcatggaaaagcttaacaaagtcacagtcaattcaaacaccacatataagaactaagttaagtatgagcatatccatacttaactacagaataatattgtccaacatgaactttgatcacttcaaaaccttaacaagtcaatagtcaatgtatagatttcttagctacagaatcagtagctaagtatggatatgctcatatactaggttgttgtatcagaattgtaaaatttcttggcctggtttatcaagtggtatgtgtttaacaagataataaaagaagtagaatgttatattcaagattcatggggcacattgtgaccagtagaggactcgataaactcaacaatctttgagggctttgggtgt

SEQ ID NO: 23025 - DNA, 616 bp, Arabidopsis thaliana columbia
ggagagtttaatctcggcgagaacatctactggggatacggcgccaactggtctccggccgacgcggtggttgcatgggccagcgagaagaggttttatcattacggctccaacacgtgcgacgctggtcagatgtgtggtcattacacacagattgtgtggaagagcactaggagggtcggatgtgcacgtgttgtgtgccgcaaatgttgggatctccatgacttgtaactatgatcctcccggtaactacatcggccagaaaccctattaatttatcatcatttatctattaaaaattctccaaaataaagtcatcttactaattttttagaaattatgatgactttttaaaggagattaggtgggtgtatttgtgtattttactagaaaatagatctatttgtgggggttgtgatactaattatgtatcttgattattttaattgatggttgtaattgcatcaacggttatttatatatccgtaagaatgcccagtgtacaagaatatataaaatataaaaagatgatatgatttttgtaaagaaatgccaagtacaaacggaaaattatattgtttgtgcatattcatatctaagtagtatttagttatat

SEQ ID NO: 23026 - DNA, 578 bp, Arabidopsis thaliana columbia
caaccttttgtctcatcttcttaggaccacaaacaagaactcccacactcgaaccttccacatcaagtagaagttctgctcatataaaccaacaaaaaacataattagaataacaattccttatatataagatagagatagagaaattaaaagaaggtcatgtatatattactcttgagattaggtctttctccaaaatgcagattggtgcgttgcagagcgattcttgtggcgtactttcgatttctctcaaggaattgtaaccccatgatgaggtaggagaagatgttggagatggacggtcgacgttttggacctgtttactttcaactttaccatacttcttcttgttccacaacatagccgcactacaagtcgccattatgctcacggagatgaccaagatatatatgatggtttttgaagtcaaagaatagatcttgttggtgttgtggtcgatcgggtaaatgtaatacctagtgatgataccaataattatcatgaagatcaagaacgaagatgcgagaattgcaccgagcaaagcgatgagtttggtccgaggattgatgagatggatt

SEQ ID NO: 23027 - DNA, 811 bp, Arabidopsis thaliana
ctcctccacatatgccactgtagatgtcatgcctcacgagttgacactgaggttccagatattgagagaaatgggatgttttctctgacggaattggacaatcacacctgacctcgctgacgaagtaatggagaaacttaagttggatgtgcactacagcccttgtgcttatcagatacgttacgcaggtttcaaaggggttgttgctcgttggccatcaaaaagtgatggaatcaggctagcccttcgagacagtatgaagaagttcttttccaaacatacgatcttggagatctgttcctggacgaggtttcaacctgggttcttaaatcggcagataattacccttctatccgtactaggtgttccggatgaaatattctgggatatgcaggaatccatgctctataaactgaaccgcatccttgatgatacagatgtggcatttgaagttctcacggcatcatgtgctgaacagggaaacactgcagctatcatgcttagtgcaggtttcaaaccaaaaaccgagccgcatctacgcgggatgttgtcttcagtcagaattgcacaactctggggtctcagagaaaaatctcgtatttttgttacttcaggaaggtggctaatgggttgcctagacgaagcagggatacttgaacatggccaatgctttattcaagtctctaaaccgtctatagaaaattgtttctccaaacatgggtctcgttttaaggagacaaagacagatctggaagtagttaaaggctatgtagccattgctaagaatccttgtcttcacccaggggatgta

SEQ ID NO: 23028 - DNA, 519 bp, Arabidopsis thaliana columbia
cctgtagttactatgtgttaacgtcacctcaaaagaggacattgttggaaaaaagttttatggaactggaataaatttgattttcatctcacagaaatgtatctttttgcttacactttgatggtgcatttactctgataaaaaagttcagcttttcccgtggttatgtaaccactctgttttaattctcaggtgtacaatttcctttgctatctatggctaaaaccctttttactcatgtacatgatatcttgagcaacacaccaagctttcagtcagagtatggtaccatactccgccatcttttggaaattaaggagtaccgttttcaaatgaggaagcgtacatattccagtgagttctcttcaattctatatccattaattgtcttgtcttgtcatgaatctgaagcgtatggtggtatgctggtgctgtgtattattttaatataatgtttctgcaaggtttggtgctgctatacatggaaagggctgagacagggttttgcgagaaaacagt

SEQ ID NO: 23029 - DNA, 499 bp, Arabidopsis thaliana columbia
ggttcactttttattttgggttttgtcgtttaggcatagtgaagaataaagaagaaacaaacaagagagaaagctccaaaattctcgggcagacaatatattcttaatatccataatttcatccaatgcgaatagtgatgatgatgatctgtcttttcttttgtacaaaacgcagagaaacaccttcacacggtcaatcaaattcagcaactaagcgcttcgtatttaaccggaatcggttggttaaacccggtccgcgcaatcaaactcccaaccaccgtcaaatctctacaaaacactcctttcaccacattcgtattgttattactgttcacagcaaccgcgaccgctctaatcggcgtttcgatgatattactccgatgagattcagtcgctactgcggcggcgatggcttttcgttgcttctccacggctgcgatgttacttgtgacgactgagtagcctttctggatcaatctgtatagtaatagagttgaca

SEQ ID NO: 23030 - DNA, 629 bp, Arabidopsis thaliana columbia
ggtgtaataatttagattagagcaatcaaatgtctaaatattataaaattgttgattatattattactaatagtttaattaaagtacctctgctacaaataattaaatgggatttgattataaacatgttccttctatgtttaaacgcaaatcggagcctaatacgtccaaactatatccacccgtctcttcgctgtccataaatccggagcctgacccgacgtttgacccggatccgaaactcccacaatctccataccacccaaattcatctcccctaaagctttctctcactttcccgggaaaatcggcgaccaaaattggaaaatgtactcagcgattcgctcgcttccactcgatggtggacacgttggtggtgactaccatggacctcttgacggaaccaatcttcccggtgacgcttgtttggttttaacgactgaccctaaacctcgtctccggtggacaactgagcttcatgagagattcgttgacgccgttactcagctcggtggtcctgacagtgagtactactttgtctacttatctctttgttcagtttcgttgctcggtccgttaacaaaattcgactttttttaggggttgatggatcttctctcaaagttaga

SEQ ID NO: 23031 - DNA, 548 bp, Arabidopsis thaliana columbia
caaactaggaacaaaagattttctttttaaaaacaaaactaaaatatgtccatggtacaaaagagattcatcttaatactaatattagcaatagataagacaatgacatctaattaacaaaagatgataattaagtaacgttaatatgcaagacttaggaatcaaatttaatctgatatgtgaccttaaccgcgggttccacgaggtttacgtgtgagagaggcaagttcaaccagactccctttttaccctgacaacaaaaaacaaacaaaaaggttttacagaatcaaccgctcgctcactcaagaagacagagatgcatgtgatctcgcagcaacacaaacctgtaagcgccactgctcgaatgaatctctaagcgctgcaacgaaattcttagtatccataggcgtttacatctccacgatgactccaccgtaatcatcatccacaaacggcagtacttcgaaaatcttgtgttctctccattacgcagaggagcctcttggtctgacatgcttcaaactctgaaaaaatttggaggaagattg

SEQ ID NO: 23032 - DNA, 745 bp, Arabidopsis thaliana
ttcataagtagctcaattttgtcaggatattgcatccacaaaagcattagaaaaataaagacaggaagatccaatagatgcttaattcacctgtgcagactgtgatagcaatcgacaccacgggttctcaaacctactgtgtacatatgtccatctttcaaaacttgccttctcttgcaaaatcgctgttgagtatacaatccaaaccagaaaacaaagacgaattgaaaaaacaatctcaaaaggaatttaaattgggtccaagagcataaagatcgaacaagaataagagcaacggaccttgcgcaacaggtggtggttgcgacgtcgtagcagccgccgcagaggcatcaatctgggagtctccagaggttggagtagtgtcgcctaacacgcatttactagaatccgaaggaggtagtgtatcgccgccatcttccaactgaaacgaaaagtgaaatcgccaaaattgttcaaaccagaagctccagatggcactcgaaagatggataagaaataatgtctccgatcagaaaccttttggcgtttggatggagatttatctgcgggagaagatggagatctcttgccgctgcttccgtcgggcgggttattgttctcgccggaggtagaatcactccgtcccggtgacaccatgactcttctttcttccgattatttcaagagcaagatttgcgattctttgagagttgaagaatcaatgcgagagatgaattttgagaga

SEQ ID NO: 23033 - DNA, 794 bp, Arabidopsis thaliana
atttcaagctacacaacgatccatggagacgagagcaagccgtaaaccggactaaagattatggtttgccgcaagaatgtctccataaaaccagctgatcaaaatctaaaacaaaaaagttggaactttggaagtaaatacctcagaagctgcagaagcatatacatatacacacggcagaatcattcaagattcattgccaaatcgattctttttgaaaggaataatcttgggttttgagttaggtgaaccatcagtcattatgtaagcaaaactctatttgttaaattcaagccagtttttataaagatcgtaagttaacaatttattcagcatattatctaatctcttcctctctctttattttgcttgaatatttatatatatcatgcaacatacatttcaaactattcataatcgatctatttaagcttcactcaatctgcacccaagcggctgagcttggtatacctgcatgcaccagaaatatcatatagtatcccggaggagcaatctcagccgttgatggacccaatgcactgactctataagaatttgttagctggtcacgcgtcacagagagtagcttcaagattaccatcctctgattcatcgcaaaggagtgtgtagtgaaagatggtgcaactatcctcacagagagaagatcaacggtcagaaactgagctatggagaaatcacgttaaacaatctcttgtaactcaatactttgtcgcttgtcaataatatcttgggacgtattgggtcggatgtgaaaaatagatatggtggagaat

SEQ ID NO: 23034 - DNA, 118 bp, Arabidopsis thaliana
ccacgtattttgcaagctatttaactggcggcgattgcgtacccgacgaccaaaattagggtcaacgctacctgtaggaagtgtccgcataaagtgcaccgcatggaaatgaagacgg

SEQ ID NO: 23035 - DNA, 556 bp, Arabidopsis thaliana
tggcaagttctgtgaactaattgatgttgattgcttgtgtaaattcagggggtggaggagaaagctaagaaagaacaaaggaggaaggatagaagaagtgataagaaggataaaaaagataagaaggagaggaaggagaagaaggagaagaaggagaaaaagaggaaggagagggaaggaaaggaagttggaagcgaaaagcgcagtcataagagacggcgtaaagaagacggtgctaaagttgatctttttcacaaactaaaagaaagtgaagtcaattgtttggagaagagcagccttactgtagaacgtgagctgcttcagtcgacgtcccaaaactcttgtgatagcactcttaacagcaatgagatgttaccgaagcagaaggaggtccagcagcctctcgatggtagacataacaacaacaacaacgagaagcgtgtggagaagcagcagcctctcgatggtagacataacaacaacaacgagaagcgtgtggagaagcagcagcctctcgatggtagacataacaacaacaacgagaagcggattgaga

SEQ ID NO: 23036 - DNA, 526 bp, Arabidopsis thaliana
caaatactacaaaactccaaatgctagtggccaataaataaaagcacaaacgtcgacattaatcattttattataaatttaattcgagaccccccggtccgcccattcagatctctgtctctttctctcactatatctatctatctacccacaaaccaatcttctaaacactatagtctctctctctcttcttcatcttctccataagcttctaaagatatataaaagcttgtgactcttcttcacttaaagaaatatttgcttacgaaagaaaaccctattctatatatcctacagcatactaaaatcaaagggtacgacatttttttcgttcttttaaaaccctaatttgttgtatcaaagaaatcaacaaaggagctatgagcaatactttcgaagaatcactcaaatctatgtcattggattacctaaacctcttaatcaacggtcaagctttctccgatgtcactttcagcgtcgaaggccgtctagtccacgctcaccgttgcatcctcgctgctcgtag

SEQ ID NO: 23037 - DNA, 499 bp, Arabidopsis thaliana columbia
gcatattaaaaaaagaaaacgcagagagccaagagtcagcatcagtaatcacgccacaaaaataaaacgcagagagcatattaaaatgttgaattaataggtggaataaagtgacgattatgtgttacaaaaatgaaaaatatggttttgtataaaaacaccaatgtggcaatgtacatagtcttaaagaacaacacgtactaaagcacaaaaagcagacagtagttcttcactcacaccactttcagtttcaaatttcaactctctctctttagtgtctctctagccatggaagacgcagagagcaccaccaaagatcctgtagacagagttgagaaagtaacatggagagatctgcaagacggatctttcaccgcagaactcaagaagcttatatgctttgcggctcctatggctgccgtggttatcactcagtccatgttacagatcataacaatggtgattgtgggtcactcggcagactctctctcgctagcgc

SEQ ID NO: 23038 - DNA, 491 bp, Arabidopsis thaliana
tgtatggggattttagagcagacaatgaaaatggaattcaaaagctttgtttttttattagtctgtaaaatacattatacacttgtagacttgtagtatatttataggcaagatagagataattttcatctatatgagccaataattcccagtttatatgtacatttatatctgtattctatcaatgacttgcagagagccttagatttgtcacaaagatacagattttatcctgtgaacaatggagtcagaaagctattatttggctgttctttttacaagagagatcccattgggttcaccaccccattcttcaagtacaatgacaaggttattagttggcttcagcatgaacgaggcacatggtacctgaaaacgaagataaagttctaaacctatgattcagatttggactcaagaagaagtagaatttaggcagttttactcaccatctttgtgaagcttctccacagttactcaaacatttcttc

SEQ ID NO: 23039 - DNA, 448 bp, Arabidopsis thaliana
tgtcggctttaacttgtttactataattcatataaaccaaaagtgaaagaaaaaaaaccttataaaaactataaataatggaaagataaaaatgaagttacaagtaattaaattaataattcaatacctgatcccatggccagggccacaagcgacattctcgattcagagtccgttagtgccgtgaccgatggagacacaatcatcgccggtggagatttttgagttgaggatggagacggtagatgatgactgcacgtggatcccatcagtgtttggactgtttccgtctgcagaaactttgactccgtcgagctttacgttactgcagccgtaaatcgcgacgtgaaacatctgactgttaagtgacgtagcccggagatcaccacgttgcgtgacgtcttgaaaccctatgctctggttgcaattgttgccacgtgtcaatttc

SEQ ID NO: 23040 - DNA, 512 bp, Arabidopsis thaliana columbia
catttcaacgtctcctccaaaaacgtatgtatataaatacctacacccaccaacaccacaacttaccaagtctccaaacatagttcctcgcatttacatatatacatataataatatctctagaattttcaagagcatcaagatccatcaagatccaccaggtatatatatacgtgcttcgtacatacatacatctcctgagtttccgttctttgataagttctctatatttgctaattgattattgatgcatatgtacgtgacaatgtctcattaacagtgtaacggagaagaatgtcgccgtcaatgatagctccggtgatggaagaagagaacaagaaataccaaaaaggcgtgaaacatctttgtgaaaatggtctgaccaaagtaccaaccaagtatatatggcctgaacctgaccgacccatcttgacaaaatcggacaagctcatcaaaccaaacaaaaacctaaagctccccctcatagatttcgctgagctccttggacctaa

SEQ ID NO: 23041 - DNA, 469 bp, Arabidopsis thaliana columbia
cttcggatcttctagttatatgaagcctggttccatatttgattacaactattccaaattggaagttcttcgcaacagtaacagcactcgaccgcaatgcacccgatgtggtgatcgttgtccaggttacatctacttcaaacgcaaacgcgataaacaccctgtaacgttttcctgttctgtgcaatgtttagagggaggatgatggtgttgtagacataatgaactttctttgtgtttattaaagttgtttgtttatatctttgtgtgtgtgtgtctttttttcaaagaaatccggaaacttgtatcgccaccacttctaaagaatgaaatatctttgtatttgatgatttatccatcccttttttcattcgatataatttcttaagcccaaaaaagtgaacagcttgacaacgtataaagaaaaacgaacagcctgactcacataaacaaaccatcttctctaacg

SEQ ID NO: 23042 - DNA, 624 bp, Arabidopsis thaliana columbia
tgtcggatgaagttctaagattctggctatcaggattactaggtaaagctctcttagtcgaactcccaaagtctggaagattttcctgagaatcaagaatgtcttgacattccttttgggattggctcacataatctgtactagccatttcaagaaccttgttaatagacgctaaaggcaaaagaggactaaggatagtttcccggagaatctcatcatctgagtttatgtcctctgcagcctgagatgaggcaaaccacttaaagagacccaaggcttcagcatcttgtatttgagcaggtgtatctctgtccgtgggtgttttcatatattcatcattttccattgatgcttcttcactcttctcgccaagtggagaaagctgttctgatgcaggaaactcactgcatgtaccaaccatatgattcaaagcctgtagatcagtaatttcaggtttggcatgcatatctggaccagctgaagatactgcagtaggcttcataccaggcggagacaattcaactttgtttagcatttctttaagcatatcccaaacccaacataatctgacatagtctgcaacacatcagctgcagagggtttccaggatcaggaggtataggt

SEQ ID NO: 23043 - DNA, 580 bp, Arabidopsis thaliana columbia
  unsure (1)..(580): unsure at all n locations
cagagctaccaagaaatgctgatgagaacagtggtggaaaagatgtttctattcctcttaatgctgagtttttcgatcaggagctgacatgggcaggcaatgttgactgggagaaacaacggaggagagcaaaaggagatagggaggatcatgaagctaggaaattgccaaaacactctggaacgagaaagttatcatctaggcataagagacatgagaacaagcttgctgaaaaggctcctgaagagccaaagattgagaaatcgagacatgttgagatgggcaacgatttacctgatcatggtgggatagtgaaacacagaaatctgctcaaaccagaagaaaacaagctctttactgaaaagcctgcgaaacaaaagaaggaattgctctgtgaagagaaaacaaaacgcattcaaaatcaacagttggataaaaaaacacatcagaaagcagctgaaacgaaccaggaatgcgtgtatgattgggaacaaaatgcgagaaagctcaggggaagctcttggtaatgaaatacgctagaggtntcagttgaattgaatggaaatggtaaaacaatgga

SEQ ID NO: 23044 - DNA, 524 bp, Arabidopsis thaliana columbia
ccatgcttcttatagcatctttcagctatatgaccaactctgttgcagaatgaacacgtaggacgacctttgtttggtccactctgaacatacattatctcaggagaagtgataggagaatgagatacctcagagacttgaaaagctgcaggtggagcaacaacattaaagaatcccttctggctattatcctgatccaagatatgataaacttctgccaaactaggaagtgccttctttgcaatgatctgtctacgaacaatggcataagactcattcaatcctgcaagaaatttcattatcttagctttctctgccttctgatacagacgaacagcttttccacaagtacaaggatcatccaaagcctctgtactgtcaagctgatcccagagagtctttaaaagagtatagtactcagatagagacattgttccttgacgaagatcctgaatctcctgtgtcagattgtaggtacgtggaagattcgtcaggttaaacctgtcaaagagatcacgccaaat

SEQ ID NO: 23045 - DNA, 575 bp, Arabidopsis thaliana columbia
gaatatagaatgaaggacttgctcttgcaatgagttttgctacgtgacataaattttgtatctccatttcgtatgtgacatgatcattcacggctgggtacataaaataactgaaatcccgctgcttattcactataattatacacaaaatcaaatttcagagtatcaaatgccaaagccaatgcagagtttggacatgtgttactgtggctgtgttacaagctcaaagcaattgtttgaaaaatcacgttgagatgattctccaaattatcaataccctaagtcctaacaaaccctctcaagaccaagagccgaaattatcgttaagaatgaaaagtaaaaaactaaaaagagatttatctctgcaaaaatcatgatatagtgcctcagtgaagtggaaattcccgtctaagagctttgcttccatcttgtgttctcatgtggctgttttgtccctcttttggtccggtttgacatttttgtcgtttcggttcgagaagaatctgtacttagaagtaaggaattagtcatgacaccgagagagcttaccccatgagagccccgccattgatgga

SEQ ID NO: 23046 - DNA, 629 bp, Arabidopsis thaliana columbia
gttaaggacgggaagagaggtaattgttgttgatcagaaaggaaaacagcggacagcagtcgttgggcgagtgaaaatagagaagcgtccacttattgttgtggaggctaaggttcataaatcacattctttactacactctagcaaactgttaattaggattcaatttgagttaacagcttcatcttttccagcttagcacaaaggaggaggaaacagtgtatagtatcatcttgcagaacgcagaaacagttgcattagtcactcctcatcaaggttcttggtcttgagtctcaccctcattgcagtttgctactagttattagttaacatctaatagtttctttttgcagtaaactcatcaggacgaaccgctgttcccgtgacctcgctgaaacccggggatcaagttttgatcagattacagggcggtgcacgccataccggtatagagattcaggaattcattgtcgagaactgatcaaaaactttcgggtaacattgaaacatatcaaataaaatgtgtctatcaaataaaataggttatgacatgtattctatttataagactagctagataggttatgacttgttggcacattatttctttttatcatcgacaaaataga

SEQ ID NO: 23047 - DNA, 495 bp, Arabidopsis thaliana columbia
gtttcaccagtttactggaggtagcttcatgttttgttgaaagaatgttctccttaaggctgtgaagccttttgctctgcggtttgtctgagcgtttctgctttagcttctttggagatttacatgtctggccttgacgtacgaggagcagtttcttttgctgaaagaactaaatctgttgatgcacttactaagaaagagatcctatcggcgctaaacagtggagaagtttccgaaacttctgaggatgctaggttcagagttagggagctggttctccccgatggcgaatcctacagtggttctttgcttggaaatgtacccgagggaccagggaagtacatatggtcagatgggtgtgtttacgatggagaatggaggcgtgggatgagacatggaattggaaatatgagatgggcttccggggcatcttatgatggtgaattttcaggcggttatatgcacggttcagggacctatgtggatgctacaagt

SEQ ID NO: 23048 - DNA, 522 bp, Arabidopsis thaliana columbia
gatggtgtcgttgttccaaaagcggaggatgatccaaaaacggatgtggtagttgatgaacctgaaccaaaaagattggaagaagatgttacaccaaagggcgaggaaccaaaatttgaggtagccgttccaaaactcgaactagcaattgttggggtttgaggggcaaaagggttggtagatgttgagctcgaaaaagggtttgttggatttgctgatgtctgaccaaacgccggtgatggagaaaatggatttggttgagaaggtgatataccaaatccggcattgccaggagactggccagcaggaagtggtccacctgagaattgaagagtacgagaatcaagatttagttaaataaggcacaggaatgtagccttaagcagatgtagtacaagatttgtttgatcaggtgtacctttatctcctcgctggtaatcttcccacctcagctcctcatagttttactctttgtatgctggcatggcagaaatagattccaactttccagcaggctgagtg

SEQ ID NO: 23049 - DNA, 516 bp, Arabidopsis thaliana
gtttatatatgaagaatatgtatctgcttcgctcataactttttatgcaaactgcaaaagaataggggattctcggaaggtgtttgacgagaaggttcatgaacaagttgctgtgtggactgctctattgtcaggttatagtctgaacaaaaagcacgaagatgcgttgagtatattctccgggatgttaagaaacagtatcttaccaaatcaatcaacatttgctagcggattaaactcttgctctgctttgggaacattggattggggtaaggagatgcatggagttgctgtgaagcttggtttagaaactgatgcctttgtgggtaattctcttgttgtgatgtacagcgattctggaaacgttaatgatgccgtttcagtgttcataaaaatcttcaagaagagcattgtgtcatggaattccattattgttggctgcgcgcacgatgggcgtggaaagtgggcgtttgtcatatttggtcaaatgatacgcctaaacagagagccagatga

SEQ ID NO: 23050 - DNA, 594 bp, Arabidopsis thaliana
catccaattaaaatctgtaacgtttgattataaatatacttttaagatgatccaatatccaaggttctttatctagttgattgtaacattatattgccaagaggtaaattaaagagaacacgaaacgtatgacttttattttatataccttgcttgatgtttcctttacgtcaaggtagccgttcctagctccttcctccatgtacgtgcgagccaagagatccacgtcttcaatcatccttgattttaaaccttgtggacccaacaactggaacgtcaagttccgaacatgtttatgggactccttgctctgcaaaaacaagttgttctccccaaatagtcgtattacgctcttcgtgacaccagggacggaatttgccttcgccatctcgagattcaattccatatccattgagattatagctttgtctccaaataagcttgtccgaaaaactggtccatgtctattaaaaaatatgacaattgacaaaggaaagacaacgtaattaataaaaaataattttaacatacatgacaaatgaatgctagagaaatcagcagaaaacgtaaggactctgtctttgatgaatgttg

SEQ ID NO: 23051 - DNA, 562 bp, Arabidopsis thaliana columbia
ctcaagcccaacatattacgaaacttggtatggacaccatgaaacttaaaaaacaaactgaaaacgtgataacatgcggcgtcattaattagctgtttaaagcatgatcttttaatgtagtatactatgcatagtaatcgaaactctctcggacacgattattgagacaactcaaaagctaaagtttcccgaatgtttgaagaagatcggcattatgatcccgtctccaaggagcgatggttaccgaaacttctcaaacattttgtctaagcctcttctgattaccaagctctctcaagtgcacattctcagtttcaggggtaattaccaagcatctacaagcttgaagaagatcggcattataaccatacctccaaggagtgatggttaccgaagcttcttcaatatttcttatctcgcagcctcctccgtagagcattgtaccaaaagctcgtatgcgttattagcgcgacgtgtttatgaccaccagttggtcgaggatttcgcggagttcatctccatggtcgaatccgctatggtttcaaaagacttttcaaacatt

SEQ ID NO: 23052 - DNA, 409 bp, Arabidopsis thaliana
ccgaagaagtaatctctcataatgttgacagtggcaacacttctatcaatctgcaccatctggccaatcttctcttccaaagtcattctaccaaacaaatccgcaactcgatctgacaccgtctgtttcgagtccttgtacaacagatactctccatccccatatcaactaacccacatacacatccatagaagaaccccaacgattcttactgaatctctgctcatcttcgtaacaggggaaactctggcaaaacaacaaagacggaagaaactcaagataagaaagacttgtcacttgtcagcttaaaaaagaaacccccaaaattgtgaaaccttggctgcttatcagcagccaaccaagacaactccaaagcaacttcgttattcatcaatgacaagcaagaaga

SEQ ID NO: 23053 - DNA, 562 bp, Arabidopsis thaliana
gtgtgctctaaagaggggctggctgaaacgaaggcgggtttgactgaaaactcgagaaacagcaacctgtatcaggcgatctggttcaactgtaatagaaggaggagggggagcagacattgcttgaagccaagtttggaaaagccacgcaaaggaggactcagactcgttgagtatgagagcacaaccaaaaagaacaggctgcccatgatggttgaacccggtgaaggcagcaaatggcacttgatacctcttacccctcctataggtggtgtcaaagactagggtatcaccaaagtaggtgtaattcaacctgcaagttggatccgcccagaaaacattcccacaatcgtcctcaattgcatataagaaaccaggattctcgagctgcctacgtttcagatagttcaatacatgctcgaccctgctcatgcttacttcttccactaattctgccactatcccaaatggaaagttttgggtatcagaaggaacacagttgcagaagcgactgacttatcaattcgggaaagacaaactgcagagagaattttagagatga

SEQ ID NO: 23054 - DNA, 426 bp, Arabidopsis thaliana
tcccatgtacttacttaaatacaacgacttgaattgcaataattcgatacacgaaggagaagccaacttagactaagtcaagaaacacattgaatcataaacgtgcgcgtttctcacacttcttctcctctccttcctcgtaaacactctcttactcacattcatatatataactaaaccttgcagattaaccaaatcaacaaaaaaaaacagacttttgataaattcacaacgaagaagaagacctaaaagatcgggacttgaaactatgatcaaatcagaagcagatctctccgatgtgatcgtgattcgtgacgtttgggcttataatctcgagtcagagtttgacctaatcagaggaatcgtcgaagatttaccattcatctcaatggatacagaatttcccggcgtgatttacaaggcgga

SEQ ID NO: 23055 - DNA, 502 bp, Arabidopsis thaliana
catctcttggaacaaaagtctgtatcaactattcaacaacgttgggcttctaagctaagtgggttgaagtatcgcatagaatacaaacctggagtcgacaacaaagtggccgatgctctctctaggaaaccaccgcaggataaggtttgctcagttcaccttaacggctccacaaacaatagatattggcgctttaaaagaagaaatcatggctgataaagagttgcgtcagttggttgatacttggcaacaagggcagagtacagaatctgaattttcagtgaaagctgggttggtttacaggaagggagccttggttatccctacaggatctcccttcattccaaagctactagagaagtttcacactagtgcaatgggtggcacgaaggagcgttgaagactttcaagagactcactagtgaggtctattggaagggcatgcgaaaagatacagtggaatacattcgaggatgccaaatctgtcaagagaacaagtact

SEQ ID NO: 23056 - DNA, 539 bp, Arabidopsis thaliana
tgtcttgaatttttgtcagccagtggtgctgttgttggcgatgacttcctggctatacattcataggatgcaataacattatcggtcaccacgccgtggttgagtgttaaatgtcaagacttgaagtacaaggtgtgtgagagacgttatcttatcacctgttatcgtcctaatctcaccctggttatagactaggaaccgatatatgtcaagaactaatgctgtgttttcttcttttagcatggagatgaatgctttctttgcattggtaacaacaatgaaatcagggagttctgctcgattcacaggtcatcaaagcccagtgataaaacggtatgtagctgaccattgtctaatatcattgaagtttcaataggttgtatcatgttttgagttatgattattactggaacaggttattggtgacaacaatctaatcatgggttcttgtcatatcgcccatgattgtaagattggtgaccgcaacatatttgccaacaatacgcttcttgctggccatgtggttgtagaagtaagat

SEQ ID NO: 23057 - DNA, 552 bp, Arabidopsis thaliana
gttcttaccaaaagatctagtcctttctttgtatgatcgatccatcacaagcccacaacaacaacaactacatctctttctctatctctagcttctattattaatacattcaagaatcaagaatggtacggacgccgtgttgtagagcagaagggttgaagaaaggagcatggactcaagaagaagaccaaaagcttatcgcctatgttcaacgacatggtgcatgcggttggcgaacccttccggacaaagctggtatgtatttatgttacttcaattattattattatcgcgaattaaattggaatatgcaatcagcttttagttgcatctaataatttaatgcttttaatcattatgaaattattataggactcaaaagatgtggcaaaagctgcagattgagatgggcgaattacttaagacctgacattaaaggtggagagtttagccaagacgaggaagattcatcatcaacctcacgccattcatggcaacaagtaagttttactatataatgatgaccacgacaggcctaaggacaagaacata

SEQ ID NO: 23058 - DNA, 572 bp, Arabidopsis thaliana
ttcacatatctattcaatatgttgtaagcatccgtaaagatgcgagatttaagatacaatatttaccatcttggcgtactgtgtttcctccaactatcacagcatcacttcctcctcgcaactcgaacactcgggttctagagagtttactacttatccatgctgcatgtccactactcgctgcaatcttacctatcaataaacaaaaaaaacgttagctaaaacagctatcctacaaacatatgaaatggaggttgaaatagttaccatcaagagtcatggcatacttaagaacagagaacggaactcgagaacaagctctatgaatcaaaggagcattcacaagaagacacgatttccgagcatcctataagaacttgaacatttagttaacagaatcctaacaattaacttcaaattgaagagtaagaagacatagatacctcaagaactttactctcaaagtcttctccaagaacattaacttcgataccatgacttcttaattcacgaatcgcagagcctctaagatgttgcaaaggatgccttattccaacaacaactcgttcaat

SEQ ID NO: 23059 - DNA, 543 bp, Arabidopsis thaliana columbia
tcccctattgcacgatagagtccgtcatctaagagtctggcgtattcaggaatagaagcagctaaagcttggaactttggaagcttaagattgacatcaggagcaacttcagcaagatacccatcaatcagctttgcaaccgctgtcattggtgttattgactgtggggatccgattaaattcccgtcatctactgaagaacaaggagagccaaccccaccaggcataatctgatctgtcccaagaaaatggtccaagatcctttgcacagagtcaacatcgtatagggtctccatagtatgagaaaagctaggcattacaagatcttccaacgcagcctggtcaagctgcatccctatcctcttctccaaattggctatgcaatccggacttgcttttaaaatcttggcgattcgaagcatgtcaacgaaaaacttggttggaactaaacctttttgcatacgaagaagctcctggatctcttcaagcaagttcttctgctcttcctcggacagtacattccctgagcccaaaggtgtgctg

SEQ ID NO: 23060 - DNA, 611 bp, Arabidopsis thaliana columbia
atccccatttgagttacctgtattacattgtttagtagtagcttataaaatatttatagaatttagtatcaggcacgtgccccacctgcctccaacgtgggtccgccactgcttgatactcgtgtgcgttggctaactttcaggctcctttggaaaggagagccgatcagaatgcctaagagcttttacttttgcaaaacgcttgagagattgactctctccgacaagattcttgtggatgttccttgtcaagtctctctcccatcacttagagaacttgatctcttctgtgttgtgtacaaagacgaagattctcatgttaagcttctatcaagttgtcccgttctcaagcatctaaaggtgactcgaaatagacgtgtggaagataatgtgagaacgtttagggttgaagtgccttctttattgagattagactacaaagcaggtatgatgtttcgagaagacagtgatatgtctgatccgtttttggttacagacactccgaatttattgtctcttcacatctttgatactgtgggatctctctctcagtttggtacatgcccatcttgcacagtagtactgatgactgttcctagtgaaaattatga

SEQ ID NO: 23061 - DNA, 521 bp, Arabidopsis thaliana
gatttaattagtgaactatatttctttttaaaaaaaaaaacaaaatctttgaccctgtctcttttctttctcgtcgtgtctttgatgctaaatttagaatttttagttcattttccaacaaacttttttaaccatgaagtgaccgtcttccttgtcttttttctctccctgttgagatctctgagaaaaaaaaaatccatccgatcttcaaaaaaagtcaccccctttaacattcttctccaatctctctacaaaccctaatctcagccatggatctcgctgcagaagagcttcaatttctcaacattcaaggcatattacgtgaatccacaacaatccccaaattttccccaaaaaccttctacctcataaccctaaccctaattttcctctctccttcgcaatcctcgctcattccctctttacccaaccaatcttagctcagctagatgcaactcctccttcagatcaatctaaaaccaatcacgaatggacccttcttctcatttatcaattcatct

SEQ ID NO: 23062 - DNA, 610 bp, Arabidopsis thaliana columbia
ctaaagtaggggaagagattttctgcggagaccttctcgttagcttgttcatcagatggcgaatggcttgaggaagttgcaaccagaaaagtgcttctgaggtttcaccaaaaacagaagttgcaatagcaaatcttgcagcataacctttcttgaccacatcagcgtaaagttttgctctttcatcgtccagcaagcaacctaggatacaagaaattagagaaggtaagaaaatagaatacttaaacaggtatcttaacagagagaggctagtctgtggtgacaaatgagatcaaccttctttccgataaggttctagtatcttcaacagcatttcgggcactacagggtcccctaaaggcggtaactgaatcatgtaactccgtagatccttagaggatgaagccatcccacggattaaatgaggcctcttctccaaagttgtgctagacgtattaaaccaagatggtttcactcctaactgtaaaatcatccgcagtgcctgcatgtataataataatcagacacattgtcaagagtaatcggaatctcatttctcagaacctgtcttgggagattatacggatatacagataatgcaataattagt

SEQ ID NO: 23063 - DNA, 614 bp, Arabidopsis thaliana columbia
tatccctctgaccagattctctatgcgcttgccttcatcgttaatagcatcactcaaacggacaacttcaggaaatagtgatattgcctttgcattctcctcatcctaaatgaactctttcgatcagcaaagagtgcaagagaatataatgctttttgagaaaatccttgtcaggaaaaccacaccttaactttcttaaatatgtccctaaatcccaattctcttagtatcagctcacgaattctgcagagaagctgcaaaaataaatccatgaacaacaaagctctctacaagcatttactttacaagaggaaactatacttacaatgcaatccggtggaccaccatggctctccggatctttcttcaggtcctcaagaatctccgcataccttgcgagaaatcaaacccaaaattgatacttttgagcgaatgagcgcctcttttaagcaactatgaacacacatgtgagaacacaaaaaaaaaagaagataccttttggcaaacttttcagctcgaacaggagcatctggaacggttgtacgctctctgcacgttcctgcaaaaaaaacaaacaaacaactttagacattgaaagttgaattttaaatggt

SEQ ID NO: 23064 - DNA, 637 bp, Arabidopsis thaliana columbia
tcctcaatgccttcctcatcaatttgtttaccgccatcaaaataagaggaaacaatgtcacgctacagcagaacagtaagaaaacagcttaaaaccatgtctcgaacagcaacagtactaggaaaataaactaaggaaatgtacaagagttctggctcactaccaaggtttaaaaaagatcctcacattgaacttaaggatgtagaatgatgtatcactggcaattgcaactagatcaccactgtccgcccaataaagattctgaaacattgaataaacaaaaacgttaaaagtgaataagcgagcagtaccaatctgcttttgcgtttaaatttcagataaggaactcttttgtatttctccaataaaaatattactgaaaacgtaacctataaactattttcttgtagaaactaatggatctacttctggtatataagcacttactttgacagtaacatctattcgcctaatcaacctacattccgcccaatcatagaagcatataaaatcacttgagcacattgtcaataacggtccaccaaaaatgtgctctgctgagaaggtgggtctcacagcttctttcctgcaaattgacaagggtacagcataggttagtgtattcagatacagaata

SEQ ID NO: 23065 - DNA, 582 bp, Arabidopsis thaliana columbia
gcccattccactgaagagacgcttgatggcatggcacatgcagcaagtgctcacgctgaatataaccaccgcattctctgccgccatcgactctatcttcgccagtgtctccgacggaaacacattcatgttgttcatcaccttactgttgttgttgtaggacaacgacctcgagtttctgttttgtattgcatctttttttgtattcttagagaaaaagagaaagagaataagagagtgagagagcgagagaatttgtgtgagagttggttggggagagagtgagaggcatgcagagtatttatacatggtgaagttctaaatttaactggtaggttttaatttattttaaaatggcatattattagagaggatatgccaaatgataacaaagttattgatgtgatagtcatggaccatcatggttgctagcttttgttatgataggatgatatttttaagagacatttgagtcccatttaagtataattatttatttttcaagattttcaaccatataaaagtagaatattattcagttaaataggttagtagaataagggaattgttggtaatggatat

SEQ ID NO: 23066 - DNA, 552 bp, Arabidopsis thaliana columbia
aggatccccttagtatttgtgcctctgcttgccaaggagattgttcttgtaaggcttatgcatatgatgaaggctcgagcaaatgcttggtttggtctaaagatgtcttgaatctacagcaacttgaagatgaaaacagtgaggggaacatattttatcttagactcgctgcttctgacgttcctaatgttggtgcttcgggtaagagtaacaataaaggtttgatatttggggcggttctaggctcgttaggagtaatagtccttgttctgttggtggtaatcttgatcttaaggtacaggaggaggaagagaatgagaggagagaagggtgatggtacattgagtgcgtttagctatagagaattacagaatgcgacaaagaatttctcggataagttaggaggaggaggttttggttcagtgttcaaaggtgctttaccggattctagtgatatagcggtgaagaggcttgagggtattagccaaggggagaagcagtttaggacggaagtagtgacgataggaacgatccaacacgttaatctagtga

SEQ ID NO: 23067 - DNA, 541 bp, Arabidopsis thaliana columbia
tccaacatactaattagtttcaaacattaccaagattaattatttgcagatcgcctattctatgcaagcaatctccaagttctgttggccgcaaccagacttctccatcttttgtgtaatcatcacccgagtttgagctgtcctcttctccactattaatcctttccgaacaatcagtatcagcaactttctgaagttgatccatccttcctggaagcttatattcttttaggtacctggatgaggtaagttacagcaatttaacacaggaattatgtttttgttcagattaagataaggaaatggtctgtttgttaacaacttcactatattaggaaattaaaaaaaagtagaatgtccgtgaaaagcaagagaaacttgcatttttgcctcctccatggcctcttcaaaccgaggttgcttgcacttcaggggggaccgtgagagaagcccttttagaaatgagaccgcttgtttgacttgtattctatatgaccaaaggaaatatagtcaattccacttcgaaattatgatttgtaca

SEQ ID NO: 23068 - DNA, 584 bp, Arabidopsis thaliana columbia
ctgacactgcaaggtgttcctctagagactaaatgttattttttgcaaatagaaactgcatagttagtcatatctggatatctcactagagcatttcacaatacctaacaatagaagatgtaatatacatcttatttgaaatataaccatttttcatagatatccttcttcccctctcctaaatttattttcatattaggtacttgaagcgaggagtaaacagaaatggtgatgttgccaatgatgtcgagaccgaacagatagtgtctgaagatgttcctgtaagaccaccctatgcaaataagttctgttgtgcagaatcgtggctcaatccctcttttctggtcacaagagacctcacgactgaatctaaagccagatatagtctgtaagttttgtggcactaaaatttctgcattgctcccccactgtctctcctttctctctttcccctgtttgactgctttgatatcaaatgcagtgtcaaaaaaggaaccaaactatgaggcgactaggcttcactttgataaccttgtagaacgatatggaaacccatcatcattctgaacttgatcaaggtgagt

SEQ ID NO: 23069 - DNA, 562 bp, Arabidopsis thaliana columbia
  unsure (1)..(562): unsure at all n locations
nnnnnnnnnnnnnnnnnnnnctaaagcaaaccggctgtaaacagtggcccatacacgcgggtcgcaactgctgacagcgcgcatacagcgtatccataccggacgctttcggcgacgactgaatgatcccggcgttcgggttggcttccatcaggcgcaccagcccgcacaaacaatcaccggtcattaccgagtcagcatccagcaccaccatgtagctgtactggctgccccagcgacggcagaagtcatcgatattaccgcttttacgcttcacgcggcgacggcggcggcgatagaaaatctgaccttcgccaccgacttcagcgataagctccatccaggctttttgctctgcgacgcagatatccaagttataactgtcactaagaatgtagacatcaaagtgtttggcattcccggtggcttttactgattcccacgttgcacgcaggccagcaaaaacacggttcacgtcttcgttacagataggcatgatcaacgccgtgcgatgctccgggtttaatggttcatcgcaactgttgacgcagatatactgtat

SEQ ID NO: 23070 - DNA, 561 bp, Arabidopsis thaliana
gtcatcttacaccatgtcatgcttcaaactcctaggatctttttgtaaaagagttcagtcggttctaacacgtttctggtgggacaaaaaataaaaatgtgttggatcgcatggtaaagatgacaaaatcaaagagatgtggaggattggggtttaaggatattaatgtgtttaatgatgatcttacttgcaaaagtgagccgactaatcctttcaaaatcttcttgcctccttgcaaaaataatgttaggaaaattttgcaaaacaacccctttccttgattgctcagtcacgaccacaacctcacatggatgtagaggaatttgtataggtagagacctgatcaaatcccagttgggtaaatcaatcgaatcaagtactttgacaaaggtatggtcacaaccttggctttccttgtcggcgccattattccttataggtccacaacagagtataccaaagtatgactattgataactttatacgccaatttccaagtcttgggacagggcaaatattctgcatcgcacctcaacatgaatcagaaatcccgcactttga

SEQ ID NO: 23071 - DNA, 544 bp, Arabidopsis thaliana columbia
gaagcaagcaaattgtatacagcgaacaaaaagaggttaaacagtggcaacactgaatgtatctgtgaagctacgattgagtggactcctctgagtctaatcttctgtggtctctgtggtctcattggaggtatcgtaggtggtctccttggatccggtggtggatttgttctcgggcctttgcttcttgagattggagtcatcccacaggtaaacacaccatcttatcagtatatatgattgtaaaacccataatcattcatcttgtgtctttcatttttatctaacggttaaaacacaggttgctagcgcaacagctacctttgtgatgatgttttcttcgtccttatccgtagtcgagttctatctcctcaagagattcccaataccatacggtaagatctctaacacacaacatgagatacatttagaagtcgtagcagaataaaaaggaaactgatgattgacctttgtttcattgacagcaatgtacttgatttcggtatcgattcttgccggtttttggggacaatcctttataaga

SEQ ID NO: 23072 - DNA, 588 bp, Arabidopsis thaliana columbia
  unsure (1)..(588): unsure at all n locations
cccgtgtgaactcaagtgtttccacaatcctacagtcaatcattgataaacacggagacatagcagcaaactgcaagctagaatcagcatcaatgcgatcccgatacctagagtgtctatgctcattgatgcaagaacttggatcaaccccggtgggtcagttaaccgaactaaaagtaaaagagatggtcgcggttctcaaggacttggagtctgtgaacatcgacgttggctggatgcgttcggttcttgaggagtttgctcagtatcaagagaacacagactcagagaaggagagacaagaaggattggtgaggtctaagaaacaagaaatggagattcaagaagctgatttggctcggattgagaaggaagtagcggaggcgaggttgagggtcgaggagatgaaagcagagctcgctgagctcgagacagagcggttgcggatggaggagatgggatttaaggtcgagaaatataaagggaagacgtttcttgatgaacttctgtgatggttgttaatatagagtaacacaatactccagaagattantactaatgttttagttatgtntgatatataagatg

SEQ ID NO: 23073 - DNA, 496 bp, Arabidopsis thaliana
cataacaagactaatctatcagacaaagaacgaagtagtcacatcaagagttctttgtctgaaatattgaatctctattaccccttggcaggacgcatcaagaactcgggtgatgttgttgtgtgcaacgatgtgagtgtgtctttcgtcgaagccaaagccgattgcaacatgtcacagattctagaaaacccaaatcctaacgaacttaacaagcttcatccattcgaattccatgaagtgagtgacgtgcctctcacggtacagctcactttctttgaatgtggcggcttagcactcggaataggcctttctcataaactctgtgatgcactgtctggtctcatcttcgtcaacagttgggcagcttttgctcgtggccagactgatgaaatcattactccttcttttgatctcgccaagatgtttctccgtgcgacatagaaaacttaaacatggctacaggtatcacgaaggagaacatagtaaccagacg

SEQ ID NO: 23074 - DNA, 994 bp, Arabidopsis thaliana
ccatttatacattccttttttttgggtatagtgttatactagttgactatttctctgtctttacttctcgctgtttacaacgttccccactttctcaaaattagaataaactagaatccagaataaaattgtaaacacaacaaaatagttataagacaaaaagcacggtcgttatcagttcgcgtacgacagtggtaaaacatgcactttaatcaatcgttctctccttgtatgtaaaatgtatgttgatagtaacaaaaaaaagaggtgagaagaagttcgccaagatgactcatcgcatcatgcatactcaaaaacattttgctaacaagaattccacaaaattttgggtctcacattccctaagcaagcttgttttattattgggcctataggcccatgctattttttttccttatttatgcttgcagctcatttataaccttaaaaataacaacatactacacgctgaaagcgcattaattattccttattactacaacaagttcccaatttttaaatacgcttacataaaaagcccacaagtctctaaggattagttgaaattaacttcatacttagactgtcgatctggatgaaacagtccccaaaacttctcatacgttggttccttcttattctcatcgaacatagcgaatatataagtctctatagctttccctggccttctcggtgatccattcttcacatgttgtatcaaattgttaacataagtctttgcgttttccacactcgtcccgactgctccctctgtgggccaaccggtctccgacaccacgatttccaacgatccgccccctgatttctccaatgctgcataaaccgagtcgagatttgcgtcgaataggttttggtatgagtaccctggatcgttatcacagtggactgggcggtgaacagagcgtagtctagatggatgttggccgtgtctgcatgtagctgaagtaagggtagagattccgagcaagggaga

SEQ ID NO: 23075 - DNA, 553 bp, Arabidopsis thaliana
gtgtagctgtggcgtccatactaaacgcggtcgttttagcgttcttgctggttcgtctccggtagagtctccggcgatttcggctgaggaattgggttgtggcggtgtggtttgaggtagaggttgaccggagtttgagttgttgttacggtggagatcgaaggcgatggcgagatcaggcgtgattaaagattgagataaaggtatgagttcctccggcgacggaagctcttcttcccatttagcaaaccaattggaatcttcttctctcatcctcaacactaacaaaaaaaaaaagaacacaaatcttgaatctcaaatttcacagtcttgatctcacaagacaccaatattgtgaagatgaggaataaaaatcaggaggaaacacaatgatgatgaagagagagatattattgattttgaggcaaagacttgtgaaagagagacttgacaagattcttgtaaatttttaattgttgttatctgtttagattcgaccactacggctcggatgattaggaccatatgggccttagaaccatgccagaactaa

SEQ ID NO: 23076 - DNA, 509 bp, Arabidopsis thaliana
tgcagccacgcttggagcagaattagcaagataccgtgatgaagccccgagtgtacattggttgcatgaaatctggacctgttcttgctcagaagtaagttgttcaccttccttcaagagaccactcctcatttttaatgtttgtctcactttcatctctctctgaaatttccaattttagaggagtgagatatcatgaacccgaatactggaaatttggagaagagggtaacaaatacttccgccatgccacaggtcagctctatgcaatatccagggagttggcgtcttacatatcgataaaccagtgagttatttcccactgccttgacaatccaaaaaattaatctgctttatgcttaaacgctcatacgctgattgtgtattaaccaaggacgaattgtgtatacagaaacgtacttcacaaatatgtgaatgaagatgtctctttaggatcatggtttcttggattagatgtggagcatgtagatgaccgtagggctatgtgt

SEQ ID NO: 23077 - DNA, 544 bp, Arabidopsis thaliana
gttagaacctgttcattgttgaccaaaacctcgtcaggagtggttgtctccgcgactgtctagggaggggtgtcgtccaggagagaagtgagttcaaccaggtcaggttggggggtcttcggttcagcagccttctctgggtacttaacttcatcggctcgaactgattccaactccccctttttatctcttaaagtagttcctgattcactctggtctccgcaactgataccttcagtgcttcaacctcttctgactccttgaagaagctcccgtatttcgaagaaaagtcatggaactgagcccgaacttttctcctttcctccttcctcgcagcgttcaacatcgcggactgctcttcctcgagtttcttcagcttctcctcgcagactttgagattagctcgtagctcgcttctcattctcgatagcagcaaagtaggcatttttgcctaactcgagttttgcggataggtctgatattggtcacctcgaggctatgaaccctcgcttcggcagctttcatccggctcagaacttttttg

SEQ ID NO: 23078 - DNA, 490 bp, Arabidopsis thaliana columbia
cggcagccttttttggcgatgttgcctgtagggttgatgcacccatcgaccttaggttctctagtaatgtgtctctccccgataacagaatcttgaagaaacaatccacttctttcgaaacaagatctatcccattcgataattctgtgaccgagtccttcagtggctgcagcgatatgggatctattgatccttgttggatcgcagggtagagtttcttgacacctgaagcaactgcctctagctctttcagaaccgttaacccgtctgacaaaaatatgttcttgatttctgcgttcatggtgttctgcacttccatgaatgattgtgcccatggaagctcgtttgagactgtaaggtacatcagattctgcgatgaacctgagaacgctgcagcaaaaacaccagagatgtataaggtcttaacctttacaccatatagagctctcatcaagactttccctttggccgagtttttcacttggggaga

SEQ ID NO: 23079 - DNA, 592 bp, Arabidopsis thaliana columbia
gctataggagtcaccgcggcactggtagaggatggttacagcattgggttttagaccacttgtcatgtgcatggaacctgagcgaaaatttccggctgcgagaaaacggatgtgatcgttaaggatatactcgtacttgcttcctggtttatatttccttcactaacgagacatttgtgatgcagatactcattggtcaggttcagggacgaaacattgcgtataaataggagttgtgtggccaccaaggctaagaaagggaaccaaacgagacgttgtaaaagagaacatgaagggtacatattgtattttgttttgcttatttttttcaagagtcgggtgttttttgttttttagtataaatgaagcgttaaggtgtgatgtttatatatacaggagactaggaagaattttagctgattggcttcaatattttggtcactagtttttcaagacggtattcaattcctttttggttaccttatacaaaactggatttgatcattttagtttggagaagattttgtatttcgtctgtacaaccaagagagaggagtttggtattttcggcgagggatgtggagagcatatg

SEQ ID NO: 23080 - DNA, 428 bp, Arabidopsis thaliana columbia
gttaccataaccgttcaacgtcgacccgctctttgtttcagaaaaaaaaaacagagaaagacttttttagtgtttctttgtcattttcgttcctcaaaaaaaccttttcgaatttgacccttattgttatcctgattcttctgctcggttctcgccggagagaagacacggagaagagggttttcgaaaaggaggatgagaggttccaataacaccgatctatttgaccctaagacggagatggattccaatttctctcgccatggttcttcctccgaaggtgattttggtttcgctttcaatgacagtaacttctccgatcgtttgctccggatcgagatcttgggtgggccttcggattctaggtctgatgctgaaggatgtacgagtattgccgattgggctcgtcatcgcaagaggagaagaga

SEQ ID NO: 23081 - DNA, 420 bp, Arabidopsis thaliana columbia
gccctttggagagagatcacgataagggcacatatggaaaaagtgatggacacttaaaccgaaaatacatcaaggaatgctggagaaagtgtggatgtgatatgcagtgtggaaatcgagtagtacagagagggataaggtgccaactgcaggtaacatttctaggatactacattcaatcttatatgctgaccatcctatttaaaataagtcttctatatagcttcttggcttgatgtctggcaccctcataattttaaactatttctatggttttatccccgttattattgaattattgttttctcctttcatttgtttgacgagcccaatatattgtttcaggtttactttactcaagccgggtaaggatggggtcttagaacactgcaagacttgcccacaggaacctttatctgt

SEQ ID NO: 23082 - DNA, 1416 bp, Arabidopsis thaliana
tatttgataattttactaattcatttttttatcttgatttgaaagaaaaatgttcagtggtaatatgattagtaaaattataaaaaaatttctttcttttattaaatacaaaagttcttaaaacgtgcagacttgaagatctccacaaacctccaaaagtctattcaaatggcagagacagttgaatccatcatcatcatcatcatcgtcttctccaaatgatctttcaatctcattctcatcatcttcttctctatcaatcctcatcttcctcctccttcttcttcctcccaaagctcatcaccaaacctcctctctccctctcatttacctctctttcctcaatgctcccttctctctctctctccaccgccaaccgccacctctccgtcaccgacaccatccctcttcccaactccaactccaacgccacccctcctctccgtatcgccatcatcggattcggaaactacggccaattccttgccgaaaccctaatttctcaaggccacattctcttcgctcactcccgatccgatcactcctccgccgctcgccgtctcggtgtctcatacttcaccgatcttcacgatctctgcgaacgtcatcctgacgtagtccttctctgtacttcaatcctctccatagagaatattctcaaaacgttgccgtttcagagactccgtcgcaacactctcttcgttgatgttctctccgttaaagagtttgctaaaactcttctccttcaatacttacctgaagatttcgatattctttgtacacatccaatgtttggtcctcagagtgtgagttaaatcatggctggagaggattaagatttgtgtatgatagagttaggattggggaagagagattgagagtctcaaggtgtgagagttttcttgagatttttgttagagaaggatgtgagatggtggagatgagtgttactgatcatgataagtttgctgctgaatcacagtttataactcatactcttggtaggcttttggggatgttgaagttgatatcgacgccgattaatacgaaagggtacgaggcgttgcttgatttagctgagaatatttgtggggatagttttgatttgtattatgggttgtttgtgtataataacaactctttggaggatgttagagaggattgatttggctttcgaggctttgcgtaaggagctttttagtcggcttcacggtgttgtgaggaagcagtcttttgaaggtgaagcaaagaaagttcatgtttttccaaattgtggtgaaaatgatgcttctttggatatgatgaggtatgtagttagttagttagttacattgtgtggtttgatgcattttggatttggtttcttattgtaaatagttatcgatttgtgatcttgcaggtcagaagatgttgttg

SEQ ID NO: 23083 - DNA, 565 bp, Arabidopsis thaliana columbia
  unsure (1)..(565): unsure at all n locations
nnnnnnnnnnnnnnnnnnnnnnctaaagctttagagacgcttcgcccactccttgcctttgtggattcagccacagtacagtgcatactgacaagacagacatcgcatctatctcaaaggtcgaaggcaagaattggcgccatggagatatcgaggacatgctcaagactatcgccttcatcaagggtcataaatggacctcgaacatggtcaagcgggtgtactttggaaactggttgagagattagtgagtgaatctcagttttcgtttgttcgccaaagtatgggattatgctaatgttttgtgttgcagctctcaggctatggacgtcggtaccctcaagagtcttcccgccgatactatacgcatccttgtctggatcctttcgttcctgtcgtttggctatgcgacggctgagtttgaggttacggctgacaggctcggggtttaccggccagaggagcatattgagtaaggtcatattctaaaaacatttgtcgaaagtattgattaaccgttatagcaccccaaagattatgccgataacctggatgctcgccaata

SEQ ID NO: 23084 - DNA, 521 bp, Arabidopsis thaliana columbia
cagacagattcaaaggaacccttgttgtaaaaacaggaaattgtgtcggagaattgaattgaagcatcaaatcttgaaataacaacaaaagtggtccttcatatccattgaatataacacactaaatccaatagaatcaaattcaaaatccttaattaaaaattaatcctggccatattaaagagaagcaatacctgcggttctgaaaccagactttgatctgcttaggctcaatattggccaaaatggaacattcacggatcaattgttgtcgacggagagagctaggcttaggacactcagcgtagacacgctcaagagcctcgacttgctcagctgtgtacctaacgtacttaccgctactatctaaatgtctattcatactgtcactgcttctctcacggtggttagccacgccatctccattttagctcgaccctcaaaaaaagtctcaaactttactgtttcttctagcttcttcttcttctttggcttcttcttcttttctctttaaattaatt

SEQ ID NO: 23085 - DNA, 528 bp, Arabidopsis thaliana columbia
tccctgtttgggttaacgatgggatgattccatgtaatcaatccctagattgtcgtgaggttcttccgattaaacctaattccgtcgatcctcctcgggaatcggagcttgattcggtggaagatgaagaaatcgttaaattagtgatcgacggaaccatcccttcgtactcattggagacgaaactcggagattgtaaaagagcagcagcgattagaagagaagcggttcagaggataaccggtaaatccttaaccggtcttccattggaaggtttcgattacaattcaattttggggcaatgctgtgagatgccagttgggtatgttcagatcccagtggggattgcaggacctttgttgcttgatggggttgagtattcagtgccaatggctacaacagaaggttgtttggttgctagtaccaatagaggttttaaagctatacacttgtctggtggtgcttttagtgttcttgtgaaagatgccatgactagagctccagttgttagatcccttctgcaagaag

SEQ ID NO: 23086 - DNA, 1690 bp, Arabidopsis thaliana
caacaaaacccttttattgaatcaggcatccgtacaagagaatagaggctctttcgccacagcatcagcatgtcgattacactctctatgattggaattgagagagcaaaatgagaaaagagcagagatagataggatattgtggagaatcccgtgaagttccttcaattaggagcttcaagttaagagctttgataagtgtgagcgagtctgaagcgaaagatatgtggatgaaagctaattcatttgcaactcgaatcgcagtaagagttgccagtgcttcggccatgaggggagaaagaacaaaagagagcagagtcgagccttgtcggacgatgcaattttgccgatccttgaagagccaacctaagcacgctttattctcaggtttccaggaggcatcagtaaagcaggtaaccatattttcgggtgagggggcttggaggggtgggttggggagagctctgatcattggactagaagattgagcctactaccactcctttgcctggataattgctagaacaagtgcatcctttgctgagatttgtttcttactaaaaataaactgatttcgtgaagtccatatgatccaacaaatctatggaaagagaggaccattaccaatcccagacggaggaagacaagtaaggttcttagcacacatgataccttttctgatggacactcgattgtttcggttcagactttctttgaatggagcttgattccagatctgtgtcacaaatggacaggtgaagctccgtgtcagcaattccggagtgtgggcattcgatagagtctgtgactagacggtgggatagattttcgccaacagaagtgctctttgagccattttcaatagcagaagttttgtttttggggaggtagctaaggacaaaatattagatttccaactgcaatggtcttgctgcaaaaccactggggttgtaggtgaggtctcctcctcagagaaggattcatggtaccccgatttggtgctataagatccatcttttgtgggaagccaagcccatttattagccgcacatcttttactgggtttcagacttagaatatccttctcataggctggcagtaagcgttggatcagggctttattccaaacataagcatccgacaataacagattggaaacagtccaactatgtgattcaaaggtgggggtcccataggggcttgaggagaggtcatggagagccaaggacttctccagaggggaatagacgtaccagagtcaatgaggtaccccaacttgggttttaagaggtctctgccgaagcagatgctgcaccaaccatgagaagcagagttgggaactatgtaatcgagaaagttggatgaagtgcaatatttgcctagaaggaccttagccaacaagaaggaagggttattgagcagtgtccaactaattttggctaagagggcagagttgaaggtttgaatatctctgaaccctaaccctccttctctaaaggactttgtcattgttttccaagatacccaatcttcttttcagtttttgtgtccaccaaaatctagtaagtgctgactaaattctcttacatagattgtttggatcttgaaacaggacatggtgtacgatggcatagcggaaagaactgatttaagcatagtaagcttacccgcagtggaaaggaagcgtgag

SEQ ID NO: 23087 - DNA, 588 bp, Arabidopsis thaliana
ggattagttgtttcatcgacattttcgtttttgacggaagcggtagtaactgaattagccatccattgaccattaaaccatagaaatgcgtaaaaacgtctaagagttgagttccaatggttcttgatagcgttatctgttcttccagttaacagtttcgcaatcactgcccatttgtttccgtgaaccgcgtgacagaaattatcatacgatcttcctcatctgcaagcagatcaaacaagaccaaatgaaaaaaaaaaaaatcaatctttcaagccaaatccaaaagaatccaaaaagtggataacaacaataaactaagtttcgaaatctcttctccaacatttctataggcttcaattaacaataaaatcggtgccgtgacataacacactgtgaaccctcaatctaggtttcattatccttttttctcagtgaattacaaacaatcttttcttcttcttactctatggccaaagtaatcaagaaaataaagaaggacaaagattgagataaagtaaagcaaacattttcacaaaactgcataagaaaaacatgtccaaagtcacaataaaacaggtaaacatt

SEQ ID NO: 23088 - DNA, 583 bp, Arabidopsis thaliana
gtttattcagctttaaaatcttcaaggttattagaagatatggcttcgagggggattaaatatgtggattgctatggtgttgacaatgttctggttagctctctcagtttcaagtctttattcgagaactttctcaattcttctcgaccattagaacaataaactggaatcctggaaggcaggttcgagtagctgaccctacttttctgggatacttcatcgacaaaagtgcagcttcagctgcaaaagtagtgcgcaaggtatattcagatacctttctaattcattggttccatgaactattctatattcagttttcaccttcctgcaattagtttctcccgggccaaatcatagttaagtttttaagcgagtagcttgttatgaaaacaggcatatccacaggaaaaagttggagtatttgtaaggaggggaaaaggtgggcctttgactgtagttgagtacacagagcttgaccagtctatggcttctgcaactaatcaacaaacaggacgtcttcaatattgctggagtaacgtaaactcctccctcgtttataacgtttcgaagttatacttagatc

SEQ ID NO: 23089 - DNA, 656 bp, Arabidopsis thaliana
  unsure (1)..(656): unsure at all n locations
catcgatggaggagcagggagcatttgacaatagtgatgcggttattgtcagagcatcaattttttgcaaatggaaagaagtgttcatttggagaggataacgtggattatcttgagcacattatttccaatgaaggagtgtctacagatccagctaagacacaggcaatgactcaatggttaacaccaaagtcagtaaaggagctgcgtggattttaaggcctcacgggtattacggaaggtttataaaaggttatggagtgttggcaagacctttgatagatttattgtggaaagacagttttgattggagtgttgaggctcaagtagcattcgataatttgaagacagccatgtctacagctcctgtcttagcattgcctgattttaatgaagtgtttacagtggaagcagatgcatcgggttttggggtgggagcagttctgatgcagaccaaaagacccatcacttattttagtcatggattgacggctaaagaacaattaaaacctgtgtatgaaatagaattgatggcaatagttttgtctattcagaagtggaagcattacttgtttggtcgtcattttgtggtgcatactgaccagaagagcttgaagtntctatctagacagaggggtggttgattaaattgttga

SEQ ID NO: 23090 - DNA, 451 bp, Arabidopsis thaliana columbia
gttggtacacttcgaacgtaatggcgataaagctctatcggatttcatcgaagctaatcagaatggtgactctcccgtaagttgcttgatctacacgattcttcccaactgggttccaaaagtggcgcgtagatttcatcttccctctgttcatctctggatccaaccagccttcgctttcgacatttattacgattactctacaggaaacaactccgtgttcgagttcccgaatctaccttctctcgaaatccgcgatctggcttctttcctctcaccttccaacacgaacaaagccgcacaagcagtatatcaagaactgatggattttctcaaagaagaatctaacccgaaaattctcgtcaacacattcgattcgctggagccagagttcttagcagctattccgaatatagaaatggtggcagttggtcctttacttcctgcggag

SEQ ID NO: 23091 - DNA, 507 bp, Arabidopsis thaliana columbia
tgctatcaaaatggttgaatattttcttgaagtttgcataagcgaaagtcgaagcgttgtagaagataagaacttgtttaaagcgacataagcttaccatgtcaagagaacagcagggtattgagatggtttggccatagaagtataaatattggggaaaacagcatgtcctgagtagcagtaaccatagagtcctatagccacaggtaatgttgacaagtttagtgtagttcctttgctgtgaattccaacttcatctaccaaaccaatccaaaacaaacataaaaccactagcactgatgcaatcacccctccagcagagatataactaagtacgctgagatctctgagccaaacggtggggagaacggcgagagtggttagcaatgcaaatagatggcgtgcatctaactgaaatcctccaatacttaaggcagcatttggatataatgaagacaaattatcactctccaatattatatattcacacagcatgcctgaaaatat

SEQ ID NO: 23092 - DNA, 602 bp, Arabidopsis thaliana columbia
caaaaaaaaaatctaatatgaaacaataatttagaaatgaggttatatgctggttcttctatgtgtatacatatttgacctcttcaggtgcaagtagtgttcttttcccatgatcatttccggggacctccttagagtccttgtcgtagacaaacttgacgtatgatacaccagaatcaccctgacctatatacactttcctcacaccttcatgaggaccatcgtcccatggatttcccacgttaccaccttttgcttctagtttcttagcaccagctgatccagttggttgagctgatccaggtggctgagtggctgaaggggtacacgaccggatgaaggagcgaaataagctcccagagcattaagaagttcgccgcctactcgcccatggaacccaacgagtttaccaccattcttgtccttgagttcatatttctgtgaacctcgagtccaaagggcggtgagaattccctttggatgttttgaagattaaggaggtgataactccgtgtcttgccaaatacctgtcagattcacttcactgatgtgatgtagtcgctggataacctcaactatcagagattcaaataagtaatctt

SEQ ID NO: 23093 - DNA, 562 bp, Arabidopsis thaliana columbia
ttcctctaacggccgccagtgtgctctaaaggttggcccagacactgacctgacagttccaaatcacggtcaatatcactgccgttctcctaacggttgtcacggccatatacaacagccgaaacgagagcgtgtttcgagcggtgcagctgctgtggctgaatctgatcatggacacctttgctgctttagccctgtatgctatgccttccatgccatgcccattctgacagcgagcgagatactgacaaaccagtgcaaccgacccacccacagccgacattctcaagcggcctccaaccccccgtcatgcgccgttgttcaccgtcactatgtggaagatgatcctcggtcagtctatctacaaactagccctctgctttgtcctgtatttctgcggccacagcatcctagacctagacagggattcctaccaggagaagctcgagctggataccattattttcaacacgtttgtgtggatgcagatcttcaatgagttcaattgccggcgtctcgacaacagattcaatatttttgaaggcatacaccgcaacgtgtg

SEQ ID NO: 23094 - DNA, 535 bp, Arabidopsis thaliana columbia
aaaggtagacccctcacataaatcactgacacaaccacgtgtgaccaagaattaacaatatcaggacattatacgattgtaatacattcagatgcaatgtcacgaacacaaaaaagtatatatcatctggttggtgtcttagggacagacagatgagggctggagagcaagtgacagtacctacaagattgagaagagcttcttcttatcttcgtctattgtgtcttcagtgggagtttgatggcaatttccagagagatttggttgcgataagaatcttctctcttccatgggattcaggttctttctcgtgtatggaagaagaccatcttacagcatgagccattcgtgcgactttatctagcacctcaggagagtctcggatcacaacctttccttctggacgtaatattctgtccatctctaccattagatctactaggctacacctgtatgcatatcagacaattcagcttaggttaagtatataagacagagacctgtgttagaaatcaagaatggttttacgtgagtt

SEQ ID NO: 23095 - DNA, 874 bp, Arabidopsis thaliana
ggtctctgtctctcagacggaggtgaagctgtccgattgtcctcaacactttaatcgcttgcggcggagtaagaatctcctccactttccccaccgttgtacaccgtagctgatcagcgttgttcatcgctgccgccatcccagctttaagcacctccatcgcctcctccaaatccgtttcttctccgtccaccattcccaccgctcccacgcgcctcgccgcgagcatcaccggcggatccgccacgctttgttgcacgagggcgaaatctcgcataacttctctctctttcctcctagtctccgacttaagactcgagatccggtctttctggtggcgcgtgaggtcggccacggagacctcggtgagtttaaacacaagagaaggcttgaaatcgccgacccataaaataagtttagcgtaggagttaaaccacggtgggcagaagaaagtgaaaacgttgtccccggcgagggaaacggaggcgaatttctcttggtagtattgaagacagtgagatagaaactgggccacgagagattgttgttcttcgagagagatacgattagtttcatccaaggaagaagcacacataagctgttcaacgaaatacctgtgacggattaaccaaccatcaacgaagatagtgaagctttgagagctgctagtgtttggcatgtttcttatgtttggagtactcactaagtaagtatggactgtgagtgtacgttgtgcaagaatgtttatatactactacattgggcttgaccaagaaaaatcttttaggaattaatttacgatatgtcggtctatcgacgatgtgtcggcgggcgaaatggatttttgtgacttttgtcttgtcggagtgaagtg

SEQ ID NO: 23096 - DNA, 447 bp, Arabidopsis thaliana columbia
cccacagtcaccagaaagcctcttgactgctgctttcgagccatcgggaaaattagctttgtacacaagaccaaatccgccacatcctataatgttagcctggctgaaattgttcgtagacttcaacaactcctcaacacttagatctttacatccacagctatggaaaagcacaatctttgatggcccgagagctttcgaaaccccgctgatagtctcctcatcaacgtcattgaatcgatcatccacatcttttcgtgaaatccttaacagaataacagaaaggagtagagtaatcccaatggctagacttatggtaagtacaacaatgctgcttctcccgaactttccagccattgttattcctacgcgaagaaccattcggattcaacatgtgactcatcagaacatcgcaaggagaatcaatcgcgcgacaaagtcctaagt

SEQ ID NO: 23097 - DNA, 954 bp, Arabidopsis thaliana
cacaacaatacaaacacacacacacacaaaacacacacaagccttttggtctgaatctgatacatcaatacaccaacaacaatggagttaccaaaactattaatctcactctttctcttctcattctcatctttcttcttaggtaattatactcatactcatctaaaaagctcttaatcacataaatgggttctctgaaacccactactaatgattaatattttgaaggtgctgaatcggattatcctcagcatagtaacttgaagagactgagaccgaatagactgttcgtgtttggagattcctatgcagacaccggaaacataaggaaatctctctccgattcttggaaaattccttacggcatcactttcccccaaaaaccttccggtcgtttctccgatggccgcgtcgccaccgattttctaggttttctctctaacacactttttttttttgtgacaataaatgaggatatggtgatgtgatccggccaccagattcaacaccaacactaacaaaccgtaggttacgtagattaatgtgttaattatcgaaaaaggaaaacgtatgggtatgttactagctaccatcatgctgacgtggaaatattagaaacctttataggtctgattttgtcgttagattagtaaactattcaagctgtttgtacaaaataaaaagattagtaactgctcaactttttttgaaaattgtgagttatgttttgaatttcatttttgaatcacattaaatctttagaatcgaaccacaaaaaaaaacaagaaattaattaaactagcctctccgaatacaaacggctgattgcaaatagtgtgggatagcctgctgcttaatctatgatctcacggtttatttcatactacgattattacttttgaccatttataaagtttgatcaattttaatgcatgtgtgcacaagatcttgggg

SEQ ID NO: 23098 - DNA, 555 bp, Arabidopsis thaliana columbia
ttgtatcgtcaaagctctccagtctctttctgttgatcatggaatgcctccttccaacgacccatgggtacctatttattttatttttatatatttctgttaagctatggattttcctaatttaacttcaaatctaaatttatatgattgataaaataaagcatataatattaagaaccgtttgtttttgtatttttaccaaaaccgtaaaaatacttttcgggtgttttttttttgttgtacaaaatatcagaacgatacttacatggtgggagtacatatgatacgtaatatgtatccaagttcgtatttgatgttatatatgttgctagagacaactgagttttgcctaaaaagcaaagtccttgtaacaggtgatgagcaacatcgtagaaccaattgttgactcttgtcttgatgaagaagataaaagagagaaaagcgcgtctcaggagagattcttggaagcattcaagagagtcgtggagagtgtggctcagcgtctcaatgaacagcccgtgatcgttgctcacagcgaaaacacctttgatggga

SEQ ID NO: 23099 - DNA, 502 bp, Arabidopsis thaliana columbia
tgagatagacgaattgtcgaaaaaaacaccttgaaatgttgataagaaaaaccatacttagagccaaccacacacaaaaatcaaatgcaaactagcaatgagaattcatcaaagaaaaaccaagacaaacagaaaaatgttactaaaaatccaccttaaaaagatctacgagctaaaaacgaaccaaaataaaaatttgagaaaaaagaacctggttcatcttatgaacgttgacccaaacataatgaagctcgatagaatccaaactcttattaatgttcataagctaacctcttttaatcatatatatatccactaaactcatgattcatcgttagctagctagcaacgattatgagtgtgtgtgtatatttgatcaatacggtggtcgtcccgttgaccaataagactgatcatgttgctgctgcaactgaaccgaaccaagaagattaggtggtaaccttgatgacctgcatagcttgttggtgatgttgcagttgtt

SEQ ID NO: 23100 - DNA, 522 bp, Arabidopsis thaliana columbia
ctagaagaatcgtcgacgatatttccggtgatggcgacggaatgagtgttaatgatgccgttaagaaagcggctaaagtgatcgaagatcgccggcagaaaaatctcttcaccaccatcttcgtgttaacggaccgtaatagaaactcggcccaccaagcccaattagcccaaccggattttgtgacttccacgcgcttctctcatttggaaatcccaacgcacactatttggcttggcgcgtgtaatcacgctctccccgaggacgtgtttgccaaacgtatcaagagtctgttgagtttatcggttcaagatcttactctaaatctcggattagtttccgggtcgggtcaaggaaaggtgacatcagtttattcactctcgggtcgacccgtttggctcggatccgggttgattcggttgggtgacatgtacggcgatgaagaaagagaagtgttggtggaactcaaatcacttcgtctagtagatccagagaatcatgaccgtccgatcacgcacgtgg

SEQ ID NO: 23101 - DNA, 429 bp, Arabidopsis thaliana columbia
tttcaaactttccacaataatcttataaaccaagatagagccaaactttagcttccatttttatttcttcggtttatgatctctacttgaccagccagttaatatatgggcttgggccttatgggcctaattgcttatcgcagaaattatctagggctcggattccgattctctctgtgactcacatcgacatcgtactggtttgttgattttgattggtaatcggaagtaaattacgacgttgaagctccctcagtctaaaggattcggaggttgacgctgaactaaataatgggagaagagctgcaatatcagcagaatggttcatctgtgacatctaattatggttatggaagttcgcttgcttacgatcaatctcaagacattgaatctgccgcagacactgctcttctccgagaacaagtacac

SEQ ID NO: 23102 - DNA, 843 bp, Arabidopsis thaliana
tctaacgtgcaccgttcatctccgatggtcgagaaaactcgtagaagctcatcagccgagatcaaaccgtcacgatccgcgtcaaagaactcgaaagtctccttcagctcagtcgagtcacgagccggatctaaagagactacacgactcgcaagctcttcaagacggatcgtaccgtcgccgtcgcagtccacctctttaagcataacgttgatctcctcctccgtcaaaggatcaggacctagccggctaagtaacgactcaagatcgtgtctagagacagctccgtcgttgtctctgtctatcaacttaaacgcttggagaatctcgacgtaggaataaggagaaggaacctccgggagaatgctagtcggggtaacggaaccgccaccgccatcaccaccggagtttttacagtcttggccggaagatgaggaagcggatccgaaggaaaaagccgtgggggacttagagacagtggaacgatctttggatctgatgaagaaacgttttggaattagtttggcgagtttcatagtgtgaatttaatgatttgatggagaaagtgaagacatatataaatggggggagtgataagtgtgagagtttacctattggcaatttcctggaagtttcctactcaactttaactttatcgttatttcatttatttttttagtgtaactgtacttagttagattaaccgaaaagtacgagttttagttgtctttagttacgtgtttcaaggatctttttttggataaattatatgcaaacattgaatatatgtattctaaagtttatcgattcataatcctcaatcatactaattaaacaattaca

SEQ ID NO: 23103 - DNA, 588 bp, Arabidopsis thaliana columbia
tcaagtacatagctgttggaaacgagcctacggatatatggcgtacggatggagacaagaacgctaatgtaaagagtgcaaagagattcaatcaggggatggtaaagcatgctatgtctggaaatggaacgcctgcgaggaaaggagtgatcatggatttttaacttttcagccttgtctatgaggatgccaagagtatagcgccggagtattgggggatcttagagtttgatgggagaccgaaatatgtgcttgacttctcgggtaaaggcaaggacaagtctttgacaagacagcccaacacttggtgtgtacttgatcctaatgcatataacctcgatgactttcctgataatatcgactatgctggaacaaaagaaagtctatgtaatttcatgaaacaacatgaacatatatggttacatatacacagatgtttgtgtttgtgttggagatacaattacaatatgtcacaactttagggagttgagatatgcactttcgctgatttgctttctactctttttgctttcggtattcatatgcttacacatactgtattaataaaaaaaagttgcctagagaata

SEQ ID NO: 23104 - DNA, 1206 bp, Arabidopsis thaliana
acagtttcatcgcgctctcagcctcaaccgtcaatacgtttaacatctaggatattgaaaattgcaaaatcatacaatggtcaggatgttagagaaggcttaactgggaacctctcagcaaccttggagcaactctatgcttgggaaaagaaactgtacaaagaagtcaaggtatgtatgtgtttcttgattttgaatggattaatctccttagattggagcatcttttgacagatgtagttgtttgttgatggcaggatgaagagaagcttcgtgttgtctatgaagaaaagtgcagaacactgaaaaaactggatagtcttggtgcggaatctagcaagattgatactactcgagcagccattagaaagctgctaaccaaactcgacgtctgtataagatctgttgattccatttccagcaggatacataaactgagagacgaagaattacagcctcaactaacacaattgattcacgggtataaattgatctcaattcttttactattcctacatttatatattttcgtttgtgtgatccgatacttgggatttgaaggttgataagaatgtggagatcaatgctcaagtgccaccagaagcagttccaggcaatcatggagagcaaggttcgatctctcagggcaaacaccggcttacaaagagactccggtttgaaagctattcttgatttggagatggagctacgagaatggtgcattagcttcaacgactgggtcaatactcagaaatcatacgtggagtctctaaatggatggctctcaagatgtcttcactatgaacctgaatcaacggaggacggaattgcccctttctctcctagccgtgttggagctccacaggttttcgttatatgcaaagattggcaagaagcaatggcgagaatctctggagagaacgtttcaaacgcaatgcaagctttgcctcgagtctgcatgaactatgggagagacaagatgaggagcaaaggcagagagtgaaagcagagtatgtgtcacacgatttcgagaaacggttgaatgatcttcggatggagagggcgagagtgagaatgagaaacgatcagctacaagacggtgcatcagagaaaagcgtggtcttgtccgagagcgggatctcggcgttggatgatttgaaagtggacttggattcaatgaggaagaagctagaagaagaaagagca

SEQ ID NO: 23105 - DNA, 802 bp, Arabidopsis thaliana
ctttgatctgcagtgactatttgttcaagcttttgctcattggtgattctggtgttggaaagtcgtgcttgcttctaaggtttgctgtaagtaacttcatttctctcttaatcacctagcttatgatatttgtatacataaataggctacatacaaataagtaactctattaagtgtcgttgttgatcttctcaagtagtgtctcaatttgtttgtatgtgcaggatgattcctacctggatagctacatcagcaccattggtgtcgactttgtaagcttcttacactttatctattggtcatgcatgaaacagaaaagttttaattttgaattttgtgatgatgttttttgcagaaaatccgaacagtcgaacaagatggaaagaccatcaaactccagattgtaagttgtctcgactagtgccaatcacttgaaattgttgtatgtgcatatatatatatatatatatgaccactctccttattactatcaccaattatgcagtgggatacggcaggccaggaacgtttcagaacgattactagcagttactacagaggagctcatggaattattgtaagttcgttgtcacacttacattatctaccatactctgacatccattaatgaaactaaactttcatttttgtcaggtgacttatgatgtaacagatctagaaagcttcaacaacgtcaagcaatggctaaatgaaatcgaccgctatgcaagtgagaatgttaacaagctactggttgggaacaagtgtgatctcacatcacagaaagttgtatccctgagac

SEQ ID NO: 23106 - DNA, 1175 bp, Arabidopsis thaliana
aatagaaatgttaaatgattaactgagtcttattcatattgtattataatgtgttaactgttagttgagcatatgttcagaaacaccttgtaatactgtattgatcgcttagtacaactttattcaagttgaaatgtgggtgttatcatgggcggatctatagaaaacgaaaactatttagcggacgtacaactagttactaaaagattggacgaatttgcaactcacattactacatataggatatttttgataaactttagacacagacagtctttacaataacaaaattaatacaagtgtagtttgttaccaaatgaggtgctatgatattttcttgtagaatttcgacacaataaatagtgttacctaccttttaacgtcaatagcaataatgcaaagtgtggaaaccagaacaaagtccatagtgtaaagcttcaagattgtctagaatgcaaaattaaatagtagtaggctttgtcaaatatactacaaaaagatttaccagccaaggaggaatacatgaagcttaatttgattcttttcatactaagaatttacagagtggaaatctgaaaaacaaaaggacctctcttccgatctgagattcctcaaaaacatagctaaatatagaaggttatatatatagatatataagaagaatcaatcttctgtagtaagaaataagaatcttctcctaaaaaggaaagaggagaaggaagataaataaaaaagcatcctccctccatcttcttctctcttgctttcttctttcttctttcttcacataaaaatcaatgagatgatgcagtagaggtagagcgaagagggaaggctgagatcgacgcatcactgccatgtccctgatgatgatgaggtagcaatggagatctacagagcgggcaattgaagttgagatgttgaagccagccttccaaacactgcttatggaagacgtgtctgcaatctagcttcctcacttcttctccggtcttgagtttagacagacacacgatgcagtcagaggctgcgttgtcggagtagcggtacgagaagaggcgatttaggttgagctggtcggcgaggacgctgaggtttgaagtaacaacaacaacgggggcagaagaagggaagaggagaagagaccggacgtgtctgaagaaagttgcgaggag

SEQ ID NO: 23107 - DNA, 948 bp, Arabidopsis thaliana
cttgctcacaattgcctatctttgcaggtcacttatgatgtcacagacctagagagcttcaacaacgtcaaacaatggctgaatgaaattgaccgttacgctagcgaaaatgtgaacaagctactggttgggaacaagaacgatctcacttcacagaaagttgtatccactgagacagctaaggtaattttataataaactaggtgaactctctatccacgtaaaccttgtcttaaagagaataacatttttgttgtctcatctccttgtcccacaggcttttgcagatgaacttgggatcccattcttggaaacaagtgctaaaaatgcaaccaatgtggaagaagctttcatggctatgactgctgcaattaagacaaggttagaaactaaattttacttgtgaagtcattaaccctttacttccatacttaaaaggttttgttgttttcgcagaatggctagccaaccagctggaggtgccaagccaccaacggtccagatccgtggacagccagtgaaccagcaatcaggctgttgttcttcttgattcaattagtcaccactcctctttcgatcatcacaccattatgatcatttgtttgcattgcatgttagacttctccaaattaacaactctttggatccttttgcttgtttttcatttgctttcttttgatccgattcttttctgatgtacgttgaagtttgaaacccataacttctatatagtaaaaggtcttttatgcaaataatgtagagcactctttaatgccttcgacgattctaaatcatcgctcaagtatgaaagatactagatatcgtgctattagaaatatacttcatttatgatgtacgaaaagaaagatcgaatgtgtaataccaaaattagagagaaaaatatcttaataatttttttcataacttaaaaaacgtaatagtttcgca

SEQ ID NO: 23108 - DNA, 539 bp, Arabidopsis thaliana columbia
tcccttctctgtggtttttctctggaaaatcgagttaaaaaatggcgaacgtggttataagctacgtatccttatattgacgattttgagaaattttaacagtttctttatcactgaatcgcttggggtttatttcataaacaagctttggtttattagctcttcgtcaatttggtcaaaatgtttctattattgtttgcttaattaaactgagagcaaattgatagaaaaagacactgcaattaatatgtttgtcttctccaattttttttttctggatatgctttgaatttatttttgttgatatgttattctctgtgggtttgtttataacttaacttgattttggaaacttagaggagtttttggcacattctgcaaacgtgaattgtctaagtatcggaaagaagacatcacggctctttataactggtggtgatgattcaaagtcaatctttgggcgattggcaagcctacttctttaatggtttgtttccatttgcttcttcagtatgtctttgcagaaaatttgtgtttta

SEQ ID NO: 23109 - DNA, 1283 bp, Arabidopsis thaliana
agttccataggttctctacagtgtcagcacttataaggtcctatgccaaatcaaatcgcaaataaagcaccttaccactgtgaaataccttttaacattgtgacacaaaaattacaaacctaacaatcaaacatcattcagtacttgctatacttacaaagttagggttcttatacttacctaaaccctaatcccccgagggttgttgaaccaatcacgattcttggtagttcctaaggtcaaatagacattgtacttgagcaactgcagccaaaaatacatctccaacgagttctcagatattatgccaataaaatagacgcatgtacaaaagatttatgtggatattctgcttacctcctctcggtgtctctgtaaactccaaccagagcctccgccttgtcatagaagctgtccttgagagatattacaatgctttggaagccattcccatcctctgcatcctgattgtcacgtgcggcttggcatgacttgctacgaatgaatttagcaacttttgccacgtttagattatcaagcgcagcatccacttcatcaagtatgaaaaagggtgaaggcctatagctgaaaaatggaaaggtaatcaacaccacaaacttcatcaaatcctcataacaactgaccatggaaacttcttttgcagaacaaccatgctatatttacacgagagcgtaggccaaatttcagatcgtaaagaaacaaaaagcgattttgaagatgggtattttactaggaacagaaaacctaagacgatgccagactggtaaaaccaatgctaaggagcaaacaaatctgatggttccagacacaaataacaaatttcatctggcaagatcaccatcttctagtccaatttcaaagagtgaaactaaacaccacagataaatcaatatgaacctacaaaatcacttttaacattgaaacaaatgggatatctaggtcgttgaggatacctatgtatggagaagagcaacgccaaggccgcaactgttttctctcctccagagagctgttccatgtcacgaaatcgctttgttgggggcattgtagtatactttataccatgtagaaacggatcatcctcattttctaggtttagataagcagtcccacccagtgggtgcgtattactcttggttagttgcttatagatcttgtcaatgttgctagcaatgtggttgaaagcttccataaatagctcatacctgcacaacaatttgaaatgagcagaaaaaactataatggaatatattagttgggaa

SEQ ID NO: 23110 - DNA, 605 bp, Arabidopsis thaliana columbia
  unsure (1)..(605): unsure at all n locations
tgtttagaactagtactagtcacaatcttgaagactctatgatagtataagttggttgatctagggtaaatctggctcattggatctttgagtagacttgtgcctgattcgtggatgtgtttgtttacagggttttagaaaagttgatgcagatcgatgggagtttgcgaatgacgggtttgtgagaggtccaaaggaattgctgaagaatgttatcacgaggaagaatgttcaaagtagtgagcagagcaaacatgagagtacaagtacaacatatgctcaggaaaagagtggattgtggaaggaagttgatattttgaaaggtgataagcaggtattggcgcaggagttgatcaaagttaggcagtatcaggaggtgacggatactaagatgttacatttagaagacagagttcaaggaatggaagagagtcagcaggagatgctttcgtttttggttatggttatgaagaatccaagtcttttagttcagttacttcagccacaggagaaaaacacttggcganaagcgggggaaggagcgaagattgtggaagaagtgactgatgaaggagaatcaactcatatggtctcctttagtacat

SEQ ID NO: 23111 - DNA, 1200 bp, Arabidopsis thaliana
acctcaaggatatgcgttgttttaccgccgggggcgcacaaagatccaaaatgtgttcaccgttttgtaggcgcaacgaggttcatgcaaccttgtgctgatgcatcctgaacggtaacccatccgtcttcaaaaccaggtagcgcatgaacaggtgcaggtgtttccagacgtacagcatcagggtaatccgcatgcgggaaacctttcattcctgcttcatccagcaatgcaagccagctgtcgcgggaatgatgcgtacgattaatacgcagccacattggcggacgctggttattggcttcgacgatggattgccactgctctggatacgctttttgcagacgcttcagcaaccaggaaggatgcagataacgtgcatcactggcattaaactcggctaataactcttcttgctgacgctggaactggcgtaatacaccgtttatcaaccctttaagttgcggacgcttaattgcgatagcgccttcaaccgtttcagccagcgcagcatgaggtggaatgcgggtataaagcagttgatacaaaccaaccataatcaggtaatgcacggtccgctgtttgccggtcatcggacgggccattaacttattaatcagccagtctaactgcgaaacggtacgcagtacgccaaagcacaactcttgaagaagtgctttgtctttatcggaaactttttgctggagcggtggcagaatgttgcttaatgattgcccttgctcgacgacttgttcaacggcctgggccgccatgctacgtaaattacgttgttttttcataagtataaaaacgccccggcaagaccgggcttagaagagtggactatcagaccagacggttgcccggaacaaaccattcccgacgagagttcaggaggtcttgcgcgctcatcgctttcttacccgcaaggtggtaccaagagcaggttcaggatgccattacaagtcgaaacatgaatgccttgttcgttggcttcaaggatcgttcctggtgcagcgttggttgccgtatcaatgaccgatgctttccagactttaaccggctgtccttcaatttcgagccagctcattggccatggattgacagcgcgaatgcagcgttcaagcagtgctgccgaaagtgaccagtcaatacgcgcttcttctttactcaacttctcggcgtaagtgacaagagttt

SEQ ID NO: 23112 - DNA, 1058 bp, Arabidopsis thaliana
tgctttatatgcagtagttattgcagacaacttccattattagttttaaatttcacaaaaccgaatgttttggactgttgcctacttaatagtttgatctacttgagctctttcatcggttcattaatttttattattccatattcatgctgaactttataccattttatctcagtttgtgcggctactctcgctactaattacaattgggcttctgaccttgtacttggcattagaccaagtaagagccccaaatacatcttgcttaagtgaagcagtagcagacactatcacctggtatgtcaacttctcaccatcttttgtaaattggagtttttctggcgtcacttgaatgttaaaccctggtggtgtttcacgctgactgtgtaaaccgctcaccgtcctcaccaacattggtcactgttcttgtaactgtcttgctaccatttcctttgaatccagagattccaattgacgggtaattgatggtggagatcaagtctaagtctggaatctgcagggcaagtaaaattctctggaaaagcttttgacatagcctttattgtggttacgttatatccatagtaacagagaaagttcaggtagtcagtttcagtagtctcgtaaactagtcctggttgcattgatgctgttgagcttagttctcctgctccagagtcataaggtgtggctgttgcaccagtttctgttgttataagacctttgtcgttgtttgtttgagtcgctgagaatgtgacatggaagttaaagaacatccaattttgcttgccataatcacaaaatatgcaatgaaggagtcctaacctgttgtcataattgctgatctgatcgcggatggacccatgtgggatgctgtgatttgatcagagatgcaacagctgaaacatgaggagctgccatggaagttcctgatatgacgttatactgagaagccggcttgccttccagtgaaatgcttgagtcgtttcagtccatgcagcgagtatcgagactcctggtgcggtaatgtcaggctgttaaaatagaagtaagtagat

SEQ ID NO: 23113 - DNA, 589 bp, Arabidopsis thaliana
gtaacgtccgccagtgtgctttaaagctctcgaaaaccttggtttgggagaagcggctaaaagaaatgtagggacaggggcgaatcagatacctgatatgggtagttttatgctttctgcttcagttcctggatatcaaaaattgccatccggtttaattattcaatgggggccaattgatgttccgctgacgtctcaggacacagtaacctattttccgattgcatttccgaatagatgtctgcgggtatttgcgactcaggattacactcccggcagtgcaaatgttggctatatagcttgtgccggttataaccaggacccggtgaaatttatttccagagcaggcgtacccggtatcggtgcttcatttttcgcattagggtgttaatttcttttaactttatggagtgaaaaatgaattacatatattccgcgactacaaactctttctatcccttggagatgaaagaggattcacgcaagctggctcatggccagatgatgctgttgaagttgatgagcaagtgtatattgagttttccggattacatgccgaaagaaaaatccgtatcgctggagaaaatgg

SEQ ID NO: 23114 - DNA, 911 bp, Arabidopsis thaliana
  unsure (1)..(911): unsure at all n locations
taaatagtatttttttataaaacttaagttatatgcatggatacatgaacgatactcctatataaagagaacagcattcaaaaggtcttatcatcttcttcactaaacaaaaaaaaacccttcaaaacatttccttattctttcttcttcatctacaacaatggctggagttgcctttggttcctttgatgattcattcagcttggcttctctaagagcttacctcgctgagttcatctccactttactctttgttttcgctggtgttggctctgccattgcctacggttcgtatactcgtagttaaataatgggatctaaataattttcgtaatttgtaaaaattaatgggttcaatacttaatgaatgtgtcacatttgtgtatatagcaaagctgacgtcggacgctgctcttgatacaccgggactagtggccatcgcggtttgtcatggttttgctctcttcgtggccgttgcaatcggagccaacatctccggtggccatgtgaacccagccgtcacttttggtcttgctgtcggtggtcaaatcacagtcatcaccggagttttctactggatcgctcagcttctcggctccaccgccgcttgtttcctccttaaatacgtcaccggtggattggtatgttctcatcacctttacttactttctcgtaaaataaagagaatcatagtataggtctacaaaacaacaaaaataaaataatacagaataaaggtatttaaggacaatcttaacttgattgaaaactaggttacaaatttataacatagtttacaaagtccaacaaccaataatattctccatgtgttaatatatagttgacacatgatttgtatgtttttggacaaacgacacatgattttgtntaaaagtgaagttatagaatat

SEQ ID NO: 23115 - DNA, 507 bp, Arabidopsis thaliana
caacagctaatatgcgttttgcaagactgaacttggttgatctcgctggatcagagaggtaactatagtgcgttttgcttggtattgccgtagaacctcatctaacattgtgcattctgtaacaggcagaaaacttctggcgctgagggtgaccgcctaaaagaagctgctagtatcaataaatcattatccacactagggtaatcaaggaatagtttattccctggcataactcagtatctcaactagctgttatgttaaatttgactattcgttattattgattgcagacatgtaattatggttcttgtggatgtggcaaatggtaaaccaaggcatattccatatcgtgattccaggctgacatttcttcttcaggttaaatctaaattcattggctttcttcactgaagttgatatctatcgttttatagcattataacggtaattattttatctacaggactcactgggtggcaattctaaaacaatgattattgctaatgc

SEQ ID NO: 23116 - DNA, 458 bp, Arabidopsis thaliana columbia
  unsure (1)..(458): unsure at all n locations
tgtatgatgtcattgaaaatttgtttccagtgtattttgaagctgcaaaataaaaactctgttattctttagttgcagcatatagagagaagtataacactggatagatgattcaatgttaccttcaacaactggattgttcgtgtctgtagatccactgtaagcttgtttaattgagtgtgcattgatccttccatctgcatggttgaaagataaatagttcacagatagaccaaaacaagacgtatcttataattgggaatcggttattgatgcagtacctttgcctggatatgatcctggctggtcgcatgtcctaatatcaacaggttctgtttgctgtaataacaaatggagaagaatcagagctcagaagcttgcaagatagagagaagtagcaggaaaagctagaggcccgttggagtgcanncaaacatacanacagcaaaagaatgtgt

SEQ ID NO: 23117 - DNA, 704 bp, Arabidopsis thaliana
ttcattaccaggaatcgaggaggaggaggatgagaagaagcgattgatgttcgtggaggaagcaaagccctagagctgagatttggtctcagaagctgagccggtgaagaagagagcaactccatgcgatggttaggaagagtagagaaagaccacttgattttgattttgttacttaaactataacgacgtcgtataacctcaagtgtcgttaaaaaaaatatgagaacaagtgattgcctttgctctagtagcttgatggtctgcgaaggcactgtgaagtgtaacgcgtgacgtgttcgatgcttcgggcaaaggcactgagagagagacagagaagagaacaaagcagtgctacctcttaattgagtattaatttatagaggttttactgtgtataaaaatcatatgaggtattctaaaatacctctctttttttcttcatatagccacagaaaagatggaaatgtaaaatgttgactgcatagtctgcattagttgaaaagggagttgtatattgatatatcatttgggtgagtagcgaagaattggctgaattttttcaaatgaactatttgtttttgaatatagagttgatcaaatatcagtttttttcacaaacttccagcaaattccattagtgacatcagcgtttttcttaataaactcaatttgctacgacactagcaaaatttgacacgtga

SEQ ID NO: 23118 - DNA, 553 bp, Arabidopsis thaliana
gcttctgggcgttgagctctttgatgttagctaagaaggaactgaattgttcataggataatcggctcctgtgaattacaaatgaaacagaaaaagatcaacaatttcagattctggttaatgaaaaaccgacactagctaagacaagaactgaagaaataaatactcacctggcttgccggaagaattctttaccatccatccgcggtgtacgagctggaaaagaatttatacatgagaaaatatacttgagttttaccaattttatacaagtaacaatctttaagatcctatgaacctgggagtgtgcggttgcgaggaggagaattcgcagccgatgattgctgacttgacgggtaccagagtgttgcctttgtgggagaaactgcacctgatgttcttttaggagaacctgctgcagaatagcctcgaggagacacacttgtggagatgatctttggtgttgcggttggggtaagacgtggagatatgtatgatgtcattgaaaatttgtttccagtgtattttgaagcctcaaaataaaaactctgtt

SEQ ID NO: 23119 - DNA, 613 bp, Arabidopsis thaliana
tacataaacccaacggcttccaaatttcatttcactgaatcatgttcgaagcaagtagttacatacataaatggagaacaaccgaaacagtaagcaaaaaccagaatcacaatcatcatcaaagcatatatgaaatgaaaccagttcacgggatatttcagctgaccagaatcactagactcaatggttttaacaaactagatagtgttgggaagctcgattagtaacggtatttggtggagtaatcttttggagcaatcaccaacccacgacccttccttgcaccacggtagacagtctcaatgatatcaatgaactcctgcttgtccttgagagcccagttgatcttgttgttgttaccagttccaagatcgatcatgatgtgcttgttcctgaagaagaacatgaccgtagaaggatcgtacagctcgtacatggtgttgaagtctggaacctcagtgatgtccaccagataaatgactgcaaagttcttaatcgtctcagcaacagacgcaagcacctcatccatctacaaaaatcaaaaacttcgaatcaaaacagaaaccagaaactgaatactagaatcaattgtaagtgaagccctaaaatttta

SEQ ID NO: 23120 - DNA, 2086 bp, Arabidopsis thaliana
cgttcttcgtattatctctcaaagaatgtactaactaaaattacaaaattgaaaccagatgcatagagatatgtattcttcaagaggcactggctacggtcaacagctatacggttcgcaatctggttattctcagaatgtaagatcatcaatttcaattgaaaccaaattatgcttaattatgcttaatttatgtgtaattgttatgtagcttggatctggctatcctggaagttcagtgagtggtggcgcagaaggaggctctcagatttctttgagttctcgccatccatcaattacaggtgctcctcaagagactgacattggtggtggatacagatctcatttatctacagctgctagtcattacggaacacaatatggctctgtgtatggatcaacttctcttagcagctctcagcctttaagcaccaatggtttaggttcatcagttttggataaccgctcgggatatgtccctactttacctgattcaccaaagtttgcatctggaagctatttgtctccctcgagccatggttatggtcaaaagacggacgatttgtattccgataagctgtctggttacattcccgttgatagaaggcagtatggtgaacaatcaagctcttatctcggtagggagttgcaaaatgaaccaactaggcgatatgctgatccatctaattttgctcgccaggtgcgcctactctcatatttttaagagaaaatcttatgaatttggttggtttctgttcaatgttgttacaattggcttgatgatactcgttattatatgattttggcagactgacttgtatgatcgcattgatcaagcatcgcttctccgaggagaacaattattaaaaatgcagtcgcttcatacctcttctgttgatgcaggtgtcaacaggtatttttcgatgattgattctattatatcggtagccagatttctttctagcatagatttctttttcaaatagtttgtattttttggtacatctgttatctgtattgttttcagatctgttctctcaggacctttgttataaagctactgtaacttcttgtcaaaactttcaataacgattgaagaaaaaacatatcttattacactgagtagcatacatttctggcagacaaaccgattatcttacagaacgaagttctactgtgcgtcattctgaccaagaagcaatgcattatggaggaaggcttgagtctgatcctcacggtttatcagtacgcaacacatcttcttatgccagccaacataccccatcgttattaggagctgttcctcggcgaaacttagatgactatatttatccggagagttcttcaaatcctggttatggtgttagcttacctccaggcagggattatggcaccgggaaaggtatccatagtgcagcgtctctcgacttggactaccctggtggcatgctggctcgtggtactggcgctgctcctcgtgttgatgatctccggaaaggtgaccgggcaagttatctcagggagtttgatctaagagaagaagagcgtcgtcgtgaggatcaacgcgccagagataaggagcgagaacgagagagggagcgcgaacatgacagagaacgagagcgtcagagggaacgagaaaggcaaagagctagggaccgggagagggaacgcatattggagagacgggagaaggaaagacaaggagaaagagaacgtgagcgaaaacgtgctctcgaaataaaacgagatcggactccaacagcaagagctacgtccaaggacacaaaggagcggactccagtgcccaaatctatttctagggatgcacgtagttcctctttgcggcgggatgcacacatcgtgaagcatcaattaggttttatttgtgatctctgtcacgttcttcatctggaatacagggcattttatgttcctgcaccaggcactaaccttatttctgttatacctgaaggcgttcttcaccgagtaagccaataagaagagattatgtctgcaaggtaataagtgttcaagagatcctcgttcagtgatttttttgcctctcctcagggttactcatctt

SEQ ID NO: 23121 - DNA, 678 bp, Arabidopsis thaliana columbia
cagatttatctggtaactgattaatccaaccaacaatttcttcttgaatcactcgcagtgtgttcctcccacgcccaatctccatcttcccaaagtgaggccttagcttctccacaaactctctcaacagtggtctcatctctttctccttcatcactctcaacgcagactgtaccacaaagttgccaaacttatcagttgtcattcttacccattctttggcattccctctaaactcctccaacacttggtctctcgcaaaatccgattttaaacacttctccaccacatagcttccttgtctctccatcgctaacctgaagaaacttccacgaagtctctcagcgattgcggttgttgcaaccggattctgaagtatcagaatgttctgcacaacgtgtgttccataggggtcaaaagataaccaatctgcgttgtttgcgacgcactcaaagattaggtctctgtatatgcctctgatttcctgaagcacattgtttagggcaaggcatccagtttctagcctggcaaggtgcagagtgtattcgtaagtgagcttgtagagagactccttcttggttttatcgacggctcgtatagcggggatgatcaagccacgaccatacttatcgctcatgagcaagaagaagtttgtgtcgacggcgcagaataagagat

SEQ ID NO: 23122 - DNA, 1253 bp, Arabidopsis thaliana
tcctctccaccctctgaaacactcgatgcatctagttcctcacgaaatacgtaaatgctcatcttctataagccagatcattactttccacgacaaggtactcgttgctggagccaactgtttcctgaaacctagaggctataccaaatacataacatgggattcccagacaggagcttgagatttatgagctatgatcaggacaaactgctatcaacccatgaaaatctccatgaaagcaaccagattcagtgtgctggtgtaagtcacgatgggcgcattgtggtcactggagcagaggatggtttagtgtgcgtgtggagagtaagcaaggatggtccacgtggttcacggcgtttacggttagagaaagccctatgtgctcacacagctaaagtcacatgtctacgtgtaagccaaccgtacatgatgattgcaagtgggtcagacgactgtacagtcatcatatgggatctcagttcattgagttttgtgaggcagcttcctgacttcccagttcccatttcagcaatctacataaacgaccttactggggaaattgtaaccgctgctggaactgtccttgcggtttggagcatcaatggcgattgccttgctgtggctaacacatcgcagttaccatctgattcggtattatcagtaacaggctcaacatcttccgactggcttgagacaagctggtatgtaactggtcatcagagtggagcagttaaagtatggcggatgattcattgtactgatccggtgagtgccgagagcaaaacaagtagtagcaacagaacaggagggctgaatttgggtgatcaagtgccagaatacaagttgattctacacaaggtgttgaaattccacaagcaaccagtcaccgcgctccatctcacaagcgacctgaagcagttactaagcggtgattcagctggacagttactttcatggacagtaccagatgagacattaagagcttcaatgaaacaagcttcattaaaacaggcttcattaaaacaggcttcactgaaacaggcttcatcggtttagaaccaaagcagagaccagtaaatcccttttggttcgctgactagaatcgaaagagctggccagggaacttaaggacaggaccacgtaggaggaagcagaccaaagtctgacatagtgttgtctcagaagagagtaagcgagcaatctcactctgttttggtggtgagtttcaggttgagaggagaggagagaggttg

SEQ ID NO: 23123 - DNA, 535 bp, Arabidopsis thaliana columbia
ttatttgattcatatttgtggattaggtgacaatagatattgctagcccagcaagtggtgtaatccaagaggtaaatatgtttgctctttgtgttgtttattcagtcgttattgttgttctctttctggtgtctctctataagttagtcttcactgactagacctgtttgattttgtcatctaatgcagtttctagtcaacgaaggagatactgtagaaccaggaaccaaggtcgctattatatcaaagtctgaggatactgcatctcaggttaccccctctcagaagataccagagacaactgataccaaaccttctcctcctgctgaagataagcagaagcccagagtggaaagtgctcctgtagcagagaaaccaaagcaccatcctcaccacctccacccaaacagtctgctaaagaaccgcagcttcctcctaaggaaagagaaagacgggtatgcaaaatctatgattgttcctggcttccgtctgaaaatttttaaatgactgatcagaggttaatacagttagtttg

SEQ ID NO: 23124 - DNA, 602 bp, Arabidopsis thaliana
tgtgcagatgtggacaggttcaaagtggttcttttcttgacattgcagcaccaaatggtttatttggtcttggcatggaaaagatatcggttccaagtgttttggcgagggaaggtctggttgctgattctttctccatgtgtttcggtcatgatggagttggaaggatcagttttggggacaagggtagttctgatcaggaagagacaccgtttaatctcaatccttcacagtaagtggtgattcacttatgcgctaaattggaaattctgttcctttgtggatggcacctttaagccgtggttaaattcattgttgcagtccaaactacaacatcacggtgactcgggtacgtgtggggactactttaatagatgatgagttcacagctctctttgacaccggtacatcatttacttatttggttgatcaatgtatacgacagtctctgagagtgtaagcatctaaacaccatcatattcgtgtttcttcgcatgatgctgagttttgatactctatgatcacattatcttcttcagtccattctcaggccaagataagcgcattcccggatcaaggatccatttgagtatggggtacga

SEQ ID NO: 23125 - DNA, 805 bp, Arabidopsis thaliana
taggctctgttttagtgcgcttaatcactattaggcccatataataattttcttgtgtttttgttttcccaacagtaagtgagaaaaagagaaactcaaaagttttctcaactaacaacggaagaatagggctttgcttgtttgagtgaatctcttaaacagtgtctcctcattttaagtagggaagttacatcaatgtctatcttcttacacgcctaactttgttctgtaactcttttctttttgtgtcctaaaaactctttataaacactaatctacactcccttaatctctcatctatccactcacacacacacaaaccatggcttcttcttcttcttcttctttattatttcctttctttcttattcttttttcatgtttaatctcggtttcatcgtcaagaagatcattaatcgaccgtactcttccgaaaaaccttccgagatccggttttcgattgagtcttcgacatgtggattccggtaaaaacctcaccaagatccaaaagattcagagagggattaaccgtggattccatagattaaacagattaggagctgtagctgttttagctgtagcctctaagcctgatgatactaataacattaaagcacctactcatggaggaagcggtgagtttcttatggagttgtctattggaaacccggcggttaaatactctgctattgttgataccggaagtgaccttatttggactcaatgcaagccttgcactgaatgttttgatcaaccactccgatttttgacccggagaaatcttcctcttactcgaaagtaggat

SEQ ID NO: 23126 - DNA, 555 bp, Arabidopsis thaliana
tgtagatatgtttctgctttgcattcgagtactattcagatgtataatcttcatggtttagtctcttgttattaatgatccataatgcatgacgacaagatagcccagtcatctcccatttccgacaagcacaagtcttcattcccatgtgcaagctgacatatttgccacaatcaagaacctcacatctaccattctctaatcctgacacatacttggtgaacttcaattttccctgctccaaagctatgaactctgcagctctctttgtgaatcttcctttgtaagtctccgctttcttcatccgcatctcaatacactgcattgttcttctcctcatagtctctagcatctcaaccatcggcaaatattttgtaggatcaattgcattgttgaatgactctaacatgttattgtgcacatctttacaactcgttgtgggtgcacagaaggcaagactgcaattctatggagttctctgcattattgcatcatacagccgcatatcataagcttttaccctttcaaggttagcttcatactcttacaatatat

SEQ ID NO: 23127 - DNA, 715 bp, Arabidopsis thaliana
ccagtgtgctttaaggaatttgttctcatcggtatagcagggtcccgcagtaactctgtactgggatctaaaaaagaaaaagtctgttgcataacagtaccgagttattggacaataaaacagaacgacttcagcttttgcaggcttaccagaatttactatggtttttctggcctatacatgttcctaaccaaacacagtgatgatcaaactgaagaacacatcgatcacaatcatgacaatgtttggttcgtggaggctgcaaagcattacgtgtttcgagagaaagttttagagagtgggaacttgaacaaacaggtaaaggtgaaatccgaaagaacaattagagtgtccaattgaatcatacaagattcaaatgttacctgctccacatgacaatagccgcatgtcaaatttctgcaagtcataaacaaaacaattcagaacactcctttctactaacaattacaagttataagctgattcttcaggattcacacaatacaaaaccttgattgaagtttatatgtacctaatggatgtccctggagggtacaagtccagaaccaacttcccccagggcgttggaggccttctgggacatgaggctgatcctccttcgacattaacaacaacgctctcactttttctggaagcatgttgtcttcgcttaaataataataaaagtataaacacaaccagtgagacacagtaa

SEQ ID NO: 23128 - DNA, 858 bp, Arabidopsis thaliana
ttcgtaattcataattaagtggaaaatcatagaagaatatcgattattttttaatgaattagaattcatgagacttacttgattgaaggtcatgttcggggcaacgtaggcggaagggtaccttaattcaatatcaagacgggactaatcaaattatcatacgtacatattcaagaagattaaaccttagacaataatttacccatagaaaggaacggcttgatgattttgttgttgatgttgctggtttgtgaatccggacgggtagtaccactgagaatgatttccaacatgtggtggcgtggcctgttcccattttttggtccttcacatgtcaaaacatcattgatgataatgttaatattggttttgaaaattgattctaaaaaggttgaataatggcaaagtggtctttcgattccattcatatcaaggtttaatccttacattgtctcctatctatggcaaagtgtttttccaaattgtaagtgaaaacataattagcttttttataggacattatggccaataatgtgtatatatatagcttttgtattagagaaaatagaatgaagatggaccttgttgaggagaggtcatggtaggggatttacgaagatgaggaccgagggaggtgagattgcagttagcacggcggccattgatgatcggagtagagtcttcgcaagctcacgtggcagctttcgcatctttgaaagtcacctatcaaaaagatattttaaaacacgatgagagaggaacagagtaacaatagtgacagaaatagtacgagagatgcaggaacatactatgccatatcctttggaacggcgagtgagtttgtcggagataatgact

SEQ ID NO: 23129 - DNA, 1097 bp, Arabidopsis thaliana columbia
tcatgtacatatattcaatttgttttgcaatttgattattccataaattttgatgttcacatctcatgttttccatgttttgaagtcaactcttgactttacattttcttagcatatatggtttaaatttatgaatacgatgggtctaataatataggggttacgatcaaataggctccacaattgagagtagcataactttattttgttatcataatcaaattctatcttttgttatgtatgaattccatcaaactctcaacgtctcgtggctcgcgctatataaaaataatcaactaaaaacataaatcgtcttttacttattgcatacaattatgcatctccgtacgcaaatgccataaaactatactttaagtttaatacctattcccgtatactatatagtaagttcaaatgtgtatgtgtacatacacatataaatattttaaaaagtcgggacccaaatatgatgtatataaatcatcgcaaaatcttgttaaatgttcagcatcttacacaaatcattgcaaaatcttagtttcccttctcactttgtgacaaagataagatgagcaagaaaaaggagacgaagctaagcaaatacataaaagttccgataaagatgctggtgaaagctagagacatgtacatacgaagcatgaatcaattttcttcccatgaccttcctggaagcggcatgagttttgggatacccgtctgcaacgtaagcactcttccgcgaagtttcagtgctagccactcccaatattccgtgagagctgaagatgatcgtgtggctaaacttgtaagagccgcatcagctagaaatgcgaccattgatggtgcacgacatgaaccatcaaaattgcggaaggctaagagttcgagaagttgtggtggtcatcgtggctttgagaaaatagatgaggcaagtcctttgattagctttgggagtaagcacaagatgtttcaaaggagtaagagttacagtgttgtcaaatacttaggctcttaaaaaaaattgttttgtttatgtgttacgggtcagtttgaatgttcatttagaatctttggtacgtatttatgtgtgatttatg

SEQ ID NO: 23130 - DNA, 594 bp, Arabidopsis thaliana columbia
cgtatttttaaggatttgtgaatacaatgtgtttgtttagtgatgataattacaaaaataacaacacaaaaaatattttacagacaccacaaatatcagtcacaaacaaaaccttcatgatttatcatttatcaatatatgaggattctcaagtttaatattgatcataataaaaagaacatacaacaaggttacatatcttcacacatatgaaaatcaaagaactcacaaaaaacacaaacttattatacttaacaaacataccacacggatcacaacacataggcataaaattgaaaagggcaaaacataaacacataatcttaagaaaagagatgtgttacatagttacttgtttactcgatggcactatactcctcgatcaaattcttctccataccacgattgttcaagatcgcgtggaccttagagcaattacaaggcataaccacacaccgtccgatctggctgcctcgagctccatttgaaccaccaagcttacgtgcgatgaccacgaattaacacgtcgtcagacggatgataaatggttacacctcaaacctttaagatacaagagtaacgattggatcaaga

SEQ ID NO: 23131 - DNA, 989 bp, Arabidopsis thaliana
atttgtgtctattatttctatcacaatcttgaaaaacagcctaacctaaacctaactagggtttaacatgacttcgaccagaacctaccaaattccatttctgaaaacaaacaaataggcacaaccctagcgttttacaaacaagcttattgacaaaattcacaagtaagaagaaacattaagctagattattctaaccaatcaacaagatctaccattttttccataccaaaaaaagaagatctacaaatttttgtttctttatcggacttaccatttccttcaaaagcgtgttgccatccttggtaagcttgatatctccggaaccaccaacaagcctacacaccggagtgatcgataaaatggcatgaaaattcagtaacaagtgaagagacgaataaacaatagatagatccagcaagagtgaagagacttacatcttgatagtcccttaggaccgagattcgacttgagtacatcttgcaaacccttggcggcgttgatggtcatatgaagcgccgcagatttgttgagaacctcggcattaggattcagaactcgcactgacattttcgataacctttggtgcacagattcaggacacgaagagaataacttgagactgaactagagagtgagcgagagagagggagagagctttagggctttcttctgggttttaaaagtgaagccgatgttgagagactctagtcgctctagagactttaatattaacctgaaattacaaaatttacccagattataatatgttttacatttttagccatatattaattgattctctaaaaatcatatattctccaacattctgcaatattattccgatcatcatttgaagaaagaaatttaattatcaacgtgatataaatttagacctaaaattagtttttttaattaatacttagtaagagtaatggtattccaaatttgaattgatttgatcatttagttttgtagtctatttagga

SEQ ID NO: 23132 - DNA, 831 bp, Arabidopsis thaliana columbia
ctatgttactcaaaaacaaaacccaacaacaaaaaaatgtctcttttttccaattattatttcaaaaatagttcccaaaaatgagctgtaaaatagctggaaaaaacaaaaaaaaaaactaattttgcaccaaatgccgcttcacaatctttacgcttggctccaacacttgctcttcccaattctctctccacttcttctccgacgaactcttcatcatcactgctttaaacgacgccgttgcatcaactctttctatttcccaaccagcgtcttttagcatctcaatcttcttcacttgtctcttcgctaacgtccacgtgttccttttgatatcatcaaccgccttatcgtacgccgcttttcttaaagcgtcccactttatcatcttcttctccggtggatactctttgaagtaaccgtcaaactccggtacacctatagctttcctaatcccaaaccgggtttctaaaccggatttaaccgggtcgtagaatctagacagctcttcgaacatacctgaatccatcatttcgtcgactcttctgagaagatactcgtagagaacagtctccgatacatcgacccagatgaaacaacactcgtaacgcaaatcggagctgattaaacacgacccggatgaaaaaggatcgaactttgggtcgaatcgttgagctaagagtgcgtggacgaaagagttagatccaccggcgataatcggaaccttttgacgagaagttatctctttgacgacgtttgaagcggcggacgaatactctccggcggttagttcgccgtgttcggggttgatgacgcgaggagatggtgagg

SEQ ID NO: 23133 - DNA, 1267 bp, Arabidopsis thaliana
tttatcacaacaagaaactgtggacaaaaactcagaggcattgatgtcatggggaatgcatcccaatgcagcagcctaagtttacggggtaaataatccaagcctcgaggtaaatgaagctcaggttgatctttactcgaagaggacttgtagaatcttagaaacaacagattatgcatcccaccaaaagctctttcattcagaaacaactcattgatcttagatatgtccaaagatatgcccaaaacagctccagtaccctgaagcacaaaaataccaattgcaagtattgtttatgtgcaagtgtagtgaacttacaaatgaaagtaacgtagcaaaacatttgacttacagtgttatcagcaagtacatcataaatctctgaagcatccatcaagaattgacgtttgccaggctcggcaatagattgttcgcaaacaatttctcgacccaattgttctagcaaattgtgcatcgtaatagtacgattgcatctcgatatgtgtatgagagacctactggtaaggacttgaagcccaaatgtgacatccaagccagaacttgcaagtatttgcttcacataatcaacgttctcaccattgaataaacaagcaatatgaaggaatatgaccttatccttgtcatgtataccatcataaccgactcgtaaaacatttctaatatcctcattaagactggttctgagtcgaggcaatgctgatttttgctcatctttgctcatccctcgcagagaggaccccaaaacctttagagctaggggaagatagccagcaagctttgttatttcagtagcaagctcgatacaaccatctggtgcagaactctctccaaatgcatattggcagaaaatctgaagagaatcacttctagatggaaaacccaactcatatatgcaagtgatcccatgcgctctcaatagctgtttgttttccgtggtcacaatgatcctacttccagaaccaaaccactgagattgtttcactaaggcatcaagttgttctagtttatcaacatcatcaagaacaacaagaactttcagatcctgcaatctttcttttaccaaacctaaatcatgtatcttcatatgcttatgatcaataacttcagacagaaactgttcttgcaaacgcaactggaagccatagcgatcgagctccgaggtcctagaacttcccttaacattctccataaaaatagtgtgttggaagtttcagatagccggttgaataaagctctggcaattgtt

SEQ ID NO: 23134 - DNA, 1029 bp, Arabidopsis thaliana
ataagtgaaaagaggaataatgcaaagcaagacttttcaactaatcctcaaacgtctctgtatttctgtattattagtgtaatctcattttttcaagtatatgttttcacgatcagctcaagcaaatataccactttcaacttaaaacattccaaaaatattcatagacatgttcaattcttatcacaaagctttagataacaatctctaaatttcataggactagtgcaggcacaagctatgataaactcaaggaataaaaatagtaccaacctacacagagaagaacaaaacatagaacaaaaatttcaaattggtacctgacaatcgagaatgtctccgaagcggctaaaagctctttcaaggtctctatctgtcacttccggcgataaaccaccgacaaaaatcctactaccttcttttgcagccattttcactcgtctattcacagaaaacaaaacaaattgaggtaaacgaacaaaaaaatctccaacgactaaactcgatattaattctagaattacacgaatagattcatcttacctctctctgaatcgtattgtttccttcgcctctcaaaatatcaatggcacgaagaaaccctaaaatggtggtggttgaggtactacgccacgagaaaggtacactacaagtgcctaaaggctctgatgattaacaacagaggcccagacctaggcccaaatttctctatgggcccaagtcataagtttattctgttaagctcatggatccaccaatgaccgaccagaaaaataagtcttttcttttttctgtatactataaatacatcctttaagcttgtaatgaggcaaaaaaaaaaacaattataattgtagttgagggtttttccaataagatctcttgccaatttttacttgaaaatttgaacatgcatataaaaattacatcgaatatgttttagctgatcaatatatattgtttagctttacaataaaataagatatcagaagctttattccacgtgagatccaagtcactatgtgtaga

SEQ ID NO: 23135 - DNA, 1208 bp, Arabidopsis thaliana columbia
ttttgcgttttgatgattttcaattgcgattgcataggtttgatcataagatctacacttgattctactcactttatttgttgtttcctctaatttgaaaaattgaaatctgcagagatctgaatttgagatgtttaaaaaaatgagtgctactacaagcaagacggatcagaaagcggcattagacattgcatcatggctattcaatgtggttacttccgttggaatcatcctcgttaacaaagctttaatggctacttatggctttagtttcggtgagtttttcttcttttatcacaaactcttcccttgaaatattagtcaacggggttgacttgtttcaactcactactaaaactgatttaagatctgtttcttaatgtgatacagctactacattaaccggtttgcatttcggaacaacgacattgttgacaactttcttgacatggcttggttatatccaaccttctcagcttccttggcctgatcttttgaaattcgttttgttcgctaacttctctatcgttgggatgaacgtcagtctcatgtggaattctgttggcttctaccaggtctgtcctttttcatctcgatgcggatttacgttttccttcgtttaaagttttttttagtaagatcttgaaacgagtgtgttggcattgcagattgcgaagctgagtatgatcccggtttcttgtcttctagaagttatgcttgacaatgtcaggtattcaagagatacaaagcttagcattttgttagttcttgctggtgttgccgtctgtactgtaaccgatgttagtgtcaatctcaacggatttctagctgccgctattgctgtctggagcaccgcgcttcagcaatacgtaagtagtgcctgaaacgttaatctattgtcaaatttggtcagatcttggtcaaattcatcctgatatcgtgatcctgatcccacacattcattgtatatcatctaactttacttgtaaaccgaaaaggaaaatctgttttctaacaattgtaactacaccctgctgcagtatgtacattatctacaacggaaatattcactcggttctttcaatttactggcgcataccgctccagttcaagctgcgtcattgttgttggtcggaccatttctagactactggttgactaaccaaagagtggatgcatacaacttttcatttgtatctctggtaaag

SEQ ID NO: 23136 - DNA, 873 bp, Arabidopsis thaliana columbia
catctccatccagtgaatgtggtttagtgaattcagccaagaaatcttcaaaatcgtctgggatcatcactggttgctgttgaaagctgatcaactcagaaaagttatcaggaaaaggctgcggcttatgattttctggaagtaaacaatactgcggttgatacacaatatcatgaggctgttgcagctgcaattggtctggttgattcaaatccagctgctcaacgtcttcttctttcttcagcttctcattctctgcttcctcagctttcttcttctttgctgccgctggagtcagataaatcttgcacaaagcatgatccacctatacacaccaaccaaaacaaaacacaataaatccaaaagtcacgaatcctaataacttggaatccaagtaaagacacttaccctcaccttctcgttgttgttatcatcagaagactcaaacccagtactcttgcattaaccaatcccctttgacactatttgattgtatcccaacatagtactctagtgaagtcttgtagccgactatgccatttccagcgttgatcttttgggcagctacagttgcgctccaatatcctccattgtcgacacgtttattacttcttccagccttaccggtcttggtcctctccgatatatagaaccaatctgtatcattacccttctcatatttctctgtatctgaattcaaaagaacagagccatttatatacataaaccacgattagagaatcaagaacagagccactgacggagacaaacctgaaagatgttgtggatttgactcgtagatgtcacgcgatggataggacattgacaatgagcattattgccttggaaaagggtgcaagtaatgaagatgag

SEQ ID NO: 23137 - DNA, 1153 bp, Arabidopsis thaliana columbia
ttgtgttatgtcaaccccaaacaccaattctccaccttttgacaaaacacaatcttcctcgacgaaatcgttatctgaaaccaccttttccctttgtcccttcgtgaagccaacaacgacaccaccggattgccattacctccggcgttttacaccggcgacgttctccatcaccggctgacacctctgttcccgttggtatcaaactttggcgaatctgagacatctcgttgtctctcatcttcaccttccttccatgacacatcatggccgtcttctccagcgattagctccggctgtgatctcctcataatctcccattctcatcttcaccaatctcttccaagcttcctctctttcccgtgatgaagagaagatgataaaaattggaatcaattttagattctgaccacagcctcctttgtaactccaggttcatcaaaggtactctctaatctctttcttgtcacacttagagactaggatcctttaatatttccagagaatctgaaaaaacttgatttttttttttttaatgtaattcgggtgattggcacaacttctctggcgaactccacaacttcttcgatgagataatacccaatcaatttcgaccttaggtaagctcttcctcaccaactgattttgcgattcaaattttaaccaagtgatctgactcgatctgctttgttaatagttgaatcaccacacccaacgatttcagctggcttcttagaggactccacctgaaactgatattcctctcagcacaataacaacagctttcacgtaattacctgccgttaatcaccatctcttgtagcaatttttcaatctcacaacattatgagatttcctaacccaatttctttctgaaactgtgtagtcagatactccacctggaacttgcaactcctacgcagttccagcacttaacaggtaacaccaactccaatttaatgccttactcaattatgacacttgagtatttctcacaaaactgactcatcttgtttcttcctgttttgcgagactgttggagttacttgtagccgctgctccatctcagtggatgttgagaagctcgtagcaaagctggaacttttgaccaggtaccgtcttagttaagaaatctgtcggattgactgttgtg

SEQ ID NO: 23138 - DNA, 681 bp, Arabidopsis thaliana
taatgttctctttaagaccaaaaatatgaatactttcaacattattttccctttaattttttcccaaagtagacactaacgaacaatcatcaaagtatttttcacatatattactataatgttagaacattacattttttatttcgtcaagtagtgtatttatttattgcaatatctaaaagacattaacaaaagcaagattatgaaaatagtaacattatttaatttatttacacaaagtccctcttctttgtaagcatttaaaaacccaaatagcccaaaccgtctctacgcataatcggagaaatctctctgccgccatattcaaagcagtttccacacatttaatgtgaacacgttttctcactaccaacaaaaaaaaactcaaatcggaaaaaaaaatgtcggttcacggacgatttccggcgagtccaccgatttcattatctccgtcgtcttcttccacatctccgtcttcacagtcaccgtcaacaccacctgatctaaagcaacgagtcatcgcttgtctcaacaagctcgctgatcgtgacactttagctctcgcttccgctgagcttgactcaatcgctagaaaccttactcacgattccttctctccgtttcttaactgtatcacaacactgactcttccgttaaatctccggtgaggaaacagtgcgt

SEQ ID NO: 23139 - DNA, 786 bp, Arabidopsis thaliana
aaaaaaagagcaaaaagcattaaatatgatctaccttgtgaagcatgagatgaagagctggatcatggagcttcgaggaagggctacaatatgaaattatagattggtattttatgagtcaagaataaaatgaatatgttacaagacataatcatacctgcagagccaccaagacaaacgttgcaaaatggaatcagcatatatatttttagatttacgcacatcagtcaagcaactatgaatcaactgtttcaggacacgaaatgcttgagcacatccagtggtctcatcaaaactggtgttatcgtttgaattaattcctctaggattcacatcctgttcaaatcccataaaaccgcctccttccatttcattcaccaggttgcttttcagaagggcattaacagccaagttatggatctgcacattgcatgttaattagaacaacatccaaaaaagcactgatgattaggtaattttttttttatgacctttaactccacagacacttttctatacgctccagggaatactaaacttgtctgttgcacctgtgtcaaagaagcatgtcagtttatcacctcgacagtagcacaaaaaaaaaaaaacatggagatgggagaagatcatgacaaagtccagagaaaccaaaaggcaaaaaaaaacctgttatacatacctcatcggcaaagaatgcctcttcattgtttatcctccaaggtctggaacaccattatctgacacccaaaggacctgttatacaaaagaaaattcagtgatatggaa

SEQ ID NO: 23140 - DNA, 755 bp, Arabidopsis thaliana
tgcttgcaaggactcagtttgcggttcttattatcgacgtgaggtgagattttaatcccgagttgcagcaaactaatatgatgcgagtgttcttttttccttatagattgttgtcttgttcatgtttttgatagggctgggttgcatccactagatttagaggttgggaaatggttgaggaagcatgctccacagattaagcccattgtggttatgaataaatctgaatcaatcggctctcttgatgaagttgcttcagaggcccttgcactaggttttggcgagcctatagctatttcagccgagactggacttggtatgaccacactttatgaagttctgcgccctctactagaggattacacggtcgaaatgttaaacggtaatatacccgtatcaagataatcatacctcccttaaatttcttcttcactgaacctcgcagtcttataatagatataggcagtcaagatgatgttctgaccgatgagaatctctctgatgaaatcgacgagtccaagttgccattgcagttagctatcgtaggtaagcctaatgttgggaagtcaaccttgctcaatgcattgttggaagaagagcgtgtattagtgggtccagaagctggcctcacaagagatgctgtgagagttcagtttgagtttcagggtaggaccgtttatctggtaagattagaattcttatctttcttatactctgactccaactattattctcctgatgttagacagagaagt

SEQ ID NO: 23141 - DNA, 568 bp, Arabidopsis thaliana
tttttggttcgtatctccaccttttttttttgtatcattgattcaccatgaaattaaattacttgctctctgatgtattagaatggagatatgctatgtagcaaagggacacacgactttgtcctggatgatgaaatcggtttgaaatgcgtccactgtgcgtatgtggctgtcgagatcaaagacatctcaccagccatggtaacatttttatagcgctctgaaatcctagattgagttgtactatttgttgattttcttatctgagttcttaacatgttcattttcctgcattgtgcaggacaagtatcgtcctagtgttaatgacaataagaaatgtagtgatagaaagggtgaccctttacctaacaggcttgagtttgatgcttcagatcccagcagttttgtcgcccctttggataatatagaaggaactgtctggcaatacgtccctggcatcaaagatactttgtacccacaccaacaagaagggtttgaatttatttggaagaatttagctgggacaacaaaaattaatgagttgaacagcgtaggggttaagggaagt

SEQ ID NO: 23142 - DNA, 591 bp, Arabidopsis thaliana
tttggcgccgggaacaaaccatggactggaactgatgctggagaaggagggagaaagaagcatctacgtgcgccggaagtccgtcgtgattccgatacgaaaacggaacgcaaaatcgttttgcaagccattttttgaagcttctctttggagatgagtcgaacgaaaaaaagacacaacgctgcgtttggttatttataaaatttctggcgttggcgagggataaggtaaagacagttatgcccataggtttttgtcttctgttaccattcgctttggggttattagagtctttcactaggcccatttgtgcaagcattttaattaaagttagcaagtgaatctaatctaatcattttaatcaaagttagcaagtgaatcgcacacgaaatcatcttaaagcgtgtttagttaagagtatgtattaaagtacgtaacaaaaagtacatagcatatagttgagaatacagaattgttgcaacgggaaattttctcctaccttctttagagtttcacttctcataggttattcttacaggaagtttcagcatctttctgtaaataagaaactcatagacatcgtgcaacaca

SEQ ID NO: 23143 - DNA, 399 bp, Arabidopsis thaliana
ccgggtaccgtattccaaactctagacaaaattatcaaaacgcatggatccgaccagctgccatatgccaaagaaaaaaaaacaattatcgagaaagagaggcgtacgacaagttcggcgacgtccaagggaggcttgccggatttgagggcggagatgccaagatcgaggcagtgacggagggcgctctcacgagggatacgtcgctcgtcggggagatcgatcggaatgtctccggcaccgccgtgtagcgcaatcgcccaccccaccatcttccgccgtataacttaaagacacgttggctcacttttcccagactattttaaagccttttagttacagatcttttcagattcaaactttatattattattgaattacaagttttttttttttttt

SEQ ID NO: 23144 - DNA, 937 bp, Arabidopsis thaliana
atctttatagctttggggaattggtccttattggttgtggtaatggttgatgtgttggtggtggtgatgatgatgagcgctctgattcatctggtgatcaaatgggtgatgatgaccattgtgatgctggtgatcatcatagtgttgataatcaacttcgttcttttcgttttgcatagagcctgtagccatctgatcatcttgccatcctctagatgtgttccgggttatttccagcaacgagttccttacgtgttcagcttggaccatctcgttatcatttttctgtaacatgggaaaacagaaacatatagtttttgtatattttgctttggtttttgtttctccattccgcaggtcctttagatcatacctcgactttgaagacattggagaccaggctgaggtagcgagtcgtgttagcatttgtgacttctagtccaagagaatccagtgcctccattagccttgtgaagcctcctggtttgtattcgcaaatcacctttacgaaaaactctctgccatctaactgagccacgtccacctgtggctgaaactccgcaacccaacataaaccgatatcatgaggttttgattttagagttcagattagaagaaaggtgagagttagtttcttgttatgatgctctaacctccatttcttgtcctttatcattggaattctcaagatcaacatcttgcttcacgctaggaacgttggagttacatgaaagccccgggtgaaacccagtgaccactgtcccgttcaggctcatccctccttgtggcctattagatccatcctcagtctctgagttctcttcaagctcgtcttgaagctcctttgcctcattctgcaactccttaacgtagttgattgcatcgccaagaatcgacgccctgtccaacttccatgccacaaaaactagtttcagag

SEQ ID NO: 23145 - DNA, 421 bp, Arabidopsis thaliana
tgtggcttattgcgtttagattacacattacatgattaactgacaaaaaaaacgaaaatttaaaaatatataaaaaaaattaacgattaaatggcggggaatcccaagtaggcggaggaagctcaacaaacggttaaattgaacccatgtccgggtttggtgtaaccgggaacggattatccggtattgttgggatggactctattggtggtgcgaatgacgtcaccggcggttgccatggatttgtgacctctggcggcgtggtaaagtcgggagtttggggtgggcaatctccgaggcctggtggtgtggagaatagtggaattgtcggtggatcttgtacggtcggtggtaatgtgaaaaccggcgggctctcttgacccggtggaggcatagtcggcgggccctcttctgccggtgg

SEQ ID NO: 23146 - DNA, 629 bp, Arabidopsis thaliana
cggcttaaagtcttaaactttataagaaccaacctacaagacaatcaacaaaactcagaatcaaaacccaaaacttcacaaatcatggcttaaagacttgactttagccaagtacagagttacaaaacgacaatagaccaacatgcaaaactctaaaacccaaaaaagcaacaaactttcaaaagactaaccagaagttactagatgaatcagactcagacttggaatcagaagaaggttcatgagaaatgactgtgcctgcccagaattttccatcgagtgtagagtcgaactgaactggttggtgaacgtaaccaattaaatctatagagttcgcgattttgggttggtacggtacctccatcggtctcggccactcctccgacgatttctcagctctgtttcctcctcctcctccgcgagtacggctactactttccgtagaagaagttgaaagaaattgctgagaagaaagaacccatgattttctagcagttgaatttaacgaaggtcttatcgatttcgaaattgatcttccaagaaactgcatttcgtgaagattcaaacttttagccttttagggtttatggggtttgacgacaaaaaaagaaagactacgcctttttaga

SEQ ID NO: 23147 - DNA, 1405 bp, Arabidopsis thaliana
ctcagccaagccttctccagtcaaggcagaataaggtcagtttatgaacgtgaactgttagccatagtgaaagctgtcacaaagtggaagcattacctatcaagtaaagaattcattatcaagacagatcacgcagcctcagacatttgttggaacagaagtcggtgtccacaatacagcagagatgggcgtctaagttgagtggactgaagtataggatcgaatataaaccaggagttgacaataaggtagctgatgcactctcaaggagacctccaactgaggctctctcacagctcactataactggtcctcctactatcgacttgactgcactaaaggcagaaattcagcaggatcatgagttgagccagatacttaagaattgggcacaaggggaccaccatgattctgacttcactgtggcagatggcttgatttacagaaaaggctgtttggtaattcctgtaggatctcccttcattccaaagatgctagagaagttccacaccagtcctattggaggtcatgaaggtgcccttaagacattcaaacgactcacaagcgaagtatactggagagggttgcggaaagacgtggttaactacatcaagggatgccaaatctgtcaagagaataaatactctaccctctctccagccggtttactatcacctctccctattccacaacagatttggagtgatgtcagcttggactttgtagaagggttgccaagctctaacaggtttaactgtatattggtagtggtggatagattaagtaagtacagtcatttcattccacttaaacatccattcactgccaagactgtagctgaggccttcataagagatgtagtcaagctacatggcttcccaaacacactggtttcggacagggacaggattttcctgagcggattctggtctgagttgtttaagctgcagggcacggggatacagaagagtacagcctatcacccacaaactgatgggcagaccgaggttgttaacagatgtcttgagtcttatttgcgatgctttgcagggaggaggcctacatcgtggtttcagtggttaccttgggcagaatactggtacaacacctcgtaccattcagccaccaaaaccactccctttcaagcagtctatggcagagaaccaccagttctgctcaggtatggcgatattccaaccaataatgcgaatgtagaggagttacttaaggatagggatggaatgctggttgaattaagagagaacttggagatagctcaagctcaaatgaaaaaggctgctgataaaagtcgacgtgatgtagcgtttgaaattgatgaatgggtttacttgaagctgcgtccttataggcaaagttctgtggctcataggaagaatgaaaagct

SEQ ID NO: 23148 - DNA, 254 bp, Arabidopsis thaliana
atcctcgtcaccaccaatctcatcctcatcaagcacctcagctacattactatccatatagtttacttcttacaagatatgtagccagagtctggacgatattcgcgaaggtttcacgatgactcagtgagcccggttttactctctggccatatgccagtacctgaatgtgttcatgcgtgtggtcagtaccggtccatgtcggatctcaactgtggtcagctgtgaggatcaggatgtggtcatcgctcaga

SEQ ID NO: 23149 - DNA, 555 bp, Arabidopsis thaliana
tgagggtaaccagttaatgttgcaaaatggtactgttgcatgattcatatttgtgagtgcgctgcagttttagctttgaatattattgagtcctgatatcattagtgtattgtaagttagctatatatgaacatataaatgttatggatatcagaaattcgacttaacttaagtttagccatctaaaagttctgatttctctcttatccaggaggaccaagatacagcaattcgactggcgaatacaatgtcaaactcgttaaaaggaagacctgtgcaggtacaaagttttatttttattgaaagcaatgatgactagtactggaagatcgattactaatgggggtcttcttgtagggccgtatatacgagggtaaagagcctccacaatttgttgccctttttcaacctatggtggtcttaaaggtatttgtatgctgtttacaagatgaggatgaagttgattttagtcgcaagagaatatacagtgattaatatggcttacatggactttttagggtggtttgagctctgggtcaaaagcagtatgggaga

SEQ ID NO: 23150 - DNA, 796 bp, Arabidopsis thaliana
gatcccgttgcaactctggcaagggtttgcaccaagacctaccgtgaagaacaaggaatgttccacggttgttggaaccctagctggatactcgagggagtttaagctcctgagtgatctagtgaatttggttgcaacccatgttgcgttttgaggtggaagtgatgcgagaacggtttttttggaggtggaaacggtggaagtgtgaccgatatagtggagggtggcagtggctgtgacgttgtcgtatgggatgtgagcgtccgtaaatgttgtggcggcgaccatgtaatttgaaccagcgtttgcgtttgctgttaagagaacgttagtagtctgtcccggggctatgaatactgtgtcagttttatacggtttggtgtaaacagcatcaacttccacaacggttaatacgtgaccagcaattttaaagaagagctcttcgtttaacgccgcgttgatgatccttaacatgtatgtctttcctgctctcactggtaaaccgtaactacctacaagtgaaaggaccaatattatcaaaagagaaacggaacattttgtattagtatatgatcatccttgtgtcataattttgatggtataaaagtataatatagaagaaataattacttaattaaaagtggttatgaatttaggattattggtaaatgattactttgggaaggacaattagagatggagcctgaatgaccattgatggtatgtgcatccgaagcactaggagctgttcctattcttgaagcctcgtttatgagttcttccacgtccgatttcc

SEQ ID NO: 23151 - DNA, 600 bp, Arabidopsis thaliana
catcatcgcatgccatctacttgcaactgatgctattgcttgagctctgtgtgatatttttgttgctgcgtgtagacacaaaatgattccaacaacttggacaaccgcagagacctgaaaacatatcatgttccaagcttaagctcaccacataagaacataacaatcagtgaataagaagaagacttactgcaaaatcaccaccgtttatataagtgatacgcccactatacgcagtggtctgaaaaagcgtagtaaactggctagctgtgacaaccagaaactgtagaagcagaaagatgcggaacctatggcttattttcgaaagataatgacgcaaacgcatatgctcatagatgaaaagagagatttcagactccccttctaaaagctttgcataatcttcaaagtgaataacttgcaagttacatactaaatgaaacatagcacttgcagctagaaagatagtgcttaagtaagtccacgacaagatcatagacaagagaattgcaacagataaccatggctggtcatgaggcacataatacattctgatgatccacgaacacccttcaaagcgaaacatggaagtgccaaact

SEQ ID NO: 23152 - DNA, 1057 bp, Arabidopsis thaliana
cacatcggttcggtaatacatatgatattcctgcgatcgtgaatgataactttgagctcgatttagctaagtatgagcaacaaggaaggattaacttgagcatgttctttgctcttacctatgggcttggtttcgccaccattgcttctacgctcactcatgtagctctcttctatggcaagtaagtattataagtagcctaccaaaatagcaacatattcttatttttatatgcatgagtgatatatcatatatgtaatcgaatcattacttttttgtattaacagggaaatttctgagaggtttcgagtttcatacaaaggcaaggaagatatacacactaggttaatgaagagatataaagacataccttcatggtggttttactcaatgttggctgcgacactacttatctctcttgcattatgtgttttcttgaacgatgaggttcaaatgccttggtggggacttgtgttcgcaagcgcgatggctttcgtcttcacactcccgataagcatcataaccgcaacaactaaccaagtaagcaatattgaccatatattaatccatggttggtttatattgcaaagaacgagctaatcattgtttacttgttttgcagacaccgggattgaatataataacagagtacgcaatgggactcatttacccgggacgacctatcgcaaacgtatgcttcaaagtctatggatacatgagtatggcacaagcagtctctttcttaaatgacttcaaacttggtcattacatgaagatcccacctagatccatgttcttggttcaattcatcggtacaattcttgccggaacaatcaacataacggtcgcatggtggcagttaaactctatcaaaaacatatgtcaagaggaacttctacctcccaacagtccatggacatgtccgggtgaccgtgttttcttcgatgcatcggtcatttggggattggtcggaccaaaacggatttttggttctcagggaaactatgcggccatgaactggttttcctcggaggtgcattaggccagtcatagtgtg

SEQ ID NO: 23153 - DNA, 445 bp, Arabidopsis thaliana
gtcgtcaccaccaatctcatcctcatcaagcacctcagctacattactatccatatacctaacctcgtgaatcctacctttcttcttctttcccttccctgtaacactcttctctccaccatcaacagcaacaacttcttcaacttcaccttccttctcctcctgaacaacactctttccagacccaaaagcatcgattttaagcttcaaatcaggaacagactgatatataggcaaagctaaactctcagacaacttcaaatgcaaagacctaacgtacgtccacttattaggcaagaactcaactagtccattcaatgtcgccatcacattctcagtaatttcacaaatatccatagacaatttcccaaccttaatgacactacacgtcccagtccttatgaagaacatagcagatccacaagctttctctatctgatgttcc

SEQ ID NO: 23154 - DNA, 1085 bp, Arabidopsis thaliana columbia
aatcctcctggtggcagcgaattcacagaaacaaccaccaggagccacgtcggtggtgcgagcgtttctaaagatccgagaatggtcggagatctggctgggccacggtggaagactttcatccgcagattcaaccgcgatccacgccgaggtcaagactgggacgatagtgacaaattccgatacgatcctgtgagttacactttgagtttcgaagatgaagacaaagacgacgacgacgaagctggagtcggtggagtcagaagcttctcgatgcgctacgcttctgtccccgttgcttcaggtaaatctcccgctgttatcagcgttgacgccgtgaaatgatatctcttcggacgagttcgacgataggcgtttgaaaagtctctcgtatgagttgcgtttcctccttgtttattatttgtttaaaagttaagtttggtttgatttattatttatcgttgaaagttactcctctttcaacgtgtcttgtaaatgtatcacgacggtctaatattttgattctataattttcctgtgttctaacgatttcatgtctgtagtaagtaacaaggaagactaagatgcaaccaaaaaaccacctatttttgtttaataaacagaactctcttcttctccgaccaaaaccagatctttgacatagacatactctcttttcactacaaaacattagagcctaccccaactaccagagtcttgttataccgaatcaccctcgtgaatggagcatttattaccgaccgatatttccctcacgaggagacgaagacagagccaccacaaaatcttgatcgcatacgagatactgttgcgtgcccatcgagtaacatcttcttggcattcttaccccgatttcatctttgacatcatgtcgttgactttgactttcgttcgtgcttttgaatctcccgagacgaacagagaaaactcttttagcaagggaggctttgcgtcatccacctgctgatgccagacaagggggcgacaagagtctccgagtggttgtacagacgtttgaggttgagagtgatcttctgcagagagggcaagtagagttcgaaaga

SEQ ID NO: 23155 - DNA, 1159 bp, Arabidopsis thaliana
aggatccccaacaggaatttataatgaatatcatctaaaaattcagtgatactgtgcatgaaaattctgatagggtaacttgaaggtaatttatgctacaaaaacaaaaataaaggatcattttgaagttaatggtagaacagagtcatcatgataatgtttggtgtagagcatttattattgcattaatagcatattatcaattggattgataccagtccaatttctgtactactctccaaatcattaaatttggttctgtccaaaagctagaattaggatgacatatctactcatattttttggtcgtaaattttgaaaatatgtgttaaattgttatttgatcattgcttggcaataatttggttaaacaattttttttggtttttgagcatatcctaaactgatggtaatttttgtattgataaagagtgattcatatcaagcaacaggatgttacaatcttctatgttcgggaattatccaaacaaataacaagattgccattggagcagccatatctcctctttctacgttcaaaggaaaccagtttgatatcacaatactcatttggaaggttagctagtctttctcttacgacatctctatttatcatctatataacttaatatagaaacatgcttatacacgtacactttcgtattatggatgccacatcttgaatttagttgaacttgaacggcgtaattaattttttctatatgagaatgtggacgacatagaataacggtgtaaaagcatgctactaatacaaaagaattcatttcttctaagaaagatgtctaaattatattctttgggatttgcaggatccgaaaatggggaattggtggatgggtttaggggatagcacactagtcgggtattggccagccgagctattcacgcacttggccgaccacgcgactaccgtggaatggggcggtgaagtcgtcaacacacgtgcttcaggcaggcacacgacgacccaaatgggctctggtcattttccagacgaagggtttgggaaagcaagttattttcggaatttggaagttgtggattcggacaacagtctcgtaccggtgcatgatgtcaagatactagccgagaacaccgaatgttacgacattaagagttcgtatagtaatgaatgggg

SEQ ID NO: 23156 - DNA, 1002 bp, Arabidopsis thaliana
ccattttcttttttttgtctgtgtcaagtcgataccacttgtctggtagctttatacccactttcatctgtttcatgttcgtagttgttcctctggttatcctcatcaacgggacccttgaaaccgtgtagccatgtaagcctttgtctttgtctctttctcttgcttcagcaagttcacgtctgctctatttctaattttgttctaagattcaattctccttttttctatgcgagaaatttaagattggttctctagctctacctctttaaatttgttactatgtgtcggtgtccatcattcatcaaattttttccttttttatccatttgagttgatgtaatgatgttgcttcgcttcatactggtcagagttagtctaatcttcattttagcacaacttgacaacttcatatggttatgacttatttttacttgggtctttcaaaggttaagtattttagtcttattttgggatgatgcagcttgcttaatgattagagtcttaaagctgtgctctttcttcatcgatttgagcaagtgatcttggaaggctcttgagttctgaattccttgtaagcaatcatggcagggaaaagagaaaactttgtgaggttagtgctgcatccttttgttttaatacaaagatctgaagtttgaatgtgagaaacgtattgatttggcaatggttgtttctgatttgtttccttatgaaagtatagtgtgattgtactgaactatagcttgttggtgcatagtaatctgaaagtggtgttgttcataccttttatagggtggatgatttggactctaggttaccatcatcatctgtagccttccaacagaactacgcctccaatttcagtggacaacttcatcctagtcatgcaagcaatgaaacttctagatccttcaagagaggtatccagaagggttccaaagggcttaagtcgatcggacgttcacttggtttcggagtttatcgtgcagtgttcccagaaga

SEQ ID NO: 23157 - DNA, 1402 bp, Arabidopsis thaliana columbia
  unsure (1)..(1402): unsure at all n locations
gtgctcggagaaatctgctcccaccaacttataaaaagtttttttttgatatttggttttgttgggggggaaagaaagaaggatgatgaatcaaaaataagattttgagagcagtctctcaaacaatcgcccttttgcaccactcactctttatagtctgtagcttttttttccttacattcttttcagttcaatgtggtttcacgttctaagtttcttccttgtgtgtatcgttgaagtcaaaaagataatagatttagttcttctactctcaaactcatcagagtaagaatgagtgaagttgggtatcgttgagacaattgctttatttcttctgattaacatcaatcgaatcgaggagtctttgaaaagagttataaacaatacaaacactgagtgctgctgagtgagtctctctattgctacctgaaaaaaaggaaagcgtttgcgcgaaaaaaaaaaacagcaggtagttgtactgttgtaacaatattttcacatggtcccgggaaattcaataaattatttattttagatacaagatggttgatatttgcacgtcgttaggacattggactcgtccagtgtctgaaaagccgtcttttatccaacttccccggggattcccaatcctttttatctttcttatcaaatagaattgtcaaccaacagagagaaagagagctttgactttagatccaatcatggagacaactacaactcctctgctccccggtgatcgcagcagatgcgggtggctccgtcgccgtctccgcctcaaaaaccctctttcttctgaactctccggcgctgtcggtgatctcggcaccttcatccccatcgtccttacactaactctagtctccaatcttgatctctccaccactctcatcttcactggtttctacaacatcgccaccggtctcctctttgacatccctatgcccgtccagcccatgaaatccatcntgccgtgtcgctgtctccgaatccccgcatctaactccttctcagattgccgccgctggtgcatccactgccgccacgctcctcctccttggcgccaccggagctatgtctttcctctacaacatcatccctctcccagttgtacgcggcgtccagctttctcaaggtcttcagttcgccttcaccgccatcaaatacgtcaggtttaattacgatactgccactctcaaaccctcttcttctcctcgtatttggcattgcctcgacggccttatcttggctctagctgctctgctcttcatcattttgtccaccggctctggcaacgacagagaagctgaagatggagatctcgccgagacttccagcaacgaaagccagtctcgccggaggagactgcgtcttctgtcttcgattccatctgcgctgatcg

SEQ ID NO: 23158 - DNA, 656 bp, Arabidopsis thaliana
tatattaaatttaaaacatttacttgcatgataagttgtagtagttttaaacttggtaattttaaactatcaatatgaggctaattggaatcgtttcagtacattatttcatctgcattcactccttatgatgattgaacaaggcaaatgttcgtaaaactctttgagcttgtgaatgaaagcattcaaggagacaacatcccggggacatacaacaacattgactaaaacatttgaagagatttgcaacaacattttgttcttgcgagctgagatactaaacatatctacacaacatatgaagacaactgtttcgattctgacggccacaagactctcggataagtttccttttgtatgactcacagttgcggttgcgattatgaccacagtggcatctctatcttgctgaggacggtccaaagtacatacaaatgggagggttgatccttaagattgaaaggattgcggatggtatagtccagatcccatcaccacagatcagtcctgatgctactgcacctgcaaagtcctctgcatctgtcctgttgatccgttcccatacgaacaatatcacagtcccagcaaacatgtcgatggctgagtaagctcgaatgtagaatgggacagccattgccattgggatcgggatgaac

SEQ ID NO: 23159 - DNA, 1003 bp, Arabidopsis thaliana
tgagccagagccaaccaataacagagccacaaacaagacctagtcctagaaaaacaaccatgaagatggctgcaagttctgcttctgatgcatgaaccgttttgggagccatgatcatgagcacgctagtgaggtagccgttggtaagacctagcatgaacgtcaagacaaccactggcacttctgttcttaaccattttggtccacgtagacatgcagagaaaagaggataaaagagaagcctaacgatacaagcccatgtagccgattttatactttgccatagatagagtgcggtgagtgacttgcctacgaaatccgatatgttgtacacagtgatgagcaaaatgggataccaactttggagaagttgggacttcaaattctcagctataaatcctggaaatatcgataaggtaacagagtagattattagcatacccgaagctggccacttgattttcctccaaccatccatattgtcagagtcgaatgcaaaggttgatgaaacttgaggtgttgttgcattactggtagcttgtgtagcacgttacaagaaatgaagcaacataggaggatggtagagctgactatgaaataggaatgagcactggttcgcatcccctgcggtgtttgtggcagcgaacgtttagtcgcaatcctaaggagggagatgataatacctagcaaaaacagagataacctaataagcttttgacaagttcaatgactcaactcattggcttaactatatatctaagtataagctcaaagttgtgaggatttcaaatcggaattgtgaagaaaccaacactagcctatacaaaacatgtgtcattctgtttaatttacaagactaacgttttacataagaggaaactaggtttacctgaagaggcagtgctggcaaaaattgcttgcatgtactgtctaggaagctttccggctgaaccaatcaaacttcctccaaccactccatcagctaaaccacagagtacgactg

SEQ ID NO: 23160 - DNA, 2038 bp, Arabidopsis thaliana
cacagcctttcaaagttccaggctttccggcttggctttcaagtttcaattatgatatgctaaacaaaaatgttcatggattgcaggttatgtctctgttatcattgtttcgttcatttacgtctccagaactcgatttgttgcctcataggttggcttccagagcttcagcacctaggactctatcgtttgaggaaaggttcatagcggctacacatcttagaaatgcttcatcggttttagatcctctgtctgctcgtcatgtagaaccacgacttggctctgttatggcccatcagcctgttccccgcacatctctgcttcaacatagttactttagacaagacgactacacgaccccacctagagaaagtctgtcaaatttgaatcagccttattatcctacagaagctcggcaactacggttgctcggagacccttctcgctcagattctcctcggtccgaacctccgcggtcatctattcaggatcctcaactcaaatacctcaccattttatctaatattcggaggtacctatggtgaacttttatctttgcccaaatatgtcgatcatagctcactgaagacctgaagttgtagccatcagatgtttaaaatcatagctaaacctgagaactctactaggttcctccactcttcagatgtttacattgttcctatttcctggctttgcagttacttatatgtgaatgtgtaatcatagggcttggtttttttgcaatgacagatatggatctgcatcagatcgcttggcctcagaaaatgaatatcatccggcaacaccatcagagaaggaccagtttgctgtaccttattctgataataaaaattacccttcgactttatctgggagtgagcatccttctgcttctgcagctaatgggagtgtgtatagaagtgagttctataattcagcatcacaaaaggaaggggaagctagtcagcagcatgagatccctgctgggacttaccatcacccagaagcatcaacagtttccaatactacaaagtccatgcaaccagatatgcaggcagttagtgttgctcaatctcataccgagacagctggctatcctacaccggcacatggtgaagcttcacaaccacctgctggagcaattggttacacacaccaacctcaaagtgtagcgggtaattatagcacgcattcacagcctgggaatgtggaagaaagtacacaatcatatgctggaacagatagttactcacaacagcaatattatgcagctatggggcctactactcaactccatgctggtggatatattcaaaaacctcatgaaattgggtactctcagcaacctcatgatgcggcaaccgggtactctcagcaacctcatgatgcagcaaccgggtactctcagcaacctcatgatgcagcaaccgggtactctcagcaacctcatgccgcatcaaccgggtactctcagcaaacctatgctgcagcaaccgggtacactcagcaaccccatgcggcggcagccgggtacactcagcaaccccatgcggcggcaaccgggtattctcagcaaccccatgctgcagctaccgcgcacgctcagcaaccctatgctgcagcgaccgcgcacgctcagcaactccatgctgtagctactgggtatgctctgcaactccatgctgcagctaccgggtacgctcagcaaccccatgctgccgcaactgggtatgctttgcaaccacatgctcaagctgttgaatacacaatgcaaccacatgctcaagctgttggctacatgccgcaataccatgctcacgctgttgtatacagtcaacaaggtgtgacgcaaggttctgtaccaagggctcctgggacaactgattgtaatgctgcaaaccaggcatattctgcaacaggagattggaatgcagtgcatcagtcttattaccctcagacagcagatgcaaccacaacgtattatcaaacatcttaaaacgttaaagcaaagtgttgctactctggtatgcaaagagga

SEQ ID NO: 23161 - DNA, 1119 bp, Arabidopsis thaliana
caattactttaaaaggaaaaaacaaacatcttatgagatgtgtgaccggaaaactatcacctggacgtgtttctgctgtgatgggtccttctggagccgggaaaacaactttcctaacagctttgacaggcaaagcaccaggttgcatcatgactggaatgattctcgtaaacggcaaggttgaatcaattcaatcctacaagaagattataggttttgtacctcaagatgacatagtccatggaaacttaacagtggaggaaaatctttggttcagcgcaagatgcaggttagctacttttttgcttaatgaaaatcttattcaactgtatgcataatctcattggtcactgcatacaggttgcctgcagatctcccaaagccggagaaagttttagttgtggaaagagtcattgagtcacttggcctgcaacatgttcgagactctcttgtagggactgtggaaaagagaggaatatcaggaggtcagaggaaaagagtcaatgtgggtcttgaaatggtgatggaaccatcacttctgatattagatgaaccaacttcaggccttgacagttcatcttctcagttacttctcagagctttacgtcgtgaagctcttgaaggagtaaacatatgtatggttgtccaccaacccaggttcaacatatttactctcccatttgttaatactaaagagactattagatcttattctcattttatcctctctctctgcagctatactctttttcggatgtttgacgatctgatacttctagcaaaaggtggactaatatgttatcaaggaccagtcaagaaagttgaagaatacttctcaagtctcgggatcgttgtccctgaacgtgtgaatccgcctgattactacattgacatattggaaggtatactaaagccaagcacaagttcaggagttacttataagcagcttccagttagatggatgcttcataatgggtatccagttcctatggacatgcttaaaagcattgaagggatggcttcttctgcttccggtgagaactctgctcatggaggaagcgctcacgggagcgttgtaggagatgacggaacatctttcgctggagagtctggcaagat

SEQ ID NO: 23162 - DNA, 593 bp, Arabidopsis thaliana
atcaatggtgatatacccgtctgaatcatctcttcaggataggtctctcactgggattgatagaacttcctgggaaacaaaagtctagaattatatctgtgtgttttattatgagatagtaattatgtgacaagaggctaaagcagctcaccagaaatatccaagtacgcctcaggcaatataggtggaccgttgtcaatgggcttccctgaaccattgaagatgcgaccaagcatatccaaagaaacaggagttttcaaaacctatggaaaaaacattggaaaatgtgagtatattatagacactgatactttaaaacttggtagcaaaaacaaacctctcctgtaaattgcacagttgtgtacttgttgtcgattccagatgttccctcaaatacctggacaagcaaatcaaagaaatttacctcgcagtgtgttgaataataatgactatgcaagattacattgatttacaaatgcgttcaattaagcatcaaagtggagacaagaggagcagaaaactaaagaagagaggaagattcaagaaacctgaacaacagctttctctccatcaacttcgagaacttgaccacg

SEQ ID NO: 23163 - DNA, 997 bp, Arabidopsis thaliana
tttcctataattttgttggggaaaaaagagtagagagattgagattatagcatgtaaaaccgaaatcaacaactgttatgcaacacattacgtaaaagtagcaatctccttctctcttgatgcaaagagtttaaacacatagaaatctaattcaaggacctgatgacacaactgatccttctgcaatgtattctatacagttaacgcatggcgtagtgtaatacagtgctttcctcttacactatgaacaatgtattagattccaactgaaatgagtaatccaatgtatgcaactaaacatgtggagttatgtctgaaagtcaaagatgtaaatggaaaaaaaatcaagatgcatgtaaaagagagtaaaatcgtaccccccagactgaaggaggttctttaaagttttggctccactgaaaatcagacacggatgctgttaaggcgccataatcactggcggctttcattagcaactctgagaattgtttctgaaaaacaaagcagaacaaagccattaaacatagcatcttcgttttccagttgtgcaacttcagatactaaataaggtcctcaaagttgcaaatagtataaaatggcatgaatcacctgatattctgcttcaactggaatgcaatctagcgaataaggttgttggagacgagcaatgatgcgatcctgttatataaacagacaaatgatgtaataaacttcaactagagggtcacaaattgactaaaagataaggcagtcttaagacgtactcagaagctaatgtttcgaaaacatcttaaggaattttctcaattttcagaacgatagtgaataagagggatatcgcttaaagacagaaaagagagataaatgaactcgaaagatacataaaccttagtccagaaaaaaaagagagagaagattttagaggtaagtagaaaggaaaaatgatcctaccttgttttgtataacatctttcaatatttgagtaatccttgacaaa

SEQ ID NO: 23164 - DNA, 527 bp, Arabidopsis thaliana
cggtccaacagctgctacaagcatagtcttcttcgtctgattcttctttcttctcctctaccttagctgcagctccagcttgagcactaccaccacctgcatccgcagacactgccgctgcagcaacaacaaacttgctgggatcctgcatttcaaatttacaccaaagagttaacattaacacgaacaatactacaagtttcaaaaaccacataagaagaagatgtacaatttaatgactaacctttaagaattccttgaccttctctgcttgagggaaagtgtagtcagtagcaacagcaatagctaaagcattcttgtaggcattgatgaacatatgcggtgcagccgcaaggtgtagggtaagaaacagctagagccaaggaagtgaccatagagataccagaagcaaacttttcaacaagttgatcttcagtaagatcaagaacctctggactgaagactgatccattatcataaaccgactgaacaactagaccatacgagaaaggcctaatgccaagctt

SEQ ID NO: 23165 - DNA, 741 bp, Arabidopsis thaliana
attcattcattgcaatgtacgaggatgctaaatcttcttcctctctgttgtgatatatatttcatctgcagagtatagaacagtctctggtgttgctggacctcttgttatccttgagaaagttaaggtatatttaccaagaaattgttctatgtcttgttttcttgatgcattattattgatttattgggattcccagggacctaaataccaagaaatagtcaacatacatcttggggatggaactactcgacgtggtcaagttcttgaagttgatggcgagaaggctgttgttcaggtttccaactattattttcctcattcaaaataatgcaacacggccttttctttatagtactgtggtgcttgtctaggtctttgagggaacatctggaattgacaacaagtacaccaccgttcaatttacaggggaggtatgttactactctcttctcttgttgcgtgatatatttggtttactcactcacttttgccaatataggttttaaaaacccttgtctcattggatatgcttggccgtatctttaatggttcagggaagcctattgacaatggtccacctatattgccagaggttacttggatatttctggtgagcactcactttagcctcctcttgacgcattcttttcctctcactaaagaggcttctgatctttggtctcccaggaagttccacaatcctagtgagagacctatcctgaagagatgatcagactg

SEQ ID NO: 23166 - DNA, 789 bp, Arabidopsis thaliana
gggtaccagctgaagccctaggagacggaggctcaccagccggtttaagcctgcacaaatccggaaattcacaatgcaactctccatcaaaccaacgtggatttgcaagaaaacaataataaaccaaacaacaaaatctcaaaaactaaaaacgaagtctttattaccttgtccacttcctagtgagaatatcataagaatgcaccgtattggtaacaccagctaaccctaaaaccagaaccagaacaactccagatcaaatcaaaccaaacaaacaaaaaaaaaatcaaattctgaaattcaataagggaaacttactgatcccaggaacggaagaactccctccctcaatagcggtggcgccgccgaagagaataagacgaggaccgtgagtcttagtagctgcaacagccgtaagtgtatgagcgcatctaggaccaggagcatcgtcttcatcatcccaaaaggtttctagggttttatactgaggagctggatgtagccaaggcttcgagcccattggaaaccactttacgggtataaatcgatcccgcaacagccaaaatactgaaccagaagcagagaaatgagaagacgaaacctagaaagcgaatcaaagaaggaaagactacggcactggacgaaagaactaggtagaaagttcagatcgaaggagtaagaagaattcacggcggagaccggtggcgagttacgacagacggactctgtcttctccacaaagtaaaacctttctttttttttcagagactattttttgtttttgaatta

SEQ ID NO: 23167 - DNA, 740 bp, Arabidopsis thaliana
tttgcgaaagttcggtgtgctgttaatactgagacaggagaaacagtggctcgtcaaaatacttgataaggagaaggttcttaagcataagatggctgaacaggtaactctctttcctaataagataatatactagatgcatcttcagtccaaaagtatgatgtgtgtctttcctgattgtttttacagataaggagagaaatttgtactatgaagctgataaaccatccaaatgtagtgcggctgtatgaggtatatctccatttttctatttgtgtctctatttttctttggcttgctttagagctctttgtatgtgaagccaatgtgctgaagctaacttttaaggaaatgattgataccgttccaggttttggcgagcaagactaagatatatattgttctagagttcggcactggtggagagctttttgacaaaattgtgagttttccttaatccctcccaatggatttataattgttacttgatccatctattgttgtttgaacatgtatgctaagctctggtcaatcttgatagatgttcctgtttcttgcaattgaaacgttctcttatctctgatgtagatttaacctttgtagatttaacctttgcattatgtgtaaacttgtgaaggtacatgatgggcgcttgaaagaagagaatgcacggaaatattttcagcagcttattaattgcagttgattactgccatagcaggggagtgtaccaccgggac

SEQ ID NO: 23168 - DNA, 987 bp, Arabidopsis thaliana
ccagacatgttcgaatgtatttttttctttttcttttaataaaaaaaaaaacattagagagtgtgattctaacatagtgtttgacgttgttctgtgtaatctaaatcagtatgtgtaatcagaaaatgagaattgagatgtaatgaaagaatgaaagaacatatatgttagtgaattgttcttctacttctaatgtaatgttgtttacgtctagtagaagtagggaaaatttgttcatttgtttttatagtagaagcgttttcataatttgtggcgcgatgatttgatgcaggtaagagcagcaaagaagcaaactttcaactcttttgatgatttgttgcagaactctgataaacctgtacttgtagacttctatgctacttggtgagtttatgttcaggtgtacttgttatagcatcaggttttaatgtgttttttggttcttatatggttacagagttgtgttttttgcaggtgtggtccatgtcagcttatggtacctatactcaatgaagtgagtgaaacactgaaagatataattgcagttgtgaaaattgatactgagaagtacccaagtcttgctaacaaataccagattgaggctttgcccacattcatcttattcaaagacggcaaactctgggaccgtttcgtaagttttctatcacgcatgaatacggcatatctactccttgcatcaaaggctcaattgtagctacacttaaaagcttatcttgaaaagcttataagacagagctgttttctttatagcacaagtttttaacttttgttgacaagttttgcttttgggttcttgcaggagggtgccttgccagcgaaccaactcgttgagcgtattgagaattctttgcaagtgaaacagtaggtttgagaaaccaagaatacttgtcatctatgaacaatctgttgtgacataagccattgttgattgtttgctcggtataatcatctacctattcatatatg

SEQ ID NO: 23169 - DNA, 1572 bp, Arabidopsis thaliana
tattcaactcaattgtcaaggaacctggatctagtgtaaattctcttacatgagacatcacttcattagttctataataatataataaaccgatgaaaagatggggaagtaaggcaaagaattgccttgtcggagaggccagtgtccttagagtaatgctaaaccctaacatattgtcttggggcttgaagctctctaaagcaacttcaccgcttaaacattgcatccttctctccctctacattttatttgttataaaccctggtccatggacttcccagcaaatccatatttcagaaatcttaaacgtttatacgataatgggaagatcaccaatggttcctatggctgttcttgtttatgtttctctactgttctctgtttcttattcctccacgttcgtcatcacaaataactgtccctttactatatggcctggaactcttgcaggctctggcacccagccactacccaccacagggttcaggcttgatgtgggacagtctgttagaattcccacggctctaggctggtcaggtcgtatttgggctaggactggctgcaactttgatgctaacggcgcgggaaaatgtatgactggagactgcggcggaaagctggagtgtgctggtaatggcgctgtccgccgacatctcttttcgagatcacactcggtcacggttctgatgacaaagatttctatgatgtcagtctcgttgatgggtataaccttcccatagttgctctcccgacgggtggtggactggttggcgcttgtaatgctacaggatgtgttgctgatatcaatattagctgtccaaaggagcttcaagtgatgggagaggaagaggctgaaagaggaggggttgttgcatgcaagagcgcttgtgaggcctttgggttggaccagtactgttgcagcggtcagtttgctaacccgaccacatgccgaccgtctttatactcttccatcttcaagagagcttgtcccagagcttatagctatgccttcgatgatggaaccagtactttcacctgcaaggcttctgaatatgcaattatcttctgccctggcaggtatatatgatatgccctttctcattttaatttgttacaatgctctctgcaacctttcaaaaactgtctgcatattctgattgattatctttccccgtattgaatccagggtaaaaagaccagacagtctgaactcggatcctcccagcccacctcagaatcagttagggcaacctatggctcccccaactcaaaatcagtatggtcaacctatggctcctgcacctcagtatcagtacggtcaacctatggctccaccgactcaaaatcagtatggtcaacctctggctcctccgactcaaaatcaatacgatcaacctctggctcctccgactcaaaatcaatatggtcaacctatggctccaccaactccgcccccacccggaccaaacgaggattcaatgactcccccacctcagaatcagaatggggatgggcagttcatgcctcctcccactttggaccaagatccaaacgaccagtatatgaatcccc

SEQ ID NO: 23170 - DNA, 827 bp, Arabidopsis thaliana
tgcatactaaccttcaagtattccttgaccttctctgcttgagggaaggtgtactcagtggcaacagcaatagccaaggcattcttgtacgcattgatgaacatatgcggtgcagcagcaagggtagggtacgacacagcaagagccaaggaagtgaccatggagataccagaagcaaacttctccacaagttggtcttcagtaagatcaagaacctctgggctgaagactgagccattgtcatagacagactggacaacaagaccatatgagaacggcctgatgccaagcttggctagaagcgcagcttcagaagacccgaccttgtcaccttgcttgataagctcaactggggtgatgatttcgacggtacccttgttaatcttggttgggatgttaagcacctaaaacaatccaaaacacatacatgttcaattaacttcaaattgtcgtcaaacgaatcaaatcaaacattaaatgtaagtttaaaacaaacctggaagaaagatgtttgggatgggtcgagaccagtgttgccaggttggacaaccacatcaattggagccaccaaacccacacgagcaggggcaccaacctgattcataataagaaaagttccattacaatcgaatcacattgaaaaagtatcaacattttaacccaatcatattgcaaaagcatcaacatattacacaatccaatcacgttgagaaagcaacaacattatacataagtcaatcgcattgagaaagcatcaactttttacacaattgatgagctctacttgggatgactgtaatctcataggagcacaggcaatataaaca

SEQ ID NO: 23171 - DNA, 587 bp, Arabidopsis thaliana
ggttatctttgtgctacacctcattgtgttcgggtaatattcttcataccttcgcggatggttacattctattgtacttagtttcggaactttgcaccaacacaacctataatttcttgtttttgtgttcaggcgccacaaggagaagaggcgcgtggtctagagcgatcgacattcgcgttgttcatgcaacctgactggtattattctgaaactaagataagtagataacttttgaaatgatgataacattgataaatttgtgacgattttttcgttatacaaaagttaatagcaacgaaaaatgtgaatgtggttgttttagggaccagaagcttacattcccaaaagaagttacaatacatgaagagttatgtctctctgatgaagtcttgacgtttggagaatatacagagaaactgctcaacaaatactatgatacaaaaccttagtagccttttaagttatatgtgtaaatgacgattccattggtgtaagaaaaatctcaccaaattagtacgttagaagtgaaatttggtttcagtttaaccatatagaaattacagaagtacaattattggtttgga

SEQ ID NO: 23172 - DNA, 912 bp, Arabidopsis thaliana
ctaaagcgtattgctgtacctgctgaacaatgaaaaattcaaccgcgaatacaccgaagcctataccaccgccagcctgatcgtgcgtgaggattacggctttgaagatggcctgttcaccggctacgacgcggaaaaacgcaagtacgataaatcctcctggacttatgaactggacgaaaacggttcgcaaacgcgataccacgctgcaacatccgcgctgcgtgtggaacttgctgaaacagcacgtttcccgctacacgccagatgtggttgaaaacatctgtggtacgccaaaagacgcgttcctgaaagtctgcgaatacatcgcagaaaccagtgctcacgataaaactgcctcgttcctgtatgccctcggctggacgcaacactccgttggtgcgcaaaacattcgtacgatggcgatgatccagctgctgctcggcaatatggggatggcaggcggcggcgttaacgccctgcgcggtcactccaatattcaggggctgacggacctggggctgctgtcgcagagcctgccaggttacatgacgctgccaagcgagaagcagaccgatctgcaaacctaccttaccgccaacacgccaaaaccgctgctggaaggccaggtaaactactggggcaactacccgaaattcttcgtctctatgatgaaggccttctttggtgataaagcgacggcggaaaatagctggggctttgactggttgccgaagtgggataaaggctacgacgtcctgcaatacttcgagatgatgaaagagggcaaggtcaatggctatatctgccagggctttaaccctgttgcctcattcccgaacaaaaacaaagtgatcggttgtctgtcgaaactgaagttcctcgtcaccatcgacccactgaacactttag

SEQ ID NO: 23173 - DNA, 1280 bp, Arabidopsis thaliana
cacattgcattatccaagtaatccatttcaccggaagacatgatgcctctagattatcctccagaaaatcctatctcattctaagctgtctccaaatcaagcttcaagagcatccagcccgtgagccctgtctttgtctcatcgaatgaacagcttcttgaacaaccactgtattataagtccttaatctgcgtgctataaagctagactgcgctgatccaatcagttttagcatcactttctttaatctcatcaccatggccttagtgatcactttaaacaactcattacataggcttatcggcctaaactgtgttatcttctccggctttcccactttgggtatcaacactagtaaggcgtaatgcatctcgtctacggagaccgatgtctgaaagaagtccaacacaaacttgaccaccgaaggcttatcggcctaaactgtgttatcttctcataccgcggacagctccttccacttatgcagctgagaattgtttgttcaactcccttaaatcatcccttgatagtctcacaaatccttcattaggcaacttatccaccacctcatctatgtctgccataaagtaaaagcgtttgtaatagtctactgcaagcttgtcaaggtcatgtgcattcacaacccatctatcctcattatcttttaacgcttctattcgattcctgcatctcctaataatggtagaagtatgaaaatacttcgtgttccgatcacccagctcaacccacttctctctcgatttctggaaccagagcacttcttcctactcaaggaccaaatcaaattccctcattagcaagttttgtttttccaacagagtatctgtctaattcacttctaacaggtcttggacaaccttgatttcctactgtaacatatcttttctcttttgcacatctccaaaaacatcacgattccactgcttcagctttacccgtaagattcctagggcctctgggttctcaactcaccctgctaagacgacaccaacaaatctttaaaactggtatgtgttagccaggtcgcctcaaatctgaaaggatgtcaacttggatttcctcttgtcactggacataattgcacataaagaggtgcgtgatctgacggggagaaagggagatgattaactactgcttcctgccatcttaatcgcaaatgggctgagcatagaactctatccaacctctgagcaatgtaagtctgttctgctcgacctcttctccatgtgtatttgtttcgtttgaatcccatatcgaca

SEQ ID NO: 23174 - DNA, 418 bp, Arabidopsis thaliana
gacaagtgcttgcctttctaaactttacttcggactgcgaatagaggttgccaagccgctttcccccagttcccgccctacctttcggcacctccagttctcgcaaaactcgaattcggagacagactctttctctatatctctgtctcggtaagtgcggtacgcagcgtcttactacgagtcgaacgaagtgacgagcgacgtatttcccacgttaggaaatccttttctgacgtcgaaacaagatactggatgatggagaagctggctttagcgatcgtaactttagcttggaaactctgggcatattttcagtctgatggaatggtggttttaagatatgtgtgaattcggggcattcttgagaggtcgtgtcagttaggacgggtagttaaatgggcgattgagttgagtgaat

SEQ ID NO: 23175 - DNA, 834 bp, Arabidopsis thaliana
ttcattgctgcagcgtggattctcttgactctgcatatatctgctcaggctcctacactatatgacaaatctggtcttgtatgaagcagatatctaaggcagcctatattccttctgtaaactgttgcatctacttccttttcagtttcaacttttgatggcttgtagcttggatccattggtgtatggactaagttacagtctttcattccagtttcttccagaatcttgattgcataacgactttgattcaaagttatgcccttactgtgttgaatcacttctataccgagatagtatgatagtagaccaaggtcactcatctcaaatttggatgacatttctttcttgaatttgagaatgagttccaagcttgttcctgtgacgaataaatcatcaacgtatacagctactatcataacatggttgctaacctgttttcgatacacagatggctcctttgaacacttgttatatccaagttccatgagaatattattcagtttgttattccatgcccttggtgcttgtctcagtccatacaaggctttgttgagtctatacactttctcttctcttccctgtttctcgaatccctctagctgacagacataaactgtttctttgagttcaccatgcaaaaaggctgttttgacatctaagtgatgaatctcccatccgtgtgatgcagcaaggtcaataagaagtctgatagtttcaattcgtgctactggggcaaagacttcttcaaagtcaactccatattgttgtacataccctttggcaacaagtcgagctttatgtttgttaaacttccatctgaatccttttgag

SEQ ID NO: 23176 - DNA, 715 bp, Arabidopsis thaliana columbia
  unsure (1)..(715): unsure at all n locations
gttctgatcagacaacagggtgatcaacgtaagcaaattcttggattcttttttgatggtccaaattggattgaagttcgtacacacttacacgacctcattgttatttatcggttttcagttagtaatccttaaagattgcagaaaagggaagaagtccaggacaaatgctactctggcaggcttcctgtttaagcttagcacattatttattttcgcattctagaggtaagcttgtttccttaggtgcccttttaagtttcagtacttgcaaatgttttcgatctcacctcattaccgtcgttacaggtattaagtagtcttgctcactgaagaagtcaaaaaagggggaaaggagaatggaagtttcagggtttgtgcttctgttatctttaaccctctcatcctatgtatatagcccacaacaagcttgatggcataaactatatgaatagtttcaccccggaaacaagggttttcgcggtaaactggtaggaataagtttggtgtacaaagaaagttcatatatatataaacacatacataaatgcatatagaatggtggaatcaacatctgattcttttgggtggtaaaagtagtcttcttactacacactctcttaaggcatatgagtgttggtaatattactaggtagatcncacgtcctcttgagtcaagtcctctgcattgtaagtaaaaaattaatgactatgg

SEQ ID NO: 23177 - DNA, 547 bp, Arabidopsis thaliana columbia
tttggttaaattaccaaaggctcatggggtaagtgcatcagctgaaattatggctgaagagattttagttgttaaggaagttgtcaagactaagttagagactacaaggaaaaagaacaaggtccctgctgataaacgtcggagattcaaagttttcaaatacggtgatgatgtgatggtgttcctccgtaaagagagatttccagttggtactacaacaagctgaagcctcgcaagtatggcatgttcaagttgtcgcggaagatcaatgataatgcttatattgtggctctctcggaatcgatgaacatttccaatatcttcaatgtagctgacattcatggctcttagaccgacggggacaagttctttagagaggagagatttagcagttttacatttcttttgataattcctatttcaagttttttattttatgttttggtttgttctctatatagagaccctaagttatttgttagacacgttttttacattctaattaataaaagtagagagtttttctaatgtagtggattctagagtt

SEQ ID NO: 23178 - DNA, 995 bp, Arabidopsis thaliana columbia
gaatctttttcgggtagaatattgaaatgaaaaaaaaaaggacttatcaacactactcttgaatgagcgagttaaattttgcgtcctacgattgttcttttactcgcactcttaaaagaacttaagaatattaattgaaattcttatttgtcatgaaacttctataaacaaaagaacaaaaaaaaagaaaaaaaaaagaaagaaggcatggtagccaaataaacatgtaaattaacagtaaaagtgtacacagagaaacatgtatcaacacaaaagaatgtgtgaaaggaagagtaaaaggttacatcaaatttttgtacagtgaagctatcagttggtgataaaagtttcttttttcaaaaggcaagaagtcactttctttttcaactatcaacatttggaccccatgctttagctttggttccatttcataccatgttagacttgtccttcttattgtcgaacccaaagagcgagcagttctgaaacgcatcaaggctggttgctatcagacggctcaatcccccgaggctctcactaaggatcaaatcatctgtatactttgacgatctaatgtctaaatccagtggtcctaacgagtcgggctgcaaagaggaaacatgtgttgttgttgaatatatatgacttttttacattggggaaatatatgagatttctaaatttacccagtatacatccgcaagtccacaaggggtcttccctggagaatccatcgtatgagggtctgctggaccctcttccattggatctccatcgtcatgagggttataagatccctcatcgccggatgaagcctaagagaaagtattgaatcagatggtttagttttgtaaacaattgagggaagtggaatttgaggctgatatagttactccaccaactgtgaaggctctccatttactctgccaacacctttaggagaagcacactagccagctcggtggaatttgcgaaacgatttttttggaaagaga

SEQ ID NO: 23179 - DNA, 669 bp, Arabidopsis thaliana columbia
ctcttttctcgcctcatccaaccactcttttgcttgctcaagcttagcccaaaagcaagtatcttgcgttgtgctcgcgtatctgcttctcacacactcctcaggcactttaactcctttctgccatttatcaatcacctcataccttttaggtctattcccctccaagtaatgcccgccagtctttatatctctgtttttgtagaaattcgcaatgtcgagtggctcggctaagagttgataaaattgagatgcgtaaatccatttctttcctaaatgaaaatcaaaaggtaactcattcgtctccaccattttaatcactgtgtcccaaaacttagctagtcttatgcgactcatgttcactttaaagtctctcttcaacgaatatcgtttgaagaaatcgtagtaacctagctgctcttctgatgcatcgcaacgatctttgtaccattgaatctcgagtcttgctggcaagacactagcaagctcattggctaactcagctgagtctcagaataggagccgaacaattcttgtagctgtttctatacattctttgactaaaacgccacttgtgtcatcgttagagaaacctagagcttcaacgcgtaacgcaacaccagcttggtagctattgtcgggatactcccgggatcctctgagcctgca

SEQ ID NO: 23180 - DNA, 970 bp, Arabidopsis thaliana
catactcttgttcttcggagtcataacttgctacacaggtgttctcatgaaaagatgtctagaaagttcccctggattcaaacttaccccgatatcggtcaagccgcctttggaatcaccggtcgcttcatcatctctgtaagtttttgatcaatcaaactcaaatatcaaaattttctgtttcttgaaaatgaaactttggttcatgaattgcagattcttctatacgtggagttgtacgtaagtttcatcttagttattgttaaatattcttgtctaaattcttccactgatagttgacaatttattgttaatcgtaactctgtttttcaaaaataggcagcttgtgtggaatacataatcatgatgagcgataacttatcagggctattcccaaacgtttcattgagcattgcttcagggatatctttagattctcctcagatctttgcaatcttaaccactcttcttgttcttccaactgtctggcttaaagatcttagcttgctttcttacctttcaggtttgaaaattttcccactgaaaactctgattatctcctcattggctatatataatgggccgttcttgtggtcttaattatctagttggaggagtcttggcgtcaatcttactcggtatctgcctcttctgggtcggtgcagtcgatggaatagggtttcatgcaacaggacgagttttcgatttaagtaacttacctgtcactatagggatttttggatttggttactcgggtcattcggtttttcccaatatctattcttcaatgaaagatccttcaaggtttcctcttgtcttagttatctggtaagtccaagaaacctatcctttacttgtttcacaaggaaccctaatagacatactcatcatccttctttcttatgcagctttagtttctgcacggtcttgtacatagctgttgcggtctgcggctacaccatgtttggcg

SEQ ID NO: 23181 - DNA, 738 bp, Arabidopsis thaliana
gtccattgctcctgttaagttggtctcccctactctaaaaggagcttgggcaaagcagctaaagttcacctcgtcatcggcctctcagcaagatgttggtggagcaccgatgcaatctcatcttgaagcaactaaggaggataatgttcgcttcccttgggctgcaaaaatggatccagcggcaaggaacctttacagggcaacctcgccggaattcatggaagacggaattccaaaggtaacgattccaagtcatgtcttcttgcaaggtcttgtgaatcaaaaggaatatgtcttaggccagttctatagatgtagtcctcctcctggtggtttgattcatgcggtagtcaataaaatttagggtagaaagtgtagaatctttatccgtaaattaggtgactcaaaatttctttttcacatcccggatgcttcaactagagcttgggttcttcagaggggcttatggcatgttgatgattgtcttatgtttgtagcgccttggtctactgtaaatacatttgatcttcctgaaatatcaactattcctgtctgggtaaccttaaaaatatcccaaaccggttgtactcaattctaggaattagccatattgcatcaggtttaggtgctcctatggctacttacaaacctagacttgacccttccctaatgagtgaggcaatatcttggtggaagtggagttgagtaaagctttcctccaagaattgctgcagttga

SEQ ID NO: 23182 - DNA, 591 bp, Arabidopsis thaliana
gtcgtaattcaatgaagaatctcaaaatcaatcctttaaacccggtttttaacccggttaattcagctttctctccccgtaaaccggagatcctctctccaagcatcttagatttcccatctctcgttctcagcccggttacgcctcttatacccgacccgtttgatcgatccgggtcatcaaaccaaagccccaacgagcttgctgcggaggagaaagcaatgaaagagagaggcttttatttgcatccatctccggcaacaactccgatggatccagagcctcgacttcttcctctattcccggtgacttctcctagagtctcaggttcttcatcagcttctacttcttgaaaaaaagacctaatttttcttttttactcaaatttttattatccttttgtgatcttaattatatattataattggggaattgagatgaatcatgttgagaattatacgagaaaatttgtaatgttgagatgtttgctaaatccaattcgcgatttcaattgtattaatggtttaatattgatgagtttattctgcagaatttgataaattagattagtactgataataatcagtgagt

SEQ ID NO: 23183 - DNA, 1051 bp, Arabidopsis thaliana
atccccacgagtaagatacaacaccagaattaaataaaacttgcaagtcagaaaaccccaacttcattataaaggcgaatcaaagatcctagtcccgttttatacagttgcaattaccaaaacaaatcagacccaatcaacaattcctagttagagaagcaatgactaaatcaacacccagaactatacaaaagcatacaagtacaatgggacattaaatcaattaggcgtgcacacacatacaatagaattacctcgggaacgtgtttcatgaccggagcttggtacagatctgccgggtcgcaggagtgccatttgcggtaacgatcggcgaactcaagctccatcaggtggccgatgacggaggtcattagcatacgacacggctgcccattgatggcgtaatcgaactcgaagattttgttgtaccgagacctaccctcccgagtccggaaagttccacgggatagaatccccgccactgacttcgccacggacggcttctccgccacgttcaacactgtcacggggccaccgcctcgtcgcgacatcgccggtaaagaaaaccctaacggttagtaattacgtttttttgttttcagtaggcgaattttcccgctcttatgatatagcctagctactattggtggtgtcactgagacactgaccgaacagttgtggaaatttgtgcctttaatgggcttcaataattcggttaaagttgatctcacaattgaaattgaatcaaaaccggactcggatccggttagcttcttatgatatatgactatatgataagtatgtttaaatcgtatagaatatagatcttgagcttaatgagattaattcaatttctttagaacacttgcaaaataaataaatagaacaaaataatatttttcctttatgcactatagagttagtccgataggataagggcccaagaaggcctcattgataatttacaatcgagagagagagcgataaagtcaactcgttgactaaaatgaaagatttcccgatagcaatctcccttctgttcgctctacta

SEQ ID NO: 23184 - DNA, 965 bp, Arabidopsis thaliana
tacctttatgttttactttttctctttaccaagtccaaacacaacgttatgactgattatggtctttatatagttccccatacatttatttatttattaattctttttttgcagtcttcatatgcaaatcctaaccagtccctctctaatcgaagaaacaaggatgttgatgaaccatgggattccaaattacatctttggaaacctctaaattttcttgtggatgtggcaaacggaacaaaggacccaaaatctgagcttggaaacgcatcccacaatgatgttcaggggagtaaaaccaaaacaaaggatcataaaagaaagtgtaaactcgaggaagagatcagcaataacggtgatcctacaacatcagaaactgctacacttaaacgaacgcgtcggactcgtcgcaaaaggtcatctacttttggtgattctagaattccactgttaccaggtgcagcaagcctaaaacaggagaggagaaacggtcatgtttggtctcacttgtagcgtcaagtaatcagtgagattcctgttctgtatctgagactctgagtacttctgatattcaatattttctgtgtcttttcatttctatctcttagtgacacggctttactggtttcagggaaggagaagcatcattgcctcagattccagcaaactacttgagaataaggtaagttgttctttttgctttgctctgtttcttgtcactaagtttttatatgtcaactgtgaagtctgtgatcaaatattacttattattgcattgatggctttgaattcgatttcgcagttgttttacccgagtttccatgtcatgtttgttttctgtggtatacgtttcttgataaagccttcttcttttttggcccatcacacctaatccttgactgggaggtgtctattttcttgtttgggagaattatattgtgccagagttgatcccctgtctcatt

SEQ ID NO: 23185 - DNA, 806 bp, Arabidopsis thaliana
caaggcaataccaggcatgtaatagtccgaatcagtgacgtactcagattcttcctcgacctctgcatcctattgtatcccaccatcggctgctaagcgaagtaaagcagcgtcctcttgtgatcgtccaagatacttctccttaatccttcttcttctgtattccaaggcatcttcatcatcatcttcgtctgaattctctagattcctcgattcttcagtcttccgcagatataatctcagcctgtctaatacgccgatgatcagctctaacttcgtcacggttttcaactttagtctgagctaaacgccgcagccttggatcatccttcctagcaacacccaaatcatcattctttggaaaagctctatccaaaacagaaaacttctgcatcctaacatcatcatcttcttcagcttcctcagcccactccggagcttttcctggccaataccttcttactttagtctgtccaataccaccttttagtttctcccttacagcaattgcagattcactcactcccgctgtgaccgacatatttgcacttgcaagtaaccaaactcaatcaaattagctatctgtctctgcagcacaaaataatacagggattagattcaagctttgcatcattagtattcaccagaaaaggaaaggaaaagagctacttcccctaatcgatcctcaatagctaaaatcttaaagagacaacaacaaaatgcattatgtacaatgcatatcattgatgtgtgtgtgggtgagtatatcacataaacacaccaacatgaacaatggaggctagaga

SEQ ID NO: 23186 - DNA, 761 bp, Arabidopsis thaliana
gataatcacgggtgctggtcatacaagtgctattgattggtgggcactgggtataatctgccactatctttaccttattttgatcacaaactgttattaatatgctcatctccttttatgtgtgtttgttgtaggtatcttgttgtatgagatgctttatggtcgcacacctttcaggggtaagaataggcaaaagacatttgccaacatcttgcacaaagatctcactttccccagcagtatccctgtgagctaccttgtaacaacaacctgtgtgtctttcccaaagtaaaaaaaatactaatctaaccatatgtgtttgtgcaggtgagtcttgtaggtagacagttgatcaacacgttgttaaatagagatccgagcagtcggttaggatccaaaggtggggcaaatgagataaagcagcatgctttctttcgcgggatcaattggcctctcatacgaggcatggtaggactaataatcgttatttttatatcaatcagccttttccgtgtttgttgttggctgatataatagagtgattgcatacagagtcctccaccactggatgcaccgttgagcataatcgaaaaagatccgaatgccaaagatataaagtgggaagatgatggagtgcttgtgaattctacggacttggacattgacctcttctaatcctattcttcctctctctgcctttgattccaaattatgcaaactcttcttctcaataaaagccaaggtgttgttgtacttgtagt

SEQ ID NO: 23187 - DNA, 860 bp, Arabidopsis thaliana
tcgaaaccctaagggagattaaaaacagaaaaagacgcaagtatcataccagtcggttaagttgggttatctcagaggcttgtttagtgcagaactcttccagagccatttccctcctgatagaacctgctagaaccttttctactgcctgtaaagtgtaaaactcgatcagttggaggaaccaattatagaaatgtggaaacaaaataagactgtgaataactatctaaatctatgttagaaaaaagtcacagttcttactttgggaacttgattcttggatttttctgccacttccgagttgtcaacaggtactaactgaagatttggcatgtcacccatttgctgggcatcaaattgttctctgcatttgcatttacagcacagaaactcttttgtattctcctctgatattgcatcagctccgggaatggtctgcacacctgcatcagccttacttatagaggtcgaaggctcactatctggagctttgaaggaaaacctgtacgtcgatcgtctttgagctgtactctggcaatacgactcaagaagtttaattcctttgtggaggctagatgccaaccgctcagtccgtacaggaaaaactttgctcttctgcgtagacaaagcactagaacagttattcatctttttggatgtagccggagatgggtccgcagcttctgtaactaaattttctccttcactatccttctgagatgctgttgacaattctgatgtcttcaagcttttcctgctatttctaatcgtaggagagacgctcagtgtgggagattttaatacaggagtcgcaccaactggatctatacaaagactgggagatgcagaatttactaagt

SEQ ID NO: 23188 - DNA, 593 bp, Arabidopsis thaliana
gatctaacaacagggaattttcgggaaatgcaaaaagatggaagactctctatagatctgcatctatctatatttgaattatctatacatatgcaagcaagggaggaaaatgaacttttttttgtttgtctagtctaatttgaacttcccccccaaaaaaattcactttttagcttgttgatagaggtttactgagtagtaaacaagaatatcgataaaaaaaaatgatttgaaagaaaaatgcatttttctgggttttcgtttaattctgataaactaaccgttctattttatttaatttgtgttcaaaggaaaaaaagcatggagctgaaataactcgctcagaacaccttttaaaagattacgtggtacaattgcatccaataagcccttacgtaataaagattcagccgcttgtgaaccttcaggcacggcttttttcaatgtttgttcaattactcttttacccgcaaatgcaatataggcatagggttcggcaataatgatatccccaacataccaaaactagctgtcactccaccggtagtaggagatgtagaattgatatatagaatacattttacttgattgat

SEQ ID NO: 23189 - DNA, 1107 bp, Arabidopsis thaliana
acaggataacagacagaaatgagaccatcttttttttttattgtagtcttagctttgattttcattgccaaaaccttcataagaccgattcgaaggaacgaaagcagaaggttgtttagttacagcagtcaagatctctccatagcccacaactccaacaagaacatcatctgaatcagcctctgtaacccaaacatgagtagccctgtgagacagcatctgagccataacagcagctaatgagctcgatgttttgcaagttagcggcgcacttcttcctctgtacatgctcctaccgatgctcaatcttgtcgggcttgtcggattaaaaccgatgctcctgctgctgaacttcttggcatttgttgctgttccgttctgttctcctcctggaaatgaagtttggaggaagtcgctgaatgatcttgatgacatgttgtcctcaactcccatcacaaattgtcctgcatagagattagctagagcccaagctgcagctagataatcacatttccagagctttgaagctgagatttctcctattatcttgaactgttgttcgttttcggtttgttccaacacggcgatcgcactagggtcacacagtggcctacgagtggcttcaatggctggaagagaggcttcaatgaagttatagttttgattgatgattcccagagtggagattgatgtgagtggtaaaggagctaatgctccaaggacacctataaggaagcggatcacgtcttccctagagagacaacaaaacttgtcccggcttgaagtcatggacgtagtaggcctgttggtggagtcagcagagagaccactgctactactagagttttcactgttcttcagccattttccattgtaaagaatggagaacctcttgctcatacctctccaaacaacgctttttggaaccagaagtcgtctcactccttgtgtcatcatctccaaagcatctatcaaccttgcattatatttgataaaagaaaatcatcatcataataaaaactggtatttaaacaaggaaggttattccatcaacagacacatcaaattcactgcaacaaatgaatcatttaatcaataacttttggg

SEQ ID NO: 23190 - DNA, 1216 bp, Arabidopsis thaliana
tagcatttaaggctaacattcggttaaattaataataatgagtaatattttaattttaattacagaagtaagataaaatcttgatcaaattacattcacttattttaattaaattttaagagaagaagaaggaaaaaaaacaaagaaaatcgttttggtgggagagcttcgcttagcgatttgctccactctccactgaacgacgccgtctgcttcttcttcatcaaacggctccgttactttagatatcacttccgttcatttttcccaaacggtgtctttttgtaaagcaaacgtcccagtgattgccatgtggatccccaaaaacgccacgtgtcgtcttccatgccagtaatacgattctgcccgctgcgtcatattaccggatcttcagaatccgaattattatgcccacccatttaccgggtcggattcagtcactatccaattatgtgatcaaataatccatagccttttcaacgaagcccgacgattcgacccgttatctgcgggtagatccgaattagaatcttgaaattccctgggaatctccacaatgataccgactaaatcaatcggttctctctcacaagcttccatcggaaacctcaccggcgaaccagaggaggaagacggcgtcgaggattcggattcgtccgatgaagaggaacttccggcttcggtatcctcaattggtttaaccgatggaaacacagcagcaaccggttcgggttcggtaaccggctgtgcgggttgaaccggagctctacaaagaggacaacttgatctggaccggaaccacgtgtctatacaatcgacatggaacacgtggccgcatttgggaaggacacgtccttcgtcgtcttcttcgaattccgacaagcaaacagagcattcctcaagcggagattcatgggttttaacggagtagacgaagatagggatcttctcgagcaccgtcggatcaagaggagagagggaggatgatgattgggtggggtctctagcggcggcgagtgatcggaggtgagcactgatacggcggcgaatacggcggttttgacggcggaataaccatctagcgtagctgtggaaacagaggattaaaatgacggcgacgaagaggatgatgacggaagcaagcatgattttgccgtttagagagtaacgtgacgatccatggttcatgtttccccataaagtcttgctactgtca

SEQ ID NO: 23191 - DNA, 897 bp, Arabidopsis thaliana
catatccggctttgtcaaccacatccaccgtgtgggaagaaccatacttgaactctgtttcatatccccataaataaataaattaaaacctaagtaaagagttctccatacctaggaagattataagacaagagtcccaaattatctggttaccaaatctgagatttcttgtagaataagttatctcaatttcaacatggtagaaatttataaagaagtaaaacaagcaaatcaaaaaattgtttcttcttctttctttttactgtttctaactttctatatttaagaacctgagaccaaataaacaaaaaaaaaatcacacatttttttttttttggtattacgtactaaagcaaacttaatttaatttgaaccaccgaaaccaatattaaactacacttgggttagattaggttactacactttttgatgtatagcttgaatctatctgaaaattataaaagttataagtaatgtggttcggatgatgatttacctagaatgtcaccaaccctgaaagtctttccggtagcccaacctgagtagtccacaccagtggtccattcaatagtgtaagtcacagctactgcgcccgggacaatggtcagaactaggagaagagcagttgcggcggctacagccatcttggacaaaccattcattgccattttttgtttactgtagaagagagatattcttgtaaagattgtgaagagaagaaatggttatggtgtcattatataacaaagagatgtgagaaggactttaggaattaagtaaatggaatgtatgaaaaagtcgccgcctcgccaactcattcaacaacttcatcctcactttttatttttcgttttacttttttattcatttcttttgttttctaagacattgtcatga

SEQ ID NO: 23192 - DNA, 640 bp, Arabidopsis thaliana
cctgcagcaatgtataccatagaatttcagaaaagagggttgccacatgctcatattctactcttcatggatccgagttataaattccccactacagaagatattgataaaattatatcagctgaaatccctgacaaagaagaggaaccagaactatatcaaaatgtcaaggacatgatgattcatggaccatgtggtgctgtgcactaaattctccgtgtatggttaatagaaaatgctctaaatactttccgaagccataccgtgaggcaactactattgataaagaagggtttccagtttacagaagaagaacatcatcaagatacattgagaagaacggatttaaatgtgataacagatatgttattccatacaacaagcaccttttgttacgctacagagcacacattaacgtggagtggtgtaccagtcaggttccggaaggtatttgtttaaatatgttcacaaaggacctgacaaaataactgttgttgttgaacacctcagcaagacagagtgggtaatgattcagtacatgttgaggatctataaccaagaacagcaaaaaatgaagtcaagactattcgattcaggtaaatttgtaatctatattagaacgatcccactgtgtgtagaa

SEQ ID NO: 23193 - DNA, 1198 bp, Arabidopsis thaliana
taaaacaatcgtgtcagcaagcagaagacgcgttgactcaaggtatggagaatctgcaacacacccttgcggactgcgtctgcagcgggacaactcggtgaaggaagttacattcctcaggtgaattctgctatggatagattagaagctttggtcagtttcgtaaatcaggtaaaatatatatattcaaactcatttgaaaatactatagtatcagtttcttgattttgtttgttcattcttaggctgatcacttgagacatgaaacattgcaacaaatgtatcggatattgacaacgcgacaagcggctcgaggattattagctcttggtgagtattttcaacggcttagagccttgagctcaagttgggcaactcgacatcgtgaaccaacgtaggtttgagttattttgtaacaaccaaatgaagaaaatggaaagacctcaaaaaatgaagaatgagtgcatctgaaaacagaggactactctgaataaatagaggggttgctgctgatatttatttttactctgcggcggaattagaaaatttgaaaaacatcatgtattgataagttgtaaatatcagaaaaaggtgggggtgcaaaaatttgtactttttagcttttgaaagaggcaagtttttcgaatgtttgtttgatttgtaaacaatttcagaattatataaacttggttccaaatcccctgtaataatgtcgagctatctgcaatttgaaaactataggggctttacttaattttacgttttgtgtgacacctatttgattttttttgatacgtttggaccagtttcgtaattagaggtaaataaaggggcaaatagtaagatataagaaaagccttatctcatagagtttcttctcttcattatcctcaaaatcgctcgagagtgagaactctgctcttcttcttcttcctccgccatagctacaatgcttagtctctcaatcgctacgccggggacgcggcagatttttcgtagaggaactgcttcggcgacttcaacttcgtcttcattccatggtgtcagaatccagcaccaggtttctgctcgcgtccccgcggcggcgacgatatcgtcgtcgtctcctaaaccgtcggtggtgatgatgtcgaaaagagaggcggaattgaaagagataagatcgaagacgacggagcagttcaagaggaggttgttg

SEQ ID NO: 23194 - DNA, 860 bp, Arabidopsis thaliana
taactcctaagcaaccagtccaatttgatggcacaagaaacgacgggcttaatttgacaccgtgtcgcgcagcggttactctagttgctatctgaagcaaagaactaacaggtttagttacatgtatacagcaaaggaacctggagttagttcttttaatttgcttcggcttacctctgagacacctaagatggaaaggaacccgccaaaaagaggaactacattagcaatgtagtcatcaaaagtggcgtcgggtttcaggaaaaacccactcataagagctatggttccaaaggttgtaacacataaagcaattgcactaacatatccccaaggagtgcttaatctagttgattcaaactgtagatcaatttccagccttcggctgcaccatacacacctttaaaagcacaaataacaaacaattcacaattagcttaaatcctgagatcaaagaacatcaaagttaaagagttttcaaagctttcttctacctgctttgtgatctcattggacctttcttccataaaccacacaacaacatcacgcccagctgcttcagatagcttagcttcaagcttaggtgtgacttcatcaatgggttttctcaggttcccaatgaagattcctccatctccaaaccggcgaacatccgtagcgaaaaatgtatcgaacccaaaacagctcttcaactgtcccatcatcacaaaccactttcaaaaacaatgcattccaacaaaacaaagaagaatcatagcataagagaaatgaattcatttttttaccttgttgagatcaagagccttgaaagtctcttctgctttctcaagcctttctttctctttagtcaaactatcacg

SEQ ID NO: 23195 - DNA, 565 bp, Arabidopsis thaliana
ttttggtgtgaagtcttgtgagtctccatcgtttaatctttgccaaagtgttctctaccttcaacattcgtgcttccgtcttcaaagctagttcctttattgcaagctttctctgtttcaatctctcatcatcttcttccttctcagcagctactccattagaagacttgttttcattattcttttgctctgtttcttcttgtgttgttgctactgtctcatctccataagcaagcttttgaggaaggcctgaaacattgttatccgccacaagtctacttctttctccttcagtattctctatgtcatcagacttctttctagaattgatcctctgagcaatggtcatgttatcatcatcttctgtctcagcactctcatcatcttccgtgtcagcactctcatcatcttccgtgtcagcactctcgtcatcttctgtctcagcagcactctcatcatcctcacgagctcgcttgcgtctcttgtttgtcgaatgcttggctttcttcatttcatcgtccaacttctgatagacttggctcaatggtactatcttaaggggtat

SEQ ID NO: 23196 - DNA, 1056 bp, Arabidopsis thaliana
ggagtaggatatttggtgagagcattaatgtatgcacaataagaagaagagagattatcagtagaaaagacctgtgatattggatgttctgtagactctttcacagattctttcactgaatagcattgatagtcttgcaaataaccaggaggtctcgaaactcgtcgccgtgatgtatcttctgtattaggtattactgactcagagttagattccccctgtctcattgtagacgaatattccccctcagttctagtccctgaagattctcctggatcagcaacacgagtacttatctgaggaaagaaccctgtgacatcaacttcgtcactagcttgggaattctgaaaaagaaatatgtcttcaaagaatttaacatttctggaaatgaacacaacattactttcaatgtccatcagtttatatcctttgtaacctgctggataacccaagaagacacaagctttagccctatcttcaaatttagttcgttgcttaggagaagtactcgcataacacaagcagccaaaagttctcaaatcagtgtactctggtgttgtattagtgagcttctcaaaaggagtcttattttccaacaatggtgatggcgtgcgattgatcaagaacacagctgtaagaatacaatccccccacagagacaacggtaggttggactgaaaaagaagagctcgtgcaacattcagtatatgctggtgtttcctctcaaccacggagttctgctctggtgtttcaggacaggagtggtaaggaatgatgcccagccgtcgataaagctcagtaaacttcaactccggagcattatctgatctcacacaacgaactcgcttatcaaactgagtctctaccatttgcagaaattctggaaacacagtcagaacatcactcttcaatctcagcaaataaacccaggtgacacgagtatgatcatccactattgtcaagaagtatctgaatcctctactgttggctctgagaatggacccaaacatcaatgtgtacaagtccaaagatgcagaacaaagattgtttctatta

SEQ ID NO: 23197 - DNA, 1233 bp, Arabidopsis thaliana
aatgtttgaaagataatggaacttgtaagcagggttcctcttcatcggtctcttccattcgccacatccgggtgctgcctcacacttggtgttggaaaccttaggagcctcccactcaccatcttcctcgtcatcccaatcttctggcttgcttgcctcggggtcttcaacctctacaggctcatcatccaaccatccttcgggtttctcagcttcctcatcttcaatctccatgggtgcatcctcatcccagtcatcaggcttcacagcattaggatcaggaatcttggctctctcatcccagtcttctggcttcttgtcctctggatcagggatggtcttggaaggaatcaacggaggctcaaagtcttcagcagacagtaaattacgcttcttcttctcctcaccatcgaccaaaatcctcacctcattatcagatttcaagaccgcagtgtagacatgagaaagcatgtcaaacggaacagaaggagggaacttgagatggtgctcaacaaactcgccactcttgggattcttatgcttcaagatgaaatgaaccttgttggtagcaccacacttatcaggtccaaacatgatagagtaaggagaatcattatcaaacccttgaggaacccatccagcttcttgaggacgaagatactttaagtaagcaccaccacactcaagcccttcttggaaacgagcctcgtattgaagaacaacagttccttcgttaaggtttagaggctcatcaacatcaagctctttaactattccgtacttcttagctttctcactcactagaagtccataatcatcatgcccttcactcttctcgtgcttccacacacctaaaagatttcaaataagaagcaaccttttaagagctcacacaaagtctgtttcttatccacttatagtaaaagtaaacatttctaaatctgttccaataaaaaccaaaactttaagacccccttttgattgtaacttccattacactaattctaacttgtttttacttcaacagacgaaagaaaaccaaaaaattcaaaacacgaattcactacgacgacatggctttaccttggtattcagctttctctgaaacgacccagcgaccatcaaaaggctcgtcaaacgattcatacaggatctgaacaacaacaaaaacaccatgttactggagattcgatgaacaaatctttaaaataggaactttttcaaggaagtgac

SEQ ID NO: 23198 - DNA, 644 bp, Arabidopsis thaliana
tgaactctaatcaaactctcatactcgtcggtgaaactggtagtggtaaaactacacaggtagctcaagctttcaatttcgattttggaattagtgtttagtgtgatccaacataacatttcattgtattctacagattccacagtttgtattagatgctgtggtggctgacaactccgataagggaaggaaatggttggttggatgtacccagcctcgtagagttgctgcaatgtctgtgtctcgtcgtgttgctgatgaaatggatgtctccattggtgaagaagttggttacagtattcgttttgaggattgtactagctctcgtactatgcttaagtgagtgtttttgttcttctttctttggcttctcagctttataacgtttctgttctgatcataacctttctctcctgttattacaggtatttgactgatggtatgcttttgagagaggcaatggcggatccgcttttagagagatacaaagttattattctcgatgaagctcatgaaaggactctagccacggatgtgctctttggtcttctcaaagaggtcttgaggaataggcctgatcttaagctagttgtcatgagtgcaactttagaagctgaaaagtttcaggaatattttagcggggt

SEQ ID NO: 23199 - DNA, 699 bp, Arabidopsis thaliana columbia
taacagctctttggtagtttttacacttgtaaagatgaagccccgtcttcgcataagcttgaccaaggcaagataagtatgctttttatgacacccttcgccttcacagtaggaggcttccaaggcaccagagctactgattaaaccatcaaaatcgaaacactaacaaaaaaataattatttattaatatgtaaactaaccatttctaatttaaaaaaggaactctactagtcatttccgacaaatcaaagctgtggataaattccaacacatgcatggatcaacctctaaacaatcagaagatgaaagaaacagaattacatctgatccctctccactcgacgcttgccgcagttctccatatcatcatccatgggaatcgtcatatcctcctcctcgtcaaggttgttccaaatttcgacagaaaccagctgacgatgcattttcgatcgacttttgttttttttacaggccatgctatctgtgctcatgatttcatctgtttgggtgggcttaagttgggctttctcaacccaaatctcgtttacaaatatttttaacgaaacgacgccgtatttcgagttaatcgacatacgtcgtcgttttcactctttataattcgttcacaaatattttcaaataaatattattttcagagacgagaggagacggcgacaatggcgaatttgatgatgaga

SEQ ID NO: 23200 - DNA, 529 bp, Arabidopsis thaliana
cccttgtaagccgggttatcaataagaggtgagctccatttgcccttgtaagcaggattcctcttcattggtctcttccattcaccacaaccaggtgctgcttcacacttggggttgtcaattttaggagcctcccacataccatcttcctcatcatcccaatcttcaggcttggtcgcttcggggtcgtcgacctcctcaggctcatcatctaaccatccttcgggtttctcagcttcctcatcttcaatctccataggtgcatcctcatcccagtcctcaggcttcacggcatttggatcaggaatcttggctctttcgtcccaatcctctggtttcttgtcttcagggtcagggatggtcttggcagggatcaatgcaggctcaaagtcttcaccagagagtaaattggcctttttcttctcctctccatcaaccaaaattctaacctcgttgtcgggtttcaagatggcggtgtagacatgggaaagcttgtcataaggaacagagggagggaacttcagatggt

SEQ ID NO: 23201 - DNA, 866 bp, Arabidopsis thaliana
aactatagtaatatatttatggcagttcgacatgttttagatgcgcccaatatggaaaagaatgagagaaagaaagacaaataataccaattatggttacctatgggagaatggtgtgggttgtcccataggtaccgtccccatacaaagagtcaccatagaagatcttttgagattcgactcatttggcgataatcataaacctcgtggctcttggaattttaccactgatgatactaatagtgacaaccaacatcatgtacgttgcttcttttaattaataatgtgttgatatatttatactgattactgataataagaattggttactgaatgaaaatgaacgctattagtttgcggtggctcggacggttggctcagacaagaggttcaatggagcaacaatggatctttgtttaaccgctcctaaggttaggctaaaccaatacagtgcttctcgacttcacattcagattggaaatgatttcctccaaaccggctttactgtaagttatttgatttaatttgtttgccatctagataaaagcaccgatcaacaagctctagttacttaatttatttagtaactaacaaaatatgtattatattgtttaataaacacatattatatgtactaattcaggtaaatccaacattgtacaaggacagccaacctcggactttcgtctatacaaaagtgagtcacgctattagtaaaaaatttcttttaatttttatattttgtatacatattagtaagtaaatgtatatattgatggaacagtcaggtgaaaaatcatgttacaatagctactgcgacgttggaatgatacttgttcgtcaagatatccacttggtatggcatt

SEQ ID NO: 23202 - DNA, 1423 bp, Arabidopsis thaliana columbia
taatatctaagcctctgtggcgggatttaccaggttaacttactctatgttaggtaattgattgtccaagaatttggataagttctttaattttagtttaatatttttgtcttattccctttcggcttgaaagataatgggtcctaaaatcttttctccttgatgggctcattgctctgtatcttatacattgtcagcatccttaagatttttttctgtatgttgtcaatgttaatttgtttaaattatctctaatgggttctaacttctaagggctaagcttctgaactggaacaggcagaaattttggtctcacccagtcttgcaacaactcaaatggttgattcagtgaccggaagttcatgtgacccacaggatggtggtctattgccgggaagcatacctccttgtaccatttccgctgaagagtcggatggaagtggaacatccagttcagtgcagctggcgtctaatattgcaatagatgagtctaggaattctgaagatagagtatcaagtagcgagtcaccatggtactatttacgaaaagaaagtgcagcttttgtttcagaaactcttcagagaggacgcagaaatctttggcaacttacaacaagccgtgtgtcagttttgctctcttccccaggtgcttcttcaacaagtatacatcagttcctaaaaaattatgaagacctgagcatctttatccttgctggggaagcgttctgtggatttgaagttgttgattttagggagaagctaaagggtgtatgcgaaaattatttcactgcatttcataggcaaagcatgcatgtaagttccgttttacaatgcctattgggctgacattgccaataccacatagctagttaatttcatgcatcacctctcctacatgataacgtgaaaataaagtctttgtttggtttttctcccttacaggcgcttaaaatggtcctggagaaggagacatggacgaaattgtcaccagatactgtgcaagctattaattttgctggtcttgtgggggatgggctcccctaattatttcttcccgcagtgcctcaggttcttccagattccctcactctgataagccaagtaactcaattgatccaagtggcaacaggagtggattttcatattggctgaaaagtgggaacccgttctcagcaaagttaactcactatagagaagatcaagactactcctcgatcaatggagaagatcatgaagggaatgatagtattcatgatgatgttgtgaatcccaagataagagacataaaacgcatcaacggaggtagtcctgtttcagaagatgaaaacgaagaccttcttgctgactttattgatgaggatagccagcttccaagacgaagttttacacgtagtcaatcaaggacttcttcttcacattttag

SEQ ID NO: 23203 - DNA, 594 bp, Arabidopsis thaliana
atcccccgatccaattaagctcccaaaataatggatttaagcagatgaaatgacgaattcccaaaaaccctagttactaaggaacaaatccagaggtataaatgatatagcgcgatgcgacgcttgcgtggcggctgggtttagggttcaaaaacagctcatcactttggacggtaatagctctcacggtgtttattgttaccattttgtggttacttacgctgctggtattgttaacaagaaaggacctgagagtgatgatgctttgtcttgtctcttctctttgagtttgagatctccattgaactcaaagaagaaaagacacacggtggctcttgctttagggataaccggagctattttcggggctctggttattgccggtttgatttgtttgtatttccggtttggtaaagctgttaaaggaggagaggttggttgggaggatcaagggtctagaccgaaatggagaccaaacactggctctatctggttcaaaatcgaggaactagagaaagctacgaataacttctcgcagaagaatttcatcggtcgaggcgggtttggttttgtttcaaaggggttttacagatg

SEQ ID NO: 23204 - DNA, 1625 bp, Arabidopsis thaliana
catgattaaagagattggtatagtgttgtgttaactgttatatttacatggagatatcatttcatggaaacttgattaatgatccctttaacgaaaaacaaaatttagtacgaagtcgttgtacttattgagttatgataggattggcattttatttaagcagtggtgccaaaacggctacaaagataaacgaaacgacatagatatgaaatggatacaaggggacaatgccatgaagatagatgcttaattaagaaggtacgtagtagagtggatttgggagcttaaaaacccttccaggagtatcctcaaccaaatcagcccattggtctccaatattcccaacgatgttgtaccctttcttcacaaggctattcctaacctttgacttgtacaccacttgcgtcaacttcgatccgtttggcctgcgtttccatatatagtcctcgatattcaatcacatatgacattatttgctatatataactaagctacttgattaattcttacttgagtatgagatgcttccattttgttacaccaacagccttgagattctcgacagtgacttctgacaattttttccatctgtcagagattatgatgggttcaatcccgagttccaagaggttttcgtatagatgcaaggtctccgggagtcctggagttgattctccggactctaaccacgaccagtacgcccccggggctgtgttctcggtcctaagaatccaacaaaaaaaaatctacattagaatgaaatcacaaagtagatatggacccaaaaaaacagttagatgggttagttaaaatatttaaagttgtcaaatgaaacgtgtctttccatatatgacagctaaacattttcaaaaaaactatatgacgataatattattaattcaatgtagataggtacaataatatgtatatacccatatccatatttagcgtagtagggaatactagagaggagagtgtcgtctaggtcaaagatccaaacattgacggtatcgttctttagggcaagtcctttggcgtaaaaatatgcctctttgtttacagttttggagtcgtattggtactgtttggaagtgatcaagtagtcttcaacataggctttgcaatttgcgggcaccgtgtcgaagtttatgatgttagaggtctcaacaccaaggtgccagcttctgcagttggggtagttgatggacagtccctctttctctaagagttcggcttcgttcccaaagatggtgttcgattcgaggagttcgatgagccctggaacggatgccgaagactggacgtgggagaccgtagcggccaagagcaagagtagtgaaagtgagaggattttcatatttttttgtatggtttattgtttagtttatggtgtttatttgtgtgacacaaagggtggtattatataatgaggtgggttaggtatgattacttatgaagaccgatgggaaaatgcggagataagtgtacgtatggcttcgagtgatgcaaatgcttgttggcccattatgcttgtaccaacgagatatttcacttacccactcgtttttagagcacgttgagactgtctaaattagaatttggcgtgtcgttgtttaagtctatta

SEQ ID NO: 23205 - DNA, 951 bp, Arabidopsis thaliana
gtaacatcgtcaaatctaactggaggttcctgtccagtaacagatgtcacaacgttcgagaaagttgttaacagtagcaaattactggatgcctgtcgcacagttgatcctctgaaggagtgttgtaggccaatttgccaacctgcaattatggaagctgcgctaattatttcgggacaccaaatgacagttggtgataagatccctttagcaggatcaaataacgtcaacgcaattaacgactgcaaaaatgtggtgttttcatatctttccaggaagcttcccgcagacaaagcaaacgctgcatttagaattttatcgtcctgcaaagttaacaaaggtacttagctgtatcatattatctctcgcatcaatctcccttggatagtcttggaaattattctgactgtacatttgtgtaacagcttgcccgttggaatttaaggagccaacggaagtgatcaaggcttgccgtaatgtggctgctccaagcccttcctgctgtagctcgttgaatgcatacatttctgggatacagaaccaaatgctaataacaaacaagcaggccatagtctgtgcaacagtcaatgggtctatgttaaggaaaggtggtgttatgacaaatatctatgagctttgtgatgtcgatctcaaagatttcagtgtccaaggtaagttttgttttagactccttaataactgtatcatcatttcctctaccgtttattgaatatcttcctgacattagctctctttttctgtgtctgggtatgccttggacgataagcagcatatggaatgcaacaaggtttgcatcaattcatctcatattccaaagttgtttgatatgtgttgttgtctcgccagaataagttaaaaagtgttaatgatcttatttgggtacaatgtgattataggttgtcttctgagagctatcctgcagacttgata

SEQ ID NO: 23206 - DNA, 518 bp, Arabidopsis thaliana
gaagatagattcttaagaaggtacgtagtagagtggatttgggagcttaaaaaccctcccaggggtatcctcaaccaaatcagcccattgatctccgatattgccaacgatgttgtatcctttcttcacgagactcttcctcacctttgacttgtacaccacttgcctcaagttcgaaccattaggcctacatttccatatttagtccttgattcaatcacatatatgatacttataatttatttaattactatataactaactacttgaatattcttacttcaatatgagatgcttccagtaggtcacgccagcagcttcgagattgtcgagagtgacattcttccacaacttccaacggtcactgagtatgatgggttcaatcccgagctctatgatgttttggtaaagatgcaaggcctccgggagtccaggggttgatgctccggtccctaaccacaaccagtacgcccccgggtcggtcttctctgttctaagaatcaaaaaaaaaaaaagta

SEQ ID NO: 23207 - DNA, 840 bp, Arabidopsis thaliana
tttttgtgcaaaagctctttcgtcttcttaagatctttgctttctagtggtatatgaatgccgaaatagtttgcctgggttttagatcatgatctcatgtatcaacatttattttactgcagtttctgtttgctttttgatggaaatgaatattgtcacaacgtagaaattttctatgctagagttctctaatacacagcctagtgaaaagtcactagaaaacaactgtatttaacatgtcataccaaattgcatcactatgtgacgaaattacttactccaagttgcaacaatctaaccacaagccttcatttattatcaaggtcacatgagaaaagtctctaaatagaatcaaaccagaagtaatctaatactgtatcaattattattataatcattagagagattgcagtagagacacattgaaaaagactcaaaaccataactaaaataaccccaatagagatgggtttgctcccacggattattctaacgacaatcatcattgcaatacaaaaactaaacatttactttatatcatagcttgaaccggacagattcaaaattctcaaaccggccggtccaactaagaagaaacaatttgattccggttcattaagctctagttccggcagcaccaccaccatcgtgaccgttcttcccaccgtgaaagcccgacgagaaactagtattgagatcagaatacatgttaacaaccttggaaatgtttccgttgagttcttgaatcaaagcaacgttcttcgacatgttatcagccattctcgattggtgattgtcgttgacttgttgaatcagtgatctgtttctgtctaaaactga

SEQ ID NO: 23208 - DNA, 1042 bp, Arabidopsis thaliana
cttctacattccaagcccatcttaaatcaagacattcagatgatgtagagatagtgaacactaatctaatgacttgcaagactttcacaaactaatcagcagacagtttgatttagtttctctcagtcaccggattcagcaagcaaactctcatctatcctcttttcaattgtaaattattcttaagcacagcttcactagtattataaaacaccaagcaagtcaatgagacacttacatgctcttcaactacagcatgaactgtcgcatctggcaaaataggcctaccaataatcgtctggcttgccgagcccaatagaagaaccttggttagttccaactgcaaagggacataaagagaaaggttttagcaacaatcataaatcataaacacaaatgcaaaggttcgtccttcttacgagagatacggtaaagtctagccctttgagagaagaatagcaaagattaacgaagaagagcttgaagctagcataccttatcattgatgtcacagaatttcaacttctcggtgaaaatggagtccccattgctaactttaaactgatgcgaaccaatctacaggataaaaataaccactcagcatcagtgagagtgagaaatgaaactaaaggattaattgagatagcacagagacgagacctgaacaatggcaaacactggttcatagggtttgaaaagtctctccgaaggtttaagaggacccatcaccttgtaccctatctcctccgcctcttccactttctccgccggtgaatattccctttctacttccatatccgccgaatcctcaaagtcttccccctcctcctcatcatcatcctctccttcactgctttcttcatcttcatcagtatcctttgtgttcgaagagaaacaacgatcttgagagcgataccaatgactgtaccatggcaaattcctagtgagagatcgattcggaattacggtcccatgagaaatgctggtcccggaaaactcaatcccatgaaatgaagagatcgatcgcgtctggttgatggag

SEQ ID NO: 23209 - DNA, 427 bp, Arabidopsis thaliana
tcctctcactttcacttctcttgctcttggccgctacggtctcggcatccgttccagggctcatcgaactcgtcgattcgaaaaccatctttgggaacgtagccgaactcttagagaaagagaaactttccatcaactacgccaactgcagaagctggcaccttggtgttgagacctctaacatcatagacttcgacacggtgcccgcaaattgcaaagactatgttgaagactacttgatcacttccaaacagtaccaatacgactccaaaaccgtgtgcaaagaggcttatttctatgccaaaggacttgccctaaagaacgacaccgtcaatgtttggatctttgacctagatgatacctcctctctagtattcctactacgcaaaatatggatacgggtatatatacgcataattatcattat

SEQ ID NO: 23210 - DNA, 518 bp, Arabidopsis thaliana columbia
cctgaccatcaatttttacatttccggaatctacatcaaagaacctgaatatcattctaagaatagtcgattttccgcttccgctactaccgacaatcgccacacttttccctgccggtacctcaaatgaaatcccatctaaaatctttctctccggtagataactaaaatgtacattctcaaaactaatgcttccacctttcagaacaagaggagggagcttcctgtctatatctttatctccgatatcagatctctcctctagaaacttaaacatcgatttcatgtcgacaagtccctgaacggtgtcgctgtaaacaaccccgagaaagtaaagaggaagagacagttgaaagaggagaccattcaccatcaccaaatcaccaactgtcatctgaccattcataatcccctgagaacacaacaccattgctgttgacaaagctgtactaaatataaaactctgtccaaaatttaataaggcaaagcttttccgactttgcaatgcagcatcttcg

SEQ ID NO: 23211 - DNA, 535 bp, Arabidopsis thaliana columbia
tgagaaaaagaatgttcagttgtggttacagttgaagataaatttaaattgtgaaagactaaaaccgaaaatctttagcaaacaatcggctatggatcttgtacaaatacgttactccttaacacatgaagaaaagatatcaagaaaccgccaacttatgaagaaaaacgcagacctgtgggtatggatgaacatggttttaagatgaagaccattcttatcttctattcagaccacgatggtcccagccttaattaattatacacttctcaccggcattctgaatcacctatccgaagaaagatgaatataacgttactgctatatttaactgttaaagctacatgaccttaaaggttgcttacccttagagaaaacctccaccagtccaagcggtgtctgatttcccgttgtgaccagcagatttcttatcgcctgcactttggtaatgaccatcgaacccatcatctttggcatcatgatcatccaaccagtccaaccatcatcatcattagaagcagatgcccctttggag

SEQ ID NO: 23212 - DNA, 531 bp, Arabidopsis thaliana
tcaaaagaaaacaaaaagaatcaaataagcaaatggaagtagtgattcaacggctacaaatcgaacttaaacaatacttattaaatattttttatgattaagctcaatcaccatatatatttccttgatttattatttgtaccctttgctctatcttgtttatttaggtggatcaaacaaagcactttaagcaagccctgtattattctctttatatacgtcccttcattacttttatcctctgaattttcttttatatatcttcggtataaaccactagttcatgaaagaaatcaaatactaaaagataaaaagtgcaaaaagcaaaaaacaaaatctagagcgccattttcaataactttgaccgctttgggatcgaactagtgaaatcttcaattacattggttaacttttaaccaacacaaccaaaaaaaaaaagaatcaaaagagaaaaactaatcaagaatgagctgatgatggtgtttgttgtggaggctcatggtctaaagagtcttgtttctctcatcagtc

SEQ ID NO: 23213 - DNA, 140 bp, Arabidopsis thaliana columbia
actcaaccatggatgcatcatcagggcaggtgcctgcacgctatcacccggatgtgatgacgggtcttcgttgcacccgctgcggcaaacccatctgtcctctggattcggtgcgaaccccggtcggtttgcgctgcccg

SEQ ID NO: 23214 - DNA, 925 bp, Arabidopsis thaliana
tgttgtcatttgctggaactacaatcttacttttccttctcagtatattctgactccaagagaaatatttttttgaatctggatcacgttgaagtgcagtaataatatcttgtaactgagagtcattggcatagcctgcttgaatatccttcaacaaatcacactccaccactgtcatagccatgtgcaacacctcagatccttctacccgagacaaagcatctgccactacattttcttttccttgtctatactggatctcgtagtcaaactcgagcaatttaggaagccactgctgctgaattggtgtgttcaaacgctgctccaatagatacttcaaacttctttgatcagtcttgattatgaagtgactctgcagcaaatagtgtcgccattttcggactgcaaagataactgccagcaattctttctcatagatagataggtgtagttgcttcccttttaattggcgactaatgtaagccaaaggatgtccctcttgcatcaaaaccgcccctatgccctgaccacacgcatcagtttctaccacgaattgtttatcaaacagaggcaaagataagacaggcgcttgacacaaggccgctttaagatcctcaaacgcttgttgtgctactgctgtccattcaaatgcatcagttttagtcaaagcatgtaatggtcccgcgataaccccaaaactccgcacaaaacgtcgatagtaaccagcaagacccaagaccccctcaactgcttgagtgttgttggttgaggccactccttcacagccttgattttcgcaggatcagtttcaatgccttgtgcactaatgaagtgtcctagatattcgactttaggaaccgcaaaagcacatttgctgagtttggcaaacaacttattagctcgcatgacttcaaacacttggagc

SEQ ID NO: 23215 - DNA, 562 bp, Arabidopsis thaliana columbia
ctttcatcactagacttagacttagtgggagtgttggactccaattgcttcgcggaaactatatcacctttaatgatgagtttcagctgagaaacagctctttcaaccttaaattgaaaagaagaaaaaggagcatgaagcacattagaattagtaagtgcagaatgagacgcaacaaaatgaaattaatctcatgtatatcttacatcttccggttttgccataaagtgatgacagaagaaacaggccctctgcaagaaattgaaaagaagattgaagagcaaaggatggtaaataggaaagacaagctcgatatgaccacaatgtcctggacaagcaagtttgagctgaccacatgaattgcaactgcattaagaggacaagaaaagctttagattaagcaaagaaaaaagaccaaacataaacaagattatcagagaaataaagatcaatagctacttgcaaacaaatcggtgtatgaatagctacttccaactaagaatcgacaattcaaagcctagacaggtataaaaaggaggtctttataacagttgcgtgaaaa

SEQ ID NO: 23216 - DNA, 531 bp, Arabidopsis thaliana columbia
tttagtagtgtattgcaatctagaccagctgttgttgaaacagcaagccctcgtatgcgttgggctgatatggcacaagaggatgagttcgatgaggaggaggaggaggaggaagaggagagggattcgagtaggaaaggttttgatgcgagttcgatgaagactccagagaagcctaagttgtctagagatcagagagagaatctcaggctgattaatgtgaagagaaagaaagactttatttgcttggagagagttaagggaaagattgttaacgtgcttgatggacttgagttgcacactggtgtttttagcgcagtggagcagaaacggattgttgatcaagtgtatcaacttcaagagaagggacgaagaggagaacttaaaagtaacttcttgttttgatctgaaaatgctcttatcttaagttgtgacctatttttaatctgaatcttgtcttgttctctctctgtagagcgtacatttactgctccacataagtggatgagaggaaaaggacgtgagactata

SEQ ID NO: 23217 - DNA, 459 bp, Arabidopsis thaliana columbia
taacgttgccgtcaaccgccacgtcccggttcggttgagtttgtgttggagtttttctttccaaaagcttgccttgacaccgaagcacaacaagatatgctcaagtctctgtctgcgacccttcagcaggatttcaggagcttaaatcttttcattgataaagagcttgagctagaagttgtatttcccgttagagaggaagttgtttttgcagagaacccacttatcaacgcaggaaccggagaggatatgaaaccattgcctttggaagaaatttctcaggaagattcttcatggatctcacacatgataaaggcaaatgagaaaggtaaaggcgtgtcactttcttgggcagttgagttggtagagctccttagcggatttcgacttccatgagcaccgtcctgctgtcttaatcgaccaacaccctttgtgggttctaggttagcgcgcagttgg

SEQ ID NO: 23218 - DNA, 481 bp, Arabidopsis thaliana columbia
tcgatgatcgaatggtcgaacttgggtcttcaagatcattatccgagtggagtggcagcaatctcaatgagatcctggagactcagaaacatggacctgcaagcttgacggagctgcccaaatgcgcctctcctgcagcgatgtatctcgcgcatgaaccactgactatcataatagtacgaaccctccccgagaagtcgactacttacgtacctactgcagagagacttcttactgggctttgctagagaagccgccaaaagagacagagataaattttgtgattgcagaaaagagtgaccgatgggaccacgatacaaccaagcggcttgaaacaatagctacccagagacagaatgtagccgaagagaaggttgcgactcatcttcttcgtaactctggccattgggtacacacagtcaatccaaagggactcctagagattgtgagtccaacttcttctcccacacgagtagacgat

SEQ ID NO: 23219 - DNA, 414 bp, Arabidopsis thaliana columbia
tagaggatccccaataaaaccaaactctttccaatcccacatagagagaaagagagagagagagatgagtcggaggaacaagaacggccctaagctcgagctgaggctgaatctttcgccgcctccttctcaagccagccagatgagtcttgttcgatcaccaaaccgatccaacacgacttcaccaagctcatgcgtttcatctgaaactaaccaggaggagaacgagacaataacctcaatggttcttgtgggttgccctcgttgccttatgtacgttatgctttctgatgatgaccctaaatgtcctatatgcaaaagcaccgttcttcttgatttcctccaagaaaacgcttttgccgctacaaccgcttacgctgccaataccagacgcaagaagaagacctggtggaa

SEQ ID NO: 23220 - DNA, 465 bp, Arabidopsis thaliana columbia
  unsure (1)..(465): unsure at all n locations
nnnnnnnnnnnnnnnnnnnnnnctaaagcgctaagttcgagctccgtgaaatcgacagcgccgaccgaagcatgagccccatgcagatctggtgctgtgaggcacaggaacgatatgtcatggctgttggcgaggagggtatgaacaagttcacggctatttgccatcgtgagcgttgcggtttctctgtcgttggtcgtggagagggtggttcagaggaggagaagagattgatccttctcgaccgagagtcgaaggagcacccaaccgtcatcgacctacccctgtcagtgcttttcggaaagcccccaagaatgacccgcacggtggactctcggaagttgaagctgcctgcagtagatacgagtcttaccacatacctcccctcgctggcgcctaaccgcgcggacgttattggcgaacggccaacagggttctgtcgcttcctgccgttggtccaaatct

SEQ ID NO: 23221 - DNA, 653 bp, Arabidopsis thaliana
agtggccggaagttcaatgtactgggctgtggaagtcttcataggtatctcaactctttagcctctgactgaacgcctcgggttttcttcggttagtgactcacagcatctctttaggtattcacagtccacttccgtttgcttcagctttgtcctattatcatttatcaatcacataacccccaccaacaatatgagactttgtttttgtaaagattaaagaagacgtttttttttgggttcaaattatataaagaaggattatgaatttttttctttttgtgaataagtcactataagcaattatatatggaaatgatgagcggaagtgatatactacttttgcacgaaaaatgacaaggatagacatgcgacaatttgttattattactcgtgatgcatttttcgtcctcatccctcttttcagaaattaatcatagcaaaaaaatatacttccaatgaagaaaataaaccgtttacacaggaagaaaatgaagataaataattaatgatataagctaacctggctcgtctgttttgaaaccagacttcaacctgacgaggacgaagattcaactgcttcgccaatgcaatcttctgtttctgcaatgttttagacagaaaaaacaaagcattaaggctaaaatttggta

SEQ ID NO: 23222 - DNA, 640 bp, Arabidopsis thaliana
gcaaatagattaagagaaaaacagaagaatcggaaaaaacttgagaaaagaaaatggaaacgaaaaaaaagtaataaataaatagccctaaatataaagaatgcatcatgcatgcatgatcaagcatatatcctcatcttgttgatcactttgtaaacatcatccacatcatcgtcgtcgtcttctttcaccgcctccacacaccgctcattatcgtccccgaggctgccatcgccgccgccgcatcctcctctactgacgtcagcagcagcaccagactcgactctcatgaagaaattgcataggagaagtgttaagaagcaacatataataaattctctagatgcagccatggatcagacactttctctctatctctctttctcttgtctgaaaaacaaatgataatatagattaatccaacttactttaaaagcttttgttctttttatttactatgttcttttgttatgcttttctcttacaattgtgcttatataagaaatggaatttactattaatggagtagagtgatttcttttgagctggtcttaaggctaagtaactgttgcagtattttacttgaatattcatagcaaaaataaagaaaatcatttaaataagtggtacgttagtgaca

SEQ ID NO: 23223 - DNA, 967 bp, Arabidopsis thaliana columbia
tgtcgacgtttcagttttcaaagcagtggaaataataaaaaagatagtagagaataatcaatgctcacttaaggatcctgctgcattgggtttccatgaagaaagaataggtgatttgatcgtaagggtggctagagatgatcctgacgccagtgccaagcttgaccggaagagcgatgggacccaggttctggagatttctcaggaagagcttgctcaaaggaatttgcttaaagggatcactgctgatgagagtgcgacagttcatgtaattttgctagcttcagctgcttttcttagctttgctcttactggaattgttactgagatttaccttgatcatataggatacgtctactttgggggtggtggttgtaagagattgtggttgtacagccattgtaaaggttgcttctgaatttaagttgaatgatggccatatcctacaggatattgacattgaagaccaatccgaaggaggtgcaaatgcactgaatgtaaataggtaaaatctttgcatgttgtatatgcgttggtcttaatggttgctcatagttggcttcgatttcaatcaaaaaggcatgtccatttacttcacgtctgtgttgctgaacatatggcttctggcatgatctaaattttcaatttgtgacattttggcatatgatatgtgaattttgaaatagactattcagatagttttttctggaaatccttttacagcttgagaactctattgcacaagtcgtcaacgccttctagcttagcacagagatcaccaaatgcagactcggaacaaatacgtgtggctaagtctcttgtgaggaaagtaatcgaggatagtttgaagaaattggagattgagccctcaagatatagtaagccgataaggtgggaattaggagcctgttgggtgcacatctgcaaaatcaagcttcaagtaaaagtgagtctaagaaaactgaag

SEQ ID NO: 23224 - DNA, 1111 bp, Arabidopsis thaliana
atctaatgtagaaaaatagcagcctgactcatttttcctaacacttttgcagggttttgctagtggtagccttgacacagatgcacaatctgtccgtacatttgttgctgatggcggtgaatgcttgatagctcaaagttacgccaaaaatatgggactttatggggagcgtgttggtgcccttagcattgtaaggaaccaaacttctcaatttcttattcgcttctattcatttgacattatggttagtcaaaaagttcatctaatggatagtacaagaatacagtattcaaaaattgcatctaatctgtgtgatataatgtgaaggtctgcaagtcagcagatgtggctagtaaggttgagagccaggtgaagcttgttgtgcggcccatgtattcgagcccccctattcatggagcatcaattgttgccaccattctaaaaagcaggtacatgattatcatgctttagtttacaattactttgaatatattatgttggagaaggaacctttaaaccggagttagtatagtaaaattacatttttagattattacatacaagatatatgtatacattgaaagctgacattaaaaattaataggcaagtggaaagagagatccctactgatcttccatacgcagtaatttgatagtttatgctgtgttgaaatggttatgccaagtttctttttctatggaatcatgcatatatcacaaacattttcctttgctttatcaagcttataatgaatatctatggaattaggttctgctctaagtttctaaaatttctttgtatatattggcagtgatatgtacaacaactggaccatcgagctgaaagaaatggctgaccgtataaagagcatgcgccaacagttatttgaagctatacaagctagaggtttattattaattcctttcctctcttatttttcactctgtttatcttcttttccatgtttgcagaatcattactctgcagttttttgttcttgacacgttgtctggattgcaggtaccctggtgactggagtcatattatcaaacagattgggatgttacatttactggattgacaaggagcaagttgaatcatgccaaagag

SEQ ID NO: 23225 - DNA, 1279 bp, Arabidopsis thaliana
ccagtgtgctttaaagtaaatcgcaacggttctgctgccgctataccggaaaaggccacggtggttccgctctgcccctctaattcgacacaacgagattgcgaacacaagcgaacccgcagtcctgaaggtgtcgggccgataagctgataacgccacgctaccagcgtcatcaatcctgaagcaggttgtcgcgtagaaagaggcgcagacgacatcgactcaccgcgatgatttagcgtaattcctacactacttgcctgccacatcccctccccggcggcttgcaccagcagcggaaacaataatattgctaataaggttctcattatttgccgccaattgtcgccgtcatgcggatatgtcggttatcagacagttccagattcgacaggaccactaactgcggcaagctgcggcgcaggaagcgagacaataatggtcgcagcgcgtggttcaccaacaatactggcggcgcacccagcatctcctgacgggatagcgcttcctgagtttgcgccagtaaacgatccgccagccctggctccagtcctcccccagccctgcagcgcctgtagtaacaaacgttccagcggtgtatcgaggccaataacatggacttcatctttgccaggaaaccactgctgggtaatcgcccgtcccaacgccacgcgcacgacggcggttaattcatgtggatcgctttggatgggcgcatgttccgccagcgtttcgagaatggtgcgcatatcgcgaatcggtactttttcatcgaggagattttgcagcactttatgcagtgtggtgagcgtgacgacgccaggaacgagatcttccgtcagctttggcatctcctgggcgacgcgatccaacagctgttgcgcctcctgacgaccaaacagctctgcggcatgctggctaatgaggtggttaagatgcgttgctaccaccgtgctggcctcaaccactgtgtacccctgaatctgcgcctgttcttttagcgcactttcaatccagatagcattcaggccaaatgccggatcgacggtcgcctcaccaggtaacgtcccggcagcggttccagggttaatcgccagccagcgccccggataagcatcaccactgccaatctccacgcctttcatcaaaatgcgatacggggcaggttgcagatccatattgtcgcgaatgtgcaccactggcggcagaaatcccatctcctgggcaaatttcttgcggatactgcgtatacggcccaacaactcaccatcctgctgga

SEQ ID NO: 23226 - DNA, 1448 bp, Arabidopsis thaliana columbia
taatctccaatcccttattagcagacatcattaacagcttctcatctcctaatttattacacaaaacctggctcacgtttaaaccaccacgctcccatacacggctagctattctagaatcaactgctcgtttcatgtcggtacaaattcgaaacgctagacactcgacatcatcaacggttctatcacaaccgtgaaataccactaaccagcccagcagaacttgcttggttaacttttctccaggtttccacactcggttaacgagggaaacatcagagaattccttgagccttaatctttccttaacttggaaattaaggtagtagtgaagaaaagttccagaatcgtcttgtagctctcttctcatctttactttggtagtactttgcttaaggtcttcatccttaaccccaaaaatgatccaatcctttctgtcttgcttccgcattaacttcacatatgggtcagaattgtaacacttatcaaaccattccccatgaactcggttaactagtatgaggaaccccccaggctcccatactcgacttgccagaaactcagaaaacagttcccctaaaagcttagagactgaggtttggtttccagcagaacaacaatttggaaagaagtcatgacttgtctgcatcttctggcctacaaccagccactccacaacataagccttgcatctgacaatttccagcagagaacctttctcgttaagctccttaaaccatgacaactccttaatctctagaccgtggagtgcgatcagtaacttctgattcaatcccaccaatgaattcacgaatcttgaaaaattctgcctcactaagcttcggttagcaaacagcaacatcaacttttgtttctcatacccaactctctctgttccaatccatgctacttgatcaaaactaaagaattccttgaccctaaatcttcccttcacttggtaacgcttctctaacattttccacttctctagctcagcagttactccccaggttcccaaacgtgattatcaagcccagagatgaagtgcagagttccatcttggattgctagagcctcaactttttcaccaggacctagttgctccagagagataaccccaactaccttacctttgatagtgatttccagagtttcgatttccaacattcttggcagtagtttcggttccttattctcaccaaagtaatgatctatccagcctagttgaagttgttcacataagatttctccaggatcccagctaaaaacaaaagagccaaaaggtttattcccattcatgaagattcttttactcatacacaagccatctatttgtttctctactatgccatgaatattactcgcagtccctatctcagcacttatttcttcattgtcatgcaaacgtttctgtcattctaagtaaaacacttcaccagatttttgtg

SEQ ID NO: 23227 - DNA, 751 bp, Arabidopsis thaliana
aatctcctcatgatacaattatcactgcagagattgattcggattgcgactcaatatcagtgaaagccattcttctgaagccattcttaagagcggctacggatttctttgttaatcaaagcaagtaatcatattaactgatcgtaaacgattcagatacagaaacacctgtgttgagattgatattagttttcataatattagtttcggttcctttcggtttgatcttgtccatgtataaatatgtttttctatcattttataaatttaacacttaaacttaaagaataataatttaaaaccaatttaaaacttaaattttaagaaagtaattaataatttttaactaaaataatgttaatttcactattatcatttaaaaattagtttaagtattaaaattttaaaacggcgaaaactaaacgtgtgtaggcatgcatccccgtccttaattggtccgtaaactttgtggtgttcgaagttcggtaaagctttcacccaatatagatttgacagttaaactatgttttagagaataataatgatgattgatacttgcgttgagaacatctacagaatttattgataattacaggaggtgatatggctatgattgttttcactcttctaccggcagctcattctctgtccaagcgacgtatcctccagcaatgtctgtgatcgccgtgaagccctgtacatgtggcgacattaaacccgcttgtcctaaaccggataacggctatataaa

SEQ ID NO: 23228 - DNA, 525 bp, Arabidopsis thaliana columbia
aaaccaatatatagatataagcccggttaatttcccactacatattccccaattgccaaatgatctaatgagttgaaagttggaactaactcttaaaagaaaatggtgaataaattactccttagttcttattttattctatcttcaaagctctaaagatttccctttcctcttatattcttcatcatcacttagctgcatagccgaagaagacgatgccatttcgccacgtggcgacctccaaaatgattgatcatcgtctctgatcacaaccggagacgaggaagagtaccctgctactcccatttcgccacgtgtatcccctgaagatgaagactcttccacgtcaaccccaaacagcctcagcttcttcgtcgtcgacggctgaggaggcgccgacggaggtaccctccccgctggaaaaactggaaccgagtcataaaccaacggctcagatcgaccaagattccactgatgatgttgatcaacggtgatctgcgtagtaacgactccattaccattaac

SEQ ID NO: 23229 - DNA, 510 bp, Arabidopsis thaliana columbia
tctctagtttttatctttatactctatttttgtatctatttcttcttttaacaaatagatatctctatttttgaggaaccagtggagtaaaaatagatatttatatattttttttttatatttagaaaaaaagtagagacaaccactggagatggtcattataagttgactcaatttatctaagaaatgagttcagacaacccatgaactcatttaatttaatgggttaaattgttgaatgggttgatccattaatatcataaataaaacaataattcataataatatgatcatcattactattatttggtggaatttgcgaatttacatttctggccgggaaattacggatttacgtttttagcgaaaaattgtagatttcgtttttggtttaaatttgtgaatttttttgacggattaattgcgaatttaagtttttgacgagaaaattacgaatttttgttttttggcggaaaaattgtaaattttatagatgaagttgaattgagt

SEQ ID NO: 23230 - DNA, 565 bp, Arabidopsis thaliana columbia
gagtttggcaccgattttcctaaaatcactgcctttcatcccttgacaatcgatccgaaccaattcacaaacttcaaatgcttctttaacatttttcacaagatcacaatacacaccattcttccctatatgacccaacacaggacaaagttaacattctccgtcttggaggaaaccatatcaaaattaatagtactattacccagaggtaagctgctagcttacctagcttgcaaatgggcatgagctctcgtcctttcctccgcatattggtagcttcctgacgagttaaaccctcaggcacttgttgaattagccttggataaacaggtgctacaggcttccacaacataagagggaaccgcggtcttgtcctgtggttatagtttctgccacggaataggaaaagcacacctcctcttctatatatcaccttcccaccaattttctcctgccaattcaattcacaacttcatgaagacaattacaaacagatcataaagcatgatgcatccatgcattatccactaatatgaaaagatataatgaaaacagttccaaggag

SEQ ID NO: 23231 - DNA, 487 bp, Arabidopsis thaliana columbia
ataatctttcagtgtaggactagtttcaaaaacgaagagactctcaaactctgcaaaaatgcaggtgtcaaatgcttatcttcaatatttgcaaggccctaggacaaagatgttgtttgagtttgtcaaagaaatgcctaaaccagaaactaaacttcgtctagacatcgcctctctaattggtccaatattctttacatgggttattctccttctgctaccggtaagtttgcttaaaataaactgctttaggctgtcactatactcatcgacctatatatgatgatctgtaaatctatgaagcatttatatgcaggtgatcttgaattcattggtgtatgagaagcaacagcgtcttagaattataatgaaaatgcatggcctaggagatggtccatattggatcatttcctacgcctattttctcgctttatccacgttctatataatattcttgatgatctttgggtcagtaataggtattgaa

SEQ ID NO: 23232 - DNA, 521 bp, Arabidopsis thaliana columbia
tcatttcctccaaaacgtagagacatttccagttcaattactcacgatttagtaatcccagtgcccactctcacatgcaagccctccattactaatttaacgaactcattaagggacaaatatgctgtgcatttgatagaatggcaaataagcaaaacataagattacatactggggaagcccctgtcagccactttgtaacaacagcaatgtcctgacgccattcatgctcacactgccaggaggtagcgtcgtgcactaaattagccgaaccctgcaaaaccaatccacaaaaaaaaaatcatctgagggtgtcataaaacatcttgacacagaagacaaagaagaaatataaaggtaaatcccagtgatcaggagcacaaacctgagtaggctgcgtccagatagttatacgtccatgaaaattagcaatgagtaacgcacgaggacaagaagtgggagacattcgataaattggacagaatcacgaggagagtctacatataaaaaattgcatcata

SEQ ID NO: 23233 - DNA, 562 bp, Arabidopsis thaliana columbia
gcataaaaagctatagaacatgaactataaaaacaaacacagagcaaaaaacagagcactaactcgaaaacagagcacttaaaaacctgaaagttcccgggcttttgagaagacttggaaatagtggacccgaaccggaatcatgattagcgttcatcaacaagtactcaacccaacccacgtcaccattccgaccaatcttactgttcccgtatccgaagggataacctgcgacttgggttttctctgacttgggcaacgagaagaaatcgacggtctcgtgttctaaaacagagactagctctgcggaaacgccatggttgatcaccttgaagaagccgaagtcttcgcatgctttcacgagggcatgtttggattctgggtcagacatatctataaccgggattagagagaacccggattttggtattgctaccggtttagacaataccgccattgatatatttccttgtttgatagaatttttttgattttgatagctttgaaggctgagacattgggttatgtctcggaggagtgtatatatagcagatgagatgat

SEQ ID NO: 23234 - DNA, 990 bp, Arabidopsis thaliana
aggtttcgacccgaaccagtagaggatcgacataaatcaatttggaaagcttttctgttggaaagaaaattaaaggttcttctgaaaaatataaatattcgacaaattagaaagaagcttatttgtcaaggtaaaacaatatgcagtgttacaaaccggaaccttaacctagaagattacattccaatttggtttctataatttcctaaacaagaaaatcaattttaggttctgttcttgttgtgagactgaggaccatccacgaacagaagcaactagcttaacatttctcaccatgtcttaagatctttgttgcctagagagaatatccggggagttaatcatccacaacgagcttcttgtctacgcttgagaaagatcgataaaacgccttgaaatgtctgtacgcgatgtctatatcgtctgttccacaaatctctctcacactgtctcacaagtaacgagttccaaaaaccagaagctgagtctaacatattttgatttggaaacatgagaaagagttgctaaggaatggcagtagttaacatacctatgcatagaaagctgagctatgccacaatcaacggttcggatccctactcctgaagccaatataggtcctattgttgaaccacatcccatatcgtttctcaccacaaactcctgcagaaatagcaaaaatctaaatgtcagtatttcattcttaaatgtgggtggattagtgcagagcatctagaagatctatgatgtgtagattcatcttaacattaagaagaacacctaacctgaattggaagatcatggagctttgctacttctttgaaaagaaaagaagtgattccactggttgcatagcgttgatttgcgttatgtttgattacaagacccttgtgtagttggggacggtggttctcttcatgcttgtctgcaaagttggggtggctccatgagccatgtctgcagcactgcaccacaagacccaacacaagt

SEQ ID NO: 23235 - DNA, 539 bp, Arabidopsis thaliana columbia
gcaatggttaataaccacataccaccatatagtttgcagctgggtatcaacgtagaggtgcggaggagacgaaaggaaagattcggaaagacgcttcagatgttctagttcaatgtccgttgctggaccgcattaaatgctttgaaactgtggcagctggagtgaaagacattgtaccagattcagttgtggatctcaaatctccagaggtagtgtgtatagatagaaaataattctatcttcgttgcatcatcgcgtttataaagtctgaaagattggagtaaaaatgtgcagttatgtgttctggtggaaatgttaccgctctctagaatatcaagtggctcctttgtagctgctgtttcagtgcttccacatagactcgttagcacaaagccgaaactctgcatcaagcctctagtccctgaatccaaacacaaaaagggaccaaactgacaggtgcaaaggctgatcgctgcattcgattttcgagagccaaagatatcaatagaagttgtaatcctctgtttttgtttagatat

SEQ ID NO: 23236 - DNA, 487 bp, Arabidopsis thaliana columbia
gggtaaagctgaccagtcccaggttcactagctaaccgctcttcccaactttttccagcaggccaccagaacatattggcacatgtcacaatttccgggtaagcttctccccatgatcctgtatgacctgtggagttttaacagtatctattagaaccaagctaagttcttgtgcaagagaaaatcaagaatggacttaccaggagtgtctatttcaggaagtactctaacaccatgctcaaaaccatactgaacaatctttgagacatcctcgggagtgtataccatgtctggtccaagagatccttttgcagcaagtgaaggttcagaaggaagcaccagtggaaaagattgtgaatcagtgatatgccaatggaacacattgagtttgtttgcactcatggccttaatagtcctcattatatcatctactccatagtaattcatcgatgtatcgagcaaaacacctctatggccaaacagagga

SEQ ID NO: 23237 - DNA, 985 bp, Arabidopsis thaliana
ctaaagattaacagggtttttgagttactccggtaatgtcgtcttagcaaactggtaacaatggatggtcaaataatttcctcaatgccgcctttacctcggcattaatgtttggttatttcatcggctcacttactggtgggtttattggtgactactttgggcggcgcagggcgtttcgcataaatcttctcatcgtcggtattgctgcaacaggggccgcttttgtccctgatatgtactggctcatcttctttcgcttcctgatgggaacaggaatgggggcgctgattatggttggctatgctcatttacggagtttatccccgcgacggtgcgtggaaaatggtccgcgcggctctcatttgttggtaactggtcgcccatgctgtctgcggcgataggcgtggtggttatcgctttttttagttggcgaataatgtttctgctgggtggtattggcatactgttagcctggtttctctcaggtaaatactttatcgagtcgccacgatggctggcagggaaagggcaaatcgcaggtgcagaatgccaacttcgtgaagtagagcagcaaattgaaagagagaagagtattcgtttacccccgcttacttcgtatcagagcaacagcaaggttaaagtaatcaagggtactttctggctcctgtttaaaggtgaaatgttacgacgtacattagtcgcgattactgttttaattgcaatgaacatttcgctttataccatcaccgtatggataccgaccatatttgttaactccggcattgatgtcgataaatcaatattaatgaccgctgttattatgattggcgctccggtaggaatatttattgcggcattaattattgatcattttcctcgtcggttatttggctccacttacttattattattgccgtgttaggctatatctattcaattcagactacagagtgggcgattttaatctatggactggtgatga

SEQ ID NO: 23238 - DNA, 768 bp, Arabidopsis thaliana
tccggcgccggcaatgattccttgtactccgtcttccccgacaaatcaatcccgtaaacctgagtcccattcggatgtaaaagtccgaaatgccgctccgtacccggacccgttttctgattttcgttgtaaagtgcgaatacaaacgccggtagaacctttccgggtcgggcgggcgtacctacgggcgggtcagctgcgagtttcttgacaacaattgcgattgtaagtagcggcgttgtaaatattcgctccaatttggtcgtagtcaccgttattgggccaacccgtttccgcgacccagatccgaatatccggatacccgactcgtttcatggcgaagacgaaagcgtcaatcatctgatcgaataggttgtggtatgtcagattcgaaaccggatccgtgacggtgacgttggtagattcgaaaatcgcgtaatcgagatccacatgggtcggatcttgtgcccatgcgaaatacgggtaaacatcaacgaataggaaagatttggtccggtttaagaattggagcatcggtttcataattaaaacggagatatcctcccgaaactcgccgctagacggaggatccgaagattggagaacgtcggtggcgagtgtagtaccgactttgactgttttaacgccgagagactttaagtagcgttggatcttgcgcattgcgggaacgagtgaagatttgagctcagagattggtaaagagaggatctcgttgccgacgaggaggtaacggatcttggtggttgg

SEQ ID NO: 23239 - DNA, 662 bp, Arabidopsis thaliana
gaagtgttaaagcgtagataatccacgtacagttctgccactgccggtaaattaatgaaatcattttatttgattttaatttattttttctcattaatagtaagatattttaaatttccgtacgaaattgagttttccgattaatcgataagattcatggtggagacgtataagttaattaaatcattcattgggatcttcaccaattattatcactatcattttttacagcattattatgactatatctaaataaacgtaaaagttaccatttgaaatttatttcatttttacctcacgatgtaacggttggctaaattgcgtgtgatataggtatagagggacttcacttcatagcaaaaggcatagcgttccagaacacggcaggtccggcaaaaggccaggcagtggcactacggtcatcctcggacctctcaatcttctatagatgctccatcgaaggataccaagacacattgatggtccattcacaacgccagttttatcgcgagtgctacatctatggaactgtcgatttcatcttcggaaacgcggccgttgtttccaaaactgtatcatcctgcctcgcctgccactcaaaggtcaagccaatgtaataacgcacaaggtcgtactgatctatttcagaacacagggatctc

SEQ ID NO: 23240 - DNA, 470 bp, Arabidopsis thaliana columbia
tccaaactcattttgagcctgtcttaagaatccttttaaggtctcttgggtttgtgacttttcctgcaaaaagaacacccaagtgaagcgagaataatcgtctacaataactagacagtactgactcccgtcgatgcttatgtaagctatcaggccgaatagatcgatgtggagtagctagagcggcctatctgtcgtcatgatgttcttgtgtggatgatgggctccaacctgctttcctgcttggcatgcgctacagaccctgtctttctcaaaatgaaccttggttagtcctaaaatgtgctctccctttaaaagcttgtgaagattcttcattccaacatgggctagtcggcgatgcagagccaacccatgttagtcttagcaattaagcaagtgttaagttcagctttgttctcattaaaatcaactaaatatagctgaccctctgaagcgccgcaatctttggg

SEQ ID NO: 23241 - DNA, 571 bp, Arabidopsis thaliana columbia
tctagcttgagaggacttacatgagaagcgatgaaatatgcgatgagattaagagcaaaaccccaccaaatagttccaaaaatgtaaccagtgaccttctgcatccttctcatcaaacagatgcagtgataaatcttggggaggaactggaacaagaatattagcagcagaatcgtcattatcagcttaaccttctcttctcttatcagtttcggcacaactaaccaaaacactgcctgcaaacaagcaaaaacacaaagttcacatcttatctgcatctcaaatcatgattcatcaacaggtaacactttcaaatgtaaatatgggctttattgatagtaataaaaagtttagggttaatttcataatattggaatagttggaaggttgttctgaaaattcacctgagggacagggaggatgacgataacatcaaaccagaagccagtgagagagcgtgcgtagtgagacgcgatggcgcgtggcatccaaacgagcttcccacaacaacgacaagcgactctctcgagacgtaggccagtctgaattgaagcacacgtgcaaagatgac

SEQ ID NO: 23242 - DNA, 433 bp, Arabidopsis thaliana columbia
agaggatcccgtattaaaatgcctaaaaagaaaactcctagtgcatcaagtgaacgtaatgtttcattcaaaacttttgatgcttcatatgtgcttactaacaaatcaggcaaagtagttgccaaatatgttggggggcaaacacaagggctccaagacttgtgtttgggtacccaaggtgcttgtttctaacatgaaaggacccaagactgtttgggtacctaagaacaaggcctaaattgttttgcaggtttatgcatccgggggctcaagttggattattgatagcggatgcacagaccacatgacatggaagaaaaggatgttctcctcctatgagaaaaacgaagatccccaaagagccatcacattcggggatggaaatcaagagtttggtcaaaggacttggtaaaattgctatatcacctgacca

SEQ ID NO: 23243 - DNA, 465 bp, Arabidopsis thaliana columbia
atttctcaacaaaattaataacattctcttttctctctgaaacaacacaactactaactcgggacataagtcccgatccagcccagcccactgacgaacaacgacattgtctgaagaaacaggcagatcaagtaattgttcgtcccgtgcaccaagtcatagcatccgcacacgaacaagaaagccgcaaatccaagcgccaatgtatgcaatccgacacaaatatctcagacccatacagtgagtatccctagtctctaatagcaaatatagacttctctatataggcagtaaccctaccgatcaggcaatctgaagattcttgggaacctttacgagtcccatagagtgtgtgcctatagcgctctgaccgcatccaagcttagcagtcacgacccactcgttagcccttcctgcctcaaacagagcagtgagagctggctttgtccggtgcagcgacatcac

SEQ ID NO: 23244 - DNA, 496 bp, Arabidopsis thaliana columbia
gtgtgctctaaaggattatgttacatcaatttaacattgagttaaccaagacaaggtcacagagctggaaaaaaaatggtctgaccggtagctaaagagatagacgaaaacgaaaagcccgcttaataactgttcacagaagcagcgcgcaaaaatcagctgccacacaacacaacaaagcgaacctactcatgagcatcttgtacgaagagcgtcttgatggcgctttacccgatgtcgaccgcacatcggtactgatggcactgcgtgacatgtccctggacttgagatcctgcataccgatgaggagatcattccttacgagtgtgacgggttgagcgcgtatcgcacgcgtccattactggttgttctgcctaagcaaatggaacaggtgacagcgattctggctgtctgccatcgcctgcgtgtaccggtggtgaccgtggtgcagcaccgggctttctggtggcgcgctgcgctggaaaaaggtgtgttg

SEQ ID NO: 23245 - DNA, 360 bp, Arabidopsis thaliana
agcccgccgaatttatggtgcgcaggtggtggctgcagtgctgaatgacgaggcattgaaagccagctggctggcggaagtagaagagatgcgtactcgcattctggcaatgcgtcaggtattggaatccttccgatcatctcgggactggcttctctcgccctccttcccttagttctgatgatagctcttgggcttggcatgaagctgaaatgaagaggtccgttgatgacatggtagcattctcgtcttcttacagcgcaaatggactagattctccaactgcagcctcgttctgatcccctgttcaccccttagggccaccaaatcagccatctcggttatgttgtgccaggtaat

SEQ ID NO: 23246 - DNA, 253 bp, Arabidopsis thaliana
tttggattctattgcaggcacatcctcaggtgttgaagcaagaaaggaaggaactttgtagacttattgatagcagaaagttatcaccgtaagcagctcttcacgcggctcataatgatcgtttaccggtgagagcaatcattggagtgcagttcactgatcacacacagctaagttgtcacattgactgtaatagtagctcgatcagcaccactacaaagagtccaacaaacgcttctggttcacattacct

SEQ ID NO: 23247 - DNA, 508 bp, Arabidopsis thaliana columbia
gatttagatggtgaggatagattcagatatctatttatatcttttggtcagtctattaaagggttttacaagcctattcgaaaagtgattgtggttgacggtacgtttctgaaaagcaaatacaaaggagttatgttggtagctataacagtagatggaaaaaaattgtcgagggaaaagaatcgagtccgaggaatcatcagtcctggacttggaatcgtcgagaaaattttaccgggtccgaggaatcgttgaccaggggttggaatcgtcgagccaaatctattgggtccaacgatatccactgccgaacacgtacttttacaggaattctcgatccggacagccgtatggtcgacgaatcctcgaactggacggccatgtgatcgacgaatcctggaaccggacggtcgggtggtcgacgaatcctcgaactgaacggccggatgatagaggaaaaaagaaagtgctgaataactttcgaaaagaaagtgcaatgttttgtgat

SEQ ID NO: 23248 - DNA, 816 bp, Arabidopsis thaliana
atacctaagatagagttgatcttgatgttgtcattgtggccacaaataggcctcggtgttcggatacccgtttgggttcggatcaggtttttcgggttatccgattttcgaatttagaagtatagacaccgttcgggtattttaagattttgggtttggatcggattctagtcggatatttcagatcagattcggattacccaaagtttccaaaaatcaaatttttataatcaaatatatccaaactactcgaaaatacacaaaatatctaaaaactttggaacattttttactcaaatttacttaaaagtagattaaatacctaaaattacttaaaaatatctgaaaatctgcatattttgactattaaattattacaaatgtaaatataaaaaatattttgagagacaatgctatgatgatgatgatgaatttgagagacaatactatgatgctgagcgacctgatcacgtaatggagacaaatgatgaatgggatatgtatgagcaaatcgagagagcatcaagcagaaaagcagttctccaaggataaacctccttacatttggatgctccagatctttaatagcggtgaagagttaaaagatcaacttctgagacatgttttgaagatgaattatgatgtcaagttgtgtagatgggatgcgactaagttggcagctatatgcagtaacgagaactgcaactggaagatatactgctctgcacaaaagcgtacaaggaaatggaaagtgcagacctatagggacgagtaccccactctataagcgggaaagcaagaatgttgaaacaaggg

SEQ ID NO: 23249 - DNA, 1157 bp, Arabidopsis thaliana
ggattaatctcgtatgcaaagttttgggtcactaaaaatcactttttggactgggccagtatgagtttgacttctaactaatggactcattaaccaaattcgatttctccaacttgtcagcgactccctgaaaatgttgacgtcagcttctcggccatgagacctgcgacggagcttgcggtgaggatcggccgagagctgctaaaagtttccggaagctctcgagctgctcggatatggagtccattgattgaacagagtcttcacggtctcggttttcgtcactcaataagcccttcgcttgtggctcgagtcatagacccgtttctgctgaatcatcattctcttgctctcggtttcttcaattgggctgctcagcaaccaggttactctcacgactccatatcttaccactctatcttcaagtctctttcgctttctcgtcagttctccgccatggacgctcttttcaaacaggttaaatcgaacaaaatccttctcgattcttccgtgtatcgctcctcattgatacgcttgtgctgggtaggaaagctcagagtgcgttttgggttttagaagaagctttttcaacgggtcaggagattcatcccgatgtatgcaatcgtcttttagctggtttaacttctgatggatgttatgattatgcacagaaactgtttgttaaaatgcgtcataaaggtgtttcgttgaacactcttggattcggtgtctatataggatggttctgtagaagttctgaaacgaatcagctcttgagattggtggatgaggttaaaaaggctaatttgaatatcaatggctcaatcattgcactgttgattctccatagtctttgtaagtgttcacgagaaatggatgctttttatatattggaagagctaaggaacatagattgcaaaccggattttatggcttatagggtcatagctgaagcgtttgtagttactgggaatctgtatgagagacaggttgttttaaagaagaagagaaagctcggagtagcacctaggagcagcgattaccgagcttttattctggatttgatttcagctaagcgattaacggaggctaaggaagtggctgaggtgattgtgagtggaaaattccctatggataatgatatcttagacgcgttg

SEQ ID NO: 23250 - DNA, 555 bp, Arabidopsis thaliana
tgcaaatatcagctcaaaagtagccctgccaaaatcccttgttcatctaaagacatggaagactcatgtacatagacacatgcatcaaatgaagaataaggttctaacaacagtagacacgctcactttcaaaagaagaaagaagcatacaagtttggagagcatcatgagggtatcaagacatcatcttgtaactttaatttgaatttgactattaaagttttaaagacatcatcttgtggtggaaaaattagtcacagtggcactgattgaaacttgtttattacattaacattgccattaccattgtcccaaaacaattgaaggacacgtcataagaaactatcagctttcctttttgtttattacatctctcaagtctcaaccttcatagctccatagctcctaaaacttcaccgtaatgtcgatggaagcccacgcccgtaaaataagagtgaaatatctacagggtctctacaaggcaggaggattctttcgtgcaatgtggccataaaggtgagacgcaacgactttcctatgatgatgagtgttggt

SEQ ID NO: 23251 - DNA, 538 bp, Arabidopsis thaliana columbia
tggaccctcttcttatctctttctctctctatgtatgtttatatatacgtacatagatacatacatatttggtaagagtgcgttacttatatttattacagtgttctggtgaacactttaatgctcttctagggtttctttctatattttcatggtttgagtaatatacgttgttgcagaatgtgactgacttatattaacattcatgggttttgcattaaatgaagaaggtctttcactaaattagcaattgactcgacctctatattcttctttcattctctcctttaaatggtagccacaataactatagcatttattgattatgactcacggaataaatatagtataaagttttcatatatatgaattaataactttattatcgaccgttgtgttatttacatttctttttgttttgctttgtagacgtgatagttacatcacgcatagggctttctgcgatgcattgatacaagagactgcaagaaaccctaccagtgagctttacgtcaatgacagctgctagtagtggtgc

SEQ ID NO: 23252 - DNA, 299 bp, Arabidopsis thaliana columbia
tctagatccccgctaatccaattaacgaagcccacgaagaaagaagtacttccaagatttcctagtgggcaaaaggtggatgatttcgtgatcgaagttgcgttagacgaagaccagccagaccgtaaaatttgaattgaggctactttgaccggtgaactaaaagaaactttgatagaatttttgaggaaaaacaagaccttatttgcgtggtcagcagcaaatatgcctgagatagatccgagcataatttgccatgagctgaacgtggatctgagctttaagcctgtaaaacaaaa

SEQ ID NO: 23253 - DNA, 652 bp, Arabidopsis thaliana
tgcacaaaagctatttgtgtcctaataacataccctttgtcgataacaagatcccagctctgccactaagagcgtagcggatgaagaatttgatgaaatcaagcggggatgtagaatatgatgttatagagccaaatgaccccggcccatccccaacctattccttctatcgcagcaaagctccaatttgcatagactgcaattagagtagccacctgttttggaagcaaaacaaaaattcatataattagacccaaagctcataacttttgaggttctcattgtgtactgatcacacagttaacaaacttccggaattaccaactgagcgaggataaaggcaatcataagaaatatcccgggacgttccacaaaagaccagcttcgcgatcgggtcacaaagataagtgcctgactgataatactgacttgcaggtatatggctgaggcaagctttcggaaatcatcatgagcagttttctcaagtgtcgcaactccaaaagttctctgaagtttcaagtaagaaaagctgagattagctgttagtgaaagaattaacaaagcaaataaaaccaacgagatacacacaagtgacggagaggagagaaaatgtaccgggaagaaatcggttttgtatgaaaccagaaaaata

SEQ ID NO: 23254 - DNA, 377 bp, Arabidopsis thaliana columbia
acgagcactggcgtctgtcaatgctggttgaatgttatttttagaaaatgtttcttctgtatctgactctgagtcactatcatgttcaagaagtctcttgatcccagttctttcatcaggcttaatccgtgtgtcatcaggtttttgcttcggtgtcacaacaaattccgaaactcgatgcagattagtctgcatctgtatccatcggtttaaagtgggatacctatgaagaaaaagtaaaatatcactgaataagatggaaaagaggaaccgagttgatttcaaattgaaaggaggaaagaactctttggcttgacagtacctctcagactgatcaagagaaaattcataaaacaatctgtctgcatcaggagaac

SEQ ID NO: 23255 - DNA, 780 bp, Arabidopsis thaliana
  unsure (1)..(780): unsure at all n locations
tgtgaccttgtctatgtatacttactactttgcatacactattgttcgttagagcagtaacttcactgttgctaagtattaacctttcattactgtatgtagtagcgtcttttggcttttccccccttttataacagcaatttatgaaatgttttgcaggtaacgccgaatctctatgggaatttagttgcaaacactgctgctggtattgctggaggcacaggagtcatgcctggaggtaaaaaaacatcctgtattgatattctctcgagctatacattagtggataaagaatagttctaaaatttatacatctgcgacattaaatacaaaaacaggaaatgttggggctgaccatgcggtattcgagcaaggtgcatcagcaggaaatgttgggaaagacaagatagtattggaaaacaaagcaaacccagtggcattgcttctctcatcagcgatgatgcttagacaccttcagtttccttcatttgctgaccggctcgaaacagcagtgaagaaagtcatcgctgaaggaaagtgccggacgaaagatcttggtggaacaagcacgactcaagaggtcgttgatgcggtcattgcaaaactagactgactttgacaaattacgtgttcccgctctgcataaatcatcaaattcctgatacagattttgtgttgcaaaatatggggtatgatcaagcacaacggttatctggttttgtactcgagttttattatattctttagccgtggaatatttcgataagaanaaaaaacatg

SEQ ID NO: 23256 - DNA, 1497 bp, Arabidopsis thaliana
tgaaaaattaaaataatttttatttctgtatcttcaatgatggtaaacaaatgaaagcttcaaagtttatttttgtaaattcggaaaacgaatgatattattgtctacaatttcttcaaatcatcattataattgttttgctcttttgaaaaaataaaatggagatattaatttgcttgaactcaaaacgacgacgtagcacaactcctttccactcgaataatccatttggaggctttttttcattacagaacacacactctctctccaatggacctaaaatgaacattctccgacctccgacgtcatcatcatcttcgtcgtttcctccatacccaaagcccgtttcattaacccctccggtatctttcactctcatccacaaccccataaacctctgctctataaacccaccattcaccaacgctggtcgaccaattttccaacggtccgcctccggcactgctaatagctccgccgaagacctctcgtctttcttgggctctccctcagaggcgtattcaacacacaacgaccaagagcttttgtttctcctccgcaatagaaaaaccgatgaagcttgggctaagtatgttcaatccactcatctccctggaccaacttgtcttagccgtttagtttctcaattatcttatcaatccaaacccgagagtctcacgcgcgcacaatctatcctcacgcgcctccgcaatgaacgccagctgcatcgccttgacgctaattccctcggtctcctcgccatggctgcagcgaagtctggccaaacactttacgccgtctccgtcatcaagtccatgattcgttctgggtatttacctcatgttaaagcgtggacagctgcagtagctagtctctctgcttccggagatgatggtccggaagactctatcaaactcttcatcgctattacgcgacgagtcaaacgatttggtgaccagtctttggttggtcaatctaggcctgatacggcggcatttaatgcggtgcttaacgcttgtgctaaccttggtgatactgacaagtattggaagttgttcgaggaaatgtctgagtgggattgtgagcctgatgtcttgacttacaatgttatgattaagctttgtgcgagggttggtcggaaggaattgattgtgtttgtgttggaaaggattattgacaaggggattaaggtttgtatgactacaatgcattctcttgttgcagcttatgttgggtttggagatttgagaactgctgagaggattgttcaagcgatgagggagaaaaggagagatctttgtaaggttctacgagaatgcaacgctgaggatttgaaggagaaagaagaggaagaagcagaagatgatgaagatgcgtttgaggatgatgaagactcgggttattcggctcgggatgaggtaagtgaagagggggttgtagatgtgttcaagaaattgctacctaactccggttgatccgagtggtgagcaccattgt

SEQ ID NO: 23257 - DNA, 546 bp, Arabidopsis thaliana
cagagcaattcgatgtcatggtaaatgtttttcagcacttgttgatgcttgggctagcttccttctattttggtttatttacttgtatctgctttgcaggtgacgcctaatctctatggtaatctagtggcaaacactgctgctggtattgctggaggtactggagtcatgcctggaggtaataataaaattcattttaccttgatctaatgtacaagcactatagagaagtagattctcttgcttatgctatgaaattttctgtaggaaatgttggggcggagtatgcggtctttgagcaaggtgcatcagcgggaaacgtggggaaggatacaacggaatagcaagagaatgcaaaccctgtggctttgttgctgtcatcagccatgatgcttagacaccttcagttcccttcttttgctgacaggcttgaaaccgctgtgaagcgtgttatcgctgaagggaattgtcggactgaagatcttggtggaacagtccactcaagaggtcgttgacgctgtcattgcaaatttggattgacttgac

SEQ ID NO: 23258 - DNA, 595 bp, Arabidopsis thaliana columbia
tgtccaaaaaattatagttgttgcccaaataggcaaaagcctaaccatcatttttacttcctcaactttggtcactgagcttagcttccaagggtttgggattgcaactccatcaagggtttgttcaaaatctccttctgcaactatggccgccttgtccaacaagctacacacaagattttattagatacaaaatttactttaatttacttcctctttgtaaagattgaactgagaaactcactgaaactgatcagtatgttcaattctaatgccttcagggttatcttcataaagataaacaatgctttgaggtagttccattttcctctttcggaacgcagctgctatgacctgaaatatttgcacaacgggacttccttggctcttcttataacggtatctcttagtcccacacaagaatattacaatagctatagccatagagacagtgcagattccataagcccaagatcttcccacttcatcttgcatgtaactaaaacagtcacagccaataatgtcccatactaataaagaagaagacctgcatgtccaattacaatttattgaaaagggacctatacaatgtata

SEQ ID NO: 23259 - DNA, 589 bp, Arabidopsis thaliana columbia
  unsure (1)..(589): unsure at all n locations
nnnnnnnnnnnnnnnnnnnnctaaagctttcgtctctttcgggttaagacctgccgcagttcgtcgagcattaaaatctccggctgcgtcaccatgcagcgggcaatctcaagacggcgctggtcaccataggccaggttactcgcctgacggttggcgtgttccagcaaaccaatgcgctcaagccaggtcgcggcgcgtcgagccttcgctctgggcgcgacggaaggatggcgttttcaacaggccagagaacagcccggttttcagttgctgatgctgcgccaccagcaggttttcaattaccgtcatttcacggaacagacgcacatgctggaaggtgcgcaccacgcccatgcgggcaatttgctgccccggtaaaccttccaggtgctgatcgcgcagtaaaatggtgccgccggtgggtttgtagaatccggtcagacagttaaaaaccgtggtttttccggcaccgttaggccgattaacgagacgatctcctgcgggtacagttcaagattgacgttgttcacgccagcaggcgccgaacgcatcatcaggccgttacagataataatggctgctcatg

SEQ ID NO: 23260 - DNA, 1341 bp, Arabidopsis thaliana
ttattgattgtcctagagagattatcttacttgcttagtgatgtttagttgtggttctgtttctatactttgacttagtttttcccaccagctctaaagaaggcaaccgttgcttgacaaagctacggataaagtggtcatcaccaccaaaaagaagaaagcaccatgaccaaatcaaattcatggtcagagtaaatacgctgatcaagtggtaatcactaacaataagaaaagcaccgtgacgaaatcaattcaaggcccgagtaatcatgttgaccacgtggttatcactattgatgtagtcgtcaatcgttaaacattaatcatagccagacgaagcatcgtttcttcttgtgccatctttacaacattatgtattagctcttcttcgattcatgcccatttttctctcttatgctatataacattgttacttgatagaagaagaatgttttgttaatctttcttgacacgtgacaaaaagaccaataatctctgacttatttatacaaggatagaaacttcaatttgaatttttgactattaagattttaaagccatcatcttgtggtggattttttttttcttctgaatactaggaggttctgggccgaaaccagtaatcccttaggcccaaaaccgcagtatgtaacattagtttcgtctcaagtgtcactcgaaccggtggcctctaagctttgtctagggtcttttaccaattgagccaacgacacttggtcttgtggtggcaaatttagtcgcaatggcactgactgaaacttgtttattacattaacattgccattgccattgtcccaaaacaattgaaggacacgggacataaaaaaaatatcagctttcttttttgttaattacatctctcaaccattatagctccatacctcctaaaagttcaccgtcatgtcgatggaagccagtcgcccgtaaaataagagtgaaatatctattgggtctctacaaggcaggaggattctttcatacaatgtggccataaaggcgagactcgacgactttccctatgataatgggtgttggtgacaccaatccagctgactgaatctcagttgcaaaatctttaagctcagcaaaaacctgtaaaatatcccaaaagccttaagaactcaagtaacataccatctcttgatcgttggttcctatcaagaaagtatggtttggttgcttattgtacattgtagttgagtagaggagtggttcacgttcaaccgcagcagctggtgtatcaaaagggagaccatggtccattagtttttgtggaagagaaggtaaagttttgaaacccatataaacgacaagtgttgt

SEQ ID NO: 23261 - DNA, 526 bp, Arabidopsis thaliana columbia
gctattctgtggttttttctactctgtctttggtaataatgacttgaagaagaacaagttaaagattggattttgatcctgctcggagagatgtagcagcgattcggagacgcatatataacggcgagcaaagctctggtcgccatggctaatttctctctcgactcctgtgaatgaatagatagaattgaccagcttcataacaaacatttctaaaacgacacagcctgtgtcgttttctccaaggactaactaaaccggttttaaccggtccacttacaataatcgaattttgtttttcagttttcagtcagaacacctctcttttctgctttacttttgcaatcagcttacaaactagtgaaagatggaaactggagtgctatcagtctattttgatatggaaaaatacagactaaatgtagtacgaaacccatacacacaaatagatatcgagctatggatttattagcctcaacccgcgctaacattcttcgagaaaagcacgtccgagatttgttgctag

SEQ ID NO: 23262 - DNA, 356 bp, Arabidopsis thaliana columbia
tggctgcacaagcaaaggcggtggtgtgtggatcaacagacaatgtaccttccaaaaccttcaccacttcccccattgatggtcttaatcgttcatccgtctgaacacaccaaaatgagattctcaaaacccgctcaagctcctctacatcgaagcatccttctaatcctttgtctacaacggtttctttccttcctccaatccactctctatacacccattcactcactactccttctggttcgtacctacccgttattagagctaaaaccgtctttccaaaatcttcaacatctttatctgcagcacataaaccgaatccatattctgttaacttagcttccaaatcctctttc

SEQ ID NO: 23263 - DNA, 510 bp, Arabidopsis thaliana columbia
ctccgactttccatcgagagacgcctttaccgacggattcaatggtcccagaacattcgagaccaaggtaagggcttgagccaggtggtggattataaaggccaagtctttggagagtatctgcacgattcaaagcagtagcgagaactctgatgagaacctcatcgtctttaacttctgggtctgccacatcacggagttgcagaacctccggcttacctggctccgagatcacgatcgctttcattctctcaagcttccgtattcaagtcctcttcttctttctctttagtattttttctttctcttagactagatggttcgagcaaacggaagaaagagtaaagagtgttgttattgaccaatgctccacggtttatttgttccgtcaaattccaaaatctttggtttgatcggtactattcaaccgccgcaattgggatttaacgctcaatttttatattattttgtgtttaaaagtttaaccgcttattttccgcgtttgagatt

SEQ ID NO: 23264 - DNA, 368 bp, Arabidopsis thaliana
cgattgtttacggaatttgtcagtgagctctactccgagaataccttctggaaatccggggaaattctcgacgtcggtggtggttgttagttgaccaccgggagcgatgtcgttagccatccatccttcgaagagaagaggtttaagttcagccctagctgcgtaaatcgccgccgtgtgtgccgctgggccacttcctacgatacagagccttgtgttgtgagtttcgagaccattcatgacggcggatgaagaaaacgcggcggagcgagagacggcggttgagagagagtggattcaccaccaagccgtgcaaagcttcgtgctttgcttatcaaacactttaaacgactcacacagggcagtat

SEQ ID NO: 23265 - DNA, 537 bp, Arabidopsis thaliana columbia
gtgcgagatgcgtgcctaacaaaagcctcgaccaatttctctttggtaataaattctccttgagtctatctctagagcattgcattgtttcattaattgttagactatgcttttgtattgcattctatttgatgtttccgctaatagactttgatcggttctatcataaagagaaaagaccatttgaacaacttttgaaagctctagggctaaattgataagaaaaaagaacattaacaaatgtattaaaaatagagtagaatcttataagtgatttctttgtgattttcagatgagagtcaaagcaaggtcttaaactggagccagaggtaaacataatccttggaacagcggagggactggcttacctacacggtggatctcccgtgaggattattcatcgtgacatcaaaaccagtaatgttcttctagacgaccagctcaatcctaagatcgctgatttcggtttggctcgatgttttggtctggacaaaactcatcttagcaccggcatcgcaggaactctgtaagctactt

SEQ ID NO: 23266 - DNA, 1113 bp, Arabidopsis thaliana
tctttaaacctttctattaagaacacacaaatctacaacctttttatgttttttaattgtctatgtgatttgttttctgtggcagtgaattttttatattatcaacttatcatgttagctcaagattgcatctcaatttgtacttatcttagtggtaattagaaaaaaaaacaaaattaggctacaatagttttgtttgtttgtttgtttaggtgttagggatagggtttattttttccgaagtttattagtgtttactatttagagtttaatgtttccaaaattttatggtttaatttatactctcagattaggttaaacatttttatttttaaaaatctataatatttttctaattttactttaaattgtagactaaataattgattcagccttatattatatcttaaactttgcaagaatcactttggcttgtaatgaaatgaaatccactgttttcatattcaaagtgattctagtcttgtattaactattaaatattccaatctttaacaacaaagaaaactataatattcaaagccatgtatataataatggacatggtccaataatttggcaatttaaaaaaatattaaagagaaaagtagattcaaataaagtggtctatatttcaaattgcaaaatgtgttggatctcaatgagccagtcaagattcattataaagtctttatttagcacagcaggaggtttcttacttggatctgctctctcaaatccgccgtctctagccaccgcgttttcttcttcttcctcgtcctcctccgccgccgccgccgtcgacatggaaactcacaaaaccaaggtttgcatcgtcggaagtggaccagcagcacacacggcggcgatctatgcatcgagagcggacgttaagcctcttctcttcgaaggatggatggctaacgacatcgctcccggcggtcaattaactacaacaaccgacgtcgaaaacttccctgggttccctgaaggtattctcggtattgatatcgttgagaaattcagaaaacaatcggagagatttggaactacgatcttcacggaaactgttaacaaagttgatttctcatcgaaaccgtttaagctattcactga

SEQ ID NO: 23267 - DNA, 615 bp, Arabidopsis thaliana
  unsure (1)..(615): unsure at all n locations
agaatcaatcccagctcatgatgatgctgtaaactcggtggtatcaacaacggaagcgattgttttctctggatcagccgatgggacagtcaaggcatggaagagagaccaacaaggaaaatacacaaagcatacactaatgcaaacattaacaaagcaagaaagcgcagtcacagctttggctgtaagcaagaatggtgcggcagtgtactttggttcgagtgatggttgtggtcaatttttgggagagggagaaacagttgaactacggtggtattctcaagggccacaagcttgctgttctttgcctagaagtggcagggagtcttgtttttagcggatctgctgataagacaatatgtgtgtggaagagagatggaaatattcatacatgcctctctgtactaacaggtcacacaggtcctgtgaaatgtttggcagtagaagcagactgtgaagcctccgaacgtcgggacaanaaatggattgtatatagtggaagcttggataagtcagtanaagtatggggagttcagaatcttcattgcatgaccagatgagttgatgcacaggcacacagcacatgttattccatctgaccatcatgctgatgca

SEQ ID NO: 23268 - DNA, 560 bp, Arabidopsis thaliana columbia
ctggtctgcatcatttgcttcgcttcattttccagctgactgagaaagaacgaaaaggaacattacagattcacaagaagacagtaccaaaagcatagaaacagaaggttaatacctaattttcatagaagcgggttcgacgccttcttgaactgtaaatcagagaaaacaaggcatcaagcaatgtctcttaagtaaccatcatatatagcacaagaaagctactaaaccaggtcaacaccccaagctattatgccagaaatatcacacaatggggcctgattagctaatttgtcattcaagaggtgcctaaaaaccaggctcactggtaagcctttaatatcaatgcagaataattataaactatgaaagtaagaatgtatatctctgcagacagcaacaatacaaaattagtggtgtaaagctatagattattctgacctttggtgcatagagctacttctgttagctccacttgtgctgatgaactcgtcatcgatctcatctactctatactccggaaactctatggatgctactgagctgtcatcagagttgga

SEQ ID NO: 23269 - DNA, 285 bp, Arabidopsis thaliana columbia
ctagacccatactccgctagcaccacggcgtctaggatctgtggatgttcctctattagatcctcacgtggatgagtccatgataatccagtctcattataggcttacccgtcgtcatccctcaaaactccttgtttatcagctctgatctttccttcgagcattgctaatttctgagttttgcggttggtgagttctagtatatctagatcaagtgtagacaagttgatcaggtcttttttctttgaggttctggtttgcctaggcatacactgaaacacagaa

SEQ ID NO: 23270 - DNA, 530 bp, Arabidopsis thaliana columbia
cgcatatggtccgtctggtgccgtggcccaaccacctgttgtctcgtgagatatctgcgccaaaaacgcagccacttcgcgtcgccttgtccaaaagtttcctacgctcccgaacttcgggaaggatcttgtagcctccacgaaagcttcataggggtagaaaccttttgcagggcatgcgttgttgtccttgtggatgaagatttggtcgtagagagttcttgggactaggctcatgatcggtgcgggtttatatttattgtgttttcgagcttcggtttcatggagagaggatgatattgagaagatgaagaggagtagacagagcaatagagagatttgtttctccatatttgttcttttttgtgttttgtgtgagaagatgtggttttggctttgttgttatatagagtcatagagatgtagtagtggacgacttagttacatgtttttgttttggtctacgttttgactttttttagtggagtttatactttttattttatatagttgcaattatttaagggttt

SEQ ID NO: 23271 - DNA, 644 bp, Arabidopsis thaliana columbia
  unsure (1)..(644): unsure at all n locations
gtcctcgagtacatagccgagattgttttcttcccggggctgaaacaacactggtggatcagcaatttcggtcttacaatgatcatacttggagaaatccttcgcaaaaccgcgataatcacagcaggtagatcgttcacacaccttataaaaattcgccgggaggagcatcataagcttgtgacagaaggagtgtatcaaatcatgaggcatccgagttactccgggtttctcatttggtctgtgggaacgcaagtaatgctctgtaatccaatttcagcgattgcgtttgcggttgtggtgtggcggttctttgcagagagaataccttatgaggagcattacttgaagcaattttttgggagacagtatgtggagtatgcgcagagagttccttctggtgttccttttgtaaactgatccttagatcaattgtgaacatatacgagcattgtttgattaccttttacatagaaaattatgaaagagatgttgtactcatgttttcagttaatgttctcttgtcaatgtctttgtgtntctttttttttattgctaaataatttggatattattcaaagactctgcctgagccagaggtttatggttatngacataaaatttgacactgggttttaaagtga

SEQ ID NO: 23272 - DNA, 487 bp, Arabidopsis thaliana columbia
ctctagagctgtctccatcgtcttatggtccatattcgcaatcacatactctaaaccatcccggttcatggcaatggaacgaaccgcctggagacacgttgagcttcacttggtgaacaatcacacgccatagttcggtttccgaatcaaacgttgctgtcttcaaaagatttcttaaatccatccacaagaacaaaccggctttggcctttaaccaaccaatccctaaaccatctaaaccggtggttatctcagcgtgccttgcagctaaccgcaatttgctctcgcggataaactcgtctacaaactcttcatcggataacattttagcgatcaaatgctgcgtttgtgacgaaacaagaccgaaactcgacattttccttgcgatctgaaccaccctgtcattgtaagagtatactataccaactcttaaaccaggcagacccatatctttagatagactatacacaatatgtatcaaatcgcg

SEQ ID NO: 23273 - DNA, 1992 bp, Arabidopsis thaliana
ggtattcgatctcggttgacgtagaatccactcaacagtaaacagtaggcgagataggtaatggagaccatgtaacataacatgatattcggaacaacaccggatataaaggtaacgacggaagatccagaccaaaaggaggcatagattaggaggcaatagaagacaaaaccctctaatcccccgctcaatccaacggtccagaatgtgatcgcggaaaataccaaggaaggtgcaagtagctgaggcagggacacaagagagtgtgatatgacgtatgaagatgttctgtacgcgttgtgtgttgtctctcttaagaaaatgtatcgttcttggataaaaacggggacattgtctaaacaacaatagaacattgttgggacgacaaatgcgaacaaagtcaatctctcttgtgctcctcttggagtgtggtctagcttccaatacacagttgctaaaagacaaccagtcaccattaccgtagcaatccttgttcctactagctcaggcatccggatccagtttttcatgtaccgtttggctaagatgaatgtttcgaacaacgacgggtttgcgtatgaagatactgtttccatggaagtgggattggatctagatgagcctgagactagtttgcctctagaaacactcgcattaatggcttcttttaaagataatgaacggtcttggtcgagcttattggtttgtggagcagattggatcaggctgatcttgttttgttgccacttttcgttgaagtctactaaagctttcgtaccttcattggatccttcaagctctcgaactaaatcaagtgcgaactctgatatgttctctttctccgggatcggacgaccgaagtcggagaagaatccgggaagactcgccggagatccattgaacacacttttgccacgagatagaatgataagccgatcaagcaactccacgattcgagcactaggttgatggatcgacataattacgatactgccactttgagcaattcgtttcaaaacttgcaccaccataaacgcgtttgtagaatccagccccgacgttggttcgtcgaggaacaagacgataggatcgtgtataatatcgattccgattgaaacgcgccgtctctctcctccagaaactccacggtgtccttcgtctccgattaccgtgttcgccgcgtttcttaaccctaattgatcaattagggcttcaacacgctccatcttcttcgacttagacaaacttctcgggagacgaaactcggaagcgaacattagggtttctttaacggtgagcatcggaaaaagaagatcgtcttgcataacatacgccgatataactttcaacaatcgagattgcaaaactttctctccgctttagagttacagagcctctcaagcttccctcagcaactctccccgctagtgcatcgatcaacgttgattttcctgctccacttgcaccgagaacggcgaggatatcgccgtcagaagcctctccggaaacatcatcgagtagagtctttactccgttttgccgtgagaagccaaaccgccggcgaagtgtgacatcgtattgaagattgttaaagtttaagacgtacgggacaggttttacgtacaaggcttcgacatctattatgtgatgtgcaggatcgtcgctttttacgccgtcgccggaatctccttttcggaaactgtcgcagtctttcagcaactcgtcgagggttggtgatccgatgggagtgatatactgagtttccgccgaaacacgtgtcatggcaatctttctaccgctgagtgatagattcatcggacggcgtcgtttagagttttggcttaagaaatcatcaaactgattgtgaagtatatatggtggaatctgaaagttcttagtagtgatattttttatgatgggacgtatagtttcatacgttggttatttataagaaaaatgtaccatgtgttgtacttctgtactaaaaaaaat

SEQ ID NO: 23274 - DNA, 674 bp, Arabidopsis thaliana
gcgaagaagcgcggtacatcgcaggcgatccgctgaagacagtttggccacgggacaagaagagaagacgatcaagcaatcgaagaagacggtaactaggttgatgaagagtcatgatcaccatacttccactctgagcgattcgtttaagaaccttaataacacttagagcacttgtagagtccagacccgaagttggttcatcgaggaaaagcagaatcggatcgtggatgatatcgatcccgattgaaactcgccgtcgctctcctccagagattccacggtgtccttcatctccgatcaccgtattcgccgcgtttctaagtcctaactgatcaatcaaggcttggacacggagagacttctttgatttcgaaaggcttcgcgggagacgaaactcggcagcgaacattaaggtttcttcaactgtaagcatcggaaaaagaagatcgtcttgcatcacataagctgagatcgctttctgcattttcgaattgagaacttctccgtttagagttacatttcctttcaagcttcctttagcgattcgattcgctaacgcatcgatcagcgtcgattttccagagccacttgctccgagcacagctagtatctctccgtctctagcttctccggtgattccgttgaggagcgtcttcgtcttggaagagaag

SEQ ID NO: 23275 - DNA, 552 bp, Arabidopsis thaliana
ctgcaggctagaggatcccctttccatccacggaagttatatataaaccgactcaaatgagaagcttcccttgagagatcaacttgggacaacatgtagacactaaactgttgcacacactcgtccaatctaagccaatttaaccccggaataaaagtggttagcctcgccacgaaattaattatcacaaaatctcgcttcatcgtttcctcaacacaaggatgtctaactttcacagcaacttccgaggacttcaccttttgtcctgcatactgaaacttcaaggaagctcggtgtacttgagctatactcccagatgccactggcgcctcatcaaattcctcaaatatctcagagagtttacgaccaaatgcattttcaatgctctttttggtgaacgcaaaactgtgctcaggagcattactgtgaagctttgaaagctgcaaacacaaatccttattaaaccgatcaggtcgcgtagaatccattgaccaaatttgataaaagcaggacctgctttctccagagttcgatggaggactcatactgcag

SEQ ID NO: 23276 - DNA, 1000 bp, Arabidopsis thaliana
tgctcaccgttaaagaaaccctaatgttcgcttccgagtttcgtctcccgagaagtttgcctaaatcgaagaagatggagcgtgttgaaaccctaattgaccaactagggcttagaaacgcggcggatacggtaatcggagatgaaggacatcgtggagtatctggcggagagcgacggcgcgtgtcaatcggaattgatattatacacgatcctatcctcctcttcctcgacgaaccaacgtcagggttagactccaccaatgcgtttatggtggtgcaggttttgaaacgaattgctcagagtggcagtgtcgtaattatgtcgatccatcaacctagtgcacgtatcattggtttgcttgatcggcttatcatcttatctcacgggaagagtgtgttcaatggatctccggttagtcttccttcgttcttctccagctttggccgtcccattccagagaaagaaaacatcacagagttcgcacttgatgtcattcgagagcttgaaggatcctctgaaggaaccagagatttagtagaattcaacgaaaagtggcaacagaaccaaactgctagagccacaacacaaagtcgcgtatctctaaaagaagccatcgctgcaagtgtttctagagggaaactagtctctggctcatctggagccaatcctatatcaatggaaacagtatcttcatacgcaaacccgccattggcggaaacgtttatcttagctaaacggtacataaaaaactggatccgcacgcctgagctcataggaatgcggattggtactgtcatggtgactggtcttctcttagctactgtatattggaggcttgacaacactccaagaggtgcacaagagagaatgggcttctttgcgttcggtatgtcacaatgttctattgttgtgcagacaacatccctgtttttaccaagaacgatacattttcttgagagagcaacgcacaacgcatacagaacatcttcatatgttat

SEQ ID NO: 23277 - DNA, 523 bp, Arabidopsis thaliana columbia
aactcactaatctcgtgatcgacggaggaatcacaccgtataagtgattatcagctagattcaacactttaagcctcagtaacttcccgatattcgccggaatcacgccggagaatttatttccgacgagatctaaatgtctcaagaaagggagattctcaatgcaactaggaatcacaccggagattcccttccaatcagcgatgatgataccggagagacgagtgagcttacatatagagggcgaaatggagccggtcattagtccgctccgtttcgccttttggaaaagcgggtcttcggattcacctcggagtgtaatgccggcgactcgacgggtgttgggatcgcagctcacaccataccagcctttgcaacagtctagacctttccatgtgttgaaaactccaatgtagggctcgttgagctttgctcggaactctagaagcgccgctcggtcggacggtaagcaagaatggacagtcgtggagagaagcaagaagacgacgacgttagtcaatag

SEQ ID NO: 23278 - DNA, 473 bp, Arabidopsis thaliana columbia
attgttacgttgtgtaatgtcaatgttagattcataaatctttaactagtatatgaccactcctagttcaaattcagatgttccttggtctgatattttcgttccttctagtggacctattggttgagtcatgagtgagagcaatagccaatatgatgaaatgtttttttgatataaaattggaaaggatgctttggagccgcatatgagcaaacaaactctggagtttcactggggaaaacatcacagagcttacgtggacaacctcaagaaacaggttcttggaaccgagcttgaaggcaagccttagagcacattatcacagcacttacaacaatggtgatctcctcctgctttcaacaacgctgctcaggtgataattacaaacctatttttagtttgagattataaaatgggtgtgtgattggttagctgatgatccattggttatgtttataggcgtggaacacgag

SEQ ID NO: 23279 - DNA, 511 bp, Arabidopsis thaliana columbia
tcgccaggaatgataaatcgaatggcttttgaagaaacccctcaataccaagaatagagattaccttcgccaacctttgatccaaactaattaactcggcggatagagttatggctagatcttgtagattctccaattgctgcagctccttcaatacgctagcatctccatgaactttagaccctagcaggctcaacactcttaaactcaacaaccttgatatcccactgatactacaaagtcgcgcagtataagccaaatctaggaaagttagctttttcaactctttgaggccaacaggcagttgctctattcttgtaaacgacaagtcaagatactgcaacgagactagccccgatatctgctctggaagttcattgaagtcacgattatctgaaagatccaaaacaactagcttttgcatataccgaatgaattcacctgatagattcttcaattgattactttgaaggaacaaagttgtaagttcagaacacttggactcgcatgt

SEQ ID NO: 23280 - DNA, 509 bp, Arabidopsis thaliana
gtaacggccgatccctacatagaatcgtcaaactatatagtgctttctcaatacatatcatgacctcgccaagtaaatcctatggccataccagaagaggagaaaagacaaaagattgacagtggcaggaaaaattctgtgagtgaaaaaacgcaaaatgaaaaacaagcagaacacatgaaagtaccttaaatcaacaggtataccaccaatggggaaaacaattctatgaggccactgaagcatgtctataacgatagtatcaacagtgtcctaacagaaagagaagcaaaaagctgtgtataagaccaaatgggaacaacaactaaaacttttggaaactgcttgacctaccaagagaggaacttacatcaatcatagcagatagtccaggaattgctgttaagcttccacggacagccttcagagtgtaatcaattcttggttttggctggttgagaacatttaaatagttggtcattgtaagacaggagatataaaatgataat

SEQ ID NO: 23281 - DNA, 3733 bp, Arabidopsis thaliana
gttatgtttgtggttctcaggaatagaggaataacgtgaaggtagagtaaaaatttaaaacttttactctaccgagtgcctagagatcgagtgcattggtcgagtatgggtgatgtttaaaacttaaaaacttttaaatcatcattttactcgaccaacgggagctacagagtcttacagagagttcatcaagtttaaagcagattttaggatttactgaaattttcctagtgaagatagagtaatgattcagaagaaagagacaagcgagggacccactgttgcaccctatgtctcccacgctcctaaccaacagacaagaaatccaactccttcttctcacaaccactcgacccctcaccttatcccatctccacacaccactcgacctcgacgacatcaccatcccccacctatcacttactcgacctcgttatctccacctcacctattatacactcgacccctcctcattcatcaccaccaacaaaccaaactctcatctctcttctctcaaccactcgaccccatctcgtcctcacaagcttcactcgatcccatcgccttggccctccatcactcgacctcaaccatcactcggtctcttcactgctgaacacttatcaccttcaagctcatcatctctccatctgagacatcactcgaccaacgccaccaacgtcttctcttcttccgcgagctcaacatcactcgagctctcctcaccattaccattctcacaagcttcacacaatctctttcaagctcgtctctcatcaccaaacactcaatccctcatcaccttctccgtccaagcttcgctactcgaccttgcctaatcactcgacctcgccatttcattcactcgacctctatcaccaagccgccttcaccacttctagctcataaccactcgaccaaggtgccatcattctctcatctctcaagtccattaatcactcgattcaccgctcaagcctcaccactcgaccaccgcctcactctaaccacgaaactagtttcactcgaccaaacaaagtcactcgatcaatcgaaaaaataaaaaaaataaatcaaaaccgacggattacttgattacatcactcgaccggttcacttgattggtttgtgtttttggtttgctgttactaacgtattaacgttttttttgagttttgtctgttttcaggtttcatcatgagtaactacagtggagaatcttttatagaccctgattacaatgtggatgaagctgagtcctagtccgttagaccgagagagcaacatgtttaccagagcttcagggatgaattagaactctccacagcccgacgtaatcagagaagagctgaaatcgccagaggaaagagggcgatgtcgagtagatatgagctgattgatgaggacatcgaaactgagtatgagccagagtcatggcgtaaggagacgaagctgctgaacaaacccgacgaggttacagtggaggagtatatcagattctttgagatgaatgacttttggggaacgaggtatctgtgctatgagactttagcccagctggggttactggaggacgtgcaacatctgttcgagaagtgtcatctagagacactcatgtcttacccttacgctgcttataaggaggagacaatcgagtttcttcccacgctgcaagtggagatgtatgagggactcacagactttgagctggataccatgggtttaggcttcttgacgttctcagtggatgagcagtggtatcagctttcgatcaagaagttggaagaactgtttggtttccctagtggaaagggaaccaaacccaggtttgacagagaggagcttaaggatttgtgggccaccattgggaacaatctaccgctaaactcggcgcggtccaagagcaaccaaatccggagtcctgtaacccgctactttcagcgctcggttgccaacgtattttactctagagagtctacaggcaccgtgtctaacacggacatggagatgatagattctgcgcttacagggatgtccgccggacgaagggaaagaatgtcttgagaggcgatctcaataacgcaccaccagtaatgcctctatcgatccacctgtgtggatacaggaagtgggcgttgacgaacggaaagaagaaggtgagaggagcactatgcgtgggtggcattgtgacgccaattctggaagcttgtggagtaccgctcaaggaaccagggttagcaccgaggatgatggacttggatcatttgcgcagatgtgagttcttggagtttgacatggctggcgactttcaccgctacaggttcgagcattcatcgattagaatcgccaacattcttctcccctgcattgacgctactaggattctcgagggcagaaacattgacttcaagcctacgcttgaagatctttatttcgagggcagtccgccaactgaggagatcagtcacaccgaaggagctacaacagaagatgttgatgagacggatgatatagatgaggcggaatttgacacgagcatgtatcatttcagtgagcatatacctccagcgagggaaagcaagagtttgagcgacgtcacaggaacaacagcaagctgcagaagtggtgcaagaaacaggataagttactcgccaagtgcctcagggctatcaagtttctcaaggataaaatcagctgctcctcttccactacagcaattccgcagggacaactccctcaagacatgccttcgaggagatatgacgcgcccgagccaagtcagcgcaggcctgagcctagagagcaggagattccgcatgtccctgcgaggcattcatcattcgagcctgacttgattgctagcaataacagtggactggattgacaccccctatagctgcatcgacatgttagtgtttggggaaattgaactgaacacaccacactttgataagtgtgtattttgcatgttttgagcatccatttgtcatcactttagcatcatatcatcactgttttataccatttcacatcatttgtcatcactttgcatgtttaggatagttttgcatgcatgttgcatatttgcgttgatttcaggtgatttggagctgttgacgagctatctggaagaagcggacctgatcatgacaaaccactcgacccagaggtcgagtaggagcttcaagatctcaagagaccactcgaccaccaggtcgagtagaggacatcactacttcacttcaccactcgaccccgaggtcgagtgccctcgtctccatcactcgatcgcttcactcgaccatgaggtcgagtgtcttcacctccatcaccagacaaccactcgacctcttcactctacctagaggtcgagtatcgccatcacaccactcgactgcatactcgatgacaagcttcagagccttcttcattccgcactcaaccagacactcgagcacaaggaagaaaagaagactccagctattcactcgacctctcactcgaccacctgggtcgagtacagttcttaacccgtccaaatacttcgtcgttttgagtattagagtttcggatatttggctataagtagcatgtacttctcattttcgcaggacaagaagttttttacctagttttatttccgcggaccttgtgttctagactttttgtaatccggatttctatttatctattcagtattcagtattcagtttctgttcttgattttcgttta

SEQ ID NO: 23282 - DNA, 3639 bp, Arabidopsis thaliana
atatatagtgctatattaggggtcaacgcatttactaacaatcttttcaaataaacattaacttacttattttatctgccaaatcaattgagtacgttgctcgggaaccgtgtatgtctaatagagatattaatgagagtgtgatggaggtcacttctagtgtgtatttgacagcgagtaattaatatggagcgaaatcttctagatatgtgttatacgacgtcaaatcaaattttctttcgtcttcatttacaaactataccgtcgctcactatgtaatctttatagttggaattaaactataccacatgtacattatcatataccgtgtacgtagatattttattattttattattattttgtgttaatgatgtctcatattagagtagtttgagctagtatgtttgaatcaattacaaagtgataattattaaaaacaaacttccattactgataatcaacgtaaaaagctcacatattgttgcatgaaaaacttataaatatgacaggatcgtggcgaatgtgagctctacaggatctggctaatccgtttagcacacaaccagatgtaacattggttgcaaagattattgaagagtctcgatctcatgtaacacatctccgtgcattcaggagtgcttacgtcaccacatttcgggtacgaaaaactgttagcgtatgtatattttaaagtattaccatatttctttatatcttctagcacctcctcacaaatgtcacgtgcctcctccgattccaaagcataatggttgcttccgaagagccgaaggtagacaccacccatgtgagcattaccagcacatatgtaaagaatagcgcatgcaagggttgcagcggcgttccttggggcgattcgctctaagtgtaggatagctccctggatgtcagactcatgtgtaacgagacgcatccttcatggtaaatagccgtggggttaccagcttgtaagcaccatttgaagaagggtctatagcgaccttcggagttgatgtcatttggatcgtggcctgccgcgtagaagtcatcgggatcgtcgcacatgctgaaaatgtttgcatttttgaggacatccggacggtagacaatgtctcttccacgaggaccagatttcaacataggtccgaggtaccaccaacatttgtcagccattttcttggctatcttcgcaagcaaatcgtcaggaatatttgggtttgtcatatttaggagtaaggtgtttcgagaaaatgaaatttgaacacttaaataagcatcattgaagatatggttgggtaagttatggttgtatttattgcaaaggtattaagtgatgatgtgtattcatattgtcaaatcaaagtaatagtattccatatataatttgttatcgttgttatgagcaacctctttttaataacagcttaaacctagacgtgtacgttttactgacggtttcagtgtacgtccacatttacatttctacatttactcaacaaacagtgtacgttgtagtgtatgttttagtgaacgtccacatttacatttctacatttgcccaacaaacagtgtacgttgtcgtgtacgttttagtgtacgtccatatttacatttctacatttactcaacaaacagtgaacgatgtagtgtattattagtgtacgtccattcataaatatcaccatttatgagacaaaccaaagacctcatatgtttgcatgtgttattttttagtgtacgttagagttgatatctcatgctagtgaacgtccatatctagttttccgagacaaagaaaaaacctctaagtattatttggtagatgcacgtgtacggagttgtggacgcttagattttaatatccaaatttacatttactgcagtgtctaaatatcatatgtgaatttggctgaaaaatattcaacttgagaaacataacacaccttgcaaatttcttaagcaataatataatttcaacataaacataaacaacatagtagaaggcttatcataatttgaaacatgacatagcggataacataaacaaacatataaagtagaatggaataactatagcatttgactaacacgcctggcacacgaccagaggtaacagcggttgcaaacgttttggaaagctcctgataccatgtaacaatataaggcgcaaggaggcatactaattccatggctggtaggataagagaacgtaggaccatatgtattgctgtatggagggtcaaacttctttatttcctcgatgaactcatcacccaaaactcgagtggcaaccgagtccaatggataatggttgcgggtgaagagctgtagaaacaagccgcccatataatcatacccagcacatatgaatacaatggcgcatgcaagtgttgcatttgctcgtactggagcatgacgctgtaagagcctgatggctccattgatgtttcgttcatgcgttagaacacgaataccttcgtaatacacggccgtgggattattagctgcaaaacaccttaagaaaaatgttcgatgtcggccttcatcagcggatccggagggattgtggccccctccagcttggaagtcatcgggcgagtcacacaaggtgagaatattggcatctttgaggacatccggacggtagacaatgtctcttccacgagtgccggctcgtaccaatggacgaaggtcggaccagcattggtcagccaggttcttagctatcttcgagagtaaatcgtcgggaagagtcgggttaaccatgtttgaaattagatagtcagagattgtcagtaatttcttcactttaataaccactactgtgaatttggttggggaaattacggttgaaatgaatgtcatacttgtgttggtaagcgttggctgtcaaatcaatttatcacttgagttatgttataaagttaaaatgcagtgtacgagacatatagatatgtacgtacacatttacattatgtaattagaagtgaacgatgtgtacgacaatatgatcgaggaaactaaattaacttctgacagtctccaaattaaatgtagttgcaatcatatatctaagataggtttcttcataataattagtcgcaaagaatcagaatattgttcttggacgattaaagcaagtgcacagtaccggtctcccgcttgccgtgctcgtagatgtcaaccgagtatttctgacggtagaagaccatatctgcttctcgaatggttgtcaattccaaaaaagggtgtccaaacgcaagcaactctaagaacttcatcgtctatggcccgcaatatcctgtagttgggttttgagcaacggtaggacaacgcacatactcaaaaggttcaactgagtacggagaaatcaatacatcctggcacatcgctctgactaagtatggcatcatttcgcaaataggagtcattctcgccttcacagccgactcccgcgtgtgcgatattaaagcgtcatacacagttattagccgttcattaaggttgatcccaaagcaacccaatgttcactcttccagttcatcggagcatacacaacatcgacatccttcagccacttcatattgggttcacggttatgtgtctccattacaatgtcggacagaaatttacccatttg

SEQ ID NO: 23283 - DNA, 569 bp, Arabidopsis thaliana columbia
tcgcgaaatcgataagaacagcgaaatcagaaagctaggattgaatctctgggaagaagagacggagtcttaggattggctagatactaaagctgagaaagctgtgatttacgtcaacttcgggagtctaacggttttgactagtgagcagatcttagagttcgcttggggtttagcgaggagcgggaaagagtttctctgggtggtgagatctggtatggtcgacggagatgattcgattcttccggcggagtttttatcggagacgaagaatcgaggaatgttaattaaaggatggtgttctcaggagaaggtactttcgcatccggcgattggaggatttttgactcactgtggatggaattcgacgttggagagtttgtacgccggtgttccgatgatctgttggccattttttgctgatcagttgacgaatcgaaagttctgttgcgaggattgggggattgggatggagatcggcgaggaggtgaagagggagagagtggagacggtggttaaagagctcatggacggagagaagggaaagaggttaagagagaaggtggtgg

SEQ ID NO: 23284 - DNA, 613 bp, Arabidopsis thaliana columbia
atttatggacaaaagttaaaaaaataaaaataaaattttcttttctcttcattttcccatctattaatatatatagttattatattcttcatgtagtaatagtagcagtatctgtaagcattgaatttctgttatacacatccatctatatattatcttgttctgatatattatcataaagctagaaaaaaggtatgatgcaaccagatcatgacctgccgtatgatttggagggagagatactctctcaccttccaatacaaattctcgctcgatttagatgtgtttgcaagagatggaacactcttttcaaggaaaggaggttcttcaacagtgatttgggtctcgcccgtccacaattcatcttgcttgccgaatccaagatttgctcggtggacgttaatcttgacggcccatctatagaggtgcataacttgccctcagatattcccggttataaactttatatgcccatgcacgtcgaatattgcgacgggttatttctttatgcaacctgttatgggattgggatttgcaaccatggctgagacagattagatggtcaaatccagtatgaaggttatgattcagtgggatgggatcgacaatagta

SEQ ID NO: 23285 - DNA, 575 bp, Arabidopsis thaliana columbia
caaataaacagagtagctgcgggtgacaagctgatcaaatgaaaccccaagctacgccaagctgtattctctattagcacaccttggagacaagagatcatttacatggctagtttacatgtccttatacactacaggtctggacgaagctcgcaaaaggaatggccctacaaacaatggtgttggaaatgcaccacgggatcaccgtcaagggaaaggaattgcacctccttctatccagaacaacaacttcgagattaagagtggtctcatctcgatgattcaggggaacaagttctacggtctacctatggaagatccactcgaccacttggatgaattggatagactctacaacctaacaaaaatcaacggtgtcagtgaagacggattcaagtttcggttgtttttattctccttgggcgataaagcacacatctgggagaagaatctgccccatgactcaatcaccacctgggatgattgcaagaaggcctttctagcaaagttcttctccaacgccagaactgcaaaactcaaaaatgagatctctggtttttacagaagactggtga

SEQ ID NO: 23286 - DNA, 4322 bp, Arabidopsis thaliana
tctgcctatgagcaacgagacgtaagtcgcccccaagctcctgcaagacattcatctcatgagcaccaagagcagaaaagaagaagaaaaacaagagtggttcgaccaaggagcaaggaccttcttatgactagcaggagatcactcgaccaaggtgctctacgtgatatcgagcagagtgtcgagcacgatccgtgggatcagaacgagcagagtgtcgagcaagatcagtgggctcaagacgggcagtactcgagaatgaattgggatgcttaccacagcatcaacgagcaggaaaatacctctgacaactgaggtaacaccacctcaaccattgtacataccataacatttttatttttatttgtgtgttgtttgttttggtcttgaattttttctcagatttttattacacaagggactgtgtaatttaagtttgggggagggttcaagacatgtttaacattatgtattcttttcttatttctaattttgcatcatctaaggcatagaaaaaaccataaaaatttgaatttttctctgaaaatgatttcacaaaagcatagtgtcatgtagattgcatatcattttaggattgtatatagagtgtttgcatttaggattgctcatttgcataggggatagtgatgatttcataccgataagcatgttttgattcaatgaagtaagttcaatgcccagttacttctatgttgcataaccgattgtacctctaaagtaagactacaccctgctttgaatttgtaacttgactatactactttgattcgaaactcgcttatctgatgccattccttatctattagaacccgaactgaatttgcaattatcatgtctatgcattgtttgtgaactcatggctaccatatacatacttggatcatcttattcacttcaccaccctctgttaatccaagtagctgtctctcatttttagagcagtttcccatacccttagcctagccttatttcaagccaaagatcatttatgtgtgattgtgaggtctttttttattgtgcttggtataacgtgttaggtatgagccgacaagagcagtctttcatgtagacctagcccacgctttttgggttagctaggactaggtggagacttgtatttgggattgggattgtgtatggaatgaatgggaatgagagtgagaataaaaagaaaagaaaaaaaagagagagtaagagtttagagttctaaagaggatacaaaagtgttaagtctagtaaagggtttggaattcaaagaagttaggcattgagattcaaagaaaagggtaaaacgccctatgtgctaagaatagaagaaaagccttaagtttgtcatagtaaagaaccaaacccgctagactcttaaatcgtttcaaagagaaccccttagaacttgaaccaaaaaagagagaaaaaaatgagaaaaatggtagagttaggacatctataggaaggggatcatcttctgagctatcatattatatcattgggtagatgggagtctgttcttgtatgtgtccgttggcttttacctttagcattctactgaagctcaatcttttctctgagagtcccttgttacttgaccaaaccattagagagaccatttttgtctcttggcctaagcccgaaaccaaatgagttcataaccattgcattgcttgatccactgttccttcttaatgaatgttaaagggaattggttgatgtgaatgcttgaatagattaaggcaagtcgttaggttacattgtgacgagtatggctaacgttttttagtaagggtctatcatcttgcaacctagaattagctacctcgacatttagattacccgttctatatgcatgctttggtttggaatccccaccttcaaacctctccttcaagatttttgtttgctcgagggcaagcaagagataattttgggggagttgataacactgtattttactcattttagacatgtatttatcatcatttagcttagtaatcaatcattgtttcatatcattttgcatcacatttagcttattttgcacacttaggcatttaggatcatcttgcatagatattgtatgttttggtgtgttttcaggtgcagaaagagcttaaaaggattctactcgaccctcgactctatccaaccaggagggaagcagaagagcaatctactcgaccagttcactcgatctaggcagctatagaggaggcagcaattcactcgaccagttcactcgctcaaggcagccaaagaggaagcaacagatcggtctactcgctactcgacccctttactcgatcaagggcgaccaactctacaaatcctccttattccccactcaaccaaacatctcagcatacggataggagaagaagaagcatctactcgaccaattgatcagatcgcgaatgaaacatcttagcttgtggttttgccagatcgcgaacgaaaccttcgattcctccttgtttagtatgttatgtgttgatggcgaaggaaggagttagatatggttgtcgtaggtgagctccgatgaagtcgaagtgatgtgctttataagtaagattcactgtcgactttttggaagcgagatcacagagtggatccgccaacaggtgttgggctttaggtatcgtgagattacgaatgagtttttaatcgtagtggaagcgattgttttgcgaaacatgatattgagtatcaaaattttcttttattcttatctcgaaattgttaagtacaaatgaggtaaagcaaacgacgatctaacgtctggtcatctagaagagacctgattagtatcgaaggatggttgaactgttaggtgagcagctgaccttctttgatggaagatgtaatgtccgttttccttgttgaagaaaaatgtttcaaacgggagggttaaaattgtggctacatttgcggagggaactgcctacataccttgttaggggattaggcctaatcgtagttcgattgaagtggtggttgcgctcttggggggagctgcctacgtaccctgccaagggatcaagccttatcgtagttcgattgcttttgagtacctattcgtggtatttcttgagatgcatggtattccgaggccgtaactcaggtactccgttgataactttttctagcttatagacgccgtcgcgtaccacctcggtgattcgatagggacctttcgagttagttccccgttttccggcgtttagctctcttgtgttgctgatcacttttcgtagaacgagctctcccacttcgaatctccgaattttgatattggagttatagtagcgggcggcagcttgttgatagttttgaactcggatcattgcctgatctctgcgttcatcgatgaagtccatgttgtcctgtaacatttgcgtgttcaggtctgagttaacaggactggcggtccttctcacgcttggtactatggtttcgacagagattactgcttctaaatgataggcgagagacaacggtgtttcttgcgttgacttgcgaggtgtagttcgataggccctgagaactccgtggagtacgtcggaccacattgattttttggaataagtcttttcttgatgttgctaagtatagctttgttggcggcttctgcctgtccgttaccttgtgggtaacacggggtggacgtggtaagacggatcttccacttatcgcggaatgctttgatttttctcgaggtgaggttagtcctgttatcgatgacgatctcatatggtatgccatgtcgacatacgatattttcccacaggaagtcctcaacttgtttctcggttacctgttggaaggctttacctcaatccatttggtagagtagtcggtgaggacccgcatgtttttttgcctcttcttcccaccggaggcttccatggaccaacatccatggaccacttcatgaacgggtaaggagaagatatcgaggacatttcctcgggaggttgatgtagagtagatgcgtgtcgttggcacttatcgcacctgagtgagtgagctatgcaataagataggattgttggccaaaagtagccttgccttttgattctgagggcgagggtacgtccactatagtggctaccacattgtccttcgtgcatgcttttcacgaggtcttttgtttgttgcccgtaggtacacaccatgtagggacctgcgacgctgcgtttcataagactcccttccacgatgtagtaccttgcactctgggctttgagttttctggcctcccacttgtcgggaggtgtgatcccttgttcgatgtaatcgatgattgg

SEQ ID NO: 23287 - DNA, 2596 bp, Arabidopsis thaliana
ttttagctcatcggcccggctatctcgcagatcgcaagacaaaccatctagcaacctatatcctagatcgctcgtcagatcatctgatagcttgccttgcagcttgttagcaagatcatttggtaacctatctcactgctcggctcatcagtcaggtcatttctctgctaggcattcagatcatctaggagagcatcccacagctcctcaacaactcatgaggtccatcagactacctaactcacaagcttagccttgttttatatcgtcgacgcgtgccaagctaaactgacgtatcttggaggttcaacggatcaaattttaattcgcatcttcctaaagtataagccgaatattcacttcttttaattcggaaaaactcgagtttagcatttggatttcccgaactgggggggactaattgttgccggaattagcacctccgacaataccggcttaaaccagaggaactacgaattagactgagatttcagtcaaaccggggtatcccgtttagcctgttaatgggccaaaataaggagctcatttgccgactttagcccgaagtagggagaccgtctagccgacttcctaattcgaagaaaaagaagttttctcctttgaaaatagcaagtctttggagataaaggaaattagaagattcaagcctcgaagaaatagaagtttaacaaatcttttaaccgtcttaatagtgtataaatagaggggtttgtcctctatttcaaggatccgaaatttaatactaaaaaccctagttttcttcattgttcttgggcaaaaccctaactttgtctccaagcaactttgttcttcttttcattgaatctttggtcactaaatagcgagagagagttaagtaaatttgtttaccccttttaaacaaatttattgtgtgattttcagaatcaacaaggataaaaataaaataaagagtctagttatgtggcttgatgaatagaaagctttctgagattagaaatcttcatcttgttcaaggtcttgatagcatcatcgactctccctaccttaacataaccattgatcattgctctgaatgttgaaacatcaggtcctgccaacaagtcatcaccgtcaacgtcggcaaacatgtcggcaaagagtttctctgcctccaacatgtttccttgttggcagagactcgcgatcatcctggtataacacgttcttctcactcgctcaaacgggatagtcttttcgccgaaaaaaccctccttggacattattatgccaaccgtctcggaatcacagatttctatcatatctaagaacaattcccaggcctctgttttcctaccgtgctccacaaggcatttcaaaactccgtttccggaaatggtgttgagcaattcagcatgttcgagagttgcgaaaatctccatagcctcctcgtctttgccttgcttgaaccagtagtccataaacgaaacgttgaagattgcaatcgccttgtgatagtttcgccatggaagtttactattcggtcctttcaattcctcgaagatttggctagcccttacgaatttgcctttatccagaaaccctcgaatcagaatgtcgtatacggcgaaatcacagcggctcatggatctcactacatcacaagcttcatctaatcttttagcaccgaccaaggctttcgtcagtatcctgtacgtctcgatccctggagctaaactcccgtcgagcaaaatgtggcggtagagctcaagagcgtggtcgacgctgccttggtcgcagtgtgctttgatgatgagattgcaggagagcatgtttgggagagtctgagactcgttgaaaaagtaatcgaacagagagatggcttcgtcgtacccaacgaatgattgcttggttggtcccttaataagtctgtcgtattatatcgcctccagatcaatcttctgaaacatcagcagtaacagagatgaaatattagtacctttgccagggaatacttaagaatgaacgactctccaatgtccaataataaacaagacccctagaagcatacactttgtgtttgatctactgtatataagccatcatcttgctgcagattgagaatcaaatacaccactctgttcggcttgtgtttggatttcggacgcacacaatctgtaatatcttatttgcatggaaaattcaggggtatatattagggcctgtttatgagagagttaagcataatgttagtttataattgagtttggtaatatgttatttgattattaagtttctatgttatagcaaaaggtggttgtaagagtcgtaactttagtttgggcagtttatcttagtttcaacagtcacaatgtttagtttggtcggttatgtacctaagacctgtacataagtgtgtgtatctagtcgagtaaaacaacaagtttcatttttaataaaacaaagttttgttcttgtcttctttacaagaaaagagacaaatgtctctgagacaaatgtctcttactctgtttttgcttttctctcaatattccaacacataacggatgtacccatttttatagaggtaagcattgtgtctttcactcttacacgg

SEQ ID NO: 23288 - DNA, 587 bp, Arabidopsis thaliana
tagtaacgtccgccagtgtgctctaaaggagggaaaagaggctgggcttgggagagggtgtgcaagggagcgaggaggagaaggttcgcgggcttatgcggaggattgggagggctgttggggggttgcatagagcgggtgttatacatggggacttgacaacgagcaatcttatgctgcgccctttggcgtctgcagatacgactgaaaccatagaggagagggatcagtcaccctctatggcaggtgaagttgtcatgattgacttcggactcgcgatgcagagctcccaggatgaggaccgcgcggtggatctctatgtcctagaacgggcttttgggagctcgcatccacgaacggaaaggtttttcgaggaagttcttgttgggtatagagaaagttataagggtgcggtctcggctctgaagagactggaagatgtgaggatgagaggaaggaagaggagcatgattgggtagttacctatataacaggtatcgaatggttgcattgaatgacaggacaaatgacaacgccgcgctcttagatgcaaaagaaaaggaatattcttaatcagaaataggcca

SEQ ID NO: 23289 - DNA, 2618 bp, Arabidopsis thaliana
cgttgtggttgttataaagaatgctccactcagcagcgttgagccagcgctgtgttgatgtttgaagcacagctgctacatctgtcaaaaatagcaaccaaacatatgagatttatatatatattataagcaactgttttattctgaaatttttaaatcttgccttaattgtacaaattccatagatctaggagactattctaagattccatagatctgtaacactgtgctacgatttctacactgttctaagattccatagatctgtaacactgtactacgatttctacactgttctaagattccatagatcataacttttctaagatttctacactgttaccaattccatagattgtagcctcgatttcccaaattcacagatctactctaattttaaatacattcctccaattcccaaactcaccaatgtttcttgatactttcaatttcaatttctttattacccaaattcgctacccctatatcttgcttctgagaatataatcgttttttattaccttcatttccttcaggtaggtccatatgctgaagatttatcgcaggagcgaccactacgggagccgccattggagattctctgtgagagagagagagagaaatagtttgagaatcaatcttctgtattttattgtgtagatcaagttatttagtatatgctagtacttatggttaaaatagactattattaaaattcaaaagtaataaagccaacgagtacactaaactcagattatattttccaaaactattgctaaagaatatcaatacgtacactagatatagaaatcggaattaggtacgttgtgatccatttcagctactgttaggggtaagatttgggcttgcttggcccaaggcccaaatccaagtcaaaggcctaagcagaatgttaagtcaagagggtaggctcgtcaaaatcctggaggagtgtcctacacgcagaaggctataaatacggaatagcatgtcttgtcaaagggggattccgccggacacgcagagacacagagcagctcgtcagctcacccgtccgaagtatcccgccagccggtccgtctcaagcagctcgtcagctcacccgtctcaagcagctcgtcagctctcccctccgaagtatcccgccagccggtccgtatcaagcagctcgtcagctcacccgtctcaagcagctcgtcagctctcccctccgaagtatcccgccagccggtccgtctcaaacagctcgtcagctcacccgtctcaagcagctcgtcagctcacccgtccgaagtatcccgccagccggtccgtctcaagcagctcgtcagctcacccgtctcaagcagatcgtcagctcacccgtctcaagcagctcgtcagctctcccctccgaagtatcccgccagccggtccgtctcaagcagctcgtcagctcacccgtctcaatcagctcgtcagctctcccctccgaagtatcccgccagccggtccgtctcaaacagctcgtcagctcacccgtccgaagtatcccgccagccggttcgtctcaagcagctcgtcagctcacccgtctcaagcagctcgtcagctcacccgtctcaagcagctcgtcagctcacccgtctcaagcagctcgtcagctcacccgtatcaagcagctcgtcagctcacccgtccaaagtacctcgtctgcccatccatcttgagtaactcgtttactcgtccgtccgaagtgtctctccgacctgcccgcccaaaataactaacctactcgcacgtctcgagaagccatccagctcgtcgcacatctgccggctcgtcaattacctgccgaccttcctccaataatggcctagctcgtttatcacaatatgaactacgtgtggcttgatccctttctaagggtacgtaggcaaccttttacaaggttcagctataaaacgaataaactctattcttcctcggaagatcgtcttccggcctcaagctcgtctttcatctacaatcggctcgttcttactccatttatgctcgttgaagaaatcatcatttgtaatccgtccaatccgcctaagtcgcgggctcgtcattaatagaaagattcttcttccttccctagagatcccattttcgtacttgtgtgattcgtgcatcaacagctaccataaactattaattgtagtgagtaagtggactttagattcatatagagttatgcgattcggttgaacgtatcatacgaatctcagtgtctacctaattaatacacatataatgcaaaaagaacaaacgcatactatagatgataagacgtgattggacacattaaacacatagtttacggcattacataaaccgatacacataattaattacgtgttacttctgtggcgtgtagtagaaagactagctgcatatggcacctaattaatactcatatatggttcatgcgaaatgctgatatgtataaggtaatatataccaccactttggtaccacaatgcaacatctaaattcgattatgataagctatgataagctatcttctcaatatcaattaatcgcttctttattctaatacactccttaatatatgcctatcatatcattatttc

SEQ ID NO: 23290 - DNA, 548 bp, Arabidopsis thaliana
tccttattagcaaccaaacgaatgtacccaaactcgcctccacggtacattgagttagcaggctgaggaaagatcgggacatcctcgtgattagctctcggttcccacatcggttgtgagtcttttccagccataccaatcacaagatgaactggatttccttgccaacgttcaccacaagtattgttactaatcgcacaaaacctttcatatctatgtacatgtccccataaagcaaccgtcacattgttcttcactaacaacggttccaaatgctcgatcatcttctctcttatagcagcgtctctgatcttcctactcgtagtgtacataggtctatgcccttggacaacaacaaacggtgtcttactcctattaacagactccaaatcactcttcaaaaaactatactgcttcccacgctttaagaaaatcagtctctgtcgaaatataaacgatatgaacagaacccatatcataagaatagtacaggtccgactttgaggtccttaaccatccagtagctccgttgaataccagcatgtgac

SEQ ID NO: 23291 - DNA, 427 bp, Arabidopsis thaliana
tagaacaccgttccactcgaattggattgttagcagctgagtctctgaatcaggctgcatacgaagcaaaagtgtggtttctcggtcagtcaccggttttgaagtacttatatttggaggacatatttagcattgaacgaagctatggtacttacaatttcaccgcgacgtcggggaaatatatagccttgataatctacagttcctttggcttcctccaagtaaaactacaagatgagagagccaatttaatcggttgtaagttttactgtgttgaatcggactttctagagatgcgaattcatggtaggtggaggacagaaagtgatttacctgaagccagttatggaatccagagacttgtccccaccagattgtcggatctccctacacagacatgctcaagcgcagaagatgagccagatgt

SEQ ID NO: 23292 - DNA, 2835 bp, Arabidopsis thaliana
gagataagatcccatctacccagagtatatcaaatgaagctctcatggtaatcccatctccaatcccaatataagaacttaactctactctttgcattcatgaatctttttttttgtgaaatcattttatgaaaattttccaattgttttggtttttctatgccttagatgaatgcagactcaaaaatatacacaatgcaacacacacttcctgagccctcccccaaacttaaatcacacagtacattgtgtgataaacttggaagagagtactcaggacaaatccattcacagaaacaaaagaaagaacaaatcacaacagatgatataatacaatggtgaagtgaggcgcttacctcagtcgaagaatgaacgaagttggtcgtcaatggctgcctgtgattgctcccaggccatagacgaaccgccctgttccgtatcagctccagcaggtgggtactcgacctcatcagctctgtggcggccaacaccgctctgaggatactcgacctctcttcttctactgcggccagcaccgcggtcgagtgatctcctcgagtgaattatgcgtgatctgctgctagatcgagtgagtgtagccttcctccttctcttgtgctcctgggactcgaatgacgaatgcctagccgggacatgtgagactctctgctcactaagctcaggcatgtgctcaggctcatcaaatctcctcgatggcatctctagaggaggttgtccctgtggaatagttgtagtggaggaggaacagctctcttgtggttattgctgacagcccagctcttgtatccactcagatggatcaaaagaagtacagagagaggtgtgtcattgatttaaccttggacagacatgttgttcttagtttggcggagagtgcccttgagagccatagcgatcatctccatatcagaattagtaacagtccctatgatctctcgggagtagagtacattggttatagaacgctggaaatacctgatgacagggctacgtatctgattgctctttgacctggaagaattcagcggtacagaggtgccaatggtgatccacaagtctttcaactcttctctgtcatacttgggcttagttcccgtcccactggggaaaccaaacaatccttccaagcgcttgattgataacctatactcatgaccatacacagagaatcgctagaatcccaatccttcgcaatccaattcatcagaggtcataccttggtaaagttccacttgcagtgtggagaggaactgaattgtctcttcttcatatgccacatatggatacgccatcagagtgtcaagatgacaactctggtacatgtgctgaacatcctctaacaatccgagttatgcaagtgtagtcgagcaagggtacctcgttctgcagaactcattcagtttgaagagcctaatatattcctcagcaggcaatacatcaggtttgtacagaagtttggtggctctgcgagtatgctcaggcatgtactcgtcttccagatcctcatctataagctcatacctctctgtcatcgctctcttccctcgggctatctcagcttttcttctgaaactatcatattctctctgttctctctttggccttgaagacgacgactttgtctcttccatgttgtagtcaggatcaacagaagaactgccactgtaattactcatgattctcctgtagaaatttagaactcaaaactcaaatgtcaatatgttagtctcacagataacagtgaaaccaaaattattatcaacatgcaatgatatgagccgaattggtcaagtacaattctgtacccgggtaaactgagctgttcccgagttccccttagacgaattggatcgagtaatgtacagaccgtggtagagtaacttctctgaattcgagtggatctgctccagggagtcgagtgaagcgtggaggtcgagttcagccggtgaagcctagaggtcgagtaatctttctgaagttggaaggctttgttgatttcaagaacaaaaggtcgagttgctgttgcagaggtcgagtgaaaacttgtggtcgagtgaaaacttgtcgtaatcgagtggtccctgagacttcgacggtgaacgaggaggagtactcgattgcggcggcgcagagaaggtcgagtggcaaagtgagaacggcgaagtgataaggtcgagtgacagaggaaatgaactggtgaacggcggcacggaggtcgagtgattctcggaggtcgagtagacagatgggtcgagtgaatcgttgaactcggctgaggcggcagaggtcgagtgcggctagggattatgaggtggagttgattgttttgatcgagtggtggaaaacagaagagagtatggtcgagtgaaatttcaaaaggaatggctaggttgagtttgagattctctctccatcttatcctcagcgcgtggtccacactctgttgactggaaaaactgcaggaaatctactgtaaacttgataaactccttgtaagactctatagcttctgttggtcgagtaagataatgatttaaaagttttggggttttaaacatcacacatactcgaccgatgtactcgagtgcaaggtctccaggtgcaacagaagattttcaaaattttgtactccaacgggctattcactcgatctccaggtcttctgtagagtaaaagttttgaatttttactctatctccacgttgttcctttgttcctgagaacaacaaacacaactaagacaaatcaaaaataacaagaaaataaaaatttatttacagagatagtcatgtgactccgcccaagtgagcttgt

SEQ ID NO: 23293 - DNA, 521 bp, Arabidopsis thaliana
ggtactcatcttcttcttcgtagaaatgtgaattggcttctagaagctcaagctcctccggcaatgggatatcgaattccattctctgatatgattgaccgtatcggaattttgttgggatttggtgctcggtgaacaaaagtgaaaatcggaatctggtgtgagcttgagcgggaatgagagtgttttagcgggaaagttttggttgcaggatctcaaattaggttttacggcccattaaatattcggcccacttaactaaaatagcccaaatatttataccattgtgactacagattgttgtttcttgacaagatgcttctgtatgtactactaaactctgtattggttgctcctactgatagcagagtaaacacgtatgtttgaactcataaacgacccgatggccgacaagatctactcaagcgttgcgggaggagtttgaacaaaacaaccttggtggtcggaatatgacgtacgtatatatatgtactaccatccctagtaacgatatagagagg

SEQ ID NO: 23294 - DNA, 541 bp, Arabidopsis thaliana
  unsure (1)..(541): unsure at all n locations
agaggtaggctcgcgcgggaacttcttcctcttcttcttcgccgcctcttgctttgcggtggctcaaaagcggagacgacggtggttgggggaaggaagacgagaaagaagagaaacaagaaatccccttcccttgaaactcttcaaagggtaagggcattgcagacgataaaaaatagtgtatttgtcttcttgaagctcttcttcttcttcttcttcttcgttgttgtgatgtggtgtggtgaggtatattggatgcgtgcaagatattaaagtggcaaagtgggcttcctcctttctttttctctcttatttccgtttcctatcattttgcctttgtcattaacttagctgattaaacaattcatcagcttctcttacacaacattttgttaatctttgctttctaatcttaactatgtcttctattacaaccccactcttacatcacgcgcgtggcttgcaaactcctttcagtgacatgaacatgatggtaacaanaatactaaatgttatgatatatttttaaatattgtatttg

SEQ ID NO: 23295 - DNA, 486 bp, Arabidopsis thaliana
atcttcttgtattagcttcaagcttatatactatgtgaatttggtagcaggtatatgcgataaacatggcgactctgaagccgtcatttactgtttctccgccgaatagtaatccgattagatttggaagttttccgccgcaatgctttctccgtgttccgaaaccgcggcgacttatattgcctaggtttcggaagacgactggtggtggcggcggcttgattcgatgtgagcttccagattttcatctatcagcaacagcaactactggatagttttttgttttatcttgatatatgagttttattggaatagtagtcataatgtattgctcaatttggttacagtatcaggtgtatcgacggtgaatttagtggatcaagttcagattcctaaaggtgaaatgtggagtgttcacaagtttggtgggacttgtgtgggaaactctcagaggatcagaaatgtagcagcggttataatcaatga

SEQ ID NO: 23296 - DNA, 550 bp, Arabidopsis thaliana
tgacatcaatgaattccctagaaacagatcaaactccagaggcattcgtgaaactaacccatgaatctgacttccctctcggtatctgacaaaatctcgacaagctttaaacatgacagccaaagtattagaattaaccttgacatctccctcctgtctcattctcagaaacagaccaaacccatcttcaaaaaacccagctttaaaatacccatcaatcatagcagtccaagtaatcacatttctctcagtcattctatcaaaaagacttctcgcatcaacaattctccccattttgcaatacccatgaaccattgagctacacgataccacttctttcacagccataccctgaaaaacacgaacagcctcgttccatttccctgctctcaaatacccacttaacaaaacattcgaagcaacagaatcacgaaacttcacaggtgtctcagcatacaaaaattcggcctcatcaaaccgcccagcccgaacaaaaccggtaatcatcgtcgcataagaaaccgcattcttctccggtatacacaaaaca

SEQ ID NO: 23297 - DNA, 3775 bp, Arabidopsis thaliana
ctaacgaaggatgttgaagaaggatgggagctagttgaaaactttgctcagtcggatggcaactacaatgaagattatgacagaagcatccgcaccagtttgactcggatgaaaagcaccatagagagatgaaagctcccaatgacaaactagacaaaatcctccaagtgcaacagaaacatgttcacttcatctctcaagatgaaccattccaagtgcaagagggggagaatgatcagagtgctgaaatcagctatgttcagaatgaaagtggctaaaacaattacagacccaatccaaatatgtcagacagaagcaccaatatcgccaacactcaggaccaagtctatcctcaggaacagtagcagcaacagaaccaacccaaaccgtttgtttcttacaaccaaggtgtgagaccccgtcctggacgtctcggcgtccggcgacgttgtactcaagttcgcgcctcttcccagccaaacctcttaatttttcacgattcaacatagaattgcctttacgaggctaaattctataatcgctctcttattacacagcggaagtctttctaaccttggtttagttctaaccaactcttgtaccggtttcatcgtctttgtcccttagacttagatcgatcctttactcggtcaagacatgcatatgttcgctaaccattctaagccaaacaatcgcatattcctttatcctactttcacggtcaattaccaaacgtctatcttaactaataagctagatcgttacataccttggccgatatgcggatttgattccttagcccgtttgtcgccttactccattcgttcaacgactcgtattcgatcgtgaattgataaaccaatccctatcgttacttagccatacaaccaaccaaccccactggtctaagtacaacgatagagattggggatcgtacgattccctttgttcacgatggccgaatcaagctcttggcttattggtccatccgttctccaaacgtacgcccctccggctatatggtggacgattgagccctcggcttatcgaaccatccatgtttccgatccggtcgtttaacactacgaccgcccacggtttaccaaccgtttacccatccgatccatggtggttgataaacgtttcgcttaatgatccatctatgcggtctgaacgatattcttatcatacccaagggtccgtggattcatccactagatcatcgtaggctaacccatgaaatctttcttccgtcggccttaggtttgctcgcgggtccaacatccgttttgtccatcggtttccaccgtggactttccagttggttatccgtcgagtcaccctttggtcttaccgatctctgatcggtttcaccatggctgaggagatagatacatgaaggcggccgcgatgttgattctatatggtgaatcacgttcgttacccattccttggtgctttctccctttaccggtaagattgcagccatgggtgacccttgggtgtgttcggatgcacttatccttgtgcttcctcgaacacttttctcgatccatcctattcgacgatcggtctgtccgacccgttccgtcagacgatcgacctatcccatccgacccgtccgacgatcggtctgtccgatccgatccgtctggctgatccgatccgtccgacgatcggtcaggccgatccaatccgacgatcggtctaccagatccgattcgtctctaagacgaacggtctaccctctctatcctctacactccatcgaaccgttggaccgggaggtagcatgcgcattagttcggtcgagttatactcgccgagccgcaccccctttccgaccaacaacttcgggatgtgttgggactcttttaagactattttgtggtgtttggatgttgtgtgatgatcccaaaggccttgggcgtcctcccttatatagggggcgaatggatgcttcccgaagcatcacatccggtccttgcactcttccgaaaggtcacatccgttccttgcatccttccgaaaggtcacatctgttccttgcatcctttgggcgatgcaaccgttctttggtatccgctcgaccttacaccttttggctgagacacctcttcacctgtgagctaccacaatccaccagctcgagtgtcagctgacaggaccactcagctgggtcagtactcgatcagctcaccgagctcagtcgagctgtcggtcagctcacctagctgagctagctagtcttccagctggtttagctcacatagcttagctagctagttcatccagcttgtccagctcacctagctggtttagcttgaactttctcgttcttactacttagtattttggtccgttcctcgaccatgatctagttttctcctaaaacaaaccggcctctttatgaacgcgggacgcggtcgttacaagtctaccccccttaaactgaatttgtcctcgaattcggcgggtgagagatcttgtttactccctaacttgggacacgggcgttacaattcttctcccagatgtgtgctttgttgcccaaggagaaaggaaacaaacagagcttgaatccgtcttcactgacaccattgatcttctttaggttgtagtgcctatcgaattcatcaaggtggtcgagtggatcctccattggcaaaccatggaatttgttcccctgaatcatcgagataagaccactcttaatctcgaagttgttattctggatagcaggaggtgcgattcccttcctttaacggtgatcacgtggtgcatctccagcaccaatgttggcatggccattttgctgattctgttcttcagccataacgagtggttgctgaggtacagggtttactgtggttctcctttttctgatttcgcgggctgtgcggttgatgttgtcgttgaaaaggaggttctggttgcatgttgatcgagttcgcatacagcagaggtgtacctggatcaaaaagacaacaagaaaaacacacagtaagtaactgaaaagaaaattgaaaaacaacttgatctaagcaagtctgaaatctcaaatgtaacaaacaaacacccaattggcaacggcgccaaattgataataagtttttaagtcaattgtcctaaaacaccaatcatgtcgttgtagtattttaggttgtcaatccaaatgggtgtgatgctaacaatcaagatgtgatcagaagtcactaagtcaagccaagcaataacaggttttggtgtgttctagcagtcctaagtgaacatgcagaaaacagaaaatcaaacagaaacagtagaacactcgaccaacacagctctttgcagagcactgagtgaggtcgagtgacaagtcgagtaacagacagaaaatgaaacagaggtactcgattgcacagtctgttgccagaccactgggtggtcgagtaccaggtcgagtaacagtaagaattgcagaaactaagcaacaggtgacaggatgcagtaaacagcagtagagtaaacaataaaatcaatcagataaagaattcctaaggatggggtaattgagtagtttcgtttcctcagtttacaggtgattgacatgctcaataaattaaccctagacaacgtgttcattaaccaaatctaagtgccaccgcaacagagactctcaagctaacctagtcccagactcaatcaccattgacgagagctaacctaacaggcattacgaatcaacaagttaaagccaaaacgctccctgcaaccaataccttggtacagggtc

SEQ ID NO: 23298 - DNA, 544 bp, Arabidopsis thaliana columbia
tcagaattcctccatgctctggcgaacacagatccatactctcagctcaactcaagaaaaacgctcctccatgggatcaaaaatacatagaagcagtcaaaaaattaaaaacaatttccaagaccttgctagccttgaagattccatccagaagaaaacaaattctgcagacagatgcaagtgattcttactggagagcagtcctcttggaagaagatgaaaaaggaaaaaggcatatatgtggttacaagagtggagtcttcaaagatagtgaaaacactaccattccacttacaaggagatactcgcagtaaaaagaggtattaaaaaaactgagtttctcatggtgagccatcacttccgtattgagatggacatgtcatcatttccaaaaatgacccataagcacaactacttaggtgggcgagttggttttcacaatggaagtttgatgtgaacatatcacaggaaaatacaacttcctccttgacttcctatgaagaaggcaacgaaaaatctcaaccattgtcctgatgatttgtac

SEQ ID NO: 23299 - DNA, 567 bp, Arabidopsis thaliana columbia
tcagttagttaaatttaaaatccaatctgaaaaagatatatatgtaacaaaatttgtttttttaaaaaacactctctgcgtctggaaaaaaaaaaaaagattaaaaaccaataaagaaagtttcggaactaattagggcttccttttgcttacatgaaatataccgtcgcaagtcatctagcactctgcttcgtaagtttcgtcttatctgttctagagaaaaggtcttaccattccagaagaagtttatgaagacaagatcagtaaattgtccgacgacttgcttgtgcagattctattgcttgtctccacaaaagatgcagtggccaccacggttttgtcaaaacgctggcgtttcatatggacaatgatgcctagacttgagtacaaagatgataagaaaagcaaacagagtatttggttgtttcttgaccagtcactgcaactccacaaggcacctgtgctacacagcttgtgtatcaaacttggttcacaatgtcctgttgatgttgaagtcggcaaatgggttgcaaaggccgttgatcgctttgtgcgtacgtaaagttt

SEQ ID NO: 23300 - DNA, 489 bp, Arabidopsis thaliana columbia
agacctgaccctattagatgctttgaccctcataattgatgtcttgattttaattacctctgttgaaggaaaaggagaacaagtgaggatccctgacagtctcagaggaaactttcttgctggtgaagttctgttttcccccaagtgcaaaccaaaaggatgagctctctgttccctcttttgcgtgcttgatagtagtcccaggctgacttagcaagaaagacgatgattaagtttaccagttacagaaaagtgataagaagtacgagtgagtttttatttaaaagcttaataaaaattataccattcctacttggacaatttcagctaaattaaaatcaaagataacaccattagaaactacctttaagaattcagcaagtttagcagccagttcctgctgctcatgcgtactatggtttcaacccaaaggaacatggaagtaccgattgcagaaggaagcagtcataggagttcacagaagttgcc

SEQ ID NO: 23301 - DNA, 429 bp, Arabidopsis thaliana columbia
ttaacaagggagcaagatagcgattgtgatcaccagcgtaaaccaaaattcttgtgttttgatcagtttcgacccgagatcatctgtgtaagatcttgattttgggtcgtaggaaaccgttagaattacaaacgcccaaacaaggcctaaagcagtccaaccggcgaatcaatggacgcgttcgaagacattgtggtgtaaatggcgaacaagagggaacgccgcagcacaagtgaggcagaggagagagagaatcgtggacgcaactgctatgatcgctgttgaagtgttgtctctgtctttaagagtgagaaccaatgcgtagatgagccaagctaccgaggaaacaccgcagccgctgtggataccacgaggctttgtaagagagctgtgacagcgatttttatgcggaggggtacaaaggagtgt

SEQ ID NO: 23302 - DNA, 535 bp, Arabidopsis thaliana columbia
tcctgatgccaatggaagatagggcttgttaacctgcaaaaacccacatagagatgatctaggcactagctgctattaatctcatcagtctctcgaactcatatgaagaaaatttgcatgttaccttatctatttcaacatcagacaactgatttagcccaactatgtaaatgttcatcatgagagctgcaacaacagcctgaaaacaaaacccaattgtttaaacagagagacgaaaaaaatgtatcttcttcatcggtcattatgtgttatatattcattacctccaagatgccagtgaaaagtaaaggagatatatcagaaaccttctctactgctaagaaagatacagataaaatgctaagcacctgcaaatccaatcacagagctaatgttatctccttgaaaaccctgaaagattgcgttttaaaagagttacatttttaaagagaaacttaactgtgccaataactgtatgaggcctagaaaacctgtaaaacgcatctaacgagtctctaaaagacttctgtttgct

SEQ ID NO: 23303 - DNA, 755 bp, Arabidopsis thaliana
tgttaagtgtgtatcttatttttgcgttttagtgaagaggaggcaaggatgaagatttactctgtgtcgcacaaatgctactttgcttttggagctcttgtttcagaagatctttcacataagatcaaaggttaaagcttgttaattcttttgcttagcttgagtttattataagcattgatttcttatacttttgtatgtgaacaatccagagttgcctaaggttaagtgggttcttcctgattcctacttggatgggaagaataaagactatggaggtatgttgtttaactctgatgattgtgctttctagtcacaatatacattgttgtaagggacactaagatttgatcttgtcagagagtagtaattagtttttgatgggttttctgaaatttgattgtttcaggagaacctttcattgatggaaaggctgttccttatgacccaaagtatcatgaagaatggataagaaacaatgctaatgcaactaatgaaaacagacgccctcgcaggcctcgcaactcggatggaggcaggaacgataggggaaaccaagacacgggttacagacgtccaccaccaaaccaaggtatgggaggtgctccacctccaccgcctcacataggcaacaacccaaacatgcctcctcatatacaaccacctaacatgaaccagaactacagaggtcctcctccaccaccaaacatgaaccagaactatcagggaccaccagcaccaaacatgaaccagaa

SEQ ID NO: 23304 - DNA, 440 bp, Arabidopsis thaliana
cgttaacaaaatcatgaagctcagaagcaaactcaacacctgttaggtccaccaccaacaactacaaaatgtagcattctctttctctcttgttcgtttagtccaggtaaacttgccttctcaaatgaatcaatgacagtactacgaattctctgtgcatcttcaacctcctgcaagccaaccgccatatcttagagacatgtcaaaaaaaccataaatgtaactagtggagcaagaatgttgttactttgaggaaatgacagttctcctccacgccaggaatgttaaatgtgttagactgagctccagtagcgattacaaggtagtcatagtcaacatcaaactctttcttccctttcgaattcacgccgtgttttgatcggcagtaaactttcttgcttcctggatcaattttgaaacattctgcctccaagaaagac

SEQ ID NO: 23305 - DNA, 513 bp, Arabidopsis thaliana
gtaaaacaaagaacaaaagaaaaacaaaacccgatagtaaagtacacaaacatatagaaatcttgatcttatttaaacttttacattttcaccagcgatgagaagtttgtatgagaacaagagggactttcttggcgatacgaagcccttcgtcttcttccatgtcaatatcttcaatagtcattccattgggcaaactccaatcgaagaagtaaagaaggttaagaagcccgagctcgaccatggtgatcccggtggccatcccaggacagatcctacgtccagctccaaacggtaatagctcaaaatgttgacccttataatcgatagggctatcaagaaacctctcggggatgaactcaccaggttgtttccaatatttgggatgcagtcctattgcgtaagtgttgatttggatcatggtgttcttgggaatgttgtagccttgaatcttgatgtcggacatagttagtcttgggagcaagagaggagctggtgggtgtaactgaatgt

SEQ ID NO: 23306 - DNA, 604 bp, Arabidopsis thaliana
gtctaaaaatgtctcatgctttggaatatcaatcttttgctggcatcattaaccttggattcttacaaaaaccaagcaaagaaattgtgtgatgactgacacagcatttatgctttattcacaggtttcgaattcgaattgacacatctattataggtgaatttcagacttcaaacgttctcagtatctaaatacaaaaagctttgattagacccaattacaaaatacaccagaatcattgttcctttgatttttcatattccaaaagcatcgttttcaacactaagtaatatgtaaatatatgatatatcccttcgtttattcttgggcgctccactgtccacacaaacaaggattagccacagcacgagccacatgcaggtagggaatctgaaaaacatcagatttgagtcaaaatcattcacaaggtctatgcgtgttttctatcatcaaatgaatcaaatatcaaactcatcgcgggtgacttactgtggtcagctccacggatatcattcaaaccacgaacattgtcgaggcccccacgaggaggtccaccacccctaccaccaccaccaccgccactgcctccgcctccaccaccacc

SEQ ID NO: 23307 - DNA, 561 bp, Arabidopsis thaliana columbia
actccaagaatatagtttaattttttttttttttttgtcatcatatagtttaaaatttatatccgactctttcgaataattaagtgttgctaacaattgaaatggagatatgaaaaacatccattagagaatcacgtaacatcttatggattggacactaaaacatcttatgagtactgtagttatctctaagctttggtactatcaagtctaagaactgaaccacgaaactgaaccaatctacattgtaataacaaaaaaactgaactttaagcaaaaatgtactcacttctggatcagatatcgaagctttgatgaagcagaaaaggaagacgtattgagtcgggattgtcaaataccattcgaggtttccaagaattgccttcttcatcactagaatctgtctgctactgtaagcattgtccgtgacatacaccagatcgttaacctgcacatcacatgaacaataatcatcagctcacagtcacatacaaaaacacaatcaaattattgacatcaaacagtaagtacctgaggtggccagatttcttcatatttgga

SEQ ID NO: 23308 - DNA, 1358 bp, Arabidopsis thaliana
tgtttggaagaagattaaatagagaaatagtattatgagatatcagatttacataacaagtagaaataacttagaatcataaactaggatgctagaatcaaacatctttcaggtaacagaaacagataattacatgcaagccatcgaactacttaacactcgacaagtgagtctaaaccctccttatcaaatcatgtaatattcagcatcacacgactgactaaaatcgaagttgaagctcataaatgatgataattagcgaaacgagaatcattccgagtgccaacaacgtttgttcaaaacagtaaggcaacagcacactaagtactgcatattgttctaatagatcaaaatcgaacaaattctaggttcatacagcaatttccaaagtaaatccccagaaatctacaccaaatgcgaaatacctggtaagacaaaccgagcttagaagaacgaccttggatcccgaagaagacagtgaaaagagcgctcgtaataacgaaggctttcgttaccggagcattatctgcaaagtcaacaattcatcactcagaaatcgacatttaaatcaggagcagagaagaaactgatcaagcgttagagaggaagacgatacgtacggaaaccggagggaccgccgttcatcttcgttgggtgaacagaggacggcgacgaaacaaccggtgagcagatttcgtgacgaatcaatctggatttggagatcgatgcaacaacaaccaacctttttatcttcttctttctgatgagaaggaagtttccaagaattttttgcttcgaaatcaaacatcaattacgaaatagtactgtataaaaaatcattacatctttaatttttttgtgcaacataaaacatatcattattgttgcaataggcaagagagaatagtccagaagatttcttatagcacaaattaattgcgttttgtagtaagtaatgagagaaataattaatctttatttacggtggagaatagatgggcctatattttcctactgttatttttttccctatcttcgtctccatctaaatcgtgcacaaaattgacctaactcattaattattttatatgaccagtgagctgcagatgtgtgacagaatcgggtgtaatagaaattggaactttgaaacatgtacagcttttaaattcaacagactgtacgtaaaaaaataaacggttttgattgaaacgggagagatgtattatttgttcatgaaggaacaaaagaaagatgaaagaagacatttattagttttatgcaaagaaattcaaaagacaacacagccttgcaaaaaaagcaatacaaccatacttgtccagaaagaagaagcttgagga

SEQ ID NO: 23309 - DNA, 575 bp, Arabidopsis thaliana columbia
atcacctataacccaaaattttgttcggttcccgctggcttttgattctcattgaacgtcgcaaatagaaatccactaatgccactctttggtctctttggcgtccctttaccgctttccacatgtttaacaaaattggtattgtatatagatgcgatatctggagtcgttaagtttccgttaccagcagatggccatccagtttctgttaccaccattggtaaatccttcacaccttctttctccattgcccatacgaacgcatcaaatatcacatcgaacatgtttgtataaccaagtggcccgtcttggaccacgaccttgttggtgttgaagatggcatagtcgagctgaatgttgataggatcagcagcatatgcgaagtaggggtagatgttgacgaggataggcgtatttgtttgagacaaaaacttcagcaccggggtaagttgttcacgtgcttgaggcatgaaatctccggccgaagctggatatgactggccaaggttggtcatagccaccgtggtgctgatcaagatcgggagactcctcgacttgacaatgttggtgagaga

SEQ ID NO: 23310 - DNA, 540 bp, Arabidopsis thaliana columbia
tctagtaacggccgccagtggtaaagatagagccagagaggttgggagggagaggattggaggaggaggttgctgagagctaaattgctgctgagaactgaagtgtggctggtgaggcaagtaaggatattgcagcagaggaggagcaggaggagcagtgtattgaaagctgaaaccttggtgatgttgagcttgaacttgagcttgagcttgattgctactttgtgctgcattgtattgaggatagtagggataaaaaccatggaacattcctgttgatcctgctgatggatgtcccatatatggtgaaaactgttgtcctccatagagatgatgattgtagtagttctgcaaacaaacaaaaaacacaaacataagaacttcaaagatttatcagtgaaatggaaacgactctacaaatttataaaatgaacttaccattgggtacatccctcttgagaataccagaaacctgcagaagaagaaacacaagcattttaagttttgcttcacacacacacgcacactaatcagaatgga

SEQ ID NO: 23311 - DNA, 524 bp, Arabidopsis thaliana columbia
atttgcattgaggtacatgaactccttcacaaaggctactccattgtcggatactgtgaccatcagtttgtcctctgagttaccggtcgtggtggagtataaggtggctgagatgggttacattcgatactatctggcgcctaagattggagtagaataagacaccaaaccagaataatgatgagtgtttgatagtcttcgttcgagtcctttgttgagatgtctgtcatgattcaggtgttttctggatttactatcttaaggcaatgctagactagataatcgtatgatgtttgtccttctgaaatttggcacagcttgtttatgacacttttcatgtgtttgttaaacattgaagaaacagaagacacgaagccctaaaacacgtttggttgtggcttctcaacctcacgaactagtgttgattgatgtatttggatgcttttacaatttgtaaaaaacatgggtaacactctttacttgtgtttgtgcttaaatttggcaaaacaactaaaaatttgaac

SEQ ID NO: 23312 - DNA, 583 bp, Arabidopsis thaliana
gtctctctagtgtatctggatgaaaatcatgaccttccattaacgattccacaagctcgtcacgagtcattcctaaggatttgagcacaattgctgtgttctgtgactttctcgggtcaagtatgaaaatctgggccggtgagctgagctaggctttttatcaccgccgtcgtctggagatttctttccgaccgccacgtagccgaacagagcctccattagatcgccatcgaaactgtaggaagaagaagaagaaaccaaatttgtaaagttggcatttttatctgactaaacccttcaaattgaaagaaacgattagggttcttatggatcttacctgaaagagccacgatcgattttgtcccaaaccatggaatgatcagaatcaggattgactttatcccaatgtaaaggcttaagctttacctgaccatttgaactttccctgaagatgatcctctaggagccggtggtggtttttttgaagccgatgatgacaaagccgccgtctttttcaacggtggaggtggcggcggagatggaccattattcttaagcttaggaggaggaggaggtggtggtg

SEQ ID NO: 23313 - DNA, 551 bp, Arabidopsis thaliana columbia
gttgttgcattagctcgttatgagccatttggttctgcaaattagcgtattgccaaggagaggaagatactccggcagtgggatcagacgaggtgagactaaaaccagacgacggcgaagacccgaacgcaacggcggatggaccgccggtgaattgttgcaccatggctctgaagttggctgtgtcggtgttgaaaagtgtagtaggtgtacgacgtgaggctctagatctccgacgtgttggctttgcaacacggcgattatccggactcagaggagaatcagctgacgtggcggtggtggtggtggttgtgacggtggaggttgcggtggtgaagaaggtttggttgttgtagaattgagaccagtcgttgttagagttggccatcttcttcttattattatgggagagatcaaagaggagcccttgtttagtatttatggactttctctcatcttttggtttttaatagcattttaaaacttgtcaattggttggatttggtcaaagtaagaccatctaacaaatcacagccgttggttttggtttg

SEQ ID NO: 23314 - DNA, 496 bp, Arabidopsis thaliana
tgcaagttgagggtaaacttgcaaaaaataattattggaagagatttttttaaattaaacgcagtagcgcaacatactggatcagaagcagagaagttgtccaaggaccaaaagtactaaagccacagacccaaaccatataattgatcaatcatacaagagatttcatcccaaaaaaaaaagaaagaagaagcaaatagtaaatctctgtactccagacaaatcccaatgcaaataaaagacttccaactatgatgtattttatgtgagaccaaaataacaaagagctctaaaatagtacaaacgggcatgcgggtaatcaggaagatatagataatttaagcaaaaaacaaactgggactgtgactactttgctcaggattgcacggccagtttctgaagatgttcactaaagacttgcaggctcacatcgtcagtgaagattatgtctgacccagctgacatctcgtttgcattgttgtaagtcgctgatgga

SEQ ID NO: 23315 - DNA, 564 bp, Arabidopsis thaliana
gtaaatgaaagcaaggagcctttgactgatccgactatcctatgctgtgcctttaagaaacacaggatctatatgttcaggtacgtgactcatattgtgctagaatgactcatctttatgttgtgggagaaagaattattttttcgcacctttagattctactttgtagaaagacctcatatgttttctctagatatcccgagaactactttgaatttattatcaacaaattggtttctgcagtcggagagagccagaagaacctgaagatgcaagccaagggagagatgtgtttaacgagaagcctgctgctgactgaacttatgtctgtctcagatattggaaactcagccacaacatcccttccagagaacgtggtatgttttcataacccacaatgttggtatctattttacttttcattacgtactgtaatttggatccttaacacaataactctttttaactcctaatcatccagataatgcatactacgcttggtgacattcacatgaagctttcccagaagaatgtccaaaactgtggagaattcacaacacactg

SEQ ID NO: 23316 - DNA, 553 bp, Arabidopsis thaliana columbia
attatgacaagcataattctatgagtaaccttttcattgtaaacaaagaataacttaaaatataatcattatgtgctatctatatataaccaaaagctctcatcatcattatgtgaaaccaagacatcataaaattattgaaaatactaaaagtaagagcatagttatgtcaacttatgataaactcagaagatactatttactgtatcaaacgcgcggattaaaatgtgacggttgcaatcttggtcgtgactactatagtattggtcatcgctgttttcgttctggactcttcttccacaacgagtgcgccgaatccagtgtagagattcacaacctctatcatccacaacattctctccacatcaaagtacttaaacaaaatgaagatgtccatggagaatgcaagctatgtagaggtaacttggcaaaaatatattaccaatgttcaacatgtgattttgccatcgatttaatatgtgcaagaaaaaaagttgtggaacaattgaggtccaaagcccatgaccacctttacccttatccaaagatgatt

SEQ ID NO: 23317 - DNA, 441 bp, Arabidopsis thaliana columbia
gaaccgattcagtttgtgatgatacgtgtatctaatctgaacacagagatcaaacgagaagagaggagatatcataccaaggcggcgattgcagcgaaaacaccgaaagcaatgagaatcgaagatatatcgccaccgggttctccgaccggtggtgctcgaggaatatcagttctccgttgttgagcatccatggcgaattttgcttaaccgggaaagttttctgttcagtggaaattgcaaaacttggaaaggggttttttcaagatgaaggtttttttcatgtatagggttttataaggtgtgggagggaagagtttaacttcgtgtgtgtaattgatatcgaaccgttgaatagaggagaatcaatggatcgtatttttttagatgtgggagtaatcttccaaaatttatatttcattataactttttttttaaaac

SEQ ID NO: 23318 - DNA, 626 bp, Arabidopsis thaliana columbia
gttaaaagctttataattatataatccactaagctagctaggaccctataatgtaacttgcgtctgcttttgcaggttcttttccaaaatgattctccggctactttacttgcaagggtcatcggtataatcggatcaattgaccaagaaatgcttgccaaaggacgtgatacatgcaagtacttcaccaaaaatcatttactatatgagaggaaccaggtgcgtattgaaaaaccaaaaagaaagaaaactttactatatagtgcggctcacagctattactcaagcaatttgtaatggttgttgaatctgatttcaaactaatgtaatgggtttgtgtttctaatagctcaggagagtaacaatttggagtacctaataccgaaaaagtcatcgctaaggcgtagactaccaatgggtgaccaaggcttcatagactttgtggcatacttgctccaagttgatccaaagaaacgcccgtctgcatttgaagctcttaagcatccttggttgacttaccctacgaacccatatctgcctgattctgtaggtgcacaaaagcagaatggatgagagctagtcaaggacagagatgatggtttgttttcagacattgtttttgttga

SEQ ID NO: 23319 - DNA, 2034 bp, Arabidopsis thaliana
attcatcatcgtttgagtccagttcgtatcattcatcacagtttatatcatttctcatcattcttgcatactttgcatgattacgataactttgcatacatattgcatttctgagttgttttcaggtgatttggagctgtttgcaagcaaattggaagaaacgagccagaaccagaagacatactcgacccccaggtcgagtgactttagagccattcttcccacatactcgacccccaggtcgagtgactttggagccattcttcccatccactcgaccaccaggttgagtaacctcagctcaggccactcgatgacactactcgaccccctggtcgagtatcacttcgccacactacctgacaacactcgaccgttcactctaccaagttactcgaccccctggtcgagtatcatcactcaccaccatcagcatcactcgaccggacactcgatcacgtcttcacagtctactcaaatccgcactcaaccagacaagctgagcacaaggaagagaagaggagaagacaaagtgtttggaagcggcctggacctccatcggatcaagaagcccatctcggcccattatctctctatgggccgagcgattaggttattggcccgtctattatcattttatttcgttttgtataaatagatgtcttagggttctgtcctgagacatctagtcgacattgagtttttgcttcagttttattttctgttttactctactgcgccggttttgcttcggcaacctgtaattcgagatttttcaaagttattcagattccgcatttgatttcatctgtcatcttgtttctctactctttatctctttacttatgcaatattatcgtttatttgcatttatgtcttttagcatgttgtctgagtagtgacttagaattcttagggataggatagagtagttgtggaatccgtagtctgtagaatggttaagttttagaattgattgaatccctttaggactagttgcgtttactgcttatttctttctgatcaattggaattcgatcccaagcattcccgcacccagaaggtgttcgatggaatgcttgatccactagttcctgagatatgcgtctctatcccaagggattggccgtttagagcgtttattgactttatcagtctgttcttattgcctgcatagttagattccgttaatgggaattagtctgggctagctttgcttgacgatttctatcacgggagtgaattgatctgttgttgaacctgttgtctagggatagcttgattgcgcttgttaaccattcgaataggctaggataccactctactcaattaccccatccttaggaatttctcgtctatcttatttctctgttttatcgttatcgcttaatcgttctcattgcctatttcttagtttttacaatcactcgaccatcttactcgaccacacccagtgtctggcaacagactgtgcagtcgagtaagattgtcttgtttcctgtctgttactcgaccagtatactcgaccacacccagtgtctggcaacagactgtgcagtcgagtatagctgtttcatatcctgtctgttactcgacctgttactcgaccacatcctacttctggcatcagcctgttgtggtcgagtgattttagtaattctgttattgcttctgttttctgcatgttcgcttaggactgttagaaaccccaaatctgttattgcttggcttgacttagagacttctgatcacatctcatctgtttgcatcacacccatttggattgacacctaaaatactacaacgacatgattggtgttttaggaataattgactaaaaatatattatcatgtatgagtgagtatgacaactagaaccataaccgaatcttaaaaacctaagtattaaatctttgttagaagatacaaagacaaagactcatacggacttcaactacactatcaaagcttggagaagcaagaagaagcttggttagctgtttggagtcgaatatgacttgatgccatgtgtat

SEQ ID NO: 23320 - DNA, 2963 bp, Arabidopsis thaliana
ctttttgtcaatcccgttgttttctgtacgtacttttggtaaacgttttcatttgtacgtatattgggacttctaattatacagagttgacggttacatttttttgctatactgttacatcaatttgggaccaatcatcgcgtctttctaaaatctatttaagaaactgggataacacccttaattcatttaaacaaaattccacacccatcacacacataagacagaaagtcggtcattttggtttttgttattgtcatcatggatgatgattatcatgccatttccgaactttgtcccatgatcacaggatggagtatacgcgcttttgtggtcagggtgtttcaaaaatgcgtgggcataaatgagttcgacctgggtctcatcttggcagataatcgagtaatatttcgtcaacgtctttctaacgtttttactttcacataccgtacatgtccctaatcatgatgatttgttgtagggaatgcgttcccgcatagagactaccattaatcgttgccttgcttcattttactctgaccgtatccgagaaaatgagtggatagttattaatactttctcagttcgtctccacaacgagggaatacacgcaacgtcccatgactaccggatctgttttatggatcagaccattgttaccaaagtatcgggattgcctgcaataccgtattatgattttactccttttgactacatcatcgagaggacagtttctaccggagtgttagtcggttagtatatttgactgtctattcatttttgtaaatatgtacgtacacataatgcttttatcttccattacgtacactagatgttattggtgtgctcattgaggttggcaacttgaccgaagactaccgtggacggaagcttccttttaagataatggataaacaataagttgtttatttttaattatttagggtttaggtttgttatatcctgtgtataatatatattctctgtagcaaggaagttcttcaatgtgaagcacaaaatgcccaagctttcgaatttcaaagattcttccagcggctaactggtcctcaaaacattatcgcactcgtatcctggcgtctaaccgggattcataaactgaaggctgtgaccaatggccccatctccaaagtcattgctaatccggatataccggaagtggaagaaatcagagtcgtcgtctattagttaattattgtttcttttattctaaataactacagatttgtaaccgaatttaaacatatccctacttttatgctaaagttttaccttctaattgctacagtttacttattacaaatacagcctaattgtaatgactttccatggacgtacaattatgtttttgtacgttcaaataggtgtactagatgtataatgtaaacaaacttagttccattcataagataaacaataaaacaaggaaataaaaaaacgttaaaataagagtaggaaatacaaagcataacaacaaaccgagtagagcatacaaccatgttaataaagccgaagcatataacaggaaaacatatgctttacaaacaacacgaaattatagccgatgcatagaatgggaaatcagatgctgaacgaacgcctttccttaataaaatatgcacaactccctagcataccagtagaagaagcaattgcggcagcaggctccgtagctgcaacgacccaagcagtctggtgaaccacgaacctccatgaacgattccacaaacgagttccttcagcatgcagtcgacttatgtgatacataaccaactcccccactgtgtttgcagcttcgaatgatggcactaaatcccagaaagtcgcgttcacggcttcaacctctcgtccgttgccagttgcggtgaggaacagaccatgagagaaacatgcgtaagcgtcgatgggcgagatagaactcaacatggttaaaccatgagcaaccgtaacgaaattgcaagctaaacgaaccccttcaaggtaaatcgccggccttgctccacgttcaagcaggagggtgaagtatgttcggaaaggtgtttccggcaacacgaaatcaggccacgtcataaactcatccatgttgatagcggtcggctccagcgtgctaacgagacctctgagtgtttcaatgggagttacggaaacgggtaagtagttgacgaggatgctgagtgggttaggtagctgaatggccaggtaaatttccgccggtgggggtgtggggacgtccattgccgagactgagggatttatttgtgagtttaggttatatatggcgtagtaagagcaatgaaaagtgtggagaagatgacttgtcgaggagtacatgttatatagacctaatggcgaggagacaactaattaaatgtttcacgtcccacttacatattgtaggtggtattaatattggacattaactcgtgtttacatgaaaatagtaaactataaactatttccgattaaaaccgaaacttcaaattacaattttcgagtttattggtttatgtacgttcagatttacacgtgtacgtctatattgaaatttgtatttattatgcctggccacgtctatcacaaaactgtctttttgcgtcaatccaatcatgtttattcctacatttatagtaactttaaagttataatgtaagtacagaaagaagtatggattacgaaacttcaaatttattgcttacatccgaataaacccttaaaccgataaaccttgtaaaccagaggttaagcacaaattgaaacataactttatagaagcattacaagaacttgaacaacttcacgcatagaggataaaacgaaatagaaacataacggcattagaagaactaggaacataacttagacgataacattaaataacaacttcaaataactagtagatttatatgactagagcatttggctaactcgcctagcacaccaccaga

SEQ ID NO: 23321 - DNA, 3542 bp, Arabidopsis thaliana
aaattaaaataaattagaggttaattgcgtaaattacaaattccccaacgaaagttatccgcacgtttcacaatgagattattgaaacctctggctcctttagcgggtctctccggtgagtgctacaaacaagtcaagtgataaaaacttcggaaccactgtagtggttgtagttgttccgtataagttttggcgtggtggtgggttccaaagaataagaaccaaacaatgagctagccagctgtgtcgtcgttggttcttacatcgctagttttgtggtagcttcttctcgggctagttttgtgaccgcttctttgaaaacttataagcttaaagaaagataatatccaatccaatgaaaataaactataaagtataaagtgacaaaattttgaaaacttcttctctttaaccatcacattacataacaaaggatttttagcagagaaacattaagtttagttccctgacaaaagcttattccagaaacatatccactgctcgttgttctaaaaggcaaaagttccttggacatagaacccaccatgatctaaacctcatctcttaaaacccaagtggcaagaatttaccaaatctcctcactttttcacttcctcgtactctgcctctggagcttgatcactgcctccctcagatcctcctcctggtgcagagcctccaccagaaccaccagacatgtgctccccaatcttagaaacagctttgtttgccgcctcaatcttggccttgatctcgttgagatcatccccagaggaagcgctccttagatctgccacagcatcttcaatctccttggcgatttcacttgggatcttctctctgtattcaccaagactcttctctatgctgtaaattgttgtgtcagctgtgttcttggtgtcgatcaattcttttctttgtctttctgagcatgcaactctgcttctctcaccatcttaggtctcacggacatgttacgtgatcgagaagaagcagcgaaagaaggatatagcaattaaaggacgaagagcgagctgcgccgtcggagcgaccagctcgcgaatcaatgaaggcgccaagttgcaggattattgttaacgtaaaccagaaatgaataaacagagtttgaaatcaatagaacagagagatgaaaatagagtactccgattaacacacttgatacaacgttcgtaaagagacgcgatatcaacttctcacctacaagagactcgacgagagctccggtaaaacgatgagggaaatctagaagtctctagagagagattacaaccagattattcgataatgaaagcatgagcataacatgttgctcttatacaaaaaggtaaagaaagtaaacgttaaccacgttaataacgatcgccgttaacgtccatttgcattgccagctcgccagctcacaacacacgtgctttgcttaacatccctgacttcacattgccagctcgccagctcacaacacgtgctttgcttaacatccctgacttcacattgccagctcgccagctcacaacacgtgctttgcttaacatcaccagagttaaaagcaaaaggaacgcctccttcaaacgaaacgataactccaataatgatcattggcacgcaaaacgcatcggacgagttcggaacactcgctcgttgttcatcacgattaacgaccctcgtctcttccctctccccctcaaagaaccactttcgaatgactcgaacatcccaacttgaacaccagacgaccactttgatccaggaggctcttcagaaatgtgacggtcacgcaacactcgaggcggccccttttaaccttccttgtcgtctcgcttgactatcaccgagacagcacatcgtcgtgatagcagcctatactttgaaagccatgcgacgcttcgatctccgaaccttgagaaaattgaaagacaaaccaaacattgcgtcttccccatgcgcgactttttacttccttcgattgagtttcgagcgcctgaaatcctgatccacgtcatcaacgatgcatcaggattggggggcaactgttaggggtcggattgggcctacttggcccaatgcccaaacccaagtcaaaaccccaaaataagttccaaggttcagctataaaacgaataaactctattcttcctcggatatcaagatcgttttccggcctcaagctcgtctttcatctacaatcggctcgttctttttccatttatgcttgttgaagaaatcatcctttgtaatccgtccaattcgcctaagtcgcgggctcgtcattaatagaaagatttttcttccttccctagagatcccattttcgtacttgtgtgattcgtgcatcaacagttggcgcgccaggtagggggatagctcgaagatatctctcaaaactacgacctgatatagcgttctagaaggtcaagctcacacatgtgaagtcagggatgttaagcaaagcacgtgtgttgtgagctggcgagctggcaatgtgaagtcagggatgttaagcaaagcacgtgttgtgagctggcgagctggaaatgtgaagtcagggatgttaagcaaagcacgtgttgtcaaatgcttacatttgccaattatgttgtttgtgatttctgtttctctctgaagctgtcaaatgcttacatttgccaattatgttgtgtgtatatagttatgagccttggcacaggagcaacggaagaggatggagcaattgttgctaagttgtttggccagggatgttaagcaaagcacgtgtgtgttgtgagctggcgagatggcaatgtgaactcagggatgttaagcaaagcacgtgttttgagctggcgagctggcaatgcaaatggacgttaacggcgatcgttattaacgtggttaacgtttactttctttacctttttgtataagagcaacatgttatgctcatgctttcattatcgaataatctggttgtcatctctctctagagacttctagatttccctcatcgttttaccggagctctcgtcgagtctcttgtaggtgagaagttgatatcgcgtctcttaacgaacgttgtatcaagtgtgttaatcggagtactttgttttcatctctctgttctattgatttcaaactctgtttattcatttctggtttacgttaacacgaccccgcgacgaagcaaagtgacaacaaacagactacatggagcattcgataccgactcgtcaggctctggaagtaaaacgacaacgtcgatccccgggagagccagtcactcgacctcttcattcgatatcgcagcatgttctccgacaagaaaaggacttcaaggaactatcgaccccatcatcctaggcgatgacacttccagcccggcagtcaggacaataacactgaccaacgaggaagtgccgccgatcaaagaggaacatcccataacctcattaaacataccgacctcgttatcactcgcgcctaaccaagaccaagaggagaagtcatcaggcgaacgtcacttagaaaacctcgacgatgacactacc

SEQ ID NO: 23322 - DNA, 352 bp, Arabidopsis thaliana columbia
  unsure (1)..(352): unsure at all n locations
tgaaaaatcccacaaaaaaaaaaataaagaaaaaaaaaaaaacaaaaaaattgtaaataacagcaagaaagataacaccttatcgaactggacaaatccataccccttgaaccggccagtaacgtccattgcaactatacatgaaaggatggttccaaaacttgaaaacgtctcgaacaaggccttgttgtcgattgaagcgtcaaggtttttaatgaacatgtttcctttgccgctcaatcgcgtgcttgggtcacggttcgaaagcatgatccgantgggcctatcacagaggggagtgtagttcaaggcctccattgcacggtaagctgcaaacataaatctacatata

SEQ ID NO: 23323 - DNA, 3966 bp, Arabidopsis thaliana
gtcaaatagagaaataaccaaatctttggttactaaatctgaaggacaccacattacctggacttgttcctccgaggtttgtagaggcttttgatgatgaagcgaatctcagtgacccgtcttcaccaacagtagttgttagcaaggtaagttattaattaagacctagagcattactgtcggagttatcatttgatgtatgttaaattgttttcattaggttcttactgaattgaaaacatccagcgtcgttgatgtgagacatgctacttctcttctaccttacattgttcaacattactttcaactaactttcagcttatgtcgactatttattttgtacaactgccacaaaaagacgatgttctcgaagaaaatgtatctcaaattcttgagaaggttgtcgtccccgtagaggtcagtatatattatcccgtgtacctattaatatttccactgtacgtgcatatagtgtacgtactcttgtagttgttccatgactaatctaattatattattttgtgcttgcagacagtaaagaaagacgatgttgtcgaagggggtgtctctaaaactgaagcaatcgttgctcccgtcaatgagaaagagaagaaaagtgtaagacggagagttaccttctccgatgacaccaaaaatgatgataaaaaagatcctgatgtaacatttgttgaggagagagaggcaggcccggaggttttggttaaggctggcgattcgttgtacaatcctttggagaaggttgacgaagctaaattccagaaattatgtactataactcaaggagaaaaaaggtatgcatctgtgcattcacacaattatctgattgtttgtcaatcttatatcaatcctaactatttcatatgtcttactaatttcaggtgccatactcttttcggctttcggaaagtggacaacgaattcttcactactctagccgaggctaatgattgggttggctcatacgtaagtgaccattaattacgtacactgttgtaattgtacgtatatgtaataatatgtttttgaaagtacgtacataacatcatacttttatgtacttttcagcacatggaaatgatggcactcttgatgtggcataagaacggggagcatatgaagagaaatcggtatgtcgttgtggatcccagactcactttccttctgtcaagctgtgccaatgcattcagatcctgtcgtaaacccgacactttcaaatgggataaacttctcacacggtttcccaagggagaatgccttaatcgtgaaccacagctgcattggatcagagatgtggacatcatatttgttcccatgaactggaaagctgagaagcattgggttgggttggctatatgcctgcaacgtcgtgttattgaaatcatggatcctttgcgttcgcttacgcgggagtctgtggttaggtcacgtatccttccaataatggagatgctaccgtacctagtcagagcgacatgcaaagattatctcgataagccttatcccgtgactccttttacatacataaggaatcaacgtctaccacagaatccaactaccggagattgcggtccgtacgcgatgaagtttattgagttgtacatgcttaacactcctgttgaggacaggttttcgattgaagaagatgatatgtacaacttccgtaagggttacgcagtcgagctctacgagcatggaattgggccattaacctagttattcgaagttgcaactgaagcaaacttatgtgttttgtatgccttttggaacttgtgttttgttgtgtttacatttacttgtttgttttctaaacaatttattacttttgtatgctatgcaacattttatgtagtaattaacaacgtacaaaaacaagatatctgaccaaagtacgtacaaactacgtgtccacgtgtacacattacacgactgttgtgtatacaagcggtaccattgatttgacatccatcaatgtaaaattaaatttgtcattcaatgtaactgtaatttccccaacaatatctccatccgtggttattaaatgagaggaagaatttgacctcttcggagtatctcatttctaagatggtcaatcccactatttcagacgacttgctcgctatgatagctaagaaagtggcagacaaaagctagttggaccttaagccactgatacgatccggcactcgtggaagagacattgtctaccgaccggatgtccttaaagacgctaacatctacagcttgtgccgtgttcccgatgatttccaagtaggaggtggccataatccaaccggaccccaaggagaaggccgcaatcgactatttttcaaaaggtgccttctcgctaacaatccgacggctgtgtataacgaagcaatacatgttctaattcatgaaactgacatcaatggagcacttaagctcatgcagcgtcatgcacccgtccgagcagatgcaaccatcgcctgcgccatcatattcatatgtgcggggtatgattatatgggtgggttgtttctggacctctacacacgcaaccatcatccattggattccgatttcacacgagatttgtgtgaggagttcttcgaggagataaacaagtttaacccgccgtacaataatacttacgctcgttcgttctgttatcccagcagccatggaattaaaatgccacaatgcgcctaccattgtttcatggtttctggtgcataccagaacgtttgcaacaagtgttacctatggtcgtgtgctaggcgaattagccgaattctctaggtctctcatttgtacgtgtgtttggtgtacgtacactgtcacgtgtttcaagtttgttaggggtttggtcctatgtattttgtttttgcttcatccacaatgcgcctattatgttgttttgtttccgtttcctttaaattcctatttacaacttctgtgtctttttcatgcggtttggttctatctgtcatgaataatatatttctgttgtcaaactaaactggtaggtgtacttgcattctaacaagtacttacattataataagtacctatattctaactataaatgtaatagtaaatgtaaggatatatgtcagtgaattgaataagaatgtcagtcttattcaattgacgtgccaggcgttaattaataaatacactcccacttgtcataattgcaagaactttagtcttattggaaatatacgtacacgtgtaactccttattagacgtacatatatcaattatttaatataaatttccttcggattagaccgcaaatatgagaattatatatgtacgtacactgttactctatacgtacacgtgtaactccttattagacgtacatatatcaattatttaatataaatttcttcggattagaccgcaaatatgagaattatatatgtacgtacactgttactctatacgtacacgtgtaactccttattagacgtacatatatcaattatttaatataaatttccttcggattataccgcaaatatgagaattataaatgtacgtacactgttactctatacgtacatttattggcaaatttattgtaaacgctatctccccatccgttaccctccctcctcggttattaaaaggacaatgatctgacctcttcggagtatctcatttctaacatggtcaacccaactattcctgacgatttactcgcaaagattgctaagacagtggcgcacaaatgctggtgggaccttcagccactactacggtcaggcagacgtggcagagatgttgtttaccgtccggatgtcctgaaaggtgctaatatttttagcatgtgtgaggatccgacgactaccaagttgatggcagccatcatccatccggcccacaagaagaaggccgacatcgagcctttttcaaaatgtgtgtggatgctggcaatccgactgccatgtattttg

SEQ ID NO: 23324 - DNA, 1154 bp, Arabidopsis thaliana
tatcttactatctacacgtgtctgcacaaatttctccatgtagctttcccctgattttgaaataagggaacacccatctagctttctggttttcaacttcacaacgcgcgctggatctgaatgatgagcctctaaatgcgcctccaaaaacaattcatgcaatctgtgccagttgaataattgaaaccagccatttttagtcacagtcagataccaatataggaactacatatatatcataacagaaatgacaaacacacaagacataaaatagataatactcacttggcatgtgatgataatgcattttcaggtgtccctccattcctccactgagatgctctcctctacaagagaatagaaggaaaactatgagaatcacaaaatggaaggtaagattacacattcaaaacaccatgagcataagaaaatctactattcagaaaatctaccatgtaatggaaaccaaaatataaccaagaaggatcacactgcaacccataagctacaacctgaactaagaagctagtacctttgctttctgtgattttttctctctctgaatatcatcccatgattcttcatatgaagacgtttcaagcctaacaaacgatggatcggtgtagcgtttcaaacaagccccagctccggaaatatcaaacctaatcaaaaccatcagaagatgttacatatatccttctctaacaaacgactaaagaagaagtcctatcaaacaaggctaaatcatacttgtccagaagaaatagccttggaggacctcgacattcctcataagaatccatcacacaacgaggtaagtcaccacttgtaaccacactctgttccaattgtagattcggatgccattccacacctgaaatagagtcacagaatcatgttgaaataatccaacatcatagtagctgaccagatcatgaatgttcatagcaatctaacctttgttagagaaaaacggcgaatgatcggtttgacacagtaatgccttctctatagaaggaaactctgcttccaactgttgcacacgagccattaaaccatggcttctagaagcagtagccattacttcttcgtgcaagtcatgaaacatctcagcagcaaacgttcatcacaaattacatgaatttaaagacaat

SEQ ID NO: 23325 - DNA, 226 bp, Arabidopsis thaliana
actctatgatggagagtagaggtttgaaaccagatgtgtacacatacactgtcatcattagcggttatgctaaaggagggatgatggatgaagctcaagagattctcgcagaggcgaaaaagaaacataagaagcttagtcctgtgagagatcacgcactcatccgaggctattgcaagagtgaagaatatgacgaagctctgaaactcttgaacgacatggatcg

SEQ ID NO: 23326 - DNA, 2957 bp, Arabidopsis thaliana
aacaccacgatatccccaaggaaacgccaagccgaggccgctaacaaaacaatcctcgacggattgaaaaaatggctcgatgctaaaaaaggctcgtggtcgacgaactcgaaggtgttctatggtcacatcggacaactcctcgccgagccacaagagaaaccccattcgccttagtcaacgggacggaatgcgtaattccagccgaaatgatagtaccgagcctacaccggagtctatctcccgagaacaaccctgataatacttagaggctcttcgacgaactcgatctgatcgatgaatgaagaaattcagccttggttcgcatacaaaactattagaatgaaacggctcgtcagtataactcaaacgttcgacagcgaagattccatgaaggatatcgggttctccaaaaagtttttcagaacaccgccgaaccgaacgctggaaaactcgggacaaactgggaagggccatacctgatctctaaggtcgtccgacttaaacggcaaagccattccaagattctggaacgcaatgcacctaaggaaatactacaactaaatccaaggtgacaaaacttgaactacgaggtgggttgatccctgaaaagggtacgtaggcaactcgtctttagacgagttcagctaccaccccattaaaaaaggggggggggagtgggtccgtatacccatactcccatttatcatcttgtaagtttttaactttggtgaaaaataaaaatcgattcacaatttctgaacgtattgaacaatatgatgagcgactgctcggagtatcttttatgcctgctcggcaacagtgcgctatacaaataacgagataaaatctatcagataacctctgatcagaaatttcatcttcagatacccggttatactataaacgccggtattctagctcatttctaaacgctgaaaatgaatcggatcgggtcgcaaccgaaatgtttaattccaaaatccaactgtacttatcagaaaaaggttcggatttaaataaagatcgaaaacttcggaattgattaatggataaagccatccaggcatgaattcataggttctaaacaagggataaagccatccaggcacaaaagtaaaaagaaaatcatcaaagtttattcttgaggctcggaaggaaggacatcagcagccataagctcggacaaaggggaaatcatgcgacctaagctaggatcgtaaagaaatcagctgggccagctcgcccaaagctcaagctaagctggaaggagtgacggttactcaggtcgagtgacagtccagctcgggcagctggacgagtgacggttgagctcgaggtagctggacgagtgacggacgagctcgaggtagctggacgagtgacggacgagctcgaggtagttggacgagtgacggactagctgggcggttatgggcgaagagatacaactcttcggaaagatgcaactcttcggaagggcgcaactcttcggaagggcgcaactcttcggaagggtgcaactcttcggaaaggtgcaaggaacggatgtgttgattcgggaagcatccattcgccccctatataaggaagggcgcccaggcccattccactcaccacaacacaccgaaaacacaagaaactcaccattaaacctctctccctcttgggagaataaatagtcttaggattcggtagccgggctgtggcgcgaataaagaaggaggttcggatcgacctaacctcgagaaggaaggtaagggatcctagactttgagtctaagggttctaggatgtgagttagtagtcggatccttgaaaggatcgactagagggctgggtagtatccgggtcatgtgcatcctacacaagactcggtccgggtagggatcggctgaggcggggacgcggctcggcggaggaccggcgggtcttaactgacctgccaagaatcggccggactgatgcgcgatcttcccctctctgaattctctccacggatccgagtagtgtatggcatatagagcattgcatggacttgcatatgattaagtaaatgagattacttatggctctatgactttcaggaacaaatggtgatcgtgggaaggacttggcttaggcgcgagagactcaaggccgggatgatgggtggtgatagttcggatagtctagggatcgattatatgacttgtaatagcttatatgcaaactcataggttgtatcgaatcctttgcttaatcaataaagtatccgattgtttgtttactctattcgtctcatatattgaatcacggaatcatatggaacggattagactaggaaagaacctcataaacagttagggccgagtcacttagtggcgtgggtcgagagaactcgtccagactttaggcagtccggatcggggcctttcgagttggtatcgaagcatgcttggttctaggactaggtgttgggttaaggggtatcaccactcgtcggcttgagaatctcgcggtagttactctttactcttttgcgattttactaggagttatgtggattaactttggaggtttcgcagatgggtaagagcagcaaaacgggaaagagtaagaaggacaagggcattgtcgaggagactttggttgaggaggaaacgatgatcaacgagaaaaccagagtcgggacgatgctcgatgggacagactcggccggacctgatgccgggaagaagtccataaatgaggaagcaccggagagtagtggtgcaagggacaacacggataaccggaacaatactccaacggcccaagaacagtgggatttgatgaaggggaatgatggcgcaactagccacattgaccaaggccgttgtagcggatccggtggtcctaaaagtggataccaaaaggacgatgactcggaagttgtggaagtgaatcccaaccgaatcatgggcggaaaaggggag

SEQ ID NO: 23327 - DNA, 4999 bp, Arabidopsis thaliana
cgcttctcctcagcagtttctatgtcaaagatcaaaagttttaccgccaacattgctttgtactcgagctcaacgggtagatgacatgattttccatagagaagattgaaaggagttgtacctatagcgggtcttgaaggctgtcctgtaagcccataatgcatcatctagctttacagaccagtctttccttgtaatcccaacagtcttttctagaattgtttttatctccctattggagatctcaacctgcccgcttgtctgtggatgatccaaccaaatagcttctgaacttctcaaatgcgaatacaacagctagaagctccttctcagttgttgcatatcttccctgagcgtcatccaacgttcggctggcgtaatatatgacatgaagctttttgtctattttctggcctaaaatagctcctactgcgtaatctgatgcatcacatatgatctcaaatggatagtcccaattaggcgctcgaacaaccggagcagataccaaagcatccttgatggtttgaaaggatttgaggcagtcctcatcgaattcaaattcggtttccttgcacaatagtctggttaacggcttggctatcttggagaagtctttaataaatattctgtagaacccagcatgaccaaggaaaacttttgatgtccttcaccgtttttggtggctgcaactgcatcaccacttcaacttttcctttgtcaacctctatacccttctctgatatcttgtgacccaacactatgccttccttcaccatgaaatgacacttttcccaattgagaacaagattcgtctcttcgcacctggtcaataccctgccaagattcaacaaacatgaggagaaagaggggccatagaccgaaaaatcgtccatgaaaacctcagcatctcctcgattaagtctgaaaatatagaggtcatacacctctgaaatgttgtaggagcattgcataaaccaaatggcattctcttataggcaaaagttccataaggacacgtgaaagtggttttttcttgatcattagggtgaattggtatttgaaagaaaccactgtatccatcaagaaagcaataatatggatgattagccaaacgttcaagcatttggtcaatgaatggtaaagaaaaatgatctttcctagatgcagcattcaacttcctataatcaatgcacattctatgaccagttatagttctagtagggatcagttcatccttttcatttttgacaacagtcattccaccctttttagggacgcaatgcactagagaaacccatgtactatcagagatagggtagatgacaccagcatcaagcagtttcaaaatttcttttttcactacttctttcaaattgggatttaacctcctctgtggttcaatgctagaataggattcgttttcaagatggatcctatggttgcatagactaggtaaaattcccttaatgtcggataatgaataaccaatcgctctcctatactttctaagctcagataatagcaggttcacttcatcactatttaactcagcattaatgatcatagggtaagtagagtttggccaaggaatgcgtaccttagacctttaggaagtggtttcagatcaaccttcggtgccttcagttcagaccagtcatctgaagttgggatgatcggctccccaaattcgttggcagacaagatcgagtagctggtcgagtatgtgctcgagtgtgcaggttgaactcgtgttgacccttcttcgctcattaccattacctccgttgctggtccattaaattcctcaaagggttctgattcttccatcgctttatgggagtctaacagcttctggtatccctatgtttccaaatgcagaaacccatcttcaccacttttggttaaagcactgttaagatgatcttcttctgccagctcttccagtaactcatcagctaactgatccatttcttcgatccaaaagagttgcccttctatggtaggcttcttcatcgcgtctttgacatcaaaggtcatcctaaagtctttgccaaggattagatcaatcttccctttcttgacatcaatcatagctcctgtagtggctaagaaaggtctccctagaatcaacaggtccttgggctcttcatccatctccaggactacaaagtcagttggtatctccacaacaccgatcctgattgggaggttttcgagcaaaccatgagggatccttgctgatctgtcagctaggatgagggatatattgcaggacttgtattgagtgaaccccaatcttttggcgacagagagcggcatgagactgactgatgctcctaaatcgcataggcatctattgaaagccaatggacctaaagagcacggtatagtgggtgtgagcaggatcactaagcttcttaggaatgatcttcttctgtatgatagcactgcattcatgactcaataccaccatcccttacacttcttgaattctctccacgatcaagtctttcagaaacttgtgagagtctgggattagcgctagagcgtcaacaagaggtattcgcaactcaacctccttaatattcttggcaaacatagctctatatttatctgccaacgctttcttgtgacggccaggaaatgaaagctgcggtttgtagggaggagggataaagactttttctttgtttttgacagcaactggttttggagcagttggtgatgctgctgggaagataggtcgagttgttggtcgagtaacgttgtcgagtggcagatcgagtggttgctcgagtgataggtcgagtggttgctcgagtgactggtcgagtgattgctcgagtggtttgtcagcttgatctttctcgagacttaaatcctccccatcttgatcttcactgtcctcagtgaccgtctttggttcctccctagttggaagtgcttttccactacgcagtgtgatagcatgagcatattcttttggattctgaactgctttgtgcggtagttggcttgtctgttttggagctgaagaagatgcagaatgtcccactaagtatcggactttggtatttagtgtttccatcttgacattgagatcattgtagctacagtccaacttgttatgtaactcagatatcttctttgccatctccatggagccagacgcttgcgcgtgaagcagctgttgtagcatttgtttcatatcagcctcaggagcagcaggaccttggttttgctgatgtgcaaaccgaggtggtggtggcggctggtagttcccctgaaattgctgtttaggaacgaaaccttggttgtagggaacaaaaggtttgttctgaccttgttgttgctgtggaggatacacttgatcctgaggattagcaacgatggtgctgcggtaggagaggttgggattgttggttttgaagttgttgtatcctttgtagccaccctggttgttgttgatgtagctgacttcttccaactggttaccctccccatcttggacttgaaactgctcgtcatcaacaaggaagtgcacatgcttctgctagctaagaagaatcctgtccagcttgtcattcagcgctttgatctccttccagtgtttgtcatcagagtctgatgtgcctctgacggtcctatcacagtcctcgttgtaattaccatctgattgagccaagtatctcaaccaattcccattgctagcggtatccagaagtattctgatgtgtggtaggactcctctgtaaagagtgctgagcagagaggctttagtaaagccatgatgagggcattggttggtgtaaccctttaaacgcttccatgcttcacagaagctttcatcagtcttctgtgagaaactagaaatctcatttctgagtcttgcagttctggcattggagaagaactttgatagaaaagccttcttgcaatcatcccaagtggtgattgagtcatggggcagattcttctcccagatgtgtgctctatcgcccaaggagaatggaaacaaacggagcttgaatccgtcttcactgacaccattgatctttgttaggttgcagagcctatcgaattcatcaaggtggtcgagtggatcctccattggcagaccatggaatttgttcccctaaatcatcgagatgagaccactcttaatctcgaagttgttgttcaggatagcaggtggggcaattcttacgatggttccttggtgcatctctagcaccaatgttggcagggccattttgttgattatgttcgtcagccatttcgagtggttgttgtggtattaggttgactgtgtttctcctttctctgagttcgtgagctatgcagtcgatgttgtcattgaaaaggaggttctggttgcctgttgatcgagtttgcatacaatagaggtgtacctggatcaaaaagacaacaagaaaagcacacagttagcaaccgttttgaaaattgaaaaagaacttgatctaagcaagtctgaaatctcaaatgtaacaaacaaacacccaattggcaaagacgccaaattgataatagttcttagtcaattatcctaaaacaccaatcatatcgttgtagtattttaggttgtcaatccaaatgggtgtgatgctaacaatcaagatgtgatcagaagtcactaagtcaagcaaagcaataacaggttttggtgtgttctagcagtcctgagtgaacatgtagaaaacagaaaatcaagcagaaagagtaagacactcgaccaacacagctctttgcagagcactgggtgaggtcgagtgactggtcgagtaacagacagtaaatgaaacaaagatactcgactgcacagtctgttgccagacaactgggtggttgagtatcatgtcgagtaacaagaaagaattgcagaaactaagcaacagatgacaagatgtagtaaacaatagtagagtaaacaataaattcaatcagataaagaatttctgaggatggggtaattgagtag

SEQ ID NO: 23328 - DNA, 4307 bp, Arabidopsis thaliana
gatcccccatcaacaagatgctttccttgtgccaattatgtttcttcccatagcctcgcatcttcttttcatgaccgttcccaccaacatccttcgtttttggtggatttacactagccaacctctcgtaataaacttgctcccctgtcaaagactcaggtggatattcgctagaagcatctcttcctttcagaaagtcttttctgttcctacgggatggatgaccatgaggaaaaaatctacggtgacaatcaaaccagcatgtcttccgtccattgggtagataaaaagactttgtactttccatgcaaacaggacaagacaatttaccatgagtagtccatcctgataacatgctatacgccggaaagtcgctaatcgtccacagtagtactgcttttagattaaaattctgactcaatgaaacatcgtacgcatcgactccagtagaccacaactcttttaactcctcaataagaggttggaggaagacatcaagactagctcgaggatgatttggaccagaattcagaatggtaagaaataagtactctgtattcatgcacataccagggggtaaattataaagagttaggatcacaggccacaatgaatgattacgagacatgccaaatggattgaacccatcagtacacaacccgagataaacgttacggggttcttccgcaaactggggatgtaaccctaggaaatatctccactctgctgcatctgaaggatgattcatttctccctcctttgattggtgctcagcatgccatcgcattgccgctgctgtcttatggctctgatacattctcttcaaccggtccccaataggtagataccacatacgactatatggtactttggttcttcgacggtcgtccttaggcttccatcttttcgcacaacaaaatcgacattgatcttctttttcgtcttctttccaaaatagcatacaattgttctgacaaacatcaatcgtatgatatggaagtcctaaattgcgcatcaacttctcggtctggtaatgtgaagtggcagactggtttccttctggtaaaaaagctgtaaacatctcgcaaacggagtccaccaacttttcactcatattatactccgctttgttgtgcatgagtcgagatgctaatgataactgcgactgcccttcacgacaaccatcgtacaatggattatttgcaccttctaacaagtcgtagaacttatttgaatggttagggaccagctcttccacattctgataactaccatcatgatgatagttatcatcatgacccacgttatcatcataccccacgttaaaattaaatgcatcgttcaccatatccacatatggatcttctacaacattacccacttcttcatgattctcactaaaatacgtcctatccgtgtaactagttccgatatccatattcaattcttctccatgcttataccaaacataataataaggcataaatccttgactaaacaaatgactactaactcttctacccgagatgatgtgtttttcattcttgcatacactacaaggacaatgaaatttacctcgactactctgtactataggatgactattagcaaaagtcatgaattgctcaactcctgcgacctattcggctgacaaattccccgtcacttcatcaaatcttttgtacatccaatctcgatgaaaaccgccactaccgccataattgtagttttccaccattatacaataaaataaactattattttcttcttttaaatcgttttttttcttttgatgttgttgttgttttgatttgttggtgaaaaaagagtgtcgtgaagttttaatatatagacgaatttttatgacttatttacgactacatgttgtagtcgctcacaaattaggtgtacctacttagcaatgcgaaacatgtttttcaccaacttcatgcgacacctttgcaactactttgcgacaacagactggttgtcgtcaaatatacgactaactaaagtcgtcggaaagtttgtcgtcatttaccgaatatttgacgacaaatttctctctacagaaatgtaatcgttaaatagtcgtccatttacgactattcgccgattaacttatttagtcgtaagtggacgactacttcacgactaattttcatgttgtcatacgttagtcgtaacaacgtcgcctagttgtcgcaaaataaaacgactacacaagttgtcgcatttcgttgtcgttttttgtctagttttcttgtagtgtgattgagtctgggactagattaacttgagggtctctgttgcggtggcacttagatttggttattgaacttgttgtctagggataatttattgagcttgtcaatcacttgtaaactgaggaaacgaaactactcaattaccccatccttgggaatttctcatccaattgatttctttgtttaccctgttatagtttactgcatcacgcttcttgttgtttagtttttgcattttctgctagttactcgacctgatactcgaccaccttgttgtctggcaacagactgtgtagtcgagtatccctgttacattttctgtttgttactcgacctgtcactcaaccacacccagtgcttggcaacaagctgtgttggtcgagtgtttatactgttctacttgaatttttgtttcctgcatgttcacttaggattgctagaaaccccaaaacctgttattgcttggcttgactctgtgaattctgattgcatcttgattgttagcatcacacccatttggattgacaacctaaaatactacaacgacatgattggtgttttaggataactgactaaaaacctattatcagtagccttgggaaaacagccgttgtacgtgtcttggtccctattattgggttttcgatgtgcataggtgctggtacgaaggtgaccttccgcttaagagggggttagacctctatcgaggcgaagtctaaacgagtccttggagtgggatctgtcagggaagcagctcctgtcaaatctatggagatctgggaagggatctcagtttcctggggaggagtttccttgcccgcgatatcgcgctatatctcatgccccgcgcgagtagattgtgcggagcttagccaactattgccctactattgtggtgcacgatttcttggtttttgcttatgttgatcaggtttatgatcattgtgcggagcttggccaactcgttggcagatctcagaaggacctgcttggaggggtaagccaggttgagcggaggacagttatccgttgggaggttgtatcgtgacatgctgctccctgtccttagtttgcggggcagtgggggggagagtttgttctgattcagaagaattcaagttttgggagaggttctccgcattagcgtcacggatagcatcgatttggattccaagagggagatccgtcgggaggcgttcgtccgtaaaagtagcgtttgagatctgagcaggtacgtcggatctcgttgaatcggatgaattgggataaatgatcgttggtcacaattgatgtgttagtttcggtgttggaaggatctattttcgtccccacagacggcgccaaatgtgggttctgaaatccacactagagatttgtaattaggtttataagaaaggagggctagatcttcacaagaactttgagatttatattgctaagaacgaatgaacttttgtattgataataacaaaggttttacaatgtggaatgagattacaagtgtaaaagtgtaagtgtgaatgttaagctgaatgaatctattttccaagtcatctttgcttccttatatagatctgcgcacgtgggcagttccatctgtgatccgcagagattctcctggatattcggcaggtcagttccgagatatcaggtccgctcctcgaatatctccctgttagttcctaggttgttactcgcttatctcccttcatcaggtgatcaggcttatcaggcccaaataccctttcgcgtatgtgggctcatcagttgcgcaggtcctctacttggtgggcttggtgggtttagtgggctggcttggtatcttcgcaggtggattcttggagggaaatccaactccaacatttacccccaagcccattgaatgagtaggcgaactggatgcgcggacatcttagtctggtaagattgcgaaaatattttagatgaggtgatagatatgataagatcagtcggttttgaggataaactaaataaaaacgatttaatttcaggttcctgaaccgaaagatattgagtaga

SEQ ID NO: 23329 - DNA, 1253 bp, Arabidopsis thaliana
attatgagatatgtaagctaatcttttctgttttgctaatggacaaatgcaacaaggtgatgactctgaattaaaagacttcaaagaaggaatgatactaacaagtttctgtaaaactactgaagatggatggcctaaacgttgatgccacagatgtccatcatttagaacagatccagtgaacaaacaagctgcaggtgttgatgtagagggggaagtattttctgtttcaagaatgtatagattgtgataaagtctacccctcccaatcatcaagccctgagaaagttcttgaatcaaacaacaatcaacatagaaatgagcagaacacgatatagttttaaccaaagaactaacactcatcaaattgaatttaaaatcaggaacatgtaaaacattatgtaatatgagtttttgagtaatatgcacagttcctatatgcgtaatagaaaccctagtaccatttggtaatgtaacagtgacaccagagacagattttaattccctaaacatcgctaagtctgaacatacatgactagaggctccactatctataatccaagcatctgatggtaagaatttctgtaaagctgataatgtatgattttgaaatttgagatcattattctcatacttaagactagtagaagggaaagggattatagtacccgatgtggaagtaagtgccataaaaccatgttcagaaactgtagccaatggactaggattacttgaagaagctgcaggctctggaacttgcacttgagcctgaaactgtgaaatcatctgctcgatttgttgaggagtaaaatcttgaagactcaggttgtttccaccatgtgttatatgtggcattggataactaccatatggattcatcataggtgcctgtgaataaccttcagaaggatatgcaccagtctctgcataaacttgagccacaacattcgctttctgcatcgaattagtataaggctgagctggaaactgcatccttggttgaggcatcattggcatcctaggttgcacatgtagctgagggttaggcttgtaagtatatcctgtattgcctgtcttcatacccggtggataaccatggactttataacatttttgaattgtatgtcccactttcccacagtgagtacatatcggcttctgattaggtctaactgtgttatatgctgcaacataagcattttcatcttcatttatcatagaagtgttttgaaaagcaacactatcaatatatt

SEQ ID NO: 23330 - DNA, 4893 bp, Arabidopsis thaliana columbia
gactttatacatgtataagaaaaatattttatattttcgacggatttgggagggtaaaagtttcaccgttagaaaagcatcgggcaccaaactttacccttcaaaacgaaaaaattatgcggcaattgtttcttttttccaaatcagttttacgcttatttttttcaaaacaaaacccttaaatatctcttaatattccctcaaatctcaattttcctttcatttctctcacatctcaactctccctcaatctctttgaaatctctctcaacctctctaccgtctccttctatctctttgaaatctctctcaatctacaagaaaacaggcgatttgcgagggaaatttgagatggcgtaaatccctcgcaaattgctatagacttgcgagcactttgcgcgggaaaaccaatacgtcgttaatcagtcgcaaaatttgcaagggagaattcccacgcaatattgcgtggcaattgcgagaaaattgcaacgacggaagaattcctcgcaaagtcatcgcaaattgcgagggatttgctgtacgataaagcctcgcaaactgcggtaaatttacggcgtacaaactttttgtagcaaattttgcgtcggagttgcgactccttggcaggttaggtcagcacattttaaataatcttcctgctttggttggtagttgaacttgtctcgcaaattcgtagcaaaatagcgatgttcctcgcaagttcctcgcaaatccctcgcaatatgttttcgcacatctataaataaccaacgtaacatgtacaaaattttcatgttcaaaatacaacaggacacacctcgtcagaaccacctaagctaagagatacattccataccccaaaatctaacataaacatattaaaaaaaaacttacatgttttcagaaattgtagagagaagtaagaagaattggaaaataattgagagaatggaagtgagagaacaaaatagttaagtaaaattcaagttaaatagatattcaaagtaaaaaaaaattacaacaacttaagcttttattaaattaaataaaataacaatcaaacgagtattgcttaaatttcgaaaaataagtttaataggatttactcaaatacagtttgtggataataataaaaataaaaatagaatttaccatccccacatcttctcaaaattatatattgaacaagctatagtcgccttcttccgttcttagctcatcaaaaaagtcatagtcgtgatctgttcgtcgccttcagttgttagctcatcaaattcatagacgtagccgtcttttaataatagcatccacgtgaaggggtaaacaaatctctctccaacgatttttggtttttatttgattatctttgatctgtttttatttttcctctataggttgaaactactatacccacgatgagttcatgaactctaatatatattgtcttcttcgtcgacttagatggagcctctcgtcgtcaccattattgatcttaagcttcattaaatttctatctcaattcagcactattattgtgtggttagagttatcgatcaaatctaagtggagaactcgtcacaagcagtaacatcccgccataatcatcatctgagatctttgattctttatctgaaccatccactctataacatgttataagtcagacttgaataagctcctagaagaatgcaaatcaatgcatttttgtgcatcaatacacacacataactatcataaacttagaacatttgtcttaagttgaagttttgtgagctagtactcaagtcaaaccaagcaagattatatcaaatctaattctcaatgcagattcacagaaatttctctccaaggacatggaaactagtaacgaaaaggaaatgatcgatgttagaagtatctcaagagcgtgtttgtaacgccgagttcactcatttggaaatgagatgatgactttatacatgtataagaaagatattttatattttcgacggatttgcgagggtaaaagtttcaccgttggaaaagcatcgggcaccaaactttaccctccaaaacgaaaaaattatgcggcaattgtttcttttttccaaatcagttttacgcttattattttcaaaacaaaacccttaaatatctcttaatattccctcaaatctcaattttcctttcatttctctcacatttcaactctccctcaatctctttgaaatctctctcaacctctccaccgtctccttctatctctttgaaatctctctcaatctacaagaaaacaggcgatttgcgagagaaatttgagatggcgtaattccctcgcaaattgctatagacttgcgagcactttgcgcgggaaaaccaatacgtcgttaatcagtcgcaaaatttgcgaggaaaaattcccacgcaatattgcgtggcatctgcgagaaaattgcaacgacggaagaattcatcgcaaagtcatcgcaaattgcgagggatttgctgtacgataagagtctcgcaaactgcggtaaacttgcggcgtacaaactttctgtagcaaattttgcgtcggagttgcaagtccttggcaggttaggtcaacacgttttaaataatcttcctgcttggttggtagttgaacttctctcgcaaattcgtagcaaaatagcgatgttcctcgcaagtttctcgcaaatccctcgcaatatgttttcgcacatctataaataaccaatgtaacatgtacaaaattttcatgttcaaaatacaacaggacacacctcgtcagaaccacctaagctaagagatacattccataccccaaaatctaacataaacatattaaaaaaaaacttacatgttttcagaaattgtagagagaagtaagaagaattggaaaataattgagagagtagaagtgagagaacaaaatagttaagtaaaattcaaagtaaatagatattcaaagtaaaaaaaaattacaacaacttaggcttttattaaataaaataaaataacaatcaaacgagtattgcttaaatttaggaaaataagtttaataggatttactcaaataaaatttgtggataataataaaaataaaaatagaatttagcatccccacatcttctcaaaattatatattgaacaagctatagtcgccttcttccgttcttagctcatcaaaaaagtcatagtcgtgatctgttcgtcgccttcagttgttagctcatcaaattcatagacgtagccgtcttttaataatagcatccacgtgaaggggtaaacaaatctctctccaacgattgttggtttttatttgattatctttgatctgtttttatttttcctctataggttgaaactactaaacccacgttgagttcatgaactctaatatatattgtcttcttcgtcgacttagatggagcctttcgtcgtcaccattattgatcaaaagcttcattaaatttctatctcaattcagcactattattgtgtggttagagttatcgatcaaatctaagtggagaactcgtcacaagcagtaacgtcccgccataatcatcatctgagatctttgattctttatctgaaccatccactctgtaacatgttataagtcagacttgaataagctcctagaagaatgcacatcaatgcatttttgtgcatcaatacacacacataactatcataaacttagaaaatttgccttaagttgaagttttgtgaggtagtactcaagtcaaaccaagcaagattatatcaaatctaattctcaatgcagattcacagaaatttcactccaaggacatggaaactagtcacgaaaaggaaatgatcgatgttataagtatctcaagagcgtgtttgtaacgccgagttcattcatttggaaatgagatgatgactttatacatgtataagaaaaatattttatatttccgacggaattgcgagggtaaaagtttcacctttggaaaagcatcgggcaccaaactttaccctccaaaacgaaaacattatgcggcaattgtttcttttttccaaatcagttttacgcttatttttttcaaaacaaaacccttaaatatctcttaatattccctcaaatctcaattttcctttcatttctctcacacctcaactctccctcaatctctttgaaatctctctcaacctctctaccgtctccttctatctctttgaaatctctctcaatctacaagaaaacatcgatttgcgagggaaatttgagatggcgtaaatctctcgcaaattgctatagacttgcgagcactttgcgcgggaaaaccaatacgtcgttaatcagtcgcaaaatttgcgagggagaattcccacgcaatattgcgtggcaattgcgagaaaattgcaacgacggaagaattcctcgcaaagtcatcgcaaattgcgagggatttgctgtacgataaagcctcgcaaactgcggtaaatttacggcgtacaaactttttgtagcaaattttgcgtcggagttgcgactccttggcaggttaggtcagcacattttaaataatcttcctgctttggttggtagttgaacttctctcgcaaattcgtaacaaaatagcgatgttcctcgcaagttcctcgcaaatccctcgcaatatgttttcgcacatctataaataaccaacgtaacatgtacaaaattttaatgttcaaaatacaacaggatacacctcgtcagaaccacctaagctaagagatacattccataccccaaaatctaacataaacatataaaagaaaatcttagatgttttcagaaattgtagagagaagtaagaagaattgcaaaataattgagagagtggaagtgagagaacaaaatagttaagtaaaattcaagttaaatagggt

SEQ ID NO: 23331 - DNA, 516 bp, Arabidopsis thaliana columbia
ctcttagcaaaagaaaacatagcaggagtgtaaagatgaatactaagactcaagggttagaaggagaagcagaagatctaacaacggtagtcttgaaattcacggagagaggcagtgttgaggaggcaagagcatggtcttcaccattgttgtcagagtcattgccatcacagtaaccttggagcatatcaccttcttgagcagtaaaaccaagaacaccaatcatagtaggccaacacttgcgtccaatggttcttatagcactgcaacacccagggccaatgtaagtctcaccgttgaggaagaacaagatcagctctccagaacagtgttggagctgcatcagtgagtcccagcagtaccctgtatcttcatcaagcttgagcctgtacacaaggcttgtggtaggagaagacgtccccatggatggtttcatgagagggcgagctgtcactgtggaggaagcaccatgagcatgagagtcacaatgtttaaggtgccatgaactagatttgg

SEQ ID NO: 23332 - DNA, 558 bp, Arabidopsis thaliana
gttatcatttctgctttgtcattcacttgcctgctattgccatttctgcttttagtttcatttcatttctgctattgcatactaggactttagaaccaaccaactttctgcttggcttgacttagagctttctgatcatatctcatctgtttgcatcacaccgaattggattgacatcctaaaatactacaacgacaagatagtgttttagggattaattgagtaaaatcctactatcagctccccaagctcttccaagcaatatttccccacttccatcgatcttacaattcacaaaagagaataatgattgttcatcttctgattgtcttccttgagctgtgatagatccagtaactctagatgtattcccctttgctattgaattaatagtacaatcctgtttgcgattttagagtattaagctcatattttgaaaaggtcatgcatgtgttttatttttaacttggtagtgtgatcttccattgccaaatataaaatctatggacccttgaatgaatcaatctttgaagaaatggcttcctttatcatctagta

SEQ ID NO: 23333 - DNA, 517 bp, Arabidopsis thaliana
taaccagaatttgaaacacaatgacactattcctacaaatacatcaaacaagattgagacttgagaccgtggaagaagaatgaaagacctgtcctctctagtgagctatcaagtgtagagaggtaaagcagtccaagcaccagagacatgaccattctcacaaacataagctctcacaactggttcaccatcatcatgaaacccaaacactcttctcaaacaaaacgatgaatgcaaatcccaagtctcatcgcacaaacaaaacgcgcatttcaaacccgaggtcttactccgattaccgtcgtttatcgttctccaaactctagaccttttgaaatccttgaagactcctctaaacaacatgtaatttcgtttctcttctacgtgaatacacccaggccaattgcaaatgtagagacaatcacctcggaatctactcgcgagaagcttgttgccttgttcacggctaaggttccagccaccggaagctaaatgagatcctagagatcgacaaatc

SEQ ID NO: 23334 - DNA, 2856 bp, Arabidopsis thaliana
cggaatagcatacataggattatatgtgtacattatatatacttgtgtacgttaacttgcacaggtagtcatggaagagccgtgtattgtcgaggggtctgtagaaactgaggatcctaacccagggtcagatgaagcagacaagaccgatattcctaaaaataatgtatgtacctattttaaacatataaaaacgtatgaaactgttgttgacaatcatatttgttaacaggatgaatcagacaatgctgctgctgtcgaagcaaaagaagaaaaaaaatcgtccccaaaggtcccaaagaaagtgaagaagcaacttgtctatgaacaggatgatgcccatcctcatggttttaaggcaaaaacagtattggtgcccgatgtaccagctcaacagatagaggttgttatcagggctggaaatgtctcatacaaccccctggacatgcttgacccttcaaaagtagaggaattcagcaatatcattaaaggaccctctgtgtaagtacattatagtaaaatggattatttaatatctcaatcatcatttttccaagtcttaaggttgttatcaaatatttttctggattttacaggattcacactcttttcggatttcgaaaagtgcccaacgacttttttgcgaaccttctaacacctggtgaatgggtcgaaagttcggtatgttgcatttatatacgtacattccttgttataaattgtacatagatgattaaatttttcgtggaagtgtacgtacactgatatattttttgaacatttcagcatttagaaatgatggcaatgttgatgtggcacaagaacggggaacagatgatagcaaacagatgtattgtattggacatgatgctgacgcatctacttaccaagcgggtgggcgacttcaagaagtgtatcaataagaacgggttcaaatggggtaaattactgtccgacattgctaatggagttcacataaaccgtgaacccaatatgaagtggctgaaggatgtcgatgttgtgtatgctccgatgaactggaagagtgaacattgggttgctttgggaatcaaccttaatgaacggctaataactgtgtatgacgctttaatatcgcacacgcgtgagtcggctgtgaaggcgagaatgactcctatttgcgaaatgatgtcgtacttagtcagagcgatgtgctaggatgtaatgatttctccgtactcagttgaaccttttgagtatgtgcgttgtcctaccgttgctcaaaacccaactacaggagattgcgggccatacacgatgaagttcttggagttgcttgcgtttggacaccctttttcggaattgataaccattcgagaagtagatatggtcttctaccgtcagaaatactcggttgacatctacgagcacgacaagcgggaggccggtactgtgcacttgctttaatcgtccaagaacaatattcttgttctttgcaaccaattattatgaacaaacctatcttagatatatgattgcaactacatttaatttggagattgtcagaagttaatttagtgtcctctatcatattgtcgtacacatcgttcacttctaattacataatgtaaatgtgtacgtacatatctatatgtctcgtacactgcatattaactttataacataactcaagtgataaattgatttgacagccaacgcttaccaacacaagtatgacattcatttcaaccgtaattgccccaaccaaattcacagtagtggttattaaagtgaagaaattactgacgatctctgactatctcatttcaaacatggttaacccgactcttcccgacgatttactctcgaagatagctaagaacctggctgaccaatgctggtccgaccttggtccactggtacgatccggcactcgtggaagagacattgtctaccgtccggatgtcctcaaagatgtcaatattctcaccttgtgtaactcgcccgatgacttccaagctggagggggccacaatccctccggatccgctgatgaaggccgacatcgaccatttttcttgcggtgttttgcagctaataatcccacgaccgtgtattacgaaggtattcgtgttctaacgcatgaacgaaacatcaatggagccatcaggctcttacagcgtcatgctccagtacgagcaaatgcaacacttgcatgcgccattgtattcatatgtgcttggtatgattaaatgggcggcttgtttctacagctcttcacccgcaaccattatccattggactcggttgccactcgagttttgggtgatgagttcatcgaggaaataaagaagtctgaccctccatacagcaatacataaggtcctactttctcttatcctaccagccatggaattagtatgcctccttgcgccttacattgttacatggtatcaggagctttccaaaacgtttgcaaccgctgttacctctcgtcgtgtgccaggcgtgttagtcaaatgctatagttattccattctactttatatgtttgtttatgttatccgctatgtcatgtttcaaattatgataaggcttctactatgttgtttatgtttatgttgaaattatattattgcttaagaaatttgcaaggtgtgttatgtttctcaagttgaatatttttcagccaaattcgcatatgatatttagttcccgcagtaaatgtaaatttggatattaaaatctaagcgtccacaactacgtacacgtgcatctaccaaataatacttaaaggtttttggtttgtctcggaaaactagatatggacgtacactagcatgagatatcaactctaacgtacactaaaaaataacg

SEQ ID NO: 23335 - DNA, 3454 bp, Arabidopsis thaliana
cccctgtgccttctctttcttgacctaagacagcatgattgcactgatgtcccttgtcagcaagttagcttcatctgagctaattccattatcaacaagtcgcttgacatacttgttgagtggagcagaagatgtcttagaaacatccttaggaagagaagtgaggatcttttccattatggcggtgcacttagcagcataaatctcctgattagaacgacgtttcctcggataaggaacaggaggggcataggtagactcgggctgcatcgcaattctcacctcatatggtgcagtccggacccagtgtcgatcgacaccgtcgtatggaatcgtcttagagaagagtgttccatagggtgtcgatcgacactggaaggtgtcggtcgacatcatctctgcaactgcgagctccaactcgtcttcagtatcaaattcttcccacacatcatctccttctctgatcaagatggcattacagctcttccttgggttggcatcaggattaccaggaagaaaactctcttgtctcttagtagattatgtagtttgacgctacctgtacatctagcttcttcaagtgagagctcagattgtcgatcttcccattaagatctctgtagaaaacatcaaacttgccattaaactccacaacaagctttgattggctctccagaatctgctcaagcatcgattccattcttgtctctgctgagggtggaggggggcttggtaagttgaattaccataggtcctctgaaagctgctttgaggaaaggtcttctggaaagcaggctttagagtgtagttggaggaaccctggttccatgtaaacctgttgccactgaagttgccatgtggctgcccaaacttcctttattcctgaccatctatgtagaagactccttcctctgactcacgctcaggctcaatagtcttctcctcagctgcaaagtggacatgcttcttccccctgagcaagttatgaaccgaatccagcttagcattcacctctgccatctgattttctgaaatagttccagcaatcttcttcctctcaaaatcagcattcttggtactgttgctgcaacaaggttctctatcagggctgtagcatcagctgggtaacgtgtattgaagttatcattgcttgctgcatctagagccatctggtatctccaatcaactcctctgaagaaggtacctagaagttgtacctcactgaaaccatgatgtggacaatctcgttggtactccttgaaacaaacccaagcagccttgaaagcttcagctggaccttgtgtgaaggtagacagcttgtttctcaactcctcagacttagcatcatcgtagaaattgttcaagaaggctatcttgatgcttctctaagtcttgagggaacctgctttaagttgtttcagctaagaagctgcttccccatcaagtgaataagggaagagcttgcacagtaggtagtcctttgagactccattagctttgatgctcagaacaaggtcctcaaatcgctcgatatgatccattggctgctcatgagataagccatggaaaggatgctggccaactaaagcaaagtagccaggcttcagctcatagtcgttcctctagaatggtgggggtacaatcgctgatcgattagcatagaacaagtctagcctgttgaaatccccaagagtacgacgtggttccgcagttggaggaatagctgcaggaatctggtgttggtgtcgatcgacacctctgttgtgtcgttcgacaccgattgcatccgcgtgctgctcccgatggtgtcgatcgagacccacttggtgtcgctcgacaccgagccctcctgcatctctagcagctaattgcgcattaaggcgcgcctgatcctcattggcgtcctcaggtaggatgagtccatgatcatccaatctctgaccagcctcattgtaggcttgcccatcctcatctctcaaaactctttctgcatcagctctgatgactctgtcagccattgctaatttatgagtttttcggttggtgcgttcaagttttcccaagtctagaacagacaagttgataagctccttctgttttgtgctccttgtttgcctaggcatacacctgaaacacagaaaagaagaagacaagaaacgcgtgagtaacaaaatagaagtaaaaactagacgaaatctctaaacaaaactcaatgatgattcccaagaactccggcaacggcgccaaatttgatatggttcaaatgacctagaactactctctcaaataagagatcaattacagtattttaggatcgaattcacggagttcttttgttcaaatagtgagttaaatgtcgagattaagctagcagggtatgagtgaaatagtaagtaaacaaagcaagaaaacagcagattgattgtgttgtgaaagatttaataaagaggtaggaacagggtattctcaggaaactattggttagtagatctaataaaaactaggttgttatcgaaccattcttaaactcaaactctaattatggaatagtgggcgtgctgcgaaactccctatatctatagctaataataacaggagaagtcgagaaactatcaacctaaatatgcattcttaacgagttcaattgttcatcttagtaaataggccgattcttattacacatctataaaccagactcatcaaataatagatccaactacagatacctatggcgggaatatctattgtctggattcaagatctagttaattactctagatctagcattaggcataattaaagatgaagaattctacagataacctagcaaagggagcaatctactaaactatatgaatccctaatgagaaaccctattcctaacaagcagattactcagacatattgattgaaggaaacaacataattgagtatgaaaacataaacacggcaaatagatttaagggaaagaagggatctcttcactgtattaggaactgaatcaatctctgaaaacactcgatgaatagcttatgtctctcagtaacagggtttgcaaaaagcttgataaaaaacttgataatgaaaacttaggtctaaacaatgtatatacaccctctaaaaacgtctagggactaataatgtaaatagaaaagttttctagggcaaatttcctcttctgtaaacttgaaagcgtctaggactttgctgggccgaaactggtgtcgatcgacactaggagtgtgtcgatcgacactcctcttgattcgtgaaaccaaagtcgtccttaccttactttttcttagcttttgctccaaaatgtctccttatctccattgttgtcccactgcatagaatacctgaaaagacactaaaaagactcgagaaataacataaagactcaagatcctatacctaaaacatagataaaatcagttaaaataaggatatatca

SEQ ID NO: 23336 - DNA, 385 bp, Arabidopsis thaliana
gatgacatagaggaggtggagaaaattatggaagagtgggaagctggacactcccttttcgatattcggatcccacacttgttaataacgggttactgcaagaaaggaatgatggagaaggcagaggaagtagtaaatatattggtccagaagtggagagtggaggatacaagcacatgggagcgtttagctcttgggtacaagatggcgggtaaaatggagaaggcggtggagaaatggaagagagcaatagaggtgagcaagccagggtggagaccacaccaggttgtgctgatgagctgtgtggattatctggagggtcaaagagacatggagggtttgagaaagattttgagactgttaagcgagcgaggacacatttcat

SEQ ID NO: 23337 - DNA, 611 bp, Arabidopsis thaliana
ttttagggtggtctcgtacactgtgtcgcagctgactgcggggacgcttgtacctgcatttctcgggaggagaaaggccgttcgcttgcatcttgtccagtgaagcggttagagattcgtgagtttcaaggaacgttgagagagatggaaatgatcaagcatttctattactgtttcctctgtttgaaggagatggagatctatgttaaagatggtcgtccacagttcctagcccctttagcgtcggattctaacccattcaagcacttattgggtcgcaatgttataatcaaggtgcacggttctttgacataggctgtggacagcacaatgaaggtcttggtggaactttaagtttacttttccaaattaatatctccgaagctaaaaagaggagtcaacttcttgctttgatagtttttgctgataaaaatggtttattttttgcttttcgtcggagtatcaaacaggttgagtgatgaacttgatacgatgccgtattgtgcacgatttgtagccgagtatgccaataatacatcaacttgcattcgagatcaaagaatcgtaaatctatctcatattgatgactacttagttgagttttataaatg

SEQ ID NO: 23338 - DNA, 612 bp, Arabidopsis thaliana
gaagatagataaaagatcctcaggttctccataggaaatatcactaaacctttgtgatcttataatctctcctctcttgtctgatatgtatttcgcgcagacacggtcaaaggttgcattagcttcaatcatcttcttctcgtgtccaaatcccatccagttttgcagcttccacaagaactttggtttaacatgcctaaagaaaatcccttctccaacaacgtcgagagctttagctaattcatcctcatgcatttcaatggagagagatctaggatcagaaccggttataaggattaagattgtatcgaaagtgaacctcccaagcacatcttgcaaatccacagttgttccttcctctgcaaaatgattaagaagaggaacaagcccgtccttgagtttacttcttgtggtactcaatgaaaagctttgaaacgcttgatgatggagcatttcttgataagacttccttagattcttccatagctcagagtccgtggtgataattccgtctccgaagacatcaaaaacttctttgaaatcagatcctttgatgtaatttgagaagtttgagttcatcatatgatgaatgttagctggatcaacgtgagc

SEQ ID NO: 23339 - DNA, 597 bp, Arabidopsis thaliana columbia
  unsure (1)..(597): unsure at all n locations
gagcagggtatcatcaggtgcgtatggatccggatgacattcaaaagacagcttttaagactcataatggacattttgagtacttagtaatgctcttcggccttactaatgcccctgcgacttttcaaagcttaatgaattcggtcttcagagatttcctgaggaagtttgttctggttttctttgatgatattctgatatacagttcctcaatagaagagcacaaggagcatttacgattggtttttgaggtgatgaggttgcacaagttgtttgctaagggtagtaaggagcacttaggacacttcattagtgctcgggaaatagaaactgatccagctaagattcaagcagttaaagagtggccaactcccacgactgtgaagcaagttcggggtttcttgggttttgctggctactacaggcggtttgtaaggaattttggagttattgcaggaccactacacgctctaaccaaaactgatgggttttgttggtcacttgaagcacagagtgctttgatctcttaaacagttttgtcaatgcancgttttgggttactgtattgataacagtcatggtggaacggatgatgtg

SEQ ID NO: 23340 - DNA, 462 bp, Arabidopsis thaliana columbia
aaaccgatggtttataatgacccgaagaagtcggcaagaattatgagtaatcctgcgtccaaacaataactttcgtcaacggctcaagaggggaagaagattgaattggaaattctgggaattggaattggagagggagagagagaattcgttcatcatggaggaagtgacgagatctgtgttagcagaagaaatactgaagcgtttagatctggagaatctctgttccgtcgcatgcgtttccaccactctccgctccgccgttgtttccggcgttcttccttctcttacctccctcgatctctctgtaagtttccgattctcgtcaatttggagattttatttttctgaatagagatgaaattgatcgaattttcgtttctctgttaggttttctctccggacgatgaaactctgaatcacgtgctgcgtggttgtatcggactcagcagcttaactctg

SEQ ID NO: 23341 - DNA, 924 bp, Arabidopsis thaliana
cccctcccaccaaaaacaaaaatacgtctttattaggaaaaacatcaaagcaagaagttgactcttttagcttcatagctattaatttggaaaataaaacttccaccaagacttcattgggtagtccacaacctatgtcaaacaacagtgcaccttgaatttaacattgcgacccgataagtcgttgaatgggttagaatccggcgttataggggactgtggacgaccatctttaacatagatatccagctcctccaagcaggagaaatagtccaagaaatgcttgatcatgtccatctctcttgacgttccttgaaactcacgaatctctaaccttttcaccggacaagatgcgagtgaacggcctttctcttcccgaagaatacaggtacaagcgtccccacagtcatcaaaggttgggagggaaacaaagaaggcgaaaaagatgttttagggtttgccaaagtgaagaaggttttaattttcctttacgtgccctacataatcaagtgaaacgcagccttttataaagtgattaatttaaacagctagcgttttataaagtgttaaaagttaaacacacaaaactagtttagatgcgatatgatgagttccccgaattaagtttaagaaaccaaatgtaaacgcaaaacttattgccactcaacctatgatttcagttgtgtaactttgtgttgtttcttgcctaaagttaaatcaagttggtatctgatgtgttgtacattaaagtcaagatgtaggtatttttttttttttttgctaacgtttagtcaattcgagtaaagctctattaaagactttgcaagcaaaaggaattgtgaagagttagaacatccaaattttaagcgaggttctaaagttcacgtaactgttttcaacgaggcaagcaaagtaacaccaggg

SEQ ID NO: 23342 - DNA, 568 bp, Arabidopsis thaliana columbia
atgatccccccaacgaacaaatcacagaaaacatgaagccaacattaacattagtagcagagagaaacaatggtcacgtacgtgtaaagtaaaagacaacacacgacaaagtatcgtttacaaaatctcatgagaaccaaacacaattcgttgctgtcttctttacctttttttagctagacatcatcacattgtcaatagattggagagcttgatttgcgaaataccgaacatcaacatctgggtcttcacttagctccaccaagcatggccgtatcatgttctccacaacctttcacaaccaacaaaaatgaaaacatttgaatatatggacgtttagattccctgatgaggaggataatgtggaatcataagctgtttctttacttgtgagagccaacaaagaatgtatactaaccgcttggtcgactatcggaatgagagattgcatcattttggccacgttaaatttgatgtttggaactctgaaagaggaggagagagtggtctttttagttagctattgggaaaaaaattgagtcaatgaagattcaatgtaagagagaga

SEQ ID NO: 23343 - DNA, 622 bp, Arabidopsis thaliana columbia
tcctgattttgttgacgaatagtcattgtttccaatctctctcccctaactaaaatagcacatatcaaaggtttcttcaatggtgttgcacaagttgttagcgttcgacttgttgtaaaccacgagggtaagcatgtgggctatggatttgttgagtttgcttctgcttacggagcaaacaaggctctggaagagaaaaatggtgaatatctgcacaatcataagattctgttgatgaaaggacatgaatctcctggttttgctgaggaagctgccataacaaaaacgctctttgttgccaatctccgtgactccattcagatatcagatatcatcaatttcttcaaagatgttggagaagttgttcatgttcgacttattgtaaacagccagggaaagcatgcgggctggggttttgttgagtttgcttctgctaacgaagcagagaaggcgctggtaaagaacggtgaatatttgcacaattacaagatttctcttgacggagctaagacagctccacaccgtccacccaagttttgcctagatcacaaggtttggtacgaagactaccttcgaagagagagcttctcattaaagaagtgagggagtggaaggcttgatg

SEQ ID NO: 23344 - DNA, 486 bp, Arabidopsis thaliana columbia
gttattgacatgttaatctactatgcattttttcttcataattccttgaataccattaatcagccattcctctctcattaaaggcatcttttaagacttaccacaagcctctcctgcagaatcctaaggatctgatctttagaataggcacggaaagtgacaaccaaaggtttgcctgcattggatggaagtataagttacagaagtatactcaacttttaatcttcatcaaagcttaggtacatatggtgaagaaagaagagtgttcaaatggcaccacacagtgatggagaaattcttacaattaagagacttcaattttggaaggaaacgatctgcaaggtctattgcatttgctacacctggaggacaaatacgaactttaaacttaaaacttgtttgaccataggaaacagattttaagaatgcacattaatacgcaaaagacagtacctataagtatacacttgacaatggcaaagttgt

SEQ ID NO: 23345 - DNA, 645 bp, Arabidopsis thaliana
atgtagagagtgttcggtaacaactcagaattcacaaaaacatgtgttcatagttgaatactaacctttcacaacatttctttttatatagcatttggacagacaatgatattgatggaaccattctgagatctataaccggacgatctaagtttcttcttgttcatgacaaagatacatctctttttctttcttctggtcattaacatgaacaagctcctccttgttgatcaccttgggatgaattcgaagttggtttcaggtttacatcaaccatatcctcatttttagtgtttgaatacgattccattcccggtaatgccgcagcgattttgcgaaacaaaggcttaatattgaatcctgctttcgcgctcgtctcaatgaacataactccgtattcacgacctttgctatctccttcctcaatagaaacttgcctgaaaaaattcacaagaaaaagaaaaaaataacatcttcaaaacaatctcatcaaatgaaaaaacagagaaattgtaatgttggcttatgatatcaaataccgtttttcgacaagatcagtcttgttaccgacaagaacaatgataacatcgccggctctttcattacggacttcttctatccacttggatgtgttgagaaatgaga

SEQ ID NO: 23346 - DNA, 323 bp, Arabidopsis thaliana columbia
taacaaaaagacaagtgactgataatcaagtcagcatgttgcaaaaataaataaaaacacataccatcagtctgtgaatgaagccatcacggtagaccattaggtgcgacacatagcttggtgcatagtaatttgtaaagtatttgctcactgtctcgctgtaggactggtcaggagactgaggaatagcacgaataagaacagtaaaatgacttggctttgaggcagatccactaatatgggcaagcctctttttggctatgtccttatactcctacagtggtgaaacacgtataaacagggtgagagagagagacgagaga

SEQ ID NO: 23347 - DNA, 510 bp, Arabidopsis thaliana columbia
tccccaaaaaaaatatcttgtgaaaactgcaactgtgatccatggcggaggatatggctgccgacgaagttacggctcctcctcgtaaggttcttatcatctccgctggtgctagccactccgtcgctcttctctgtacgtctctcttcttcttcgctgtttttttatccttttctattacggactcaaataatcaccggaattgtgaaatccgctgctttagtaggctgtgcgcattcgcgtattctcttcatcttgcctttaatcgagtttcccttactttcgtcgtctactaatgcgtcgttttacgtcttgactatctacttggtgaagtagtaggtctttaaagccaattcaatggctgacagttaggtcatggccatgcaggggatcgatcttctccgactcagcttagcggtttagatggccaccaaattgtttcggttacctgtggtgcctgatcacactgttgcttattcacaatcaggcatggaagtctcagttggggat

SEQ ID NO: 23348 - DNA, 1021 bp, Arabidopsis thaliana
gttttgatctccggagataacaatggcgggttcaaaaggcttttgggagaactcgaaactttgattccagatggtgcagcagaggaagactccgcaggacttctggtgatgcgacaggagcctctggtgacgctgcgggagagtatatatctatctcgaccggaggattttttggggaaaatgaatctgctggagcttctggagacgcaacgggagagtctgtatatatctccgccggagaatttgcaggactagcgataggtttcataacttccggtgccggagctggtgtcgaaaatggagaatctgatctggattctacatgcgtagagatggtgaccaaaatagaaaccgtgaagatcacgatgatccgataggttttgttgaactccatttttttcccctttgattgagaaaaaaatggaattctgattagataaaagtgaccaaatgaagaaaagagtttacggagatcggtggaacgtaaatggcgattaaactttcaagttgtaattagtcatcatctttaaacatggtaattgtgaagttttgcgagaaaataggtcaacacgtcaattaacactaacgtatgttgtctttaaaacctttgtattcttcaattaactctaaaatctaagtatagctagaaatctgttaccttaaaccatcaccttttcctcaaattttcttccctttgattttttattagtatgcgttttttgctctaaagttattcttagagaaatgtagtactagcaccaattcagctgttgaaaggttttattcccgttgcttggattctcccaaagcaccaattcagctattgaaaggtgtatttggccggcgctattagctttgatcacagtctgttttatggccaagctaacacgtgatgttattatgtaccttcaccaattggtcttcaatgaaaggtatctggtgggtgaaagagtggacaatttgactgacgatgtagagcaggggataatcatccatggacaatgaccaacaattacgtttg

SEQ ID NO: 23349 - DNA, 465 bp, Arabidopsis thaliana columbia
cgagagccaaatgattcaacacatggttgatttagcttccaagaacaaggttttcaaatccttcatcgggatgggttactacaacactcatgtccctactgtcattctccgtaacatcatggagaatccagcttggtacactcaatacactccttatcaagctgagatctctcaaggtcgtctcgaatcgctcctcaatttccagaccgtgatcacagatctcacgggtcttcctatgtccaatgcgtcgcttctggatgaaggcactgctgctgcggaggcaatggccatgtgtaacaacattcttaagggtaaaaagaagacctttgtcattgctagtaactgtcaccctcagactattgatgtttgtaagactagagctgatgggtttgatttgaaagttgtcacctctgatcttaaggatatagattacagctctggtgatgtttgtggggttcctgtcag

SEQ ID NO: 23350 - DNA, 489 bp, Arabidopsis thaliana
tcaaaaaccactttcttctcgacccactcgtaagccgcttcgacctcgtctctctcccatcctgcttccgccacgaaatcttcttccgcacgtgagtagaatcctgcgtttatgactgtgcctccaccgagtacacgagcgcgtgagttgaaaacgccgtcttcggagatgaaaagctgcgaccatgagtttggagttatgttcaagagtgtgtttgcgaagtttccgatgtctgttgccgctggatcgtcgtaaggggaacctccgcgttcgaggactagaacggttgcgttttgagagagcgttgcggctaatgcacatccagcggttcctcctccgatgattatgtagtcgaagtgagataactttggtgctaatgttgcatctttcataaatctatagtttccagctacacgaaaacatatttttcataaagttggagttcatattagtacactaaggtaaggtataacaaaaaaaaaaaaaaaa

SEQ ID NO: 23351 - DNA, 2726 bp, Arabidopsis thaliana
taccatcagcatgaatttaatacgcatagtttcaattctgagaaaagttgataatgttgttatgagataactagtacaagtagtacaacaaaatattaattgtatgtttgtgtatgaaatttcaggaacttgatgatgaggaacaaccaatgcagccagagaggatgttctttagtacaagcgaatacgtgaagacgtgtaagatagggacgagatgcactgtgcaacagacagtgaagtatttggaggagtttaaagaagatttgccatggttcaaggcgcatccacagtttaggcatgtattccacatgcctgaggagaaaaaccacatgacccaaggcttgttgatgcttttgcttcgcacagcacagacatagatggatagggagtgctggtttgtggttaatggagtgcctattaggtactccattaaagagcatgcgttgttatgtggtttcgattatcatgattactcggaggagttgcagccgagtatgaagatcgtggatgcagatttgaagtttgccaaaaagatctttaagaaggtatctgagattaagatcgttgatgttgagaaaaagttggatgaaatgaagaaatgtggagaaaagaagaagacggataggaagaagttggctatcttgcttttttgtgcaaggtgatcgcggccaagtcaaaggttgatggaaacattgacaaattctttctgaagattgttgatgatgtgcgtgcatgtgagacattcccatggggtcgtttcacatttgatggatgtatggaaggtatcaagtcggtaatgaaatcgatgaaagggaaagcaaaattgcagacttgtttctccggatttattcttccattagaggtaacaatttagagtaatatccattataagatgcattagtagacttaaaaataatactaatgtgacttttactttgaatgtgtagattttgccttttgaggctattccacatttgggacaaaagtttagagaccttgtaaggttcgagaatgagtgtccgagaatgtgtaaggccaaattctctagtagtctcatgaaagggttctcgttggaagagataaacgaggagcttggaagtgtaaaggtacgagttgtcccagttatctctagagttgtcccagttatctatgagctagaatatgattatttttgatgtgtgaatttgtataggttatctctagcgttttgaaactggattacgaggagaaagatttgttgaggcggattgtagatggtgatcatgttgatgatgggatagggtttgttgatccggttgtcgatagctggagaaaccgtttgatcaaagagaggaagagaatcttctggaaggatatgtttgaagcggatgtccgggcccgaagcggcgacgagcaaatggaggaagagaatgttctgagacatgttccggatgttccgggcagcagtagctcttgctctttgaaggaagatattgatgaaggctttaagagagtgatggcgatgttggcggaacacaatgaaaggcttgtaaccattgaaaggagacaagccggtgagagtgtgcctccatttgagaagaaggtccattccgatgtgaataaggagaaggaagatggtggtaagaatgagaagaacgtgaatgtggctattgagactgaggctagtgttgagcccgaggctaatgagacccatgatgttgagcctgaggctgttgagaccgatggtgttgagaccgatggtgttgagatcggtggtgttgagacccatgatgttgagaccgatggtgttgagcctgagggttttgtgcccgagtttgttgagcccgatgatccgagttctgccatggttctttatgttccggatgttccaatcggtatggtttgttttgtcaatctttgatctttttaatatatgatgtttgttggttataaatggttgtcttttcttttgaaggtgatgttcaagttgaaagggaaactgaagcggataaaggcgatgatgagacgccgaagaaggaaacgaagaagaaagggaggaagggaaagggaaagtgcaacgataagaagaatgagaagaagaaaagagacgaggatcctgaggacgaggatgaaggtggcaaaaagaaacgtaagataaatccatcgagattccacacgccaccttataccgcggagagaatgagagggaccaagggtccgatttacgtttggagaaaaatgtattgaagacttgtgtttttgtgggaacgatttacttatgtatttcggatgtattgaagacttgtgtttttgttatttaggatgattgatcatgttgttttgggatttatgttacttatgtatttacgatggttgatcttgtttttatggtatttatggtatttaggatgatgttcaaaacaaaaggtacacgtagtttatagtgaggtacaactcaattccaaaagaggtacaactaacaaatcaaaacaagtacaaatgagttcaaaacaagtacaagtgagttcaaaacagaggtacaagtagtttatagagaggtacaactcaattccgaaagaggtacaagtagtttatagagaggtacaactcaattccgaaagaggtacaagtagtttatagagaggtacaactcaattccgaaagaggtacaaattacttcaaaacaagttgaaaggtcaaatgacctagaataggattcacatagttcaactttacatcttgtgcac

SEQ ID NO: 23352 - DNA, 4073 bp, Arabidopsis thaliana
gatcgttggatcggatcggccagaccgatcgtcaaacggatcggatcggccagacggatcggacagaccgatcgtcggacgggtcggatgggacaggccgatcgtctgacggaacgggtcggacagaccgatcgtcggatgggatggatcgagaaaagtgctcgaggaagcacacggataagtgcatccgaccacacccaagggtcacccatggatgcaatcttaccggtaaagggagacagcaccaagaatgggtaaggcacgtgattcactatataggatcaacatcgcggccgccttcatgtatctatctcctcagccatggtgaaaccgatcagagattggtaagaccaaagggtgactcgacggataaccaacgggaaagtccatggtgggaaccgatggacaaaacggatattggacccgcgagcaaacctaaggccgacggaagaaggatttcatgggctagcctacgatgatccagtggatgaatccaaggacccttgggtgtgataaggatatagttcagatcgtatggatggatcaataagccgaaagctttatcgaccaccatagaccggacggataaatggttagtaaaccatgggcggtcgtagtaaatgaacagatcggaaacatggatggttcgataagccaagggctcaatcgtccaccatggaaccgaagggagtacgtttggaggacggatggaccaataagccaagagcttgattcgaccatcgtgaaccaagggaatcgtacgatccccaatctctatcgttgtacttagaccagtggggttggttggttgtatggctaagtaacgatagggattggttcatcaattcacgaccgatgacgagtcgttgaacgaatggagtaaggcgacaaacgggctaaggaatcaaatccgcatattggccaaggtatgtaacgatctagcttattagttaagatagacgtttggtaattgatcgtgaaagtaggataaaggaatatgcgattgtttggcttagaatggttagcgaacatatgcatgtcttgaccgagtaaagaatcgatctaagtctaagggacaaagacgatgaaaccggtacaagagttggttagaattaaaccaaggttagaaagacttccgctgtgtaataagagagcgattatagaatttagcctcgtaaaggcaattctatgttgaatcgcgaaaaattaagaggttcggccggggagaggcgcgaacttgagtactacgtcgctggacgccgagacgtccgggactgggtctcacaagttggtatcagagcatgcttgatcctaggatggataggtgctcgggaaaacgtcatagtaaggttttggcggataaggaagttgagggatcgatgtgtttggaaacggaaacagttacctaactcacgatcaggaaccaagatattatccttgttatcaaaacttaaacatgacgggaaaatgggttgatatattcggagatggaccgatatcaatgaaatttggatctagtcggaacttgactaagatcgggtacagacttagtcaggatttgactatttctagggttttgatcttatcggaaattgaccaagatcatggaaaaacgacaaggtcggaagagacctatgtcgggaatattgaccgagtccggtggggaccagggtcggaaatattgacaaagtcggaaaaagacttaagtcgagaatatgatcgagtccgggaaaggaccaggatcaaaaatttgatcgaatgtcggaagagacaaagatcagaaaacattgatcaagtctaggaaaggacaaagatcgggaaataatgatcgagtccgggaaaggaccaggatcagaaatttgatcgaatgtcggaaaagacaaagatcagaaaacgttgatcaagtcaagaaaaggacaaagattggaaaacgttgatcaagtccaagaaaggacaaagatcggaaaacatggatcaagtccaggaaaggacaaatatcgggaaataatgatcgagtccgggagaggaccaggatcaggaatttgatcgagtgtcgtaagagacaaagatcgaaaaacttgatcaaactcggaaatagagatttgatcaaatgtgatatctaaagtctcggagagactaaagatgggaaagcgttaaggagtaaacaagatctaacacccgctgaattcgaggacgaattcagtttaaggggggtagacttgtaacgcccgtgtcccgagttagggagtaagcaagatcttacacacgccgaattcgaggacgaattcagtttaaggggggtagacttgtaacgatccgtcccgcgttcataaagaggccaggttgttttaggagaaaactagaccatggtcaagaaacggactaaaatacttagtcggaagaacgagaaagttcaagctgaaccagctaggtgagctggacaagctaggatgaactagctagctaagctaggtgagctaaaccagctggaagactagctagctcagcaaggtgagctgaccgacaactcaattgagctcagtgagctgatcgtgtacttacctagttgggtggtccggtcagctgacactcgagctagtagactgtggtagctcacgggtgaagaggtgtctcggtcaaaaggtgtaaggtcgagcgggtaccaatgaacggttgcatcgcccaaaggatgcaaggaacggatgtgaccttttggaaggatgcaaggaacggatgtgacctttcggaagggtgcaaggaacggatatgatgcttcgggaagcatccattcgccccctatataagggaggacccccaaggcatcatctcacatcatctcacaacatccagacaccacaaaacattcttaaaacagtcccaacacatcctgaagttgttggtcggaaagggggtgcggctcggcgagtataactcgaccgaactgatgcgcatactacctcccggtccaactgtttgatggagtgtagaggatggatagggtagaccgttcgtcttaaagacgaatcggatctggtagaccgatcgtcggatcggatcggccagaccgatcgtcggacggatcggggcagccagacagatcgtcggacgggtcagatgggacaggccgatcgtctgacggaacgggtcggacagaccgatcgtcggatgggatggatcgagaaaagtgttcgaggaaacacaaggataagtgcatccgaacaaacccaagggtggcccatggatgcaatcttaccggtaaagagagaaagcaccaagaatgggtaaggaacgtgattcaccatataggatcaatatcgcggccgccttcatgtatctatctcctcagccatggtgaaaccgatcggagatcggtaagaccaaaggatgactcgacggataaccaacgggaaagtccacggtgggaaccgatggacaaaacggatgttggacctgcgagcaaacctaaggccgacggaagaaggatttcatgggctagcctacgatgatccggtggatgaatccacggacccttgggtgtgaaaaggatatcgttcggaccgcatggatggatcattaagccaaaagctttatcgaccaccatggaccggacgggtaaacggttggtaaaccgtgggcggtcgtagtgttaaacgaccagatcggaaacatggatggttcgataagccgagggctcaatcgtccaccatgtagccggaggggcgtacgtttggagaacggatggaccaataagccaagagcttgattcggccatcgtgaaccaagggaatcgtacgatccccaatctctatcgttgtacttagaccagtggggttggttggttgtatggctaagtaacgatagggattggttcatcaattcacgatcggatacgagtcattgaacgaatggagtaaggcgacaaacgggctaaggaatcaaattcgcatattggccaaggtatgtaacgatctaacttattagttaaggtagacgtttgggaattgaccgagaaaataggataaaggaatatgcgattgttaggcctagaatggttagcgacaatatgcatgttt

SEQ ID NO: 23353 - DNA, 638 bp, Arabidopsis thaliana columbia
  unsure (1)..(638): unsure at all n locations
ctgatccacataaaacacacaataattaacatttaagtttagctatatccaattattcatatatataagtctataattatgtataagagaaactgagggattgattacatacgtagagacatctactttgtagggaggtccaccaacgtggtcggtaatctaattaatataaaggcaaaagtattaatccacttagtctttgattatatatagctaaattatggaatatttacccaaaaattaaaattattaccggatacatgagagttatgagttcgccgtcaggttttaagagttcatacatagatttagcccatgcaggtctcatctccggttcaatggcacagaagaacctgttaataattactagttaattgaattttcgttacctttttaataaataaaacaccttagcctggtccttcacattaatgtttctaaccaaattttttgtttagttacgtaatgcaaaccttaattatgtnttcaattataagttaataaactcacacataatcgaagatgaggtcgaataattcagtaggacgccacgtgaaaacatcttccttcacgaacgaaaagtactctgcatttggtgaggagctgtaagtctatatgtagtcacataaaatattatt

SEQ ID NO: 23354 - DNA, 1311 bp, Arabidopsis thaliana
caaccaatattttttgattttaaccctaagacatagacgaaataagaaagaatcctacaaaacgattttaaatttaaagagaataagtcgaccgggtctacgaatctattctaactctcaacgaattccacgaattttaggcggaataggaattgtaatcctttcgacttctcaaggtataatgacagaccgagaagctcgactaaaaagaatcggcggagaaattttgtgttatatatggtaatccttctaatataaaaattagatatctgtaacttacaatttgtgaaaaaagggggttgtgtaataccacccctgttcaaaaaagtttcggatgttttacttcgaatgaaattaaagaaaaaatgaattaataaaagttttctttcttaatcacttccgaacggcatggttcgattttgtttagatactaaagattttttttcgttcatgcttctgaaaggattcgacatatttttgtataggtatacctataggataaaaaggtaaaattttgagtaagtactaaagtatcaggcaatgatttcggattgtcacaaaactcattttatttaaaagccggatgaatttaatgggcctaatataaaagcgcccaataagccactggttagagtatatgtggactggtttcaccaccgccgcaaaaagggagactgagataaattcgtacagcaatcggagttactatgtggacagtgaaactggcggcgatgccggttcaatttctcatggagcaatctccgttggctatttacagccaccaccaccgcataaagtaatgatcaagaattcttctgaaattttctgagctcaatttcttattctgtgaattgatttgtggcaagagcgactccatgggaattgccgaattggagccatctcgtctctgctgcttatgcaacaggtaacttttcaattgctagtttgtcgtttgtgtttttaatttcggttcggtttacatggttttgaaaaattcaattgatttcggttgggtttgaattggaattaaaggagaaaaacactgaaatcacacactcgaggctttttttgaaagaggcgagtgtgtttcaaaacaagccatttggtgggttagaacccacagaaaacgtatacacgcgctcaacacgcgtttggtgagagtggttgtgaaatcgcccgagaggtgagagtggggtatgacatggaatgctctgattagcttataaaataaaaatagtagagatgtagctccttccttcctatgttaatatttatttacttctcttttccaaagtatcatttcatttcatg

SEQ ID NO: 23355 - DNA, 810 bp, Arabidopsis thaliana
cgccagtgctggacagaaaagcaacaaagaacggatcagaactctgaccgcacctgcattgtaaattctctcactgtcaggattgaactggcccgatggggttgttacaacaaaagttgtgttttcattttctggtatagtagcaagggccgttgactctgatgttaaaaacgggggaaccaccacttcaagtgcaagttctaacaacagctgtataacctgcctttccaactcaacacacagcaatccagactccgccaaaagctcaaaaaatgtctgagacgttataacagcgtggagtttcatcctattaacagcattctcacagactgcagctgtcataaggcgaaacagatatttaaacaatttgatgtaaaccgtcaagtcagactcatccatgtgctctcttttcccttgaaaagtatgaagggtcgtcaataaaagagagaaaccagtggcttcgccaaagactctttggcagagccattaacaccaacaatacgccatagagcacccattgtatcacatttcgcatcatcatgaagcttgtattgatggccagaaataccagtgaccattccactctttaacaaatcgacaacagctcctaattcgtcatgatggacctagttggacagtaattgaaagaaaaagtaaattagggatgtttgccaattatgaaaaataaatacctatgatggcatcaatgtaatcgaacacatcaaatttgcaataaaattgacagtggcgtagttgatccaagaaaaagaagctacctgtttagtgtcttctgtgattagacatgataag

SEQ ID NO: 23356 - DNA, 548 bp, Arabidopsis thaliana
atgagttgcggccctttggttgaaaatgtccaagataagggcggtgcggtcacaaactcgaacatccccaccaaaggccttttccaggttacgcaattgcctgaaatataacatataaataagaaaatgtaacacatactcaattcacaagtcgacaaactagttttgaaacaaacaagagtaatgaaactccaacagactccaacaatccgatggctactttagtagatattattcagctgaatgaccgagacaagctacactatatagaaagaagaaacatagatggaaaattttaaacttataactttgggtgttaggaaacttcaagagcatatgtttccactaaaaacaaaagttacacagaaacattaccctggtgaaagttcatcgtcaaatatcgcagtctcaacgtccaaagcattaattgcactttttatctctgcgacctttcctgatccaatgtatgttctaggatttggggaagctagcctgtagtatccatcaaacaatcatcgacttaagcatctgccggtaactaacatggc

SEQ ID NO: 23357 - DNA, 3681 bp, Arabidopsis thaliana
taaggtttgctctataattgtagtctcttgtattaggttaaagatgatccttgtgtgggagtttgaccccccccccctatttatacaatgggtcgaacataccaaaatatgataaacttctaattatcttagatctaaatctccattacttccattcttcatgagattcccctctttaaaatagaagtttttccttcacacgaccttagaaaccgcctacgggagtctcaattgtcgatctaaatttcgggcgagctcatgactcaggcccattaacaggctaaccgggatttcccggttcaatcgaattctcgattttattcatgttatttcttggtttaaatcggtattgtcggaggtgctaattcctgcaccaacaattagtccccccccagttcggcgaatccgagttgcttaattcgaaatttccgaacttagaaattgaatattcgatttaaatcttggaaagcgtgaattgatcattagatttccgaatcgattcgtatttcgaacgtatctgacacgtgtcaaatcgccgcgtctgtacgcgcgcgtgaagctcaggaaccgaagcgtctcgtaggtttaatgatgacctcgtaggtttgccgcccattcgcctctatttatattagattaaaccctcgggaaatcattttccgccgcttgcaagaagaatctaaggtagctctcgctctctcctctgcgaattattttgtactctcgattctttatcgatttttccggcaatgggtaaggttgttcttgtctctccgtcctcttcttcctccgagagcgaagtgtcgttagttcgccgaaactctcggttaaccgggaatccaagtaacgaagctcagtctagtcgatctaaccggatcgagattccgacgttgcttgatgatccagatcgggaaggttccggtggacatctcgcagctcctgaagatccggtggatttcttagctcagttcgacccactcatcgacctggaggatgcttataacacgcagccgcagtatacagaggctgaagttaatgcgcgattacttcatgaggatcatgttgaatttgacctcgacccagtggttagctggaacaccgagatcaccgcgaaaaagaccctttcaacaactgagtcagtcgcggaagtatttgccttgtgtggctccggagatcgcccgctcacttacatgattcccggagaaaataagcgtccatggaatccccctcgagggtacgtctgtatgtatgaagcctacttcagacaatgtcacctctggtttccaattccgtctctgatcatctcctttctgaatcgccgtcatatggcgttctcccagcttactccggcggcgatctgcaattttgttgccgctctgaccttcggcgctgaagaaggttacctggtaaacgttcgttgttttgaggaaatgacgacgttgaaagctatcaggtcgcccggctattgggtggtgaacaaccgcccaaagcataactttcttcccggtcccaaagtcagtaacttcaagaactgggaagaatattacttctacatcagggtcgacctcgagtcgtatgagcgtccgttctcgtggaggaaaaggatgtggacggagtttcctggtagacttcttttaaatagatagggtaaagacatgtcgatcccgattagattctcatagccttttcttttgttgcagatcggtacaggcctagcccggagtttcccatggagttcgagggagttttagaggcaatcttccaagctcaacgtcgtgcgtggaaagacatcacgaggtcgcgcgtcaacaggataaaggggaaggtcaggaagccctttattagctttgctgccgggcttttgaatatgccgcctcctcagctcccatcgaagaggagactcatcctctagacggagaggcggctacgtcgaatcctcccgttagtgctggcccttccggtgttgatcaggtctcccatgagacggtcaatccagattctcaagataggacgcgtcttgaaggggccgacgtcgttccagctcaagagatcgccgagtgcgatcaaagtcaatccgttcaggtcgtcgagcctgaaattcaaaatgttaccagcgaccgctccatcgccgtttatgccgccgtgccagcaggcgaagaggtcaacacgggcctagttatcgttgatcaagacaaggatgaaaccgttgaggagctcgagacttccaggaggtcccgtgaagagaaagggaaaggagtggctaaccaatccaagaagaggtcggcctctgaagccggtttagatgaagttgctgctccgaagacgtttcgcctgtcgcgaggtgaaactcttaattctgaccagttttcgtttaagtattctggtgcgaaattccttgtgagagatcaggaggccgccagtcatctttggcgtaacttgatgctccctgggacgaaggatttccctaatcttgacgacctggttctgaaagagggatatcaaaagtttgccagatcatcacttgaggtacgtgctagttacatgtcttcctgtggcttaatatctttgtattttagctttaaccgtaactctttttccagaccgccgccctggccaatgatctgattgcgacatacgatcgcaagttgaagctgaagctcgccgacagagaggccttcgataacctgaagaaatgcgcagaccaggccaaagccatctacgccaaagacatgaaggaaatggctgcattgagggatgctgccgagattcataaggcggaaatgagctcgttgaacgacgaggtcaagaggctcaatggtcgagaagctgatcttcagaaagagatcagcgatcttcaggtcgcgttggttgctgtgaaagagcacggggagaaggaatgcaacaggctgcggaatgacctagttgctaaggtcgcccgtactacaaagaaagcccaagctcgtcttgataaagtgaaggcttatctcaaggagcaagaggaccttgtcgggccaaaggtggatgttgagaatcaagccaaagcgcctgaggagatagtgggcattctgaactcaacggccttaaggagttaaccaaaagggcgactgacgaagttaatgccttgaacgtcatcgagctcggggatgatgacctgaacatgtccccggatcagctcggttttttgaggcaagcctcccaaattgctcctgtggcggaccatcacagctcaaatgtcgacctcgttagcggaagcgatattcgacgtgtaagcgttgaagaaacgaaccagacgacctgaatcggtcgtccttgtaatttattttgatacattgatcgtggacccaactttcggggggatctcaaaactcatgtttaaccgtggacccactttcggggcggattttaattttaaactctattttcgatgattttccatttttcctgtttccgaggcaaaatagtattttctctatgttttccatttatgagctttggcatttttggaaaaggaaattaggggaagtcaacctgttaatcaagtaaatttccattttcccagttttggagaaaatgcaaatattagtctttcttgggaaaggaaaacgagaatttccagaccgcatttaagcaaattcccaattcgatttctgtatttgccccctataaatacttctctgttga

SEQ ID NO: 23358 - DNA, 584 bp, Arabidopsis thaliana columbia
gactcatcccttctctataagacgtcgctgcataaagaaaacaacagtcatgattaccaaagacaatgttccttaaaaatctcctctcgaatttgattagatcattgaaaaaacctttaattccaagtgatgtttggcctgatccaacagctgttagggcatgttctatctgaaccagcttccctgatgggctgtttcataaaccacaacatgaatcaaaccccgaagaaaccgttccaaatgctcagaaagagataacattgatatgataaacaaagttaatacctgaaggtggtgagagaaaacgagtactgactgtcccccattgaaaaccaactaaatcaagctgcaaaaaatgcgaaatagtgtcatctctggaaatttagaaacagtggaagctaaatctgttcttcatcaacaatgttcaaacttaaatgaaaagaaaccatgtctgagcaagtacgtagactgaagcgttcaaatctgacaaagcttaaaaacccggaagagtctcatcgccatgggcgctgtgtaaggaaacgatgaaaagacaagatataccaccctaattaagaattgtgagt

SEQ ID NO: 23359 - DNA, 581 bp, Arabidopsis thaliana columbia
cattaaggacttataatggcccaatcgtattgctatatttatgattttgcagttgggaaattaaaagaagtagaaaagcgggaaacagagaattagttacgtcttcttctccgacgagacgactgcgattgagtttttttgaagatctcaaattcaaaggtatatagatttaatatttatcttcttccatggaaaccgaatgacatttacgcgaatgatcaaaatctttatttcttcttttgttttttcagagacgagccttcttaagtggccaaggattctgaagatagttcatcagctgcgaacgattcctctgggttcgtgaaatcttgggttctttaatctcaaatccaaaatggcataatttctgattaaaatcgacgccaagttttgggaaatcaaagagctcgatcacaacgatatgcgatcaatttcttgatcttttaacccctaatttgccactttctttctattttgcagcgaagagccttcttcttcagcggccatggattctgcagatgcgaacgttacgtttgagtatgtgacctttttgggatcttgaacagaaaatgtttgaaatt

SEQ ID NO: 23360 - DNA, 3911 bp, Arabidopsis thaliana
gctttggacgattagtgatttccctgcttacgggaatctagctggctgcaaagtaaagaaaaaaatgggatgtcctctatgtgggaaaaatacagatatcatgtggttgaagttcagcagaaaacatgtttacatgtgccacagaaagggtctgcaaccaacacatcatttcagaatgaagaagtcttggtttgatgggaaagctgaaaatggcaggaagaggagaatattgagtggtcaggaaatttaccaaaaccttaaaaattttaagaataactttgggactttgaaacaatctgcaagtaaaaagaaaaggacgatgaatattgaaacagactctgatagtgatgatcaatctagtgaatcagaggaggatgaagaggaccaagtagatgaggaggaattatctagatggaagaaaaagtcaatttttttcaagttaccttattggcaggtgtgttaaacattcctgttatttaaatttcagatttcatcactaatcgttgattaaaagttctttactattatctcagatttcatcactaatcattggttaaatttttttgttttctttcgtgtgttgtataggaacttcttgtgagacacaacttggatgtcatgcatgtggagaggaatgtggctgcaagtattatatcgacattgttgcattgttggaaatccaaggatggactaaatgctagaaaagatttggaggtgcttgggattagaaaggatttgcatcctaaaaccaaaggcaaaagaacatatcttcctgcagcactttggtctctatcaaaggagatcgagtgtacagcccgttggagtacaaaattttgaaaatcttctgttgcacctagagaccttgcactcgagtaccttggtcgggtatgtgtgatgtttaaaacccaaacacttttaaatcatcatttactcgaccaacagaagcgacagagacttgcagaaatttcctgcagcttacagtaggttttctgcaaattttctcagtcaacagagtgtgggccacgcgctgaggataagctggagagagaatctaaaactcaacctacaccactcattttgaaaaatcactcgacctcacaaaatccactcgacctatctcttttcatttcaccaccaacactctaatctctctacaccacgaatcgccgtccaaagagctactcgatcctgacaatttcactcgacctccgagaaccactcgacctccgcgccgccgtcaccagttcattccctccgtcacccgaccagaccacttcactcgattcctttgatatactcgaccaattcatccacatcaaccgccgtctctttcaaaagaaactactcgacctcgtttcccagtctcgtagccgcactcgaccgacgccgccttagccgatttcaacagttcactcgaccaccacaaagcactcgacccctgcaaaagctactcggcttcttgttcttgaattcaacagagccttccaacttcagagaagttactcgacctctaggcttcacgactcactctacctccacgattcactcgacctactgtagcattccgactcgacctctgagaagatactcgatccaattcgtctaaggggagctcaagaacagctcaggttactcgagtacagaattgtactcgatcaattcaatctatttcattgcctattgacaataattttggtttcattgctatctttgagactaacctattgacatttgagctttgagttctaaatctctacaggagaatcatgagcaattacagtggcagttcttctgttgatcctgactacaacatggatgagacagagtcgtcatcttcaaggccagagagagaacagagagaatatgaaagctttagaaggaaagctaagatagcccgagggaagagagcgatgacagagaggtatgagcttatagacgaagatctagaagacgagtacatgcctgaacagactcgcagagctaccaaacttctgcacaagcccgacgtattacctgctgaggaatatgttaggcttttcaagctgaatgagttctgtagcacgaggtatccttgctcgacctcacttgcacaactcggattgttggaagatgttcagcacctgtatcagagttatcatctggacactctgatggcttatccgtatgtagcgtatgaagatgagacaatacaattcctctccatgctgcaagtagagctctaccaaggtatgacctctgatgagttggattgtgaaggattgagattcttgcgattttctgtgtatggtcatgagtataggttatcaatcaagcgcttggaaggattgtttggcttcaccagtggaacgggatctaagcccaagtatgacagagaagagttgaaagacttgtggatcaccattggcagctctgtaccgttgaatgcttccaggtcaaagagcaatcagatacgcagccctgtcatcaggtacttccagcgttctacagccaatgtactctactcccgagagatcacagggaccgttactaactctgatatggagatgatcgcaatggccctcaagggaactctttgccaaactaagaatggtatacccctccagggtgaaatcaatgacacacctctatctgtacttcttctgatccatttgtgtggatacaagagctgggctgtcagcaataaccgcaagagagcacgaggcgttttgtgcataggtggcgttgtgacaccgattctgatagcttgtggagtcccaatcatttctgctggactcgagccgcaagcaatggatatcgagcacctatgtcacttcgaattcctggagtttgcaatggttgacgatttccacaggttcaggtttgagcactctacagacaggagagctaacatccttctccctagccctgaggttacacggataatagagggagataacattgattttaggcctgaggttggatgcctctactatgagaacgctccgccattggatgaggatgatcttcttgaagaagctgcttcggatgggatggatgaagatagggcagtggagttcgacactagcatgtatcaatttggtgagcatgtacctccagcgaggcagagcaagagcttgactgaagctcataagaataacagtaaattgcagaaatggtgcaagaagcaggacaagctgatcgccaagtgtttcaagcttctgacagataagctgagttgctcttcctccaccactgctattccacaggtacagcctcctctggagatgccatcgaggagatttaatgcacctgcgcacaggcctgagcttagcgagcagaaagtcccacatgtccaggctaggcattcgtcattcgaatcccgggaacacaagagaagaaggaaggctacactcactcgatctagcagcagatcacgcctcattcactcgaggagatcactcgaccgcggtctggccgcagcagaaggagagaggtcgagtttcctcagagcggtgctggccgccacagagctgatgaggtcgagtacccatctgctggagctgatacagaacaaggaggttcgtctatggcctgggagcaatcgcaggcagccattgacgagcaactacgttcattcttcgactgaggtaagcgcctcacttcaccattgtattataccgtctgttgtgatttgtttcttccttttttgtttctgtgattggatttgtcctgagtactctcttccaagtttattcacacagtggactgtgtgatctaagtttgggggagggctcaggaagtgtgtgctgcattgtgtataattttgagtctgcattcatctaaggcataaaaaaaaaaaaaaaaaaaaaaaaaaaaaaaaaaaccaaaaaatttgaaaaatttcagaaaatgatttcataaaaaaaaaaaaa

SEQ ID NO: 23361 - DNA, 1279 bp, Arabidopsis thaliana
ccaccacaactcccagaagaagtagtagaaaccatttcctgatgctgattcccatctcctcctccaaccgaaccatccggtaaaatagcaaaaccagacggcaacaacgccacgtaatcaggatctccaccgcttagaaccacattcatcgccactatatccactggcgcgtaaatcacatacgatcctgatgcatctgtacagctctcttgtagaatcaacatgttgctctggctcgagtttccactctgtttacaacaacaacaaagtttcctcaatctgaaaacgataaaacaaagagaaaatatcgatagttaataatgtcaagtcttacattgactcggagcaaggagacacagtttccaggttcatgaccattggctatatgagccatttcctgaaccatacctccatttgacagaatatcccactgcatcaaagttcaaaacctaaattaacaaacctaaatctacaaatcgtgactcgcaaggttctaaccctattttctttgtttattcaatttggtctgaagtaataattttaaacttttgcattacctcttttcttgaattttcgtcacggaggaaatcaaaaacacgtttgggagcaactgggatccagaatgaagtagctgcactaagaacaatacccggaggtcttcctggatcatccatactcttgcgggtcatgacccgaacatcatcggatcctgttgtcgacattgttgtccaagcgtgtgcagtcgacgcgccaacaccactgcagaaactcataaccattctctcagctagcttcaacatactcttccttccttcaggactcgttatcactacatatattaattaccataaattataaggaccaaattagtaaaaattaaaactaacgttttcatttaatttagccccaacatatttgaattgatcagaatagcccctaccggaaagatcaccaggaatgttgctggccatggagctagcaagccgctcgcattgtcgttcgagtgtagccacccaacgtttcgcaccgaaagctaaaccggactgaaccaacggtttatacatgttgtgaactgatctatcatctacctccatatgctctatccatgtaacctttgaacagagtaatcatcatcacacaatcagtttcataaaatttaaatttctaccataaactttataaatactcaatttaaaccctatataccttagaataaccattaggcaattcttgaatcagacaacgtgaaggccttcttctagttcttaagattggagta

SEQ ID NO: 23362 - DNA, 500 bp, Arabidopsis thaliana
cctctttgttcttctctagaaacacttgaaactcccttaaaatgttaatagccggttgctaccacattgcacacaaaaacaaaaaaaaatcttcaacatttttggcggtggaccgaccttaatatacctcatacttacaacaaacatatattgtatcaaaacttacaaaagcggtgaaattgaaacatgttccatcgaaagaatggcaaagcagatatcgttttggaagtcatacatgtcgagcataaaccctcttacaccattctgcaataatccaacaaaaacattcaaacttatgaaaaaaatgttaaaagggtttactaaaaatttgaaacatttgtttacattgagttggcttgtgattgaatcttgctggttagtaggagccaaaatagcagaaccggtccgtgatactcccccaaacgagcaaaagagttgtgtgtggttaacatgaatacttgtttaaaggcgaccctttggcttggtgatggggttgatgg

SEQ ID NO: 23363 - DNA, 4114 bp, Arabidopsis thaliana
tctacaagtaatttgagttagttacctcatactatggattgaactgatattagctgcttttggatatgcttttgattcagcaggggcagaactatcgattgccccccttcgagtaacatagaaagttgcaccatcctcctcattgacatgctttgtgactttgttgatcttactaccgtattcgctactagccgtggttttgaaggactgatcgagacatttagagagagagaggcggagcaaaggtagacgagactcgagcaaaggtttacagctccggaactgacttagaaacatggttttgacggagtaaaggaagacgagagagatgcggcgcaaatagggttttctttcgtacctacagaaaccctattattataccaacctccattgacgaagagaagcaccagtcctttaaactaataagcccatttgtaaatgggccttcttttagaccctataagagcaaactctctcttttcttggctaatactgtaattgtttttttgtaataacccaaaaccaaatttctcttagttttcaatattaattcaattgttcatatcgtcccaaactgctctccccatctcatagtttctcgccatgaagtatgacttcattatcatgttgaatgtgtgtatcgatggctcaatattgttctggatcagcttgttgtagatccttgtggcatgttccgaaattttctggttcgccatcagtttgatcagcgcattatacgttttgccatccggagatgtcccttttcttgcatctccttgagcagttcgtaaacagtaaccagcttcttctgagtcccaaaccccgtgatcagacacgtgtaaaccgcagcatcaggcaaatgaggaagcaatgaagccattgaaagctgtgagtaactctaatggagctccttctcaaagagcgatagagccatggagcagcagccatggaagctcgacggcggttagcaatggcgaagtcggtgaaaagccactgatttacggcggagagctcttcacgtatttgggcctttgtttgattagaagctttgagtgataataattttgacccattaaaggcccattgatctggttacatataaccattgggtccaccaggagcattaaagcgcaaacgcataatcatcaaaggtgtcaatttctttttttagttggaagttatctgtatgcatcttatcttcgttttagggtcgtgatattttctcaagttttttttaggggaccaatttattttcagatttatttgattctatcatacatttctcttagttcacgttatctttgtatacgtgtttatggatattacataactgaaaatcaagatgagtcaatcagtgtaacatcaatcatcaataactctgcgggatgtatataaaactaaagggattgttgattctgtaatcaaacaatgaatttgtactaagggatttagacaaattcactcctctctcagctaacaaataatcaaaggggaagaacagagttgcatgaatagaaagctagggtttgctctataattgtagtctttttgtattaggttaaagatggatccctggagagtttgaccctcccctatttatacaatgggtcgaacataccaaaatatgataaacttctaattatcttaagtctaaatctccattacttccattcttcatgagattaccctcttttaaatggaagttttcccttcacacgacctcagaagccgcttatggcgatctcgattgtcgacctaaatcttctggcgagctcatgacttaaggcccattcacaggctatgcgggattccccggttcaatcgaattctcgattttattcacgttattccttggtttaaattggtattgtcggaggtgctaattcctgcaccaacaattagtccccccagttcggagagtccgagttgcttaattcgaaatttccgaacttagaaattgaatattcgatttaaatcttggaaagcgtgaattaatcattagatttccgaatcgattcgtatttcgaacgtatctgacatgtgtccaatcgctgcgtcagtacgcgcgcgtgaagctcaggaaccgaagcgtctcgtaggtttaatgatgacctcgtaggtttgccgcccattcgcctctatttatattagattaaaccctcgggaaatcattttccgccgcttgcaagaagaatcaaaggtagctctcgctctctcctctgcgaattattttgtactctcgattctttatcgatttttccggcaatgggtaaggttgttcttgtctctccgtcctcttcttcctccgagagcgaagtatcataagttcgccgaaactctcggttaaccgggaatccaagtgacgaagctcagtctagtcgatctaaccggatcgagattccgacgttgcttgatgagccagatcgggagggttccggtggacatctcgctgctcctgaagatccggtggatttcttagctcagttcgacccactcatcgacctggaggatgcttataacacgcagccgcagtatacagaggctgaagttaatgcgagattacttcatgaggatcatgttgaatttgacctcgacccagtggttagctggaacaccgagatcaccgcgaaaaagaccctttcaacaactgagtcagtcgcggaagtatttgccttgtgtggctacggagatcgcccgctcacttattagctcagttcgacccactcatcgacctggaggatgcttataacaagcagccgcagtatacagaggctgaagttaatgcgcgattacttcatgaggatcatgttgaatttgacctcgacccagtggttagctggaacaccgagatcaccgcgaaaaagacactttcaacaactgagtcagtcgcggaagtatttgccttgtgtggctccggagatcgcccggagcacgtttggtgcaaggagggttgctcctgaagtgggtcgtgcggatgcttatgacaggttacctccggagcttatgacaggttactccggagcgattcctgtcatatctttcgtagaccaagcaaaagatgacgacctcgatttcaagaaggcgatcactcttcctttctctcctagttcgcttccgataccaaccgtccgagatggatccgactcgtcgatgttgacctggataatcttgcaacttggcgccttcattgactcgcgagctggtcgctccgacggtgcagctcgctcttcgtcctttaattgctataagatttccttctttcgctgcttcttctcgatcacgtaacatgtccgtgagaccttctggttgccgtatagtatgaagattcctgtgtttatcgggaacttcaagcaaaggtggtacgtcgaggggatcgccttcatcgaatagatccaaggactccccagaatggcattgtagattggttccgagtcgatgacgacgaacttggtcttttgtgtgatgccgcccacttggacctggagtttgatctctcctattgacatttttgcctcgccgtcgtatcccgtcatagggcggatcttaggcattattttgctttcagagattcccattttaaaaagggtcttcaggaacatcagattgaccgagctgccggtatcgattaggattcgttctacgtcgaagtcctccattaccagtttgatgaccaatgcatcgttatgaggatgctgaatcccgctcgcatcctccgaagtaaagatgatgggttcctggcttaatggctcggcttctggggcaaccctaacgctgcatacttgtcgagctcgcttctttaaagccgagactgaatcctcatcgtcagatagtccggccataatcatggagatccttccgcggggatggtctggagctcgctgcggttgctgtcctctccatctcttcgggggaccggggagttcgttctccgggaccctcgcctcctccacacgatcgtcctcgaggagcagtcggtgatccacgtgttgtgcttcatgcgttggtccgcctgggactgtttggagccgctcttgcgtttattttcccattcttgggatggtagaccgctctacttcgccggatttatattttccgaggatattcagaagatgtt

SEQ ID NO: 23364 - DNA, 4067 bp, Arabidopsis thaliana
ctcgattacgacgacttcaaaaaatggggcacgtcgattacgagttgcaaggcagaaaaacgccacttaccgggttcgctggagatacgacattttccctaggaaccatccagctccaaaccgtcgcacggggagtgagacaactcacgaacttcctcgtggtcgataagaaagcttcttttcaacgtaatactgggaagaccatgaaacacgccatgaaagccgtcctatcgacctaccaccaatgcattaaattcccctccgacaaggggatagcagtcgtatacgacagccaacgcagcttccaaaaatgctacatgggtggctacgagcatatcaaaaaagccgaccctgtggtactaatgatagaggacaaactcgcaaaaatgaaaacagtcagatcctcagacccatctcaacgtggacctcgaaaatcgctgataacgcaggactacatagacgaatcagatcctaaacgatgcgttggggtaggtcacgacctcgacccagcaatacgagaggttctcgtaatctttctcaaggaaaacaaagacacgttcgcctggtcaagcgcaaaccttcgaggaataagcctcgaggtaacctcacacaaactcaacgtcgatccgacctaccgatctataaagcagaaacgtggcaagctaggtcttgaaagggctaaagttgtgaacgatgaggtcgaccggttactcaaaatctgatggataagggaaagtaaaataccttgactggctcgccaaccaaatcgtcgttaaaaagaaaaatgggaagtggaaagtatgcattgactttacggacctaaataaagcatgtcctaaagacagttttccactcctgcatatcgaccgactcgtcgaagccaccgcaggacatgaactattgtccttcatggacgcattctccgggtacaaccaaatacttacgcgcctagacaccaagaaaaaacagctttcattaccgactgaggcacctactgttataaagtaatgccctttggtttgaaaaatgcgggactacctaccaacgattggtgaacagaatgttcgctgaccagctaggtaaaacgatggaggtctacattgacgacatgctggtcaaatcagctcacgaaaaggaccacgtcccacaattaaaagaatgcttcaaaatcctaaacaaattcgaaatgaagctaaatcccgagaaatgctgtttcggagttccatcaggagaattcctcggatacctagtaaccgaaagaggcatcgaggccaatcctaagtagattgcagccttcatcgaaatgccatcaccaaaaacgacacgggaggtccaacggctaaccggccgtatcgccgccctcaacaggttcatatccaggtccaccgacaagtgcgtccctttctctcagctcctccgaaaggagaaaaagtttgattggaatgaggactgcgaacaagccttcaaacaattgaaagcatacctgaccgaaccacccatactcgcaaaaccggaagaaggagaaccgttgtacctgtacacgacagtctcccgaacctcgataagcagtgtcctggtgagagaaaatcacgaaggacaaaaaccgatctattacgtgagtaaaacgttgatagacgctgaaacccattatccagcaatggaaaaactggcactggccgtagtcatgtcatctcgaaaactgagaccatatttccaatcacaccccatagtgtaatgacgtaccaaccaatctgaaccattctgcatagtccggcccaatcaggatgacttgcgaaatgggccatagagttaagcgagtacgatatagaatatcgcaccaaaaccagctagaaagcacaggtcctagccaactttgtaattgagctccagttagcgaaactggatggaaccaactataataagaaatggctcctccatgtcgacggctcctccattcgacaaggatccagagtcggaatacaactcacctcccccaccggggaagtcatggaacaatcgttccgacttggatcaacgcaccaaataacgagtttgagtacgaagccctcattgttggcattaagctagctcaatcaatggggatccgcgaaataaacgcctactgcgactcccaactcgtcacctgcaagttcccctggaatacgaagctaaagacgagcgcatggaaacgtacctcgaactggtcaaaaccttagcccagtagttcgaatagtttgaactgaccaggatccctagaggagaaaacacctcggcagctctcgcttctacgtcagatcctttcgtcaaaaggattatcccggtcgaaagaatagaacacccgagcatcgacctaacagtcaaaaatgctaggatggaaacctcggcaacttgcaacttcacacgagtaacccgaagcaccaccgccgcaaccatagctctcgtaacagctgtggaggcaagtgcaacggaagaggagccagagcccgaaacccccgaacaacctgccccgtacgaacttgaaccgtacaacgactggagaatcccaatcatcgattacatcgaacgagggatcacacctcccgataagtgggaggccagaaacacagcgtcgcaggtccatacatggtgtgtacctacgggcaacaaacaaaagacctcatgaaaagcatgcacgagggacaatgtggtagccactacagtggacgtacccccgccctcagaattaagaagcaaggctacttctggccaacaatgctacccgattgcatagctcactcactcaggtgcgataagtgccaacgacacgcacgtactctacatcaaccacccgaggaaatgtcgtcgatctcatctccttacccgttcatgaagtggtccatggacgtcgtagggcccatggaagcctccagtgggaagaagagactagaaaacctgctggtccccaccgactactctaccaaatggattgaggctaaagtcttccaacaggtaaacgagaaacaagtcgaagatttcctgtgaaaaaatatcgtatgccgacatatgagattgcaccgacaacgggactaacctgacctcgggaaaaatcaaagcattctgcgataagtggaagatccgtcttaccacatctaccccctgttatccacaagggaacgaacaagcagaagccgccaacaaagctatacttagcaacatcaagaaaagacttgattccaaaaaatcaatgtggtctgacgtactccacggagttctttgggcctaccgaactacacctcgaaaataaacgcaagaaaccccgttctctctcgcctatggtctagaagcagtgatccctgttgaaaccatagtaccaagcgtgagaaggaccgccagtcctcctaactcggacctgaacacgcaaatgttgcaggacaacatgtacttcatcgatgaacgcagagatcaggcaatgatccgagttcagactatcaacaagccgccgctcgctactataactccaatatcaaaattcaaagattcgacatgggagagctcgttctatgaaaagtgttcagccacacgagagagctaaacgccggaaagctaggaaccaactgggaaggtccctttcgaatcaccgaggtggtaagtgacgacatctataagctcgaaaaacttatcaatggagtacctgagatacgaccttggaatgccatgcatctaaagaaataccacgaataggtactcaaaaacaatcaaactacgataaggcttgatcccttggtagggtacgtaggcaacaccccccaagagcgcaaactacgataaggcttgatctcgtaaccgggtacgtaggcagtttcccccgcgaacgcaaccaccatctaaactcgtccgcttgaagcatatttcttcgacaaggaaagcagacatcacatcctccgtcaaagaaggctagttggctaatctaatagctcaaacccctctacaccaagcaggtcccttcttggcgaccagacgctaggacgtgtttgctttacttcatttgtacttaactatttcaagataggaataaaagaaaaatttga

SEQ ID NO: 23365 - DNA, 516 bp, Arabidopsis thaliana columbia
cacactaggaacttgattcatgtaatatttcaaacaatcaaaacattcactaaaacctctaaaattcaaatctatgactcgaaaataaccaaaacttggtcagagacaaacctcgtcaagctcagaagatgattgtttaagagcggttctctttttccatctccctgatagctgagcaatcgtgtcaccggtgaaagtgagtgctccggccgtcacagcttgcttcaaaggaaaccgataaccgccggcgtctctgctcacatcgacggaatccgacgatccagaattacgtttcttacctctatcaccggaagacttcttctttctccgttgatcgaagccattccatccccagaaaccaccagcgccgccgcaaccacccaatgcgtccattaaaaatgcttccttttgcgtcgaaacagagaagagttttgcctaaatcttaaaaatcgcaaatgagtcctgtccatttgttttttccggtttggttcgattccaatttattggatcttgggt

SEQ ID NO: 23366 - DNA, 4849 bp, Arabidopsis thaliana
tttttcgtcaagacttagagaaacttatctacagtgaaatattagtaatcatgactaaagaaatgcgaaaaatgtcctgtaatacatgaactgtcaaaaatgtcattgtaatacgtgaactttgtatgtgccattgtaatacatttgaaaaccgttgactggccagtttatacggagttaatcgttgactaggccaaaatccacacgacgttatctggcgttagcagacacgataacggctgctaactagtctccgttagttcttaatacaacgtcattttaccatatcgaaacatggaaatatcatgtaatactccaactttcaaattgaggttgtgttatacatcaacttcacatgtgaccgtgttatacatgaactaaacgctgatcaggagtttggaaaatgagaatgcattgaccaagctaacaagacatacctccatctaggcctagacatatggattttggtttagatatttttcgaatttattcggattcagataatttgagtaggagagtttattagattttcttcgaatttattcggattcaaataattttgatgaatacgtgtaaatattttcagtatttacagtattttattatatggtttattttgatgaatacgtctaaggaaacctacttacaatatttttgttatatgatttattttttctagatgtgatgttttgggactcttctttgcacaattattaggtatctcggttagaaggagcattggtttcttcatataatctaaagaatttggtccatttgtggatcccttgagttgtgaaataatttgtatcggtggtcgcaggattgtactggctttagtttaattgggccggtatgaaagatctgtgattgattcaagggtaaattgcaggccacacccgttgaccatgttttatttccatggattgtcaaagtcaaatgtggttttcaccatttgccttttcgcctgcaaaatgacgcttctgcccttgcgcttctctcttagtaactgttgaaatgtacggtttagtttagcaggtttagttacgtacactgttccggttcagttgaagattttttgtttcacgttgacgcgatcggttccgttacaagtgagattattccgaagtgacatcaacatttaatgcccccaaaaagtttagatgtgactattgtcacaattaatgcaaaatcatcattacatcaaataatattaaaaaaattattaataataattaaaaaaaatttgttgagataaagaagatgaacccaggaacaaagaattattgcgaacgtacattgctgctgaagaagtgttgatcttgtttttgtaccaagtttggagcattgctcgtgtaagtaatgaagttcttttaagaagttttttttatgtcatattaggatcttgattgtgttcgaactccatttttttatcagaatatttgcaaaatctatatctgtttgtttaaaatagtcaaatgataattggtatttaggtttataaatgtgtagtatcgacattccatttgttttttatatgtatagtatttttcagttgcatttaatgtgtgtctcctgaatttatgatgcaggtgggttatggatattcccgtatttaccatggtcggtgagtggaaatgcaaagaaggagaattgaaatttgaacctgaggaaggcatctttggtcgttgtgtacgcgttcaggaaaccatgacgtacacggactttgtccgtacactccgagaggctttcagtttgaagtccaccgagatcaatcccataattagctactggatgccgggagaaatgtcagtgctgatatatactaaacgccctcctgtatacattgacagtcagatgggtctcgaaacgttttttttggttcgtggtgggtatctttctctcaacttgttcgtctctttcaataatacagtgaaggcgttcgggaatactgtctctaggtctcatggtgaagtttctgaaagtgaccgtgtgtttgatagtgctacaaatgttgatgaaaataatgaggatgcagaggagcaagccgatgttgaagacgatacaacagaagaggatgaagtggaggagggcaacgaagatgatgatcggtgtgatgattatcttggtgtggatggatctattgggggaagtaccctgtatcctaccacagacggtagtgaaggtattggcgaagaatacgattacaacaagtggaacgatgtaatagtagaagaatatgtacaagaaaatcttgaggaagacgtcagtctcactcaacagactgctcaacatccaggggaattcagtcgtttattggaaacgtgtacgtacacgggtgttagtgtacctggcggagatacaggggaattcagtcgtctcttggaaacgtgtacgtacactggtcttagtgtacctggcgaagaaacaatttctccattgggttacggtacacgctgcgaagggcaaagggattccaatcttatttgtatagacgaagtcaccggggatgaagtgatcgacggtattggagcttcctcaactgggacacagaatgataatggggtagttaccgcagctgaggcttaccaagtgtataatgaatttcctaagttacatggtggcgagttggcgaatctcggtaacgatgctgctcctgtgttcgatgacttactcaattttcgagctgatgagacacaggttgaaatcagcaccacaggcgaaactttgtttgttggatgtgtttttaagaatagaaaagtcctgcaacaaacaatgtctcttcaagcgataaagcaatgcttttgcttcaagcaacctaagtcatgtcctaaaacattgaagatggtgtgcgttgatgagacttgtccatggcaattgactactcgcgtcgtgaaggattcagaaagtttcaaaatcacttcgtatgctacgacacatacgtgtaacatcgactcttggaagaactacaataaacatgctaattataagctcctcggggaagttgtgaggagcagatacagttctacgcagggtgggccgcgagctgtcgatttaccacagctactcctaaatgatctgaatgtgcggatttcatattctaccgcttggagagcaaaagaggttgtagtggaaaatgtaaggggggatgagatagcaaattacaggtttttgccgacctatctgtatcttctccaattagctaatccgggtacaataacacacctacactatacaccagaagatgatggtaagcagcgcttcaagtatgtctttgtctctcttggcgcttctatcaaaggtctgatatatatgaggaaggtagttgtggtagatggaacgcagctagtcggaccttacaaaggatgtctccttattgcatgtgcccaagatgggaacttccaaatattcccaatagcttttggtgttgttgatggtgagaccgatgcttcttgggcatggttttttgaaaagttagctgagattgttccagacagtgacgatttaatgattgtctcggacagacattcatctatatacaaaggcctaagtgttgtttacccgagagcgcatcatggagcatgtgctgttcaccttgagcctaagtttctgagccggccaatatagtgtacgcttctgtgttttctcggtgtacgtaagtttatatataatccacctgtaactatgtacgttgtgtacatatgtttaaactctacgttcgtataactatgtacgtttttgtctgtgtacgtgttaaagttcatgtaataagggaacatagaggtggttgctcaatattttgagtaatttgaaataagttttttgaaaatctaacttattccccctcttaaatgaacggagttggagacatagttgggtatattgtggttgtgttggtatttaatggaaaggacgtaactgttgctgtttattgtcaaatcaacgttataattaccttatatgacggttaccaggctattaccaaaaatttgaatcaagtgtagttggaaccgcattaataactgtagccgttccagatttcctctatttaagtctcctcctttccttaattttatccacaatcctcattctaaacccatttcttgtgccggcagttatatcattcactaaaaaaaatttagtctttcgattcgcttgttcttgctatccgtgagatggaggggtttcatatggtctcagaattgtgttctctgatcactgggtggcgaatatatgtctttgtcgtgagagtcttcaagaaggttatatcgcccaacgtcttcgaactcggccttatcctggcagattacgcggtaatttccgtcaaatcattatgtgtttttctcgttcattcgcttaacttgtatattaaactgtctactatcatgttctgtatgtaaagaataaccgtattgaggccaccgttgatcgtcgccttgctccgttttacgaagaccgattcgttgaaaatgagtggaagacgatcacctctttcttggtccgtaagtcaactgactcagtcagagcaacaaagcatgaatacggcatactatttatgtatcggaccgtcgtcgttcaggccccaccgagatcaccaccagttccagatttcgatttcgatcccttcgactacattttggagaaatctgcttacaagaacgttttagtcggtgaggaggaataactccgatgcttcatttattacatttttgaaattttttgtttattatctttgtttctccatcatctagatgtcgttggagcgttagttgatgttggcgcattgactacagactattacggtctcaaactgagtttcgagataaaagatagatagtaagtgttcttttca

SEQ ID NO: 23367 - DNA, 4847 bp, Arabidopsis thaliana
tactcattttaggtgtatatttatcatcatttagctttgcattcgctcattctatcatatcattttgcaccattttagcttattttgcatacttaggcatttaggatcatcttgcatacacattgcattttttggtgtgttttcaggtgcagaaggagctcaaaaggattcaactcgtccctctactctatccaaccaggagggaagcagcagagcattgtactcgacccactcactcgatccaggcagccacatcggaggcagcaattcactcgaccctcttactcgatccttgcagcctcataagaagcagtagatcgatctactcgacccttctactcgttcctatcctcgatccatttactcgaccaagggtgaccatctctacaagacttgttgagctatcaaagcgtcttcgcatcctcctcattccccacttaaccagacatctgagcatacagataggagaggatgaagcatctactcgaccaattgatcactcggagcatagaaacaaaggcgcagactttgcagcaccctctttactcgatccccaagatcgagtattcgtccaaaccgcctcaagtctcttgtcttctagtgaatctagggtttccaacattttagtataaatagatcactttgggatttgtccaaaggatctatgctttatctttcagtttttctttgtgtttatgaatcttaaaaccttaattactcttaatctatttcgtgtttgcatttgattgtttaagtaaagttgtttagcttgtttagatctacattttggtatgatttttgtaatttctgggtttgtgttcttgataatgttgcttgagtggtgattagggttcttgagtatggattagattagggtaatctctaggttagttaggtggttagtctttaggtttatacccttctggattcgcttggcccctatgcggtttttgctgactaatgtggagattcgatcatagacgtccaacgtccaaaagacgttcaaatggatgtctgacctacgaattccagagatttgtagactcgaccaagggattggcttgtctgcctattggctttggtagattgtttcttaaacccttctctgctatgtttcatcaacgagagctgagattaggaagtggtagagttatgggggtctctgtcacggcagtggacttgacccagtttttgaatctatcgtcatgggtatctatctttcgcctattagccatttgataaaccctagagttgcccttatcaatggatccatccttagaaattctattagatttatttatatcccctgttgattacacttttatttacctgttatttgtatcccctatttgtatcccctgttgattgcatttaggtttcttaattttgtcacctgttggttctactcgatccagtgatcgagtagggctctaaagttctcatttttacttgtttgaatcctgacctaggattattagtagaaacccatcatcattataatctggcttgacttagttgtttctgtacacatcttgattgctagcaatacagtggactggattgacaccttctataactgcatcgacatgtttgtgttttaggggaattgaactgaaatcacactcttcagcacataagtagacctgaaaaaccagcttatcaatttggcgtcgttgtcaattcattgttgcattgttacattcaagatatcataaacttttaagatcaagttcttttacatttatcaagttactaactcatattttcgtctgctcgtttttgtggtacaggtactaatctttgtgcatgcaaactcgatccaaaggttctgtgcacctattaccattcagagatagaattgacaaaatagctcgtgagttacaagaaaccaaagcaaaagcagcctgtgatcagaacagacaagctgctatgaatcaacagaacataccagttgatgttcaagacccacctaattttgatcaaccaagaaacattggtgctggtgatgctccaaggaatcatcaccaaagacaagggatagtgccaccaccagttcagaacaacaactttgagatcaagagtggtctcatctcaatgatccaaggaaacaagtttcatggcttacctatggaagaccccctggaccatcttgacagctttgataggctctgtggccttaccaaaatcaatggtgtcactgaagatatgtttaagctctggctatttcccttctctttgggagacaaggcacaccactaggagaagactctacccccagactccatcacctcatgggacgattgtaagaaagcttttcttgccaagttcttctctaacgcttgcacagcaagattgagtgaacgagatctccggtttcaactaggtacacgatgcaactttttgtgaagcgtgggagaggtttaaaagctacaccactcagtgcccgcatcacggtttcagaaaggcttcattactgagcacactctacagaggagctttaccaaagatcagaatgctgcttgataccgcctccaatagaaacttcttgaacaaagatgtagctgaatgcatgggagttggtcaaaaatctagcacaatctgatgggtgctacaatgaagactatgatcgctcagtgagaggaactggaggcaatgaggataaacagagcaaggatatcaaggctctgaatgaaaagataggcaagctgttgctggctcagcagaagcagatacactacatcactgatgaagagcacttccaaatgcaagaaggggggaatgataaaactaaagagctgtgctacattcagagggttgaacaaggggtacaataactacaagcccaacccaaacctctcttatagaagcactaatttagctaacccccaagatcaagtgtatccaccacaacagaatcagtacaagccttttgttcaatacaaccaaggttatgtccctaaacaacagtttaatggaggctaccaacagccgaatccaccaccagggttcactcaacaaccacaacaagccccaacagctcaagatcctgaaattaagcaactcattcaacagatcatccaaggacaagctactggagccatggcttttgacaagaagatagctgaattataacaacaagatcgattgttcttacaacgatttgaatgtcaagtttgaagctctgaattcaaaaatcaagtatgtggagagtcaatttgcatcaacctctgctccgaagcatcctcgacaacttccagggaaagcagtccagaatcctaaggactacgctactgcaaatgctatcaccatcctccaagaaaatgagtctccaccaagtcatcaaactcccaatactgaggacagtatgattcaagaagggggggaattcaactcaaattgctgcacctgccacccagcaattcatctggactatagaagacacacctttgctgaatactcaccattctggaaaatagttcaaacttgataaactcaagaataatcagaatcaagagatgattagcagtgccaacactcaagaaacttacaagaaggaagtcatccaagataagcttgatgataccggttcattcactctgccatgctctctaggaccattgacattcaataggtgcctttgtgatttgggagcatctgttatccttatgcctctctctacagctaaaaggctagggatcatggaatacaagttctacaacctagctctacttttagttgatggttctattgcacatcctcatggtctaatagaaaatctgcctgtcaagattggaaatgttgagatacctacaaattttgtggtattagacgtagatgaaaaaggcaaggatcccctgatcctaggtagaccattcttagcttcagctggagcagtcatagatgtcagaaatggaaaaattaatccgaaccttgaaaaaggcatcaagataaagtttgaaatcagagaagcttcagggaaatcaacaacaggagttcagaattttgggattcaggacatggaagttgatgaagaaatagaatctgaaacctcaccaaaagtcaactatacttctcaactcagcaagctgaaaaggacttttgaccacaagaagagagcaacacaaaggctagcttagactgaagatcctatagaagatgaggaaaagatttaaatggcaaagcagagtcatagagggattatcttcaagggtgatgaagctgaaagatcaactatggatgtttgaaaaaagagttaaaaaaatttcaaatggtattgatccagagaagatggaaactgcactatctatcaaggaggacaaaagtttcacaacataatgatttgcaccaaaagagcagaaaggagttcacttagaggaaagaagcctagagagcaagttgttgagtgaggaggaaactcctattccgacttattctctaggagtgcctaaacagcccacctacccctctgctgaagaagaacacttgacacttgattatgttactgaataacttctagaactcaggatagaatacaaagctcaagaggataccattggggagctaacttacaaaatggaaggactgaaccatgcaatcttggaactttaagaaatgattaaaggctaccccaattttgaatttgaggattggtcaaaggagccaggttcagaagaagaagactactctgttgatcagaaagaagcttactttgaagaaaaatcaaatgagtactcctcctaccatgtctcaagagaggatgcagagtatgattcaaacattgaaaattcaaccattaaagatgaggacttttctgttcctctcttcaacctttttttggactaagcact

SEQ ID NO: 23368 - DNA, 569 bp, Arabidopsis thaliana columbia
cgatgaacacaaatattcgctgtcccatcttcctgaaatcgcttgacgcatgtctcaataccgaatcactgaaagaaggaaaaaaagaagttaagaagtttatttttcaatgttccgaaatgatgtgagcaagaattggattctgcaaatgaacaatgggacacatggtttcatctggcttttaggtttcactttgctaacagaaagaagttaacaagatcaacgaataatagtcaacttatgtttgggttttattcaatatactggattgatccaatctgattctttgttggattgtttaaaaacagtttaccttgaatatccatcatctgaacctcgaggtttagcccatgttggtgtgcgtcttgatctcatggactgagcagcttgaccttgactactacttgctgctgatgaaagtgaggttgatccgtggaaacttgggcttgggtcgttcatacatgggaaatcccttttggcaattctcctttgctaagtttttcgatgagttctggcaaatccagaaatgaaaacagtcacaaagcaaaagtagtgtctgtgaaatagga

SEQ ID NO: 23369 - DNA, 1463 bp, Arabidopsis thaliana
atgttttagtggcttttggttgcagatgtggcctgatctgatcaacaaagccaaagatggtggcttagatgcaatcgagacgtacgttttttggaacgcacatgaaccaaaacgtagggaatacgatttctcggggaatctcgatgttgttcgttttatcaaaaccattcaagacgcaggtctctactccgttcttcgcatcggaccttatgtttgcgcagaatggaattatggaggctttcccgtgtggctgcacaatatgcccaacatgaaattcagaacagttaaccctagtttcatggtataaccaaaactttgatttgacaaatcttgctactgtcagattcttgaatttcttcaaatgtttgcttgaaatatctttatggcagaatgaaatgcaaaatttcactacaaagatagtgaagatgatgaaggaagagaagctctttgcttcacaaggcggtccaattatcctagctcaggtatgtattttatcattatggaggatgttatgggcatcctttatcccccggactggcccattgggctcagaatcagcctttgacgactatatatgtcatatacatcaaaaacgttttattgatcatattttttcctctatattggtataaaccggttttttttttttttttttttttaacttgttcctccatattttagatcgagaatgaatacgggaatgtgatctcgtcgtatggagcagagggtaaggcctacattgattggtgtgccaacatggccaactctctagacattggtgttccatggcttatgtgccaacaaccaaacgctcctcagcctatgctcgagacgtgcaatggattctactgtgaccagtacgaaccaaccaacccgagcaccccaaagatgtggacagagaattggaccggctggttcaagaattggggaggcaaacatccttacagaaccgctgaggatcttgctttttcagttgctagattcttccaaaccggaggaactttccaaaactattacatggttagattcagctcatttttattcgttagtattagtaaccaatcttatctaaaccttttttatttaatgtgaaattttacagtaccatggtggtactaactttggaagagtcgctggaggtccatacatcaccacttcatatgattaccatgctcctcttgatgaattcggtataaacaacttaacaaacaaaaatgaaatatacataacgcttaaaatgtaggattatagggtcttgacatatttttttcaggtaacttgaaccagcctaaatggggtcacttgaaacagctccacacagtcttaaaatccatggagaaatcgctgacttacggaaacatatcaagaatcgatcttggcaactcaatcaaggttagatccggctctgtttcttttggttatatgttgacgttatcatcaattaacattcaacatgtttgctg

SEQ ID NO: 23370 - DNA, 542 bp, Arabidopsis thaliana
  unsure (1)..(542): unsure at all n locations
ctnnnnnnnnnnnnnnnnnnnnnnnntaaagaagaacgcctgattctgtgtgccgattttcatttttttcattcctttgaattaaaacgtaacgcccattttgatgctctgttccggatgctggtcgacatactgcatatagctttccgggctattggcaaaggtcaccaccgggtcgattaaatcttcgcaattgagataaccgttcatcagcagttcccaacaggtttcttcaatacgcttgcggctccagcgcggataatccgggttcggttcgctgcacgcgcgagagaagacaattttggcgttattgaaatgcgcttcgcgtcctgaggttaaaaccttcggcaaacggcttggcaaacgcgacataggagatggtgccgccataagccagaccgcggacgccgacttgcagcgcgtcggcgtagcntaggtttcgataatcacatcggcaccctgcttgccggtcagcgttttgatctctttacctacatcagtgcagatggggttaaggcagaaatccgcgccgtgggacgggc

SEQ ID NO: 23371 - DNA, 546 bp, Arabidopsis thaliana
agatcagacactggtaagttctctgggatggttacaaactgaaaatcagacaaatcatttgaagggtttaagtagttgaacttggtttgaacaactgtaatagagaagccttttgagtgaagtgcttttgcaagttgtatcattggagttatatgtccttgagctggaactggaaccaacactactcttcttctcctcgagagcttctcctccatttcccaaaattagcctaaaagatcgaattttccaattacccattgacactatttctaatccatgaccaaattgaaaagcttttgaatcatgatgaacaaattgacagaaaacaaaaatcccccaaaatattagggttcgtgtttgattacaaattcatcgtttaaaagtttcgaatcgtctctcctttggttgattgggctccaaacaggccattcgagttaaacgagtaaatacatataattggcccattagtctttgaatttgtcttattttgccatataccgaaacacacgattacttcactagtattgaaaaaaatgtgattagtga

SEQ ID NO: 23372 - DNA, 580 bp, Arabidopsis thaliana columbia
gggtaccgagctcaataaattttttcattaatctacaaaaggaaaaaattgaaatgcatcatatgatgttttgcagaatcaatgactctgtaacaaacagagactaaaagggtccttaaaggtaagttggcaactatcttcttgtttaagaaatgtgttaatctttgtgagtcaaggtaattaggctaaacttgttttgttgattagccttgacgctctctgcattccaaaattttgttgacgaagctcttttagagtcaatagaaaataacaattcagtaaaacaaaaattacacatatctttaagatttaataaaaagcctaattcgaatataatgttgctttcttctggacttaaacacaaatctatacaatttaaaaatattcaaaacatacaatcaatatccttgaaaatggtctgttgatcgactcttctgtcgccggattgcttgaacgctacagtgggagcgattctacaactcctcctctggtgttctagcactagttcaccggctaaccaatccagcttctcataattgctttcttcattgattttcttacaccaaacagaacagactct

SEQ ID NO: 23373 - DNA, 612 bp, Arabidopsis thaliana columbia
gaagccatcaaaaggcttaattcaacggcgcgtggtgagcgattcgaacggaattgtcctaacgatggaatgggattgaattgcaccgttccgattcctcaaggataccgtagtccgattccgtggccgagaagccgtgatgaggtatatctgtgacgctctctgttctgattttgtatttccaaaaggaaagtttctgattttggtttacaggtgtggttcaacaatgttccacatactaaacttgttgaagacaaaggtggtcaaaattggatttataaagagaatgacaaatttaagtttcctggtggtggtactcagtttatacacggagctgatcagtacttggatcagatctctcaggttaattgatttttatgtctcattgtgagaattatttgcatcacttgaatctgatattactttatttttgtggttgtatgtgtagatgattcctgatattagctttggtaccatacacgagttgtcttgacattggatgtggtgtggcaagttttggtcctacttaatgtccgaaatgcttgactatgctatagctcaaaagatgtcacgagaccagatacagttgccttgacgtggtgtcctcaatgt

SEQ ID NO: 23374 - DNA, 523 bp, Arabidopsis thaliana
aacatcgcattgacttggttgttctcctcagtgtgggaagaaatctgcagcacaaagtggtgtcatattgtattatagacaacaaaactgtgacactgtagatattaacacatgtttagattcagggtgttacctgtgactgtaatttctccccttcagaggtaagctgctttgttagatcttctatggttgtctttgaagcctcaagctcattggctgtttgctccttctcggcctccaaggcagagagctttgtctgcaactcgttggcctcagatccatgattggctagttccagattcaacttcaaattcacctcggccaaatccccactttctttctcaagcccctggcatttggccccgagctcttcaatagtagattcaagattcttcaactttgatagcgcgtcttcaagctcaacttttctagtgtccgcaactcctgatgcttcatgagccagctttttgtactctcgatttggtttcatgtgttttaactttcaaccaagtcctagatctgt

SEQ ID NO: 23375 - DNA, 1490 bp, Arabidopsis thaliana
gttagcaggtttcttaaaaccaaaaaaaaattcataaaatttacttgaaagcatgatgatagctactaaaaaaaattcataaaaagatatttaaaaataccttaaatgtttatctttatataacaacaagacctctgctgctgctatgctttcactggctctctcttttctcttttcgcccagctcgagcttcgaactaatcacacgttgcacattaatgtaccatcgcagaccagtgcgctacaagagccgggcgccaaagttacaactttttactaacttaaaaacctttggtcacctatataataacttcaataattcttttctatttttgagtcaaaaacataattcactccaacagtagtagtaattactagagtttctttgagttttttttaataatacaacaattaactttaccattttatctttttgaaaaaaggtttaccattttttacttcttgtagagttgtagtagtattatcatagtatggtgcatgtgtgttactgtgttaggtgtgtattgttttgtatatacgaaataaatgtttggaggcttggaaaatttttcaaggaaaaaaaaatcacatccatatgaccatatctattaatgagcaacactcatttcatcatatagatgccgagtgatcatttaatacactgtaagaaaatttaaagctttctgattccaaaattctcaaatctttttattacagtgtctttcatattcactttcttacaaagattattattaccaaatttagttacatgtctgctgctgagtttcaaataaattattgtcttaataaagatcttatcctatctccacacacgtttcctcctttttatttctcactttcaagcttagaaagaatattcttgttcgattttttttctcccgaacatgatctttcaatctcaacgacgatttctcagtgactaatactacatttgtatacattcttcatcatcatcatcatcatcatctgtgtttttgttcatattcatttttcagttatcgttttcaatttttaaaactttttttcttgggtttcacaaaatttgtcgttaatcgatgaatttgattgttttcaagatcacccatctctcgaattcacgaaatctctcagcttttccgtgattcttggtaaaaattcacaaaatcgaaattggagaaagaaagaaaaaattagggtttgaggaaaagcttcgatttttcacacgatgagtcatcaccggcgagattctggcggagatgtagttcacgtgattcccacaaacaatcctccgcaggataattggtttcagaatctcggcgatagtgctgtttgggcgacggaagatgattacaatagagcttgggctatgaatcccgataacacctccggcgacaacaatggtcctaccgaacaagtcgactcgaggctctccgacgacttcatcatgcacgactacttctgctgcgagctatcgtactaaagcgattggga

SEQ ID NO: 23376 - DNA, 126 bp, Arabidopsis thaliana columbia
ttatgcaacaagatagtgtccgagaagtttctataccagacataacaaaagaagatgttatccacgttgatctactgaacagagaattcgaagatatcactcatgaaggttctgaagaagaagaac

SEQ ID NO: 23377 - DNA, 529 bp, Arabidopsis thaliana columbia
agtgcaggttagcgagtaacgaccttacctcgttattatttgtcttagcgagaataggggaggtaacgaagttgtttaaattgtcctgtttctcttattattcacgatatcagtcgggcgaggaagaagttggtgttcagccggaaaaaaatgggaaccaacaggtatatttgtttatagactaacgtttatagtgcgctaattatctatgtatctggtactttagtctatagtttattaactttcttatcaatttactgttgctatgtaggccgacgttgatatggtcgatgatcttaacgcaggcagtgctcaccaggtaaatgctttttttgtactttaaagttagtcactaagtcgcttagaacaattgtgataattctattaacgtaaaataaactttttatccgttaacaatttgtttatttaattccattttcgatataattgttacactataacctgtagaccgcggcaattatcaatgtatctggtaattaagttattaactacttaacgtttttaacat

SEQ ID NO: 23378 - DNA, 634 bp, Arabidopsis thaliana columbia
gaaagagatcaaaaccacagtgagagttgatgactttaactggcagtcgaaaagattggtcgggtcagacgttctggtcttcaattcagggcattggtggaacgaagacaaaactgtgttaacgtatgataaatccctcagcttctatgatcagaattcgacattctcttccttcttaactgagtttatttttgtgtgtgtgtgcaggggatgctattttgaggagggaaggaaagtgaacaagacaatgggagtaatggaggcatttggaaagtctttgaagacatggaagtcatgggtcttggagaaacttgatcctgacaagagttatgtcttcttcagaagctactctccagtgcactacaggttaggacaattcagataaatgctgttttactatcgtcttgagagaccggggtctttaaaggttttgatgaatctatggttgtttcagaaatgggacatggaataccggtggtctatgtgatgcagagattgagcctgagactgataaaaggaagctggaacctgatgcgagtcacaatgaatatatctataaagtaattgaagacatgagatatcgacatagtaaggttaagtttctgacatacatatctgcagagtttagaaagat

SEQ ID NO: 23379 - DNA, 607 bp, Arabidopsis thaliana columbia
gattttgatccgaagaagatacaccgcatcaagaaaccgaagaaccagcagaaaaagattagatttatgcttccagttcgtgttcgctgcaacacatgtggtaattacatgtcggaaggcaccaaattcaattgccgtcaagaagacgtcatcaccgagacgtacctaggtctaaaaatccacaggttctacatcaagtgcaccaaatgcttagcagagttgacaatcaaaaccgatccaaagaaccatagttatactgtagaatcaggtgcaagttgcctttataatggccatgaggacattgaggaggagaagaagaagaagcatgaaaacgcattagaatccctagagaacagaactgtggtatctaaaagagagattgaagttatggctagtcttgatgagttaaagtcgatgaagtctagacgagcctcattgagtgtagactacatgcttgaggatttgagtagaagataaacacaagaagcagagaatgttgaggaagaattgcttattaagtcgataaaatttggtaagaggattagaactgatgaagagaaaaagacaaactatgaggcgtatgatgagaagaagaagaagaagaaga

SEQ ID NO: 23380 - DNA, 502 bp, Arabidopsis thaliana columbia
cgcaagaagctcgctattcgaaatttggaatttcttcaagtgtcggggatcacacatttgatagaggtatcctctcgagaaactcgtaatttttagatgatgctgtcttccgcaagagtgcagctttcttgatttttttataaattgcacctaaatggatacccaataagtattgttgtgtatggggatgagaataagtttcaagaaggtactttgtgttggtttacttttggggctttactgttctcactttctttctcgtgcacatatccattaaaagttattcactgctctagaacctaatatcttctttggtaccaagtataacatatgtgcatatgatactctcatctttgaaagttgtggacctttatttctgatctgaaactaaggctttgtacagctgcccgttgattccaaggtccctatgaattgggtgaaagtaaatagcaccaagaagactattcgatatcatccccagaaatagtagctggcttggatg

SEQ ID NO: 23381 - DNA, 498 bp, Arabidopsis thaliana columbia
cagtcatggcaggaatggcatctgatggaactcaatatgatcctcgtcagtgttgatactaagatgaatgccatgtgagttaaattttagtatcttaatatctgaatccctttataacaaccaagaactgacttgtgtaatactttctagtctcggcgaggaaggagaggaaacattctacactaactatgacgaagtttgcgacacttctgatgcaatggaattgcaaccagatcttctcaggggtatttatgcttacggtaagtgaagtatttcctttgagaacacattctatacataccttcattgtttctgtctagttttgtattatcttttgtctgtttcaaagcttagtactgttactcttaaacaacctcatattggttatgttatctatcattaggtttcgagaagccttctgctattcagcgaagaggaattattccattctgcaagggtcttgaagtgatcagcaagctcaatctggaactggaaaga

SEQ ID NO: 23382 - DNA, 493 bp, Arabidopsis thaliana
ctgttatagaagaaaaaatacctcacgtacatgttgaatatgttctgaccatgaagaactataaacgagtatatcgtcaaagaagaccagaactgacttacgaagcagaggccgaaagatctcattcatcagcgcttggaatgttgacggtgcgttgcataagtcgaaaggcattacgaggtattcgtagtgaccattgtgtgtctgaaatgctgtccttggtgtgtcagaaagatgcatacggacctggtgatagcctgctgtgagatcgagcttagtgaaatagacaactccattgagctcatcgagcatatcgtccaccgtgggaatagggaaccagttcttaaccgtaacagcattcaaggctcgataatcagtgcagaaacgccatgacccgtctttcttcttgactagcaacactggagacgaaaacggactcgagctcggtcgaataatgcccgacgactcatctttttggtaaacgcatacgata

SEQ ID NO: 23383 - DNA, 515 bp, Arabidopsis thaliana columbia
tgctgtaaagtatccggtgaacaaaacgcaaaatcgtctgccaaatttttctccagcagcagaatactctcgttatgcagcgatattttttgctgttcatgataaatatcgaatgaacgacgaatgaggatcaccgagcagacatgagtcatgattatcccttatatttcatactgcgattatttcaatttcagtatactaatgaaatgatgccagactgtttcttagcgcaaaaactgccagatttggtaggaccaaaatttatccacaaagtagttttgcataacagttaattgataataagtaaatgcagcacgaatatattttcgcacagcgtatagcttatgtttataaaaaaatggctgatcttatttccagtaaaagttatatttaacttactgagagcacaaagtttcccgtgccaacagggagtgttataacggtttattagtctggagacggcagactatcctcttccgcggtcccctatgccgggttttttttatgtctgagta

SEQ ID NO: 23384 - DNA, 690 bp, Arabidopsis thaliana
ggcacccagtgccctgacagttccaagatccgatcctcatgggggctgtgggggtaccggggaccccgcgcctccgtccattgaaagtggtgaagagacagatgctctaagactcactttcttatctctcttgcgaatatgtcctaagacagccgactcttcttctgcttcagcctggttgtagagcatttcgaaactgactcgcttccttttaacaaatggaaagcctattgtagcattgtcagatacttcctctaggagtccagcctccctttgatgatccatcaatgtttcccgaacgtgtttggcatggaggtatcgcagtctctctgcagtcaactctgtgtcctcaaaagcgctcgccaagtcagatggaacagaacttgaggatccctcctgcttcacacttgtggcaccggcgttgtgtccttgtaaacccggaatcaaagaggcaggatcaatgctaggcaaggaatcctctgcagccatatcatcttcatcatgtccttgatcatgattgtcatcatcgttgtcatcattcacgttgacagggacatactcttcaaaggacaaattgcattccttcacatcatgtttgagagatccacacttggtacagaaatttcgaagcctttcaaatcgaaacttgatgatggtgttctcattttcctggaattggaagttcctctg

SEQ ID NO: 23385 - DNA, 671 bp, Arabidopsis thaliana
  unsure (1)..(671): unsure at all n locations
gaagaagtctttgacaatgctacaaatgagtttgcttttgtgaagcgtaggngtcagttttgaaacattgtacaaccacgcggaggctgcagaggaatcagcagtactaggtcatcttcgtaagaaagacaggagagtaagctttgctgcatctgtgacatctccaatctcaatggacggaggcgcgggggacccggtacccccacagcccccatgaggatcggttcctggaactgtcagggtttcagagcgccgctgactcaatcgcgtcttactaatctatgtaaattacttaagtttgatgttttattcctcatttaaactctaaattagtgtgatgttataagtactctagcaagtatattaggattcccaatgtaataacacaacccctcaaggtcatagtggtggcttggccttgttgtggaaggataatgtgtgtttaccaagattctcaggatgacgccatatcgatgtaaactctctatcaataatacaacttctatttgtcttgtgtgtatggtcaccatgtcaaagtgaaaggcattatttgtggcacactttgaactttacacttcacgcaatgatcttggatattataggagatttaatgagatactgcaatgctgaaagatgaggacaccagagatgattgcttcagagatttagag

SEQ ID NO: 23386 - DNA, 655 bp, Arabidopsis thaliana
gagatgtcagaggcaaattcattgccaagtgtggacatggctactttgattccgggactccagagacaatctgcaactgcttttaatcaaggttctccctctgactctgttccatctgaccttgcaagtgcctttgaagacacagagttaacggctgaaaggttgcgctatcttcatgctaagacactccgtgagtcattgctgcaacaacgtgaggctggactccttgaagaagtctcggacaatgtgactcagggctttgcttttgtaaagagaaagagagtcagtttcgaagcactttacaaccaagcagaggctgcagaggaatctgctgtgttgggacatttgcgtaagaaggacaggagagtctctttcgctacatctggtgagtctcaaccgctaatggacagaggcgcggggggggggggggggataccccaatgcctccatgagagtcggatcctggaactgtcagggccttggtgcgccgctgactcaatcgcgcatagttaagttatgtaaattatgcaagtttgatgttttattccttattgaaactttaaacaagtgtgaacttataagtagtatagcacatgtattaggatttcccatgtaattactcagccccctcaaggtcatagtggtggcttgcctt

SEQ ID NO: 23387 - DNA, 1188 bp, Arabidopsis thaliana
ctttgactttgcttcgcaaacatagtacgaggatgtaagtagaaattaacaaaggttatgtggtctgatagaactatgttactttccaaaccagacgacaagacgatgtcgttcctcatatagtcctcgtgtctttcctaatatgtgaattttagcattacaattgtcaattggagagtaaataggttgaaaatataatatggggatgtaatttaacaattaaaacagttatgaggctttaatcgaatttgttgctttgctttgcgactttcatctttccgattaatcaaatccttttatcctctgaaaaatctcaactttcgaagaaaacgaaaatggcgagccttgtctacgggacgccgtggcttagggttagatctttaccggagcttgctccagcttttctcagacggcgtcaatcttctttattttactgttctcggcgaacttcgcggtggttgcgtgttccactccagtcaacaatggtgggtctgtcagagttcgtttcgcgccttctcctactggtaatctccatgtaggtggagcaaggactgctcttttcaactacttgttcgcgaggtttgtgatctgatatagagcagaacaatattgagagtttttggggattgtaactgatggagtttttctacaggtctaaaggagggaaatttgtgctgagaattgaagatacagatttggagagatcaacacgtgaatctgaagcagctgttcttcaggatctctcatggcttggtcttgattgggatgaaggttgctttttcttcttcttctctgtgctaatttaggtgtttttccaatggtggtgtaatgaaattgggatttgaaatttcaggtcctggggttagtggagactttggtccttatcggcaatctgaaagaaatgctttgtataaacaatatgcagagaagcttttagagtcaggtcatgtctatcgatgcttttgctcaagtgaggtgattatcttcaaattcgctgaacaacttcagcttggtttttttgactctgctgttgattttgatcaattgttatgttatgtaggaacttgtaaagatgaaggagaatgcaaagttgaaacagttgcctccagtatataccgggaaatgggcaacagcttctgatgctgaaatagagcaagagttagaaaagggaacaccttttacttaccg

SEQ ID NO: 23388 - DNA, 513 bp, Arabidopsis thaliana
cgtggatctcgggttaccagaaggatgcgaaaacgtcgatttcttcacctcaaacaacaatgatgatagacagtatctgaccttgaagttctttaagtcgacaaggtttttcaaagatcagcttgagaagctcctcgagacaacgagaccagactgtcttatcgccgacatgttcttcccctgggctacggaagctgctgagaagttcaatgtgccaagacttgtgttccacggtactggctacttttctttatgctctgaatattgcatcagagtgcataacccacaaaacatagtagcttcaaggtacgagccatttgtgattcctgatctcccggggaacatagtgataactcaagaacagatagcagaccgtgacgaagaaagcgagatggggaagtttatgattgaggtcaaagaatctgatgtgaagagctcaggtgttattgtaaacagcttctacgagcttgaacctgattacgccgacttttacaagagtgtttgtactgagag

SEQ ID NO: 23389 - DNA, 678 bp, Arabidopsis thaliana
tagagataagtacatcgataacgcgttcatcctagaacacattggataaacgcacattatccttccacaacaaggccaaaccaccactatgacctttagggggttgagttattacattgggaaatcctaatacataagctaaattacaaacaacatcacacttgtttagagtttcaatgaggaataaaatgtcaaacttacataatttacatagactagtaagacgcgattgagtcagcggcgcaccgaggccctgacagttccaggagccgatcctcatgggggctctgggggtaccgggcccccagcgcctccgtccattgagattggagatgtaccagatgtagcaaatccaaatttcctgtctttcttgcgaatgtgtcctagaaccgctgattcctctactgcttctccctgattgaaaagagcttcaaaactgactctctttcttttcacaaaagcgtattcattcatcgcattgtccgaaactgcttccaacaaacctggtctctttgtccatcaatgattcacgcaagtgcttagcatggagatacttgagtctttcagcagttaactctgtgtcttcaaagacacacgccaaatttgatggcttagattatgaaggttcatgtttcaccctatggcaggatgtgctgaagtcctggaacagaatggctg

SEQ ID NO: 23390 - DNA, 1104 bp, Arabidopsis thaliana
aatccctaaaagtccactcatctctttagtggccctcctatcttttcacagtttgaaaatatctcattgaaatcactgatcaaaatccaagaatcattgcatgtaagtgatagattttcaaagtgtttccataaatggtgtctttcactttgacaaggatgaccatacacacaagacaagtagaaattgatattattagtagcgatatgtacatcgatatggcgttcatcctgacaaactttggataaacacacataatccttccacaacaaggccaagccaccactatgaccttgtgggggttgtgttattacattagaaaatcctaatacacatgctagattactaacaaagtcacgcttatttagagtttcaataagaaataaaacatcaaacttaagtaatttacataggctactaagacgtgattgagtcatcggcgcaccgaggccctgacagttccaagagccgattctcatggaggctgtggggataccaggccccccgcgcctccgtccattgaaagtggagatgtagtagatgttgcaaagctgactttcttttccttcttgcggatgtgacccaaaaccgccgattcctctgctgcctccgcttgattgtataaagtttcaaagctgactctctttctcttaacaaaagcaaactcattcatagcattgttagagacttcctccaacagccctgcttctctctataccattaaggattcacgtagatgttttgcatgaagatacctgagtctttcagcagtgagttctgtgtcttcaaatgcactaaccatatctgatggaacagaacttgaagacccctcttatttaatgtttgtagcggcatgactctgtagatccggaatcaatgtggtgaaatcaacactaggcagcgactcatctcctgtcatctcttgttcatcagggttattctcatggtggtcatcgtcatttccatcatttacatttgccggttcagcctcctcaaacgccaatgcacattccttaacatcatgcttaagagaaccacacttggtacagaagttcctcaatctttcaaatctgtatttgatggtgtaatcaaaccccatggtca

SEQ ID NO: 23391 - DNA, 569 bp, Arabidopsis thaliana
caaagtagccatgtccacacttggcaatgaatttgcctctgacatctcttgttcatcatggtcctgatccgggttgttgtcatcatgtccattgtctccattggcagcattgtcatcgtcgaaagttaaagtacactccttagcatcatgtttgagagaaccacatttggtacaaaaattccttaaccgttcaaaacgaaacttgatgatggtgttctcatcagcattgaaacggaagttcctttgaaaacgaagcgggttatctagattccaagccaatttaactctcacaaaacccatttggtatgagttctcatcgaaatccacatccaagacataacccaatctgttacccacagccctagccattgcattgcttaagtaaagtaaggggataccttggatttgaacccagaaagggattatcttcatttcgttttcagtgatgtttggaaaccatctgtggatagacagcatccaatcattgaaagacaccggtccgcgtcgcaagaccaaattcattacttcttcagagcgaaacttgaattgaacttttccagggctaatga

SEQ ID NO: 23392 - DNA, 1006 bp, Arabidopsis thaliana
tgccaaagctttttcttggtgtatggatagatgtcaaattattaaaaagaaaaaaaattgataaaatgttgtccactacagaaggagaccaatttaatggtaagccatacacatctcaattgagagagagagagccatgagatcaacaaaatcttctttctactcgcaagtctttgatgtcaacaacataaaaaacaaattaaagatatctgaagaagctcctcttacaaacttaaagtaagttacaatctcaaaaatccttaaaacacttgagcaaagaaaaaagaaagtgtttgtaactccaaatagatcctaaacgcatctgtaagaacctcttaaaccaggtgcaaccatctttggcagggttttagtagcggtcatggcgtctgcaaggtagttaaatacttactttaatgtagccagaagtaataataagatgtgtgtatgttcttaatcaaagttacctgcggcgatcatgatccctcggtctttccctagaccgggaccgtgaactgcgccggcttcttgagtcatagccacgtgactgattatagtttctgtcatgttctcggtggtcatggtgcctgtcacgatctctactcctgcggtcaacatctcttcctcggtcacggttatctcctccgtctctgtctttacttgattctcgctctctactcctctcctttgatctgagattggtttaggttttcagcaaaaatgttgaagattaaaggaagtaaacaaacaatgtgttcaaatgcttgagaaaaataaacctcctttcttcgacccgttccttgtgaactttgttcttctcctcctgaagaagacagagagaatataactatacagtctatatcaagagagaaaaggaaaatcactagaaagattctactgtatattacctgaagctctgccaatttgtcgcggatcagcatgtaacccaagtgaagcttccctccaaaatgatcagctaaccgacgatcactaaaggcagtacaacaga

SEQ ID NO: 23393 - DNA, 578 bp, Arabidopsis thaliana
gtaggtaaaatgtttgtgtttacataattacattacatcaacaaacgtaaaaaaatgtttgtgtcattaaatgtttatccacgtactcttcacaacgatcataagtcataattcagaaaattcctttaataaatgtgaactgaataagcttttgtatagtcatcaaataaaaagtcaactgtacaattaaaagtccgcaaacatctcgatcgtctaagagacgacttttctcgtaactttatgaagaatatacaatagtagtggcttgatcgcgtccacacatttacattgcgacttttcttgcatgccgtctcacgcactatatttaggcaaaacacaattgtcttcatttcaagactagttcttgttttcccatattcctcaacaacatcaaaatgttgactcccaccatttctaaatccatctctttagtaaccattctattagttctacaagctttctctaacacaacaaaggctcaaaattgcggttgttcgcagagctatgttgtagtcagtttggcttttgcggtacacttcagactattgtggtgtaggttgcaacaaggaccttgtttt

SEQ ID NO: 23394 - DNA, 911 bp, Arabidopsis thaliana
taaacattatactaattacctagaaatatagccgtctattaaaaatgttatttagtataatgtatatatatcaaacgtattaggctttttagtaaaatatgagagaagcttacagtcacaaattctgaggcagagtcagacataagagtagtgtatgaatcgacgtcgtattcaggtcttgcacgtagagtatagtatgtattggctatgtcgtcgctgcctgcgaccaataagaataagctgttggctactatgaagtcttttcttgcttccccaactatattcttcactttctctatgtactcctcgaaataactcaattgatcttctaatgatattactgcctaatacagttaacaaagaaaaattaaaccaacgagttaggaaaaatatataatcaaaaatttccataggagtttgcaatgaaaaacaccatgataaaaaatttccatagtatttaccacaagtttcggtgttataggatcataaccagaacctccggacgcaaacgatacaccggttaaaagatctttcgattttagattcggatctaggtatgctggtacaattgattttattcccagttcttcggctgcaaatacaaacagagcatgattttttatttaaatgacgttagtttaaagacatttcttaacatcatgactgtagaagactcgagccggaattttcttaataaattttggcacgcataattattgagtcaatgttactagagttaattttaacaacttatacttctaaaagggaaaagaaaacaaatgattgctcaaattttatttgccgtagtcactacttatgtcctagtaattaatggtcgctactcattatatataaatacgtaatattttttaacattggctattcgctttagaaataaggttaaagagaag

SEQ ID NO: 23395 - DNA, 537 bp, Arabidopsis thaliana
ggagctcacgtcgatcgttggactctcgatagctgtctctccactcactttggcgtagacctgtccattttttgttttgcaacatttgagcgtgtgctataatagttttatcgaaaatcactcagattcttatctatgaccaatttttctcacctcagtcatcatttcagcaagttgtctcactgtcacttcattgtttgggttgcctacattgaagatatgcccattggctctctctggattttcctggtaaagaattccgcaagcaattcagatgcaacttctttaataatataaaaacaaacgatatatcaccagggataagcaatgaatgaaactcacgatcatcaaaaggacagcttcgatagcatctttgatgtagatgaaggttctctgtgattctccaccatccacaagcttgagaggctccgtcgcagaagattctgaaaataccaccaaaaagtttacaaaaaagttaagctgcagccatgagaagaactcaggtcattggactaagcctgtatacttacgttacta

SEQ ID NO: 23396 - DNA, 341 bp, Arabidopsis thaliana columbia
cggtagtattcttgtccgaacaactgaatgggacaacatcaaaccaaaccttccttggttgcttgatgctattgtctgcgtcgtactagatctatttgtatcctttgctaaccatttgcacagtctcaacgtggataacaagttatcttattgccattaggttgagctttgctaccttaattcgaaaaatctgcacagatgatactgcagtatatctactagtcgtattgcaggattaagagcttggtcatctatgagatgaagacgcctatggagactatgtgggagcaagcaaaactttctgtttcgtggatcactatttatgttacaaggataatttg

SEQ ID NO: 23397 - DNA, 398 bp, Arabidopsis thaliana
tggttgttttataaatgccaaagcattgatctagagaatagctcccattacataaggaatttttatttgtggaactaaaaacattaggattgctcaaacattggttgttgttctacagaggaggcaaccatgtgatgataaccgggctacgaactttatgtgtagtgctcttccacactagaccaccaaactcaggcctcttcatccggaaccttgtcctgaaagtaaccgtgtaggaaagcttctggtgcttcgaagtgaagttgagtgttttgggctggacagttacggatgcgcctttgaatggcgagacagaaaccttgtagcttgaaatgtgaggacgaacattggtcactgttcttctaagtgtcatagctttaacatgtgtgttctctggg

SEQ ID NO: 23398 - DNA, 535 bp, Arabidopsis thaliana columbia
gatggtgatactatcattgttatggatgcttttgctttaccagtggaaggtactgagacaagggttaatgctcaggatgatgcttatgagtacatggttgagtattcacagaccaacaagctcgtaagtgagattcaagaaacttcaaagttttgatttttttctttagaaagtttgtatataagtcagaacagtttgattgattatggttataataacttgacctttataaggcggggcggctggagaatgttgttggatggtatcactctcaccctggatatggatgctggctctccggtattgatgtttctacgcagaggcttaaccaacagcatcaggagccatttttagctgttgttattgatcccacaaggactgtttcagctggtaaggttgagattggtgctttcagaacatactctaaaggatataagcctccagatgaacctgtttctgagtatcaaactattcctttaaataagattgaggactttgggtgtcactgcaaacaggtacattttcttgatttttc

SEQ ID NO: 23399 - DNA, 490 bp, Arabidopsis thaliana columbia
attcaaaaaagtgaatggccaggaggtgatgatacattaccgattcatctcaatctcaaagaagaagctttctattgttcacaaaaggcacattgtcgattgtaagaagaaacaactgaaaaagagatcaaatacaagtcaactatgggtgtagtctaagcttcccgaaccaaagcattggtattcgactcatacaaagtcagaactcaagctacctgatgatgagaagtccagtctcctcgttgaactataaaacaaggtggcaaagctatcaaagcgtgtaatgactgtgtacaagtcgaatacctatgctttgatttgtattttacgctctagaaaacactcttctagatttgctgaatgttcttctagatcaaggcgaatgctgctgcgtgaagtagaatacagaagccacgatctccacagactccattgttttatttgtaggaatgaataagactttgtattcgatgaaaaaaggggtttcact

SEQ ID NO: 23400 - DNA, 382 bp, Arabidopsis thaliana columbia
aaaatctaatacagatatatttaaatcaattaaaagctccacaatcacgacggatatcaccattactaccagttttaacaccaacacgaccaagcttgatcatcgagttaataaaagcttgattaaacaactgtcgattattagcccataagtcaacggttggctgtgaccgacgatccgtcggtaagacttgatccgacgtggacaatcctctcccttgtcgcaagtttttgtagtaaacgtcgtcgaattgtcatggtgttgttggatccatgttaatagccactcttggatctatgtttcgaggacacgacgcttttagctcatgcacgtaatctttggtaaccgtgggatccagtttagttgtcttgtcgaaagtgta

SEQ ID NO: 23401 - DNA, 531 bp, Arabidopsis thaliana columbia
atgtaatctcgattatatttttgattttcccgtaatagcaggcttcgtgtccttccatgtcggttgccctagtaacgactccactattttgagtggcggccataggatgaattgattcgaaaatgcttgaacgaaagcgatatccattgacgtcgtaacgtccatagcttttggcagttacgcttccaatagataactgacgtaagtcatcattcaaattcatttcctccccaaactgtcaatcatgccacaaagcattagcaaattctgtaatattagttaaatgaaattagctctcggagccacataattaagacttacacagtcccgaagccacataatgaaattaggtcgcccatgcataccatcgcgtcgcaatttgtctatgtctctcgctgttggcctaccgagacacctcatgttttgttcatcaaactcgctgtcaaatattattgtatgacatgagatatttgataacataaactaattcacatatgaacagtttaagaaaacaagtcttacacaaagtat

SEQ ID NO: 23402 - DNA, 3305 bp, Arabidopsis thaliana
caatcaattggcaacggtgtcaaattgataagcaggtttttcacgcctgcttatggtgaatgtgtgattcagttcaattcccctaaaacacaaacatgtcgatgcagctataagggtgtcaatctagtccactgtttttgctagcaatcaagatgtgtacagaaacaactaagtcaagccagattataaagatggtgggtttctagtaacaatcctaggaaatgattcaaacaagtaaaaatgagaacttaaagagccctactcgatcattgggtcgagtagaaccaacaggcaacaaaattaagtaacaaaatgcaatcaacaggggatactaataggggatacaaataacaggtaaataaaagtgcaatcaacaagggatacaaataaatctaatagaagttctaaggatggattcattgataagggcaactctagggttcatcagatggctaataggcgaaaggtagatactcatgacgatagattcaaaaaccgggtcaatccactctcgtgacagagacccccataactctaccacttcctaatctcaactctcgttgatgaaacatagcatagcagggtttaagcaacaatctaccaaagccaataagcagactagccaatctcttggtcaagtatacaaatctctggaatttgtagatcaaacatccatttgaacgtcttttggacgctggacgtctatgatcgaatctccacattagccagcgaaaaccgcataggggccaagcgaatccagaagggatctaatctaatcttaaccacctgagtaacctagagattaccctaatctaattcatcctcaagaaccctaatcactactcaagcaacataactaagaacacaaacccaaaaaatactaaaatcataccaaaatgtagatctaaacaaactaaacaattttactcaaagaactaaatgcaaaaacaaaatagattaagagtaattaagttttgaagattcaagaacacaaaaaaaaactaaaggatcaaagctagattctttggacaaatttcaaagtgatctatttatagtaaaatgttgaaaaccctagattcactagaagacaagagacttgaggcggtttgggcgagtgctcgatcttggggatcaagtaaagagggtgctgcaaagtctgcgcctttgtgtccatgctccgagtgatcaattggtcgagtagatgcttcttcctctcctatctgtatgctcagatgtctggttgagtggggaatgaggaggatccgaagatgctttgatagatcaacaagtctggtagagttggtcgcccttggtcgagtaaatgggtcgagtagaggatcgagtaagaggggcgagtagaccgatctgctacttcctctgtggctgcctagatcgagtaaactggtcgagtgaacgagtagaggatcgagtaagaggggcgagtagacggatctgttgcttcctctatggctgcctggattgagtaaactggtcgagtgaattgctgcctcctctgtagctgcctagatcgagtgactggtcgagtataatcctattaagctccttctgcacctgaaaacacaccaaaacatgcaatatgtatgcaagatgatcctaaatgcctaagtgtgcaaaataagctaaatgtgatgcaaaatgatatgaaacaatgagtgatcactaagctaaatgatgataaacacatgcctaaatgagtaaaatatagtgttatcaactcccccaaacttatctcttgcttgccctcaagcaagcaaaatatcttcagttgaaggagaggtttgaaggtggggattcaaaaaccgaagcatgcatataaaacgggctcaatgtccaggttgctaattctaggttgcaagatgatagacccttacttaaaaacgttagccatactcgtcacaatgcaacctaacaacatgccttaatctattcaagcattcacatcaaccaatttcctttaacattcactaagcgtgaacagtggatcaagcaatgcaatggttatgaactcacttggtttcaggcttaggctaagagacaaaaatggtccctttaatgatttggtcgagtaacaggggactctcaaagaaaagattgagcgtcagcagaatgctaaaggtaaaagccaatggacacaaacaagaacagactcccatctacccaatgatatagtatgatagttcataagatggttccagtcccatagatgtcctaactctaccctttttctcattctttctctttttggttcaagttctaaggggttcttctttaaaacgattcaagagtctagtgggtttggttttatactttgacaaacttaaggcttttcttctaatcttaggtcgttttacccttttctttaaatcacaatgcctaacttctttgaattccaaaccctttactagactaacactttttgtatcccccttaagaactctaaactcttactctctttttttcttttcttttcattctcattctctttcccattcaatccatacacaaccccaatcccaaatacaagtctccacctagtcctagctaacccaaaaagcgtgggctaggtctacatgaaagactgctcttgtcggctcatacctgacacgttataccaagctcaatcgaaaaagacctcacaatcacacacaaatgatctttggcttgaaataaggctaggctaagggtatgggaaactgctctaaaaatgagagtcagctacttagattaacagagggtggtgaagtgaataagataatacaagtatgtatatggtagccatgagttcacaaacaatgcatagacatgataattgcaaattcagttcaggttctaatagatagggaatggcatcaagttctaatagatagggaatggcaccatcgagcaatatcgatcatcatccctttctctgaagtgagtgtcaatcgacactatagctcggttctgcaatacaacaatttcgcagtcatcttcctcagttgtatcaatcatatatatgttctcctcaggcaagaaatcattaacggggacatcaccttcaatcctaatgcatgacaatagatccgctacaccattctcaactcctttcttatctcgtaccttgatgtcaaattcttgaagaagtaaaatccatctcaaaagtcttggcttagcatctttcttttgtatcagatacttcagagctacatgagtctgtatgaataatcactttagatccaacaagataagatctgaactttttgaaagcaaacactacagctaacaactcttacgcttttgttgca

SEQ ID NO: 23403 - DNA, 472 bp, Arabidopsis thaliana columbia
tcgagtttttgagacaaattatttaatgctcatcggcggtttataagtcaatgatttaagaaataaaaataaacgataaagactcgagccatatagtcggcaccatgatattatgattatcgtaatgatatttacatgtgatgtgatattcgtattttatgtatttggtgcgacacggatattaacagaagactcggtggcactcaacttaaggtgccaagtgttgagaaactacaacaagcttatgacgcattaaattctttcaatttctatccttcatcatataagtttaatgacacttcttttgatttgataaaattacgtaaggaatttgtaaacatttggcctcttaaccttttctgaatttaataacacgaaaagaatattaaaaatgaaatatatacttgagcaaaacataattgatacctagcgattagcgagtatgttaagtgttgttatgcaacgatagaca

SEQ ID NO: 23404 - DNA, 557 bp, Arabidopsis thaliana
tgctcttcagtagtacttttgtgtataatgagaacaaaagaataactttttggtcgactacagaggctctgttgaacttaatgcctttatgctgatgcatataaatcatcccaaaagaagaaaagactacaaatatcgtgctttcactaaaaaaaggttttaccttcaggtcgggagtcacacctttgtgcctggtatattgaaagtacatgtcacacggcataaaaaccctttcaagcagtgcgccagtacgctttgccttcggggagcttcttctaatctttgggagccattgcaccccagctcctggatcgacatctgttggtgccacatgagcttgtacatgctccaacatcatggacacttccatgcgtgtccatgtcatgtcagtgccattttcaggattatgatcattttcattttgagctgccttctcaatcatgtcatacgcaacatgaacaactgaatgaaatgatcgtgctaaaacacggccactagcagcagcgagcaaaaatctacctggtagatgaagagagaatgtaaatagtgatgacaat

SEQ ID NO: 23405 - DNA, 541 bp, Arabidopsis thaliana columbia
ataattgtgacgcttctccatacggagacgggcaaaacgaagagcagactgtcctcctcttccgtgtttcttcggaagatcaacagagaacttgtgaagtacctcacgggtgttaccactaagagttccaaagagagtcccgtttccatccattacaatgaaaccaaacttgtcatcagactccaacaattcattcaaagcttccgtgtgaaacttgttgtcacaaaggtagagagaagcattgatgggtctgaaaggctcaaagtcaatagtaaccttcttctccttaccatcctcattaacaatggttccagtatagagtacaagaccattaggagggaccctgttgtaaagtttcaacctttgctgagcagaagttatggcccccaaaacagattgacgattgactctgctcttgatgtttgacgcggttccatactcatcacccaacatcttggtaacacgagagacctgatcacgcggaggcatgatgagtgagatcatgctggttccattacccctagcagcttcaagtgatttg

SEQ ID NO: 23406 - DNA, 3701 bp, Arabidopsis thaliana
aacaaggtggaagagctatcaaatcgtgtaatgaagcttgaaaagaaaagaaaaactgtcaccttcaagcggtccagaaatttggctttcggttttgttccattatcttctagatcaaagcgccaaaagtcattggaggtacctactcaatctcaatcctctgatgtaatcaagatttcaaacagtttataatattagaaccttatcatctacttatacatttttcaagttttaacgcataacaaaacttttattttcctcatagaatccatctcattcacacacgctgtctgatgaacagaatgaggattttgatattgaggtctgctgttttaaccttatgtgtttattgtttattctgttaccacatctatatgtacttaatcaatttttatcaatcttgctagcatcaatctgagcaaaaggatgattcatgggatgtttctcctcctctttctcacccttctacgatagtccaagatgatgaattcaagaagtttcaagatgaatccattgatagaacaactttgacaaacacggttagtgtaatatttaatttccaatatctctttggtagaattgtttacgtcaaaatattttgtttcaggtgattactgatgaccccatggatgtcaatcatactccacatgaatcacaggattctgaaaaggatgatgcaatagaggacaatccaatttatgacactggtgcaaaagatccaaatgacaatgaaccagatgatgagggaaaaatccaggtacttttataaatacaaacacaacacatcatacactttatttaacagtttataggatctgacacatttgactattctactttacaatcagtttgattcaagtgcaaacgtaagcaacaaaaaacaatcacctctcgaggaacacaatattatggaggtaagttaatacatcatttggtgcaacacatcggaaatggttggtgcatcacagaccgtaaacataataattgcacatctgcttagttattatggacaggattttgtggatacttacgagtgtacttcaacattcaggtcaatttggaggcgggtgaagcatctcaatcagtggtggagccgcatcccgatgaccctatggaggtatacattttcaactagttccttgatttattggacaccggtgagggatgcttcatcactcagtccatgtccaaaaaaatatttacaggccaattctccagactgtaattctccacagggcaatgcagcatctctgtgcattctaaaagatccaaatggccatgaagcagatgatgagggaaaaatccaggtacaaaaatacaaacacaacacatcaaacaatttattttacaggttatagattctcacaaaattgactactgtactttacaatcagtttgattcaagtgcaaacctaagccaaaaagaacaatctcatctcgagcaagacaatattatggaggtaagcttatatataaaccaaattattgtcagaactttattaaaccaaattattgtcatagcccttaagacatatctgtttgtaattcataattcaggaaaccttggagacggttgaagcttctcattcagtgttggagacgcaacccgaagaaaacattgacgatgatcatatgacggaggtaagctaatacataatttgatttaacacattggatttagtccttaatataaataatgactcttgtgcatagttattgtggacatgattttgtggatacttactagtgtacttcaacattcaggttactttggagtcagctgcaacatctcactcagtggaactacctcaacccgatgaccctatggaggtatacatttttaactagttccttgctttatttgacactggagagggatgcttcttctatcagatcttttccaaaacaaaatttataagccaattctcaacagggcaatgcagcatctcattcattgctagagactcaaccagaagtcaacagcgacggtgattctatgaaggtatactgtaacaatcatcatcaagttttatgtgttgtggttcttgtgtaattggacatgattttcttgttacttcataaaatgtaggcaaaatttcttttatttattctaactagctacatgtctacatcaacattcaggttactttggagatgcctgcatcatcgcattcagtgtcggaggctcaacccgaagaaaagattggcaatgatcctatggaggtatacatttctaactagtttcaactaatgatttacattcattgatttattggagattgtagaggtttgatgcatctctcaggcattatgcaacaaacatttatagaaaaatgctcccatgttcactattataatcgacaggattttgtgtataccttaacatttgcagataatattatcttatgtttttttcaccatctttttgtgtactgcaactttcaggacaccatggagacgcctccagcagctcattcattgactgggtttgtaatgttctccaaaaagaaggtcatccttatgtctaaactaaattaggcttgcatgttcacttttatattggattggagtttgtgtattcgaaataatttccaggttatatattcttatgtttttctcaccatcaggtcaccatggagacggctgcagcaattcattcaggagtttgtaaagacaacactgatcctatcaaggtataacatgtatcataattttctggtatgttttaatggacagctctgtttggattgtttttaaaattatcttcttattccaggcaatggttgtgtttgtgaagcctgtatttcatacaagttccaaagctgacaaagagccccaatcatctcccacacatagtcccaatattgtgggtacaaggaacgaggtattgcgtaacatatactgacttttgttaataatgactagggaatgatttttcagttttgtaacagcttgtccctattggtctgatattatatcttcctgtacaggataataactcagaacactctaactctactgcccgggaaccagatcaatattttgagttatctgattcatccccggcgcgtaacagagaaaaaccaaatctctcccaagctgaagcacgtctcgtagccgagttcacatctcaaccaatacttgagacacaagcacttttaccaacactaaaaaaagcggagtattcacagtttgtcaaaaccctctcgagctctccaaatatgtatggttatcattcatttttcttatttccacaacattcatcatcaagttcatctctaatgctgtttttttacctcatagtgaacatctaaccaagtgtggattccttatttccaacaaattcttcgtcgaacttgccaaacctcagcaatgggtttcaaccctggtatgtagtccactatatttaccttagtacaaattaacctgttaacaagagatactaatgtgtaaatgttttatttcctagcacatggaggttttggtgtcattactttctcggaggctcagaactacacttgagaatcatcgttctgcttttgttgatccatggttcacaagccatctacaagctaaatttagagccttcaacgctgcgaaggtgaaatcacgtgttcgttggtcagaggacatgcagcgcttcatcaaaggatccaaaactgaatggttcaaggacatagatacaatttacgcacccatga

SEQ ID NO: 23407 - DNA, 3636 bp, Arabidopsis thaliana
tcatcttgtgcaaccatggcgtaccgagtatgacattatagatgattggttgtcaacaacggcaaattcaaaccaggagaccgttccaccaacgtagattggcaaggtgatcgtgccgacggtcattattgtgtctccgtcgaagcctgttagcggttgactttgtcctggaacgatcgaacatcgatttccagttggagaaggacatctttgaaaatcacgtttacagagaactagcgggtcgttttgagaattttcgtgacaatactttctccgatctttaattcgacaactagcgggtcgttgtgacttccaggaagagcgatatcggcctcagaaaatgtgatgggttcgttgcattcaacggcagaggtgtttttctcgatccatgcacgttgcttctcgcttggcggcgatagcttttgattgaccgaactgaatcgcggcatgccgtgaggccgcccataatcatatttctccgacgcttagaggccggctcgtcctcgaattgtcgtggtgcatcgtgatttcgtttatggggttctgctcgccggtcatcatcgtgaatgcgttctgctcgtcgatcagtttcgtcttgtcggcgtttatcgtcttgattatctcggtcggtattctcgactcgacgatgcgtgttgtctctgtcgtttgtgcccgtacgacgtcgatcgggctctatgtcgagatcgccttttttaaacttcgtcaggaggagagtttgtaattgtcgacactcgtcagttgagtgtcctggaattttatgaaactcatagtatttttggtctcctttggcatcggccgatcgattccacttattccatggtttatcagatcgcggtgccgtgtccccaacgtagtatgacgttcccttttttagtttctcttccttagcgtagtcagcgtcgtagtgctgtcgagactcatgatgcccctccttcggtttttcctttgcgattggtgctttcgccgagccctgtcgatgaaacggtttgcacaatgtagtgcatctgctagagtcgctggttggttaagcagaagatcttctcaaaatcgtgacccgtgccagagcgcattccgcagagccgcaattgcagcatcgtcaggggtggctacgctagtgacgatttctttgaatcttccgatgaaacttcggagtgattccttagcggtttgggccattgtccacaggtcgacattagaagcacctttctccatgaaaactccgtagtttttcagaaaactagtggtgagtgcgtggacgctgtcgattgaattggcttcaagtcgagagaaccaagtaagagcggcaccacttagatgtttcacgaagagttgacaacttccagcatctcggtcctcatcggagaagtgtgcacggccgatcgctatgcttacagacgtcaagaatggccttgggtcaacgagtccttcgtaatttgccaacttaattttgctgatgtggcgaatgcgaacgtcggagatgcacgaagtgaaaggagagcgttgcgtctcttccaatactttatctacttctggggtcgagctgacggcgcgatgcatcttggatgacgtatctttcaatgtggttcgtagttgctggagttcccgatcacgcgcaccggtatcatcgtcttctgttcggcgtgctcgagtgtcgacgttcggtcggttgtcacggttcggcgcattttcacgagtgtgctcgtcgatggacccaacgacgatggaggcaggcctgttgcgtcggtttgccgatctttccatgactggagttcgctggggcgggattgtttcgtcatcgctgagctgtcgacttgcgcgacgtgcggaggactggagttgctcgatctgattctgcgaggcctcctgggcggcaactatcgcgttgatgcgttcggaagttcttgcgtcctgtaagtcgagtcggtcgaggaaagatcggatgacttcgtcgagattggttcctcgtggagttatctctcctaggtcggcaggagctgcgacaggagctgcggctggaggtgcgacaggaactgcggctggaggtgcgacaggaactgcggctagaggtggcatcgtcgggcgagctggtgggggcgtcgtctgccgagctggtggtccggcaagaggcgcgctggttccgactccttgctcgttcgaggtttccgtcatctcgtcgtggctctccgggattactggcaacatcgtatctgtttgtcaatatcagaagaaactctgtctggccccacggtgggcgccaattgtttgtacagaggttgtaacaataattattaaggggtttggggagaacggagtagcttctttattaatgacgaacggaaagacagtaattaacagaacggaaaaccgtaagtacagaacggagaaccgaaagtacaggtcagaaaatcgatattaatggtcggaaaaccagaaaatacagaacggaaaaccagaaaataagagataaagaggtaggcagcaattctctcttaaatcctctgagtggtgacttaggttctggatccctcttcttagtagtgtctcctcttatttataggcaagaagctgatctagggttctcttagtctctctagcgatttctccgttttgcccttctgaatttatcgggctgggccaaaccgtgatgggccgagctgtgatgggccgagcagtcattctgatgggccgttgttctgatgggccgttcttccttgttagtagctttcttgacttgttctatttgtgtttgggccgaattgggcatggagggcaaagcccgtatcccacaatctcattggcggtccgacacttcacctagaacatgacagagaaatcgactcgatgtacattgagggtattaaatgcgtaatagacatgaaaccatgcacacatctaaattctcatgtacaaaaagacactctaaaaacatgccccgtatctgctcttatacaaatcgtagtgcagtcgtccgtcgacaggggtatacttgtacatcaattttcatcaaacatgagcttcaccaattcttatgtcaagtcgcttgatatcaacatatgatatcatgtaattctatatactttccctcttcccgcaggatccaaaaagttgtgcagaacaaaagatcatccgagaatatcatctttcatacactaaaacgattactttgaatccgaattcttgatctagcttaatttagtttaatactcatgtatcgttatttttagtagtatcaaaataatttgaaaaaaagatggaaaagagaaaaccacgttgggaaaattccagctagggattcaacagaggcacacaagtgtgattcttcaaaattccaaattctttatattgaaaagcttactgaattataatacacattacattgttccaacttcaaaacataggcactcttaaacaaaacacagaaatacaaaatctcttaaaacttcaaacttcccaaccaaacaaaaccacataggctattactacttagttaggcggcttgaagaacttgagcttaagtccattggtaaccatactccagatccacctatggagaatgccaagctgaatgcaactcccaaccaacctaatccccaatggaaatccaattgaactgta

SEQ ID NO: 23408 - DNA, 480 bp, Arabidopsis thaliana columbia
  unsure (1)..(480): unsure at all n locations
nnnnnnnnnnnnnnnnnnnnnnctaaagtcaacctgccgggcatgccagcaccggcaaagcgcgaacgttacgcagctgacatcacttacggtacgaacaacgaatacggctttgactacctgcgcgacaacatggcgttcagcctgaagaacgtgtacagcgtaaactgcactatgcgctggtggacgaagtggactccatcctgatcgatgaagcgcgtacaccgctgatcatttccggcccggcagaagacagctcggaaatgtataaacgcgtgaataaaattattccgcacctgatccgtcaggaaaaagaagactccgaaaccttccagggcgaaggccacttctcggtggacgaaaaatctcgccaggtgaacctgaccgaacgtggtctggtgctgattgaagaactgctggtgaaagagggcatcatggatgaaggggagtctctgtactctccggccaacatcatgctga

SEQ ID NO: 23409 - DNA, 3492 bp, Arabidopsis thaliana
tgttggcggcttctgcctgtctgttaccttgtgggtaacggggggggggggggggggtggatgtggtaagacggatctttcacttgtcgcaaaatgcgttgatttttcccgaggtgaggttagtcccattatcggtgatgatctcataaggtatgccgtgtcggatacgatgttttcccataggaagtcctcgacttgtttctcggttacctgttggaaggctttagctcaatccatttggtagaatagtcgatgaggaccagcaggttttttagtctcttcttcccaccggaggcttccatgggacctacgacgtccatcgaccacttcataaatgggtaaggggaagatatcgaggacatttcctcgggaggttgatgaagagtaggtgcgtgtcgttggcatttatcgcacttgagtgaatgagctatgcaatcggctagcattgttggccagaagtggccttgctttttgattctgagggcgagggtacgttcactacagtggctaccacattgcccctcgtgcatgcttttcatgaggtcttttgtttgttgcccgtaggtgcacaccatatagggacatgcgacgctgcgtttcataagtctcccttccatgatgcagtaccttgcgttctgggctttgagttttctggtctcccacttgtcgggaggtgtgatccctcgttcgatgtaatcgatgattgggattctccagtcgttgtacggttcaggttcgtacgaggcaggttgttcgggggtttcgagctccagctcttcctccgctgcacctgcctccgcgactgctacgagggctctagccgcggcggtggtgcttcgggttactcgcgtaaagttgcatgttgccgaggtttccatcccagcatgtttgaccgttaggtcgatgctcgggtgttctattccttcgactgggataattcttttgacgaaaggatctgacgggataattctgcagaggtgttttctcctcaggggatcctggtcagttcaaacgattcgaagtgttgggtcaaggttttgactagttcgaggtacgcttccatgcgctcgtctttagcttcatattccccgtggaactggctggtgacgagttgggagtcgctatgggcgtgtatatcgcggattcccattccttgagctagcttaatgccagcaatgagggcttcgtactcagactcgttatttgatgcgttgaatctgagtcggaacgattgttcgatgacttccccgataggggaggtgagttgtattcctactctggatccctgtcggttggaggagccatcaacgtggaggagccatttcttattggagttggttccatccaggtccgctaacgggagctcgattacaaagtcggctaggacctgtgctttctggctggttctggtacgatattctatatcatactcacttagttctatagcccattttgcaagtcgacctgattgagtcggactgaatggttctgattggttgagacgtcatcactacgatgggatgtgattgaaaatatggtctcagttttcgagctgacatgactacggccagtgccagtttttccatttctggataacgagtttcggtgtctatcaacgttttactaacataatagatcggtttttgtccttcgtggtcttctctcaccaggacgccgcttatcgcggttcgggagactgccgtgtacaggtacaatgttctccttcttcgggttttgcgagtatgggtggtttggacaggtacgctttcaattgtttgaaggcttgctcgcagtcctcgttccaatcgaactttttatccttttggaggagctgatagaaagggacgcatttatcggtggacctggatatgaacctgttgagtgcggcgatacggccgcttagttgttggacctcccgtgccgtttttggcgatagcatgtcgatgaaggttgcaatctccttaggattggcctcgatgcctctttcggttactaggtatccgaggaattctcctgagggaactccgaaatagcatttctcttaattgcgggacatggtcattttcgcgagctgacttgaccagcatgtcgtcaatatagacctccatcgttttacctagctggtcggtgaacattctgttcaccaatctttgttaagtagctccagcgttttctaaaccaaagggcattactttataacaataggtgcctcggtcagttataaaagctgttttttcttggtaatctgggagcataagtatttggttgtacccggagaatgcatccatgaaggacaatagttcgtgtcccgcagtggcctcaaccagtcggtcgatatgtgggagtgggaaactgtctttaggacatgccttattcatgtccgtaaagtcaatgaatactctccacttcccgtttttctttttaacgacgaccgggttggcgagccagtcagggtattttacttctcttatcgatccgatcttgagcaaccaatcgacctcatcgtgcacagctttagccctctcggtacctagcttgcgacgtttctgctttataggtcggtaggtcggatcgacgttgagttcgtgtgaggttacctcgaggcttattcctcggaggttcgcatttgaccaggcaaagctgtctttgttttctttgagaaaggttatgagatcctcttgtatcgctgggtcgaggtcttgacctatcccatcgcatcgtttgggatctgattcgtctatgcagacctgtgttatcaatgactttcgaggtccgcgttgagaaggatcagaggatctgactgttttcatttccgcgagtttgtcttctatcattagtactacggggtcagcctttttgataagatcgtaactgcccatatagcattttcgggagctgcgttggctgccgatacgactgctattcccttgtccgaggggaatttaatgcattggtggtaggttgatgggacggctttcatggcgtgtagccatggtcttcccagaattgcgttgaaaggagctttcttgttgactacgaggaaactcgtgagtcgcctcactcctcgtgcgatggttgggagctggatggttcctagagaaaaggtcgtatctccggcgaacccggtaagtggcgttttcctgccttgcagctcggaatcgaggtgccccattcttttgaaggcgtcgtaaaagagtacgtcaactgagcttcccgtgtcgatcattatatgggagagttcgtagttgcctacatcgattcgaataacgagagcgtcatcgtgaggtttattgaggtcggtggtttcgctttcccagaatgtgatctggtggttaggtcccatcatcgggctcttgccttttgtgtaagaatctgccttcctctgatgagttttgatcgaattgattgagtcgttgcagagctgagaccctccgcatgatgaaatcgatgcgtttcggggagaggtgctcggttgcgcttctgcagaatttc

SEQ ID NO: 23410 - DNA, 3365 bp, Arabidopsis thaliana
cacactactcgaccccctggtcgtgatcatcactcaacaccaatacctccactcgaccaagactcgatcacatcttcagaatctactcaaatccgcactcaaccagacaagctgagcattaggaagagaagaggagaagaagaagtgtttggaagcggtccggagcttcatccaatcacgaagcccatctcggtccattatcactctatgggccagggcgattaggttcccggcccatctactgtcattttatttcgttttgtataaataggtgtcttagggttttgtcctgggacatctagtcgacattgagtttttgctttcagttttattttctgttttactctggctgcgccgcttttgtttctacaacctgtaattcgagatttttccaagttattcagattccgcatttgatttcatctgtcatattgtttctctagtctttatctcttcacttatgcaatatacttgtttacctgcatttatgtctttgagcatgttgtctgagtagtgacatagagttcttaaggatgggatagaatggttgtggaatccttagtctgtagaatggttaaggtttagaattgattgaatcccttcaggactagttatgtttactgcttatttctttctaatcaactggaattcgatccaaggcattcccgcacccagaaggtgtttgatggaatgcttgatccactagttcctgagatattcatctctatcccaagggattggccgtttagagcatttattgactttatcagtctgttcttattgcctgcatagttagattccgttaatggaaattagtttgggctagctttgcttgaggatttctatcaagggagtgaattgatctgttgttgaacctgttgtctagggatagcttgattgcgcttgttaaccattcgaataggctaggataccactctattcgattaccccatccttaggaatttctcgtctatctgatttctctgtgttatcgttatcgctaaatcgttctcattgcttgtttcttagtttttgcaattactccaccaacttactcgaccacacccagtgtctggcaaaagactgtgcagtcgagtatagctggttcatatcctgtctgttactcgacctgttactcgaccatatcctacttctggcatcagcctgttgtggtcgagtgattttagtaattctgttattgtttctgttttctgcatgttcgcttaggactgttagaaaccccaaaactgttattgcttggcttgacttagtgacttctgatcacatctcatctgtttgcatcacacccatttggattgacacctaaaatactacaacgacatgattggtgttttaggataattgactaaaaacctattatcaaggacatagaaactgagtatgagccagagtcatggcttaaggagacaaagctgatgaacaaacccgacgaggttacagtggaggagtatatcagattctttgagatgaatgacttctggggaacgaggtatccgtgctatgagaatttagcccagttggggttactggaggacgtgcagcatctgttcgagaagtgtcatctggagacactcatgtcttacccttaccttgcctatagggaagagacaatcgagtttcttttcacgctgcaagtggagatgtataaggcactcacaaacttttagctggataccatggggttaggcttcttgacgttctcagtgaatgaacagcggtatcagctttcgatcaagaagttagaagaactgtttggttaccctagtggaaagggaaccaaacccagatttgacagagaggagcttaaggatttgtgggccactatagggaacaatctaccgctaaactcggcgcggtctaagagcaaccaaatccgaagtcctgtgatccgctactttcagcgatcggtcgccaacgtcttttactccagggagtctacaggcaccgtgtctaacacggacatggagatgatagattatgcgcttacagggattctccgtcggacgaaggggaagaatgtcttgagaagcgatctcaacaacgcaccaccagtaatgcctctgttgatccatctgtgtggatacaggaagtgggcgttgacgaacgggaagaagaaggtgagaggagcactatgcgtgggtggcgttgtgacgccaattctggaagcttgtggagtaccgctcaaggaaccaggtttagcaccgaggatgatggacttggatcatttgcgcagatgtgagttcttggagtttgacatggctggcgactttcaccgctacaggttcgagcattcatcgattagaatcgccaacattcttctcccctacattgacgctactaggattcttgagggcaagaacattgacttcaagcctgcgcttgaagatctttatttcgagggcagtccgccaaccgaggagtttagtcacaccgaaggagctacaacagaagatgttgatgagacggatgatatagatgaggcgaagtttgacacgagcatgtatcatttcagtgagcatatacctcctgcgagggaaagcaagagtttgagcgacgtcacaggaacaacagcaagctgcaaaagtggtgcaagaaacaggacaagttactcgccaagtgcttaagggctatcaagtttctaaaggacaagataagctgctcctcttccactacagctattccgcagggacatctccctcaggacatgccttcgaggagatatgacgcgcccgagccaagtcggtgcaggcctgagcctagagagcaggagattccgcatgtccctgcgaggcattcatcatttgagcttcgtgaatctgggaggaagaggaggaccacactcactcgatctagcagtaggagcggacgacttctgcagtctcgtagtttacgcgaccacggtgctggccgcagtagaaggagagaggtcgagtttcctcagagcggtactggccgccacagagctgatgaggtcgagtacccacccgttggagctgatacagaacaaggcggttcgtctatggcctgggagcaatcgcaggcagccattgacgagcaactacgtttatttttcgactgaggtaagcgcctcacttcaccattgtattatatcatctgtcttgatttgtttcttcattttgtttctgtgattggatttgtcctgtggactgtgtgatttaagtttgggggagggctcaaaagcgcgtcatgcattgtatatatttttgattctgcattcatctaaggcatagaaaaaccaaaaaaaattgaaaaatttcacataatgatttcacaaaaaaaggagtgttcatgtagttgcattacatttaggatcaagtctagag

SEQ ID NO: 23411 - DNA, 3118 bp, Arabidopsis thaliana
tatttggtacatcaagaactaggtttacagaaacgaaaaaacatttatgggaatatcttacaataagaaatgaaatattttacaaaaacatggaaactagttacagatcatacattaattaacaacttaaattcaaaaataaaatttctcattggattagatcaacttgtcctgttatgacccaatctaaaaaaatcaactacaagtactcaaaatggattagaactacattacctattaaaaagcatctccatatggatacggctttatggataagcaaacggtattgcagaggtttgcgatacaatcaagatatgtttcagcaataactaattataagaactgaaatattttacaaacaacatagcaactagttttacaataagaactgaaatattttacaaaaaaaaatagcaactacttaatcatcatacatatattaattcaaattggattagaacaacttgtcctgttatgacccaatcctttgcagcgtgacgacctgttctgctgcgtccttcctgtcttaggtttctacgtttaccatgttaaccaacatgttgcattagtttggttagtttttcaaaagcttagacaatgtacgagatttacaaaatatttatctaaccttatattcccctgttgatggtattcttgctacctttaggcctccctgatggtctccgagtatatggtggaagcatggaacggtgtgggagctcttccggtatgtcttcttctttgccatttgcttcagggaatactgctcctttgtaactcgcaacccatgagtgtggtttgaaataatcatcaactaaagccttgtacgagaggttaatgctattggcagccaccaaagcatgaccacatggtatcttcagtttatcatatctcttgcaggtgcactgcttcttttctagatcaacaacattgctaccacctagcttcccaactacctcgtagctccagctggttaccctaccaaccttgcttccacttgatgttgtcaagttttttgaaatttgcttgtcaacctccggaggtactggacctgaatgtgcttgtgacttcttccgacgcgcgttgaaccaacgtgtcaacatagacctaataaatcttaggaattccacaatatgtgacgatctccccttgaacaacgccttgtttaacgtttcagcaatattgctagtcatcagattgaaacgctggccagggaaatatagccttgtccaatgagccatccctacgtcgtgtagatactttatgcaaagggggttaatggcattaatctgattataaagcgttttaaactttccactcgtaaactcatatccagcgtttttcactaactgcgtcaatcctctgttcttgaaccttgcttgtatattcctacataggtgaataatacatgcaccatgatgtgcttgcggaaataccttcttcacccctacctttatcgattcgtgcctatctgataatatagtgagtgtgttgctgtcagctattatcctctccaactttgtaaagaaccaagtccatgcatcatcgttctcgctatccaccacagcaaatgcgagtggatacacttggaagtttgcatcttgaccacttgctgtgagtaaaacccccttgtattttcctttcaaatgtgttccatccacaaccaaaacccttctcagatgcttaaaaccttgtattgaagccccaaaagctaaaaacatatataaaaacctctctttcctttcatcttcaatatcaggttcggtttctatatgtgttatcgtccctggatttgttaacttcagaagatgcaaatattcagccaaattgctataagactcttcatcactcccgccaacatctgttaaagctgattccctagctctccaacactttttgtatgacgcagaaaccctcaaatcttctagtacaagttgctgaagatccattggaacaggaccagcagaagcttcactgtattttgccttaaatacagatgcaatcacctttgacgttgctttcttcatgtactgccttctagtatcaaccaaacatgtgtgttgaagctgcgctttcttaatttcatagtaacctgtgccattcattacagtggccaatattctccaatcacatttctcatctgagcaactgagaacaaaataattccattttgttcttgtttgcttgaaatgaaactgattctttatcgcaaatatagccaatcctatttggcaatcttctttgctcgcatacacttttccctggtatatacctttaccatcatcatcaatgtccaaatcaggtaagttatcaacttcatactcgatgtcctcaaacaaaggtgggatgtccaactcctcgtcatccacttcctccaactttttgacctcattactcgtttcctgaaagcttccaactccaccgaccatctttcctttcataacttgtggggtcttttttgtatgctctgtctttatactttcgccagccccattcacatatatagcgtgatcaaagactccgttgccagtacagaaaaccacttcatccggattggagcccacaaccttattgttagacccgtaccttacatctaaacctcctgttgccatcaactcattagcattggagccaccataatcatctgttaagaaatttgaccaaaactccttatcataaccgccacagggcatactatcttcaggtttttccgtgactgcttcaacttcctctgtatcgttatcaacgaaaaataacttttcaacatcattgttaaaaccttcgttatcagtatcattccgtgacgatttatgcccactgttacttcctatgtttgcttctgcttgttccaattcctccatgaattcgtcatcacgaggagtcaacacaattgtaggagtttttgaaacaaatacaagtactcaaaatggattagaactactttaactgttaaaaaaacatctccatatggatatggctttatggataagcaaacggtattgcagatgtttgtgatacaatcaggatatgtttcacaataactaattataagaactgaaatattttacacataagataatagaaaattggatagtgataatactgagtgactcaatga

SEQ ID NO: 23412 - DNA, 498 bp, Arabidopsis thaliana columbia
atccttgaagttcctgagaatagttgtgtactctgtaagcaaatgcttttccctgttctccattcccttcatgaacatctctttccaatctggttcaccttctttctccttttgatcctcttgttgttcaccattgaaactgatatcagactccttctctgaaacattactcggcacagaatctatcttatcagattcaccttgcttctccaaaacagaatcaagaacagaatctgtctgatcagatgcagcttggttctctaaaacattatcaagaacagaatctgtcttatcagatgcatcttgcttctctaaatcagaatctactttttcagtagattccaacacagtgtctggatttgtacttgggatggtactatcttctgctattgtcgcattgcgggtctgctcgaattttacactcttcacaggtgcttctttcttctcctcacccgtttccttttgatgttcctttatctcttcactgatatctaaagt

SEQ ID NO: 23413 - DNA, 575 bp, Arabidopsis thaliana
tcttgcgtgcggaacacagctgcgttgttctgcataatcctctgcatgttcaatctgatagttgaagtaggtagagacccgtttgagtttctcaacctgtccagccatgcaatagtcttctcacccgcatccttctcaagaggtttctgtttctcccctgcaccaatcgaataaagaaaaaaaaatgatcagaagagacttatcttttataataacagcagtcctcaaaaaagactaacctggtttgcttatctctgcaaccctatttgcacaagcacgaccaaatacgacaatgtcgagcagtgaatttgcaccaagcctgttggcaccatgaacagatgcacaagctgcctccccagcagccattagcccaggaatcactgcatctggatcatcgcctttgatggtaactacctgcaggatttaacagaataactttcagagctaggcttctaatccatctcatgcttaactccacacaaatttcagcaaagtttcttaaatgacttttcttattcttacctcgccatggtagtttgttgggatccacccatgttataatgaaccgtgggtaa

SEQ ID NO: 23414 - DNA, 428 bp, Arabidopsis thaliana
gccagtgtgctctaaaggtttgatgaattctgcagtcagttccggcagttcacgctcttcaactttcttcaggttgatagcgaatttcgctgctttacctttcaggttttctgcgtggtattcttccgggaaggtcacgtcgatggtgaactcttcgccagctttgtggcctttgataccgtcttcaaagcccgggatcatacgaccctggcccatcgccagtacgaaatcagacgctttaccgccttcgaactcttcgccgtctacagaaccggtgaagtcgatggttacgcggtcttctgcttcaacagcgccgtctttttctttccaggtcgcctgctgtttacgcagagtatccagcatgccgtcaacgtcagcgtcggtcacttcaacgatcggtttttcaacttcgatcgcttccagaccct

SEQ ID NO: 23415 - DNA, 2864 bp, Arabidopsis thaliana
atcatttaacgacgttaaatgttaaccatgtgtatataaatagatatatagactttttattcaaaatcttacaaatatattggtgtggtctagtagtaacaagtagtttatttaatgttactgcgttaatacgattgataagcaggttttttacacctacttatatgttgaatgtgtgtgttcagttcaattcctctaaaacacaaacatgtcgatgcagttatagagggtgtcaatccagtccactgttattgctagcaattaagatgtgtacaaaaacaactaagtcaagccatattataatgatggtggatttctagtaacaatcctaggtcaggattcaaacaagtaaaaatgagaacttaagagccatactcgatcattgggtcgagtagaaccaacatgtgacaaatttaagaactaaaatgcaatcaacaggcaaatagaggatacaaataacaggtaaataaaagtgcaatcaacaagggatacaattaaacctaatagaagttctaaggatggattcattgataagggtaactctagggttcatgtcacgaccggtcccgcattcataaagaggccggtttgttttaggggaaaactagaccatggtcgagaaacggactaaaatacttagtcggaagaatgagaaagttcaagctgaaccagctaggtgagctggacaagctagcatgaactagctagctaagctaggtgagctaaaccagctggaagactagctagctcagctaggtgagctgaccgacaactcgactgagctcggtgagctgatcgtgtactgacccagctgggtggtccggtcagctgacactcgagctggtggactgtggtagctcacgggtgaaaaggtgtctcggccaaaaggtgtaaggtcgagcgggtaccaacgaacggttgcatcgcccaatagatgcaaggaacggatgtgaccttttggaaggatgcaaggtacggatgtgacctttcgaaagggtgcaaggaacggatgtgatgcttcgggaagcatccattcgccccctatataagggaggacgcccaaggcctttgggatcatctcacaacatccacacaccacaaaaaattctcaaaacagtcctaacacatcctgaagttgttggtcggaaagggggtgcggctcggcgagtataactcgaccgaactgatgcgcatactacctcccggtccaacggttcgatgtagtgtagagaatggagagggtagaccgttcgtcttagagacgaatcggatctggtagaccgatcgtcggatcggatcggccagaccgatcgtcggacggatcggatcggccagaccgatcgtcggacggatcggatcggccagacggtcaattccctaacgtgtaccttaactaataagttagatcgttacataccttggccaatatgcggatttgactccttagcccatttgtcgccttattccatttgtttaacgattctaatccgatcgtgtattgatggaccaatctatatcgttacttagccatataaccaaccaaccccactgatctaagtacaacgatagagattggggatcgtacgattcccttgtttcacgatggccgaattaaactattggctcattggtccatccgttctccagacgtacgtccctccggctacatggtgaacgattgagcgctcggcttatcgaactatccatgtttccgatccggtcgtttaacactacgaccgcccacggtttactaaccgtttacccgtccggtccatggtggtcgataaagctttcggcttaatgatccatccatgcggtccgaacgatatccttatcacacccaagggtccgtggattcatccatcggatcatcgtaggctagcccatgaaatccttcctccgtcggcgttaggtttgctcacgggtccaacatccgttttgtccatcggttcccaccgtggactttcccgttggttatccgtcgagtcaccctttggtcttaccgatctccgatcggtttcaccatggctaaggagatagatacatgaaggcagccgcgatattgatcccatatggtgaatcacgttccttacccattcttgctgctttctccctttaccagtaagattgcatccatgggcgacccttgggtgtgttcggatgcacttatccttgtccttcctcaaacacttttcttgatccatcccatccgacgatcggtctgtccgactcgttccgtctgacgatcagtctatcccatccgacccgtccgaagatcggtctgtccaatccgatccgtctggccgatccgatccgtccgacgatcggtttggccgatccgatacgacgatcggtctaccagatccgatttgtctctaagacgaacggtctaccctctccatcctctacactccatcaaaccgttggaccgagaggtggtatgcgcatcagttcggtcgacttatactcgccgagccgcaccccctttctgaccaacaacttcaggatgtgttgggactgttttgagaatattttgtggtgtatggatgttgtatgagatgctctaaagaccttgggcgtcctcccttatatagggggcgaatggatgcttcctgaagcatcccatccgttccttgcacccttccgaaaggtcacatcccttccttgcatccttccgaaaagtcacatccgttccttgcattctatgggcgatgcaaacgttcattggtacccgctcgaccttgcaccttttggccgagacacctcttcacccatgagttaccacagtccaccagctcgagtgtcagctgaccggaccacccatctgggtcagtactccgctcatcgagcttagtcgagctgtt

SEQ ID NO: 23416 - DNA, 3456 bp, Arabidopsis thaliana
ctctagagaagcgttcatagtgctcggtcgtgcatgtctagctgatgtgcgattcttttttactgcctagcaaatctctagcagaatttgcgatggatttgcaagcgttctgcaacgttttttctgatatattaagacttcattagtgtctgattagtctctaattacctagttaattagttgttaattatagatgattttgtatgcaattcaaagctgaaatttcattaacttgttctaaatagataaatacacaattgaagcttaaattcaaaaacaatattagattgtttgaaactctaagaacttgttctaaagagagataacaaggaaaaagcaagacaatgttttcaaaatacagttgatagaggagaggatcctgttgcaaggttagctagggcagcagctgctgtctcctcattggccacctccggttctggagcagtagacacaggtggttcatttgggttggcttgtcctgtctgtgtcgaggaaccacgtcgaagaattgcagccaaagcaggatctttttcagcaagatagtcaaacaggatgtcgaagctattgatcctctcagcctgagattgaatgcatgcttcagcggcagcagcttctgagaaagtatgaccgaatcatcactaggaagcattggaccactatgggctgaggatgcttcaaactgcagagatccaaccccataaatccttcctttctttcgcggagaacctgcaaagatcacaaacactcacaaggacacaacagaaaaaccatgagaaaccaagttcaaaagaattcagacacaaagtataatgaataagctgccaagactaagagaactttatatcaaacactagcgacacaacacaaacatttcagacaagtacacaacacaaacacttcagacaagtacactaaagaattcagacaagtacagaagtacacaacagaacagaattcagctgccaagtacacaacagaattcagacaagtacacaacacaaagaatccagacacaaagtataatgaataagctgccaagattacgagaacttgatatcaaagactagagacacaacacaaacatttcagacaagtacacaacataattcagacaagtacacaatagaattcagacaagtacacaacacaacaagctgccaagtacacaacataattcagacaagtacacaacacaacaagctgccaagtacacaacataattcagacaagtacacaacacaacaagctgccaagtacacaacataattcagacaagtacacaacagaattcagacaagtacacaacacaacaagctgccaagtacacaacataattcagacaagtacacaacacaacaagctgccaagaaaaagcacagaagatttacctcagtaaaaatcttgttcttggcatgaacagacaatccacctgatccagtgctctccggattgtccattgagcacatatgtgactcttcctcttctatcctagatgtcacttgcttgtaaatctcctctgacttcccatcgatgaaagttccatccgcttttctgtgtgtctcatctagcagctcaaggaaatcaggagttgtttctccagtttctcacactgaaacacaaagagataaacaagttagattcataacattgtagattaagtaatggtaaggagagaagactacttatcttacccgttttcttgcacgagctttgtaagaggtctggcctgaacggtgtttatagatgcctttgccatccggatcatgatatctagcatttctgctgttgttactctttttctctgactttggatcttgccaaaactgtactagacctttccacacatcaggatcaatccattttggcttggcttcatcacccttctccttccaatttcccttccaccttgacacttgatcagacatcctagactttagctttgcttcaaactcaacccttactcttttgttaattgaacggtcccagttatatacttgctacaaaacagacaaagcaaacatcaaacatcagactacaaaatagacaaagcaaagcaaacaaaacagacaaagcaaacaaaacaagcataaacatcaaaagagcacaaaacttaccgcaaacgtttcataccatcgatcgattgtagcctttgatgtctgtgaccaattggcatgaggttctttgaaatctctttcaaatatgctgcggactgttgctgcaattgtagagtcatcgtcaaacctacaataacagcaacaaaacacataaggatctctatgtctttatacttctaagaaactacaatgctaagtacaaccaacctaaatccagagacttctaaggcaggaccaaacttctaaggcagaaccaacctaaatccagagacttctaaggcagaaccaaacttctaaagcagaactaaccaacttacaagacctaattccagagactataagcttaaccttaccatagagttcccggaggacgctttgggtctagccttgtcaagccagcacgaccaggactatcgaggagctcttccagtgtcagattgttgagacggtcagcttgaacatcagaatgattgacagaaggctgagtcgttggcgttggaggcgatggtggaacggttgaacctgaacctgaaccttgaacccctgagatattcccaccactaagcggagaattgacatgcaacgggtcacgctgctgttgtctaaaccggacataagtattatccgacggcatcttgcacaaaaaacaaatcaagtgttagatctgggaaaaaagaagtaagatcggatcgaagaagaataggtcagatttgagagaagaacttagatcggagaaacagaggttacctttgaggccaaacagatcgagtcagagaagaagagccgcggcggtgtttgaatacagatcgaagaagaagagaggcggcgaagagagtctgcgtcgtaatcagatcggagaagaagagaggcggcgatgagtataacagattagagaagaagaagaagagaggcggcgacggaatcggatcggagaagaagagctccggcgccgaagagatcagagaagaagaagagaatcgaagaaaatttttagggttagggtttgatgcggctgtgtttgctccgctcaaactaggtcttcgagtatatataggaatttatttcctcgcaaaaccctcgcatagtttgctttgaaattgcgaggaagatttttaaaccaattaaaacgcaccacatattgcgagggaattgcgagaacacctagcaagtccctcgcaacttatgatttttaataattttgggtttagggtaaaatttacgacggaagtgcgagtgcgtctagcaattccctcgcaatccttcaaccaattaactccaccattttgatttagtgtttgaatcagatctgatttagattcacctatttcgaataagactccca

SEQ ID NO: 23417 - DNA, 484 bp, Arabidopsis thaliana
  unsure (1)..(484): unsure at all n locations
nnnnnnnnnnnnnnnnnnnnnnctaaaggcgctttttgcttctggccgcccaggttctggaacatggactgcagctggctggtcatctcttccatgcccggaggagccataatttcaacgcccatcggtgctgcggcaagatcgatctcgatttctttgtcatcaagctggccttcacgcagttttttgcggaatgcctgacgagcagcggacggttcctgctgctgttcggtctgtccccagttgtttttagcaggtgggatcagcacgtcgagaatacgttcttctgccagttcttcagcgcgataacggtttttctcgatagcctggacgcgtaccattttcacggcggcatcggtcagatcgcgaataatagaatccacttccttaccgacgtagcccacttcggtgaatttggtcgcttcaactttgatgaacggcgcattcgccagcttagccagacgacgggcgatttcagttttac

SEQ ID NO: 23418 - DNA, 3977 bp, Arabidopsis thaliana
agtcctccttctttattagaaggaaatctcattctcttattgtctttgtatggtgaaagtgagatctatggaagggagttagttgactgacggaaccagagtcgatgggagacgctgaagcggttggaaacgtttcgagttgagcaagaacttggtctaggtttgttcgaagagtattagggtttgctttgttagtttgatcgataccacgccaaatctgatattcgacgtaaagacttttcaccttctcttgtaaaacccaatttaggtttcgaatccgtacggtccattgtgaagttactagcgcggtttggtaacacttaagtgaattgtcaaactctcgctgattgttacatatcatcaaatttttcttcctgctttatatcatctaactagctgatttgagattcacaatcttgattctccaggttgctctgtatattggtggtctttatgtttgtggaaaggttggattttgaactcttattcttgcaaacaatgatcttagcttttgatttgaagccattgtttgagttttcggtcttggtaatatacaacaatgttaaaaatatgcaggttggattggaatctataatgaaaatgggagtatagacaagagaactgttcttctatgagacatttctgtattgtaacccgctccttctcattgtaagttacatttcctctcaaattagtagagtcaaattctttaagtgtgtttcctcatgtatgctattttgttcagacactgaaggtctgctggctctgggtgttaatttgtggctttttctcggtctggagttgattatgcggcaatcttttatctaggaccagatcatcttagtcacaaagagatatggaaggtaaacaactattacttagatcatttgtatatatttttcattcgattattacatcaatgtaaccaatgtcacagtgtgccgggtggatgacaataattatattgactagcatgactgctgatatgtcctggtttttactgatttctaacatagtttcagaatagtttttagagtcttacactacaagaaaacaggtgattgaagacctacaagtcagtcgttaagtagtcgtaactaaagctaatacgactaatttgcgactaataactgtaatcattaatccatagtcgctaaaaacagtagtcgtattattgtcgttgaccaacgactaattaaccacaactgactaaacagtgaaaaatcttcgttacgtagtcgtactatgtcggcgactaattgacgactatcctacgattatttatactgtacagagcgtgtgagaacatgtagtcgtttcgtagtcgttaattgtgtacgacgacattacgactatgttgcgattaaatattctaaaccctgggtatgtttccagttgtcgtaaaatagtcgtaaatatgtttacgactattcgacgactctttgacgattaaaagtactttaccaaggatttgaaactttttgtcataacatagtcgtataagtatatacgactattggacgtctgttttatgattcttttatgactaatttgtttagtcttatgattgtcgtaaagttatgtgactaattgacgactattgagcgactatagtgctacttatttactacttttttgcgactaatagtttggtccgaataaagatttggtcatcaggtgatgggtttcttgtttgttcttgtttgttcatcgattgttcttgtttgttattgatatgctatacaatatgaaaacactgcttatatattgaaaatcaagttcaaaacataaaattatcttgttcaaacatacaacttattgaaagatacaactagtgtttggaaacctaaattctatggatcattagatgggggagtaattgggatacgctctgtggatgtggaagagtgtgtggcaatgaagtccaagaactgcgaatcggtttggcggagatacttctcgactaaggacaagtgctcgagcttgtccttttgctcagctgtgactcaggctgtctcggcttctcgggcagcaatctcagcatctcgcttctcgttatatgcagcctgttcttcaatttgccgctgagcttcctgcagccgttcttctaaggctttaaaggttgagtctccggggagttggcggttggcactgcctagagtttctttaagacagccaagtccataaggattgcctcttgcatccttttctgtggactgcaagaaataaagaggaagataattagtgacagatcctaaatgtctctaagactctgaaaaagacaaagaacatcttacctcgagaaatatggctgcatactcatctagtgtgagatcccgaggacgtgaagagccatcaaacacagcagaagcagccgcctctagttcagacagcttctctctcacattctgctcatacgccagagcaatcttctctgccttctgatcaacataagtcccatccgacttagtgtgtgtctggatgaacacctcaccaagagggacaggtcttcccattttttcttcctgcaaacacaaatcacaagcttcattactatcaacagactaaacatcacacacagttaaacgaacatcactaaaccacatgggaagattgcagaaacacttaccaattcatcttggatttcttggaaagactttggcccaaagtagtggacgtgaggaccgagaccgttacggtcagagagacgagctttggaatatgtcttactccttttctgtgcctcttcagtgtcccagtagtcgcacatggttccccacagagtttctccaatccatggaggctgctctcgagttctccttgcggtgctaaccatgtccttcaagcgcctcttaacgatctcattgaagtagtattggactgtccctgttattaagggatcccagtggtgagttttctacaaaaaaagtgtgaagttagtgaacaaatgacagattaaatagtacagtctaaagaaagttgaagaaatacaagaagcttaccgcaaactctaaaaacaatctttctcttttatccaatggcacagaggaccaattatagtagggagcattgaacttttgagtaaaaatctgtgtgatctttctaaccaatttagatcctctgtcgcgagtaaacctccaaacacatgcaacacagacagaaagtaaacatgtttaaaatccaaaacactacaactacagcagactatataattgaacaaaggcagattctacaagattctagacaagtataagccgacaagatcacacacagaacacaatagtcaacataacaagatcatagacagtaaagaacaagtatagacaagtatagaacaaagacagatcctcattgtcaaagccgaaaacatgctaagttcaacaatcaacaaatgttccacaattatgttcatgattcacaacagaacacaataaagaacttaacaagattatagacaagtatagaacaaagacagatcctcaatgtcaaagccgaaaacatgctaagttcaataatcaacaaatgttccacaattatgttcatgattcacaacagaacacaataaagaacttaacaagattatagacaagtatagaacaaagacagatcctcaatgtcaaagccgaaaacatgctaagttcaacaatcaacaaatgttccacaattatgttcatgattcaccacagaacacaataaataacctaacaagattatagacaaagtgaagaacttaacaagatcacacacgagtttagaacaaaggcagattctactatgttacacaaaccctaacaagccattctacagaccataacacgaattacactacacaggctaagaacactagaataaaatagaggaagagaacataccagtcggttttaggtttgggaattggagacaagacacaacaccactgctccctgtttggcacagagagtgtcgattgcagagccaacgccgagtcttcttgtagc

SEQ ID NO: 23419 - DNA, 589 bp, Arabidopsis thaliana
acaacaacaacgaagacaacaatagcagtggcgggggaagcaagagcatcaagtttctgaagaggacactgtcatttacagatgtaacagctgtgcctaaagggtatctagctgtttcggtcgggttagagaagaagaggtacacaataccaaccgagtacctcagccatcaagctttctatgttcttctgcgtgaggcagaagaagagttcgggtttcaacaagccggtgtcttgaggattccttgtgaagtttctgtttttgagagcatattgaagataatggaggagaagaacgaagggtacctggtgacgccaataacagctaagcaggaatgtaagttcaatgcagcagcagatgataagacgagttaccagcatccatcagactgtcctaagactccttcacaccaacctcacaacagcccaatgtgcagatagttttgttcattgcttgcttctgcatcttctttttctcctcttgtgctaatttgagccattctgcttatcccactttttctctaggaatatggatttgtgtctttaaaatttctaattctgagtaggggagagattctaatagtggaatg

SEQ ID NO: 23420 - DNA, 544 bp, Arabidopsis thaliana columbia
ggagcgtatgtgttccttacccaagtcaaattttagtctcaaccttcttaaatccaaagtttctaatcgcagttattgatacttttttctacagaatgtcttatgctcaatgctatggaggacaccagtttggcatgtgggctggacaactaggggatggacgtgccattactctgggagaagttttgaactccaaaggtgaaagatggcgacttcagcttaaaggtgcgggtagaactccatatagccgttttgctgatggccttgcagtgctccgtagtagcatcagggagttcctttgcagtgaaactatgcattgtcttgggatccctaccacgcgtgccctttgtcttctcaccacaggtcaaaatgtcactcgcgacatgttttatgagtatgtccaaaacattccaaaccttgtctaattttttcctttattatgttctgcctctgtgtaaaaagttcatgtccccgccaaatatagagaaaattaggtttcataggattaggaacctcacatgcgcatgatctacatggaagtttt

SEQ ID NO: 23421 - DNA, 530 bp, Arabidopsis thaliana columbia
acacgtaaccaagattgtacccaatcaattttcacacaaaagttggtgaaagtctttcatctcgtcaaatcaatggggaaagtttgctttgttgaaagatttaaagtaccatcttaaatttgacaaccccaaaattccttcgttcattaggtacgtgaaacgccctggtgttgcaatcaaaacgtcaacaccttgctctaaattttctagctgggttcgttgtctgaagccacccgtcactaccatcgaacggaacgggaccccagactttgatattgatctacagttagcaagaacctgccaagtatttcatatgtaccaaacaattgtcttcagctaaatacattcacatcaataaccaatgaatcaacctaggaagatcattcacatataaaaagaaatgaacctgagaagccaactctgcagttggtaccagaacaatgacacgaggacacccaggagacgatttgctgtgtccttgaagctcttcttccctgagacgctgaataacagggacaagatatgccagt

SEQ ID NO: 23422 - DNA, 423 bp, Arabidopsis thaliana columbia
gatgttcaggagacgttattgaaaccttcgaaaccatcacaatctaaagctgatgttcaggagacgttattgaaatcttcgaaaccatcacagtctaaagctgatgttcaggaaacgttattgaaaccttcgaaactatcgcaatctaaagcgaaggttcaggagaagtcggctaaagctacgagcacaatcaagacactgcagattcaagagcgagaactgtttagtggttcagtcacaatggatgctgctccgtcaccaagacacgtaccgattccaatattttgttatagagagtgaggaccaatgagtcttctaaactatcgacaactagaatgaagtaaagaagaagaccaattgtattgcagagttcttgtttggttttgtaaagcaattacatattatgccttattgtgtggtaat

SEQ ID NO: 23423 - DNA, 866 bp, Arabidopsis thaliana
ccaacagatacaatagtcttactactgcttgaagaagctccttgctcaatctctttcgtcatctttatgaaataactgtgcctgcaaaaaaaatgaaaccggaaagagtaaaaacagaccatatagatcattgctgcaaatatcaaaagatcggggaaaatgttaatcaattaccatcgagtgtctgcagtaagctcgggatgaaaagcagttgctaacaagtttccttgcttcacagcaacaatgacttttgtttcaggaagagcatcttcctgatttatccccaaaaaatgaaaccaacaagaagggattcatacatgtgctcacaaaagagtaatcgtttcatgaaaattagtgcaaaattaagcaaacctcttgaatttgtacggtggagcttgaatacaagaccttgtttgatgggacgggataatccgccaggacttcgacatcaggacctacatcaagaacagctggagcacgtatgaacactcccctgtatgtctctggcccaccttcttgagatgttagttgaggtactaagatatcagcttcaaaactttgaatctacacatcaaaaacaaattcgagaacaatctaagattttcacaacatcttatttgatactaagagtgaatgagaatccatatgaaattactcccattgattcatgaaaagaccgagttttatatatcagtacaccacaactcatgctaatataagcagtttctttttccacatattgcaagtcaagattgatttaaatatgtgtttacacattttcttaacatgaacccggaatcttggtaagagacataacctggctaccgaagaagttcctatgtacggtgcaatcaaggccaccaact

SEQ ID NO: 23424 - DNA, 391 bp, Arabidopsis thaliana columbia
caagatcagaagcctctatgtaactgtagcaacactgaagctaatactactaccaagagcttacctgatgatcataaaagctgcaaaaccggtttttcggggcttgaaaccgtcaagctattgcttcgacttttacctatattgatcgatgcgacgtaacgtgtgcaggtatattccaacaacccgcgacctttttcacaaagcaaggtatgactatgaagagatacatcggaccaaacttcaagatctccacagcaacactacaaagcactatcactttatccatgatccttcgtatgcccttctacgacagaatcttgataccgatcgccaaaagactatcgatccacgataagggtatttctgtgaaggtaagaatggggattgggat

SEQ ID NO: 23425 - DNA, 1086 bp, Arabidopsis thaliana
aatttactattcagagtactaaaaggtagatgctttcgtgcggaactttttctctactaaccgtggacacaaccttcttatggctgaattctttccgattcgggagagaactattggccagcaacgtccaaattagcattggtgatgggcaaactgctagtttatctgataaatggctcccaaccatacctccgcgggctccactactgcgcgatgaaacttatgcagaggcggaggtcaagaccctcatcgatacaaccacctatcaatgggatgagcagcaagttactaagatgatacaaccagaggaccaccacctaatttataagatctatcttccccagagacctactcctgattcatatatctggagtaaatccaaaaacggtcaatactcagtgaaatcgggatattggacagcaatcaaccttcaagaggatgaagagacaccgagacctcctttggcagattttccagatatcgccaagaacgtatggaagctagacatcgttctgaagttaaaacactttctttggaggattggttcaagagcgattggggttgcagaaaatttacgttttcgacatataaatgtaaacccatattgctcacgatgttgtacggaagcagagacaagtgatcatacctttttctcttgcaaggaaatacaagcagtttggaaagcaagtggtattccaacgaactatctcggggatcccaacaagtcactagaagataagctacaacacctcatgcaactacataacgatacatcggttgatcgtctcacccggcattttggttgatgtggagaatatggaaaggacgtaacaatctacttttcaatcataagatgaccacccctttggagatattcgagcaagctctcgttgatactaagaatggcttgacaataaaccaaactttgtttccccaccaggccctcctactcaaatgattaatcgtcaacaaaaatggagtaccccaccgagaggctgggtaaagtgcaattacgatgcgtctcatcagttcaatgatcgttgctcaggactagggtggataattcgtactccgatggtgtatgtt

SEQ ID NO: 23426 - DNA, 355 bp, Arabidopsis thaliana
tgtttctctctcttgaatgggagagcatttccggcacgagatgcagttcctggtaaataatcgccacgcacgcgttaagtgctgctggtcgctgtctggaaaaggacatttctagttcattaatcactacagaagtcgttgttggcgcatagtagccgcttagtatttttaatagagttgaagctcttgcacgattgtgatggatcaacgaatgatcttgaccgacgtagcagtcttgtctagtatttgtcagagggttatttggagcaagcgttttattgatgccgcgcgatttgagatatgcctgtacactgtgtgctgtcgtattcttgaagttatggtcatgtatgtaact

SEQ ID NO: 23427 - DNA, 490 bp, Arabidopsis thaliana columbia
tgcagtgatacttggaagatggaactctgcccttaacatgtactcctatattggttttctgaaggttagcattgatactacatagtctacattgctgactgtttcaactgaatttaagagtttattgaaccttgttagtgttataccttgttccccgggaaagatttgattttccagactaacgcatctttttcaggagcataagaggcagaccctagagatgtcctaacggtggggttagatgcatcggttggtacaggcaactcaatctcaacgttcgttgcggtgctacaaaaagaatgttcgtgatcaaaggtttaaagaatctgatcaatcaggatctttgcatgacagtaagacagaaaaggaaagtggcacaaataccatagaatatatttaccttcgttccttgaactgacttctagcttttatgagcatctcaacacgacttcttgaatgactttctatttgtgcttcccccatataagtg

SEQ ID NO: 23428 - DNA, 620 bp, Arabidopsis thaliana columbia
cgaggatgtcatttgatatacaaattcgaacgtattgatacccctggcgctcgtaagtattcatctttgttgttgacaaaaaatcataaaatcgtgtacagaaaaaaatggttggaaaatttcttacttatttggtcttatagtaaaatttcttatacttttatcaaaaaatatattatttcttaggtatataaattttccactcgcgagaaaaattgaaggatagtgataaacaaattaagttgaattcacattaaagtaaacgattcattacgtaaaataaatatgattcttgttatttttggaagaagttaataatcatcacaagtacaagttatttgagaccccggaacacggtctcatccacaagatatgcgatggagctaccgcggagactttccccggattcgaagagatgaggacggaggcactcactgcagccgaaacaggagttgttgacggtcacggattctatgaggatagctacaagctcctccacgttgtggctcaatgcgacggccacgttgaagcttgcgattgcggcgagtgcataagttcagccgcggcacgagcagcagaagagtgtcggtggccatagccggacaaatatcttagaaggg

SEQ ID NO: 23429 - DNA, 946 bp, Arabidopsis thaliana
tcaaaggagctttctctccctgtaaatagccacctctgttcttccaaactgttcttcctctgattgttgcgccatccaattccggatcacatgtcatgaagtaaacagtgtacaatccagttttcttgataatgacagcttccggagacatcttcacttcttcctcaccccttttgaaaaaagtgggaatccgcttaggccattcaggatcattaggatctgcactaatcataacctctccaagattgcaggaaccagcatccgcaagttttggcgtacagcacatgtcctcagatttgaaaaaagatccaccaactctatctcgctgcttcacctcaaacagtatcgcttccaccaagcctgcagctgccagagtagaattctgcttgctagcagattccttggttcttacgaaagtgatatcatcaaacctacaaaaacataaaagatgaacatccataagaaaccaaaaatccccatagaaatgcaaatagtaaaatccaataagaaacagtaatacaaatctataagctcatatacatatatctcttaaaatttccttggaaactttacaccaaagtgctaaatccagtacctaagaagcggtaaaacccaaatctacaagctcacactataaaatcgcacataaaaccctaactcagtaggaaatgaacagagtcagaagagaaaacgaaatgcgtacctgatgaaggagtttcccttgagcagaggtgtatcagaagaagcatgatgaacatccagaaactcagaaccatagattccttcagaaccaccaacgaagtagcgagcattggcgattttggtgaacctccgctgttgttgtagtcgtgaatcgagccgtcagctgcgtgaatcaaattcccaagtaagcaaaacgaaatcaccaaaaaccctagaaacagattcgtcatttttgagaactttg

SEQ ID NO: 23430 - DNA, 585 bp, Arabidopsis thaliana columbia
gagtggtagggacgatgatcttagcccgacaaagcggacagtttgagtgagatttgagccaccgatcgatacaaacgacatgaaaggtgtggttgcatttaggtaataaccttaagctctcgtcttcgttaaactctccaagacatattgaacaatccgtaccgttgatcttgaaaccgttttgatgcttttgttaacttgaagaaaccgatctcttttatgagagtatcatctaagccggcggttgaagactcaagagcaaaaggatcgtcttggtctcctcttgtccggcgagttaacgtcgagaattatatccgatcttccggattctgaggcagcttcattggtggtgtcgttggcgcaatactttgagacaagagtgtagtaagctgccaagagaaaggcagttgcaaatattccaaaaatagcaatgacaagaggggagagattggggtttgatgcaacgcatcgtttaggaattgttcataagaaattggtggtggagagaagttgatgtaagtatccgattgaggacaaaatgtggaacataagccttgagtacaatctcttgggtttatgtattga

SEQ ID NO: 23431 - DNA, 536 bp, Arabidopsis thaliana columbia
ggaaggattcacagtcaaaggaagtgaaaacgagatctacaagttgaataaagcactgtatgggctaagacaagcaccacgagcttggaataacaaactaaacaaaattcttaaagagttggattttgttaagtgctcaaaagaaccttcattgtatcgaaagcaagaaggagtgcattttctacttgtagccgtttatgttgacgacttactcgtcacaggctctaatcttagaatgatactcgagttcaagaaagggatggcgaccaaatttgagatgagtgacctcgggctactaacgtattatcttggtattgaagtcttgcagcatagtgatggtatcatcttaaaacaagagagatatgccgggaaaattttagaagaaaccaagatgaatgaatgcaacgcagtgcatataccaatggagtcgggtttaaaattatctaaggcgcaagaagagaaaggtattgatgcaacagaatatcgaagaatcattggatgcctacgttacttgctccatacgcgaccggatcttt

SEQ ID NO: 23432 - DNA, 565 bp, Arabidopsis thaliana columbia
cctctctattcttgcatgtcactcctataaatatttaatactaaaccaatcactttttgttgtgtcgtcactttacttctctttaaataatctctttctctagtgattgactttaggaacaagtgaagtgagtgatttttaataatcgccggccgagagaatgggaagggcgccgtgctgtgagaaggtaggaattaagaaggggcgctggacggcggaggaagaccggactctctccgactacattcagtccaacggcgaaggatcatggcgttctcttcccaaaaatgccggtaaagttttttttatctatacagtactctgtctctcgactatcgcatgcatctcataagatagtttttttgtttggtcaaaatttataagagaatctatatgcatcgagaagttaattaatcttacgtacggttcaattatacaccatgagttgtaaaaaaaattaaaatagagacttgattttttttttttctatttaatgtatcagtttctataaggaatgcataatattttaaagtacataaagtgtttattgataattcagaccaaa

SEQ ID NO: 23433 - DNA, 506 bp, Arabidopsis thaliana columbia
gattgacaataactagaaagcagcaacctctgatatatatgctggttttggtttaaagtaaaaaagtagagagaagctgctatgtctttacacaatattgttgtgttagtgtctttaagtacatctttttcttatacgtattgtccttccttgaaactgagcttgcataattgatgatatcagcactgattttttttccctttaactgatatattgcaaggacaaagttaatctccatttctgggtatgtaaatatggctaaacccactataaatatacccccttactttgagtcctgaggcagtcattacctctcttcttcttcttcttcttcttcttctttctttgggttagctgagaaatggatgtaatgaagcttgatcacgacagtgtattaaaagagcttgagaggatcacctcgaaagctgctgaagttcaagataacattttacgtgggatctttggaagaaacaaggacacagagtacttgagtaagtacatgaatg

SEQ ID NO: 23434 - DNA, 558 bp, Arabidopsis thaliana columbia
atacaaaacacagacgcgtaagttcaaatctttacaagagtttagcttcgtctaagaagaagatttaccgagatgattcctttgagatgatctgttgtgagtttgaaagattctccatctttctcttgcttcttcattagatcaagcatcacatctacgacgtcagggttctcagatacttgtcttccaggcttaatatgatcatcgagcacgttttggaagaaagtgtcaagttctgagaaaacattgtttagtgtcttgttctgacctgagattcggtctacaagccaacccactccagggaagaaatcagtgaaggcaacaccagcgactagcatctcaaacttgttaactagatcagcaacgttgtcctcgtctacgaactcgcacttgtggatattcccccgaacgcgagcctacacacgatactcgtcgctagcgtgaaaagggtcttcttcagattcaccggtgattttttcagagcggattcggttagtttcttgataacaagtcattctcttcctctcttatatacctgaaagactgaaactttttcgt

SEQ ID NO: 23435 - DNA, 473 bp, Arabidopsis thaliana columbia
cattttgcttctaaccttttttactgtttccaaacaacatttaaggatgtgtttgatatttattacctttgtatctagtttgctaactcttttattctctccaggctctgtccaagacattaactaccgatgaacttctttatctgaaagcgcagtttgcacacttagcacccaacaaaaatggcctcatcactttagatagcatcagactggtatgtgccttctcttcctctctgtctctctctggtagaaagcaaacagctcaaagctagatttatttctgttggacaggcacttgcgacaaatgcaacagaagcaatgaatgaatcacggatcccggactttcttgcattggtatagtcacctgtcagttctagaaattttgcttaatctgtgtaagatacaatccaaggttggttaacgaaagtttggtgttgggaaatgacagttaaatagatctcaatacaaaggga

SEQ ID NO: 23436 - DNA, 1256 bp, Arabidopsis thaliana
catcacttatgtcttatggacttcgtgattagatggcatgatggcattgattatgttatattacgtagaacattttggtgcggtttcattttcgctttaatattgttagccaatgcggcaatgcgtctagtttcatgttgtaggtctgtcttacatttactaccattaatataacagggatgaaaagggtctcttttatgcattggacctaggggggacaaacttccgtgtcatgcgtgtgcttcttggcgggaagcaagagcgtgttgttaaacaagaattcgaagaagtttcgattcctcctcatttgatgactggtggttcagatgtcagttttctgttcttcaatttgtcatgtttagtcttagatgatctttgtgtaacaagattcttttgcgttcttttgatggattcaggagttgttcaattttatagctgaagctcttgcgaagtttgtcgctacagaatgcgaagactttcatcttccagaaggtagacagagggaattaggtttcactttctcgtttcctgttaagcagacttctctgtcctctggtagtctcatcaaatggacaaaaggcttttccatcgaagaagcagttaagctcgattttcgttcaactatttcacttaaaatgtttagttttcgcctttgccttaatctttgtttaacctgttgcataggttggacaagatgttgttggagcacttaataaggctctggaaagagttggtcttgacatgcgaatcgcagcacttgtgagttctctttcgccttatgctctctagtgaatcccttttgtcatgtgtttgttgatttgtttttgacgttttacaggttaatgataccgttggaacactagccggtggtagatactataacccggatgttgttgctgctgttattttaggcactgggacaaacgcagcctatgttgagcgtgcaaccgcgatccctaaatggcatggtctgcttccaaaatcaggagaaatggttataaacatggaatggggaaacttcaggtcatcacatcttccattaaccgagtttgatcacacgctggattttgagagtctgaatccaggcgaacaggtacgagtttttaaaccccggtttgttgttcaaaatgcaatacctacgaggtgtccgagaatgagttctatgtggaattcattttgcagattcttgagaaaatcatttccggtatgtacttgggagagattttgcgaagagttcttctaaagatggctgaaga

SEQ ID NO: 23437 - DNA, 608 bp, Arabidopsis thaliana
aagacttttcttaaaagagaatgagttcaccagcgtcgatctcttcgacgagctcctctctctcgtcttcaatggttaacaccaatcggaagacaatttcaccatatgatctatcgtcaggtgacaatccaggaatcataatctcgagacctttactacgaggtccgaactatgaagcttgggcaacaaacatacgtttagctttgaccgcacgcaagaagtttgggtttgctgatggatctattccaaaaccaagagaagattcagaaaactttgaagattgggtagcaaacaatgctttggtggtttcatggatgaaggtgaccattgaagaaaacatctcagattcgatatcacatctagatgattcccacgaactctggactcacatacaaaaacgttatggtgtcaagaatggacaacgtgttcaacgattgaagacagaattggcaacgtgtcgtcaaagaggaacaaccctcgacgaatattacggtgagctatcaagtctctggaagagtttgtctgattatcaacaagcaaagacaatggaggaggtcggaaagagagagaagaagataagtacatcagcttttgatgggtcttgatga

SEQ ID NO: 23438 - DNA, 577 bp, Arabidopsis thaliana
tgtctccatctacctataagaccatgcttttatttaatgagactggaaatgaaataatttaattacaacaatgtttgaaaattgaaattgtgtaacatacagtgatctggttgaaacttcggttaactgcaacctttaccatctttctccagatatcactttcaactagtgcatctgttgtgatgacctgagaaagataaatatatcgatttggaatcgtttaacatcaaagtgtatgtcttaatataactacacaggcaaaagaaagtaagagctaaaggacatacacctaacatagttgccatattgggatggatcatcccggagcctttagccataccaccaactcgaattttgattccaccaacctgagcaatgtcaaaaattttgtaagagatatcaatgctagaaatagagtatacaacgtgtttcttaaacctacctgtgattcaactgcaacactcttgcttacaagatctgttgttgtgatagctacagcagcagaatctgccctgcatttcaacattcatatggttatgcccaatggctaccaaagaaagtgaagactgtgactacg

SEQ ID NO: 23439 - DNA, 569 bp, Arabidopsis thaliana
atgttcttaaagcaaaatatcatgagcttttacctgtctcatctcttcaagactaatgacgccatttttatccacatcaatcgcatcaaattgatctctgaggtcagagatctctgcctcgtcaagtgtgctagcaagcgcctgccagaaggagacacaaagcattagagacatgtccggatcactttgtttttatccatccaacaacttcctcatttaacttacccttaaagcaaattgctttagacggctgtatctcacaaattgtcttaagttgttcagaactgaaatgtcgacagggatatcagtagcattcccgccttctctaacccacgcatgtgctacaaaggcaagagacaaaatagcattagtcaaagaatccgccgcacatgaaaaaatcactaactttagtactcgaaagcatacatagtgcttgtgcagcagttagccgtgctcgtgggtcttttacaagtaactttttcacaaaatctttggcgctgtcacttatagttgccaaggtttcggctgaagcaggtttattcttaaacctatatcatatagtcatatta

SEQ ID NO: 23440 - DNA, 524 bp, Arabidopsis thaliana
tgaattaaagattcgatctcgaaatcgttggcttttgttgttgttgcattcttcggtgatggctccgactcggattctaaccagagacgaagagcttggtgttatttcagacgatgatgattctccatcgggtaaaagatctaaacttgatcgcttccctcttagccgttgggaactcgccgtttctctcggtgtcttcctcgtcttctcctctggactctgttgtatctacatgaccatgcctgctgctgaatttggcaaactcaaacttccaagaagcctcgctgatctccgtttgctcaagtaactttctttctaatcttacgactcaatttttgtagccaattaggagaatttactgattagtgttggtgtcatgattggaattgacaaaatctgtaatctttcttgttgttgatgtttcagagataatctagcaaattatgcgaatgagtatccggcgcagtttgttttagggtattgtgcaacgtacatttttatgcagacctttatgattccaggga

SEQ ID NO: 23441 - DNA, 407 bp, Arabidopsis thaliana
tgttgatgatgatatgtttccggatttagataataatgcagatattggtgatggtgatgaggatatacgaaattgtctgagacctgaaagtgatttctggtttaaaaatcttatggataatccttatgatcctctggatgagggttcaattgtagacgcaagtggcagtgacacagacatatctgaatcttcagagtttgatgttatatcagagcatgttcctgaagacaatgatttgataaccggatcgaaatctttgtctatatggtccagtgaggatgatggaactctggttagtaagtggtcttcagaaactcataacgagaagaatgatgtaaggtctaaagaagattcaggtgtcccaagcaattctgatattttcaagaatgatggcgacaaatcatctg

SEQ ID NO: 23442 - DNA, 490 bp, Arabidopsis thaliana columbia
tctctagatccccattgaatactatactaataccactcaaccgattaatagaattgtctacttacgggatcgtcggtcatcggagaggcagtgtggaaaacgccatcgcaaccgtcgattgtggcacagagagcttcgtagtcgagaagatctgcactgtgaagagtgagtctttccttggctccttgaagctctctgagatggttgttcttgggatcagttgggttccttacggttcctctaacggtgtagcctctctctaagagtaacttaacgatccaagaagcaatgtagccgccggctccggtgacgcagacgagtttcccgtcgacaagcattttttcttcttcttgtaattgagcaaagcctcttaatggtttacaaggttatgaaagggcttaagagagtagtatgttatgatgtgtcgttagtgatttgtatatatagagacttctaaacaagttacttaacgatggtaaagagttggtga

SEQ ID NO: 23443 - DNA, 508 bp, Arabidopsis thaliana
acgtcaaaactgccttggtgagtgtgagccgccctgcgaactcaacatacgacctttccagcctgctaatctcgacgaaaatcttttaataacttccccaaatgtctctttgttaattcgtttctgcagaattggcacccctaaatacttgcccaagtccttcgttgctttcataccgctctcctcgctgatccgcttccccaaatcccgcaaaacatttttagagaagtaaatttttgacttctctaaactgactttttgacccgaagcgccgcagaatttctccaaaactcctctaagcacccggatttggtcaatagaagcttcagcaaaaaggattaggtcatcagcaaaacatatatgtgataatcttggaccggactgagatatctttatcggtttccatttttttgctgcaatagaactttcaatcagatgacacaaccgttctatacacagcacaaaaagatacggcgacagtgggtcccctgtcgcagccacgcaacgg

SEQ ID NO: 23444 - DNA, 516 bp, Arabidopsis thaliana
tatcgaggagctgttggggcgcttcttgtttacgacgtaacccgacactcaacattcgaaaacgttgagagatggctaagggaactccgtgaccacactgacccaaacatagttgtgatgcttgtgggaaacaaatccgatcttcgccatcttgtagcagtccaaaccgaagatgcaaaatcttttgcagagaatgaatcactctacttcatggaaacctcagctcttgaatctaccaatgttgagaacgcgttttctgaagtactcactcagatttaccatgttgtgagcaagaaagcaatggaggctggtgaagattccggtaatgttccttcgaaaggagagaagatcgatgttgatgtttccgcagtgaagaaaactggttgctgctccaactaaatggtcttatgtcctaaagctgaaatcggtttttaaattttacattcaaattttgtttttgaagatgtttgcatttattaaggaaaacaaactatgttatgcctttagaattgcttg

SEQ ID NO: 23445 - DNA, 489 bp, Arabidopsis thaliana
agtaacgcccgccagtgtgctctaaagtacaagcgagaaagtttctcccttgttgataaagaagttagcatttttaaccgcgacaaacttcttacttccttcaccgaagaaatttctaaatctttgatttctactaatttttcagacatttccttcctcctagtcagccagatgggcaaatcccattttttcacggatcttatcatggagatttgcaatcacagctggtttttctacttttggagcatcctcatgaagaagccaagttttagcccaatgtgtctctgatactgagaattgaggagctttttgttcgaagtcaatctgcattgcgtagtcagaacgcaaggcaaaagcatcccctttcaggtcagtataaagtgacggaggtgttcctgggattgagtaaagatcccctttatcatcagcaagctgaggcaagctagacaagagactccatgtatatggatggcgagggtcatagaagac

SEQ ID NO: 23446 - DNA, 3556 bp, Arabidopsis thaliana
agcctagtaagatttgagattgtgttagaaatgaaacctggcagagattgtaagtgaagctgtcgtaattatcaatcacgatgataggaccattctgtttagaggaattgataacaacggaaggtatcgaattcgattctgccatttcaatagaagcttcagcaaatgtacatctctacgactcttccccaaaactgaaaactcctatatcacagaagtatatttgggatctaagtgagatattcagagcagccaacaaggaataacccaatctaacaatagcaactcagaaaatcaccaattttcaaactttaaacaagataaaagacttaaaagaccagactgtaggcagctaagaagtaatgtattagctattgctgaatcaaaaattactcctggcaaggacaaagaagcaaggaggagctttttcaaatatatacaaaaccaaaaaaaattactcatctagagaactagtcttacgtgaataagattcgatggtgccgcataacgactcagtctgatcacataacaagagagaaattacattacatagtcttgtatataagcaagtcgagactagattgattgtgaaataaagagattctaacaatcaatcgagatgcatacttgaatacaattcatatgaatcaaggacttgcaattagccaggaccctaattgattaagacatggttgaccaaaaaaacaaaactattagaaattatggtcaaagtagtagctacagagattagaaatctattccaatggtcttagctctaacgtcaacaaaggtttaatcatcccctaaacttcaagtttcaacttagtccgaatcaggagaaagactatgagggaagttatttggacaaatggtttaatgctctactaaaggggaatcgatcagattctaattgtaacattttgggtacctggaggttgaagatccttcgaagaacgaagtgagccgcctcgcgaacattctgttcaggtgatgttgacccgactcgctgattcgacccggagctggttttgaaacggtcaaggatataagtggcgctggattgatgaggaaatcgctatcaattgagatagactgcgaatagtacgagaacaccatcattttggatgctttgacgcagattcattcatggcttctaggtcttttattacttcattagttgttgacttaaagaaatatatctaagtaacgtttaatgatgtgggggatattaagcagccaggttttacactcagctatagtcatcttttcgtataagcatctaattcgacaaatgtatagtatagtcatcttttcgtataagcatatatagtatagtcatcgtataagcatatataccgttttcaatttaatggtcacacgatcctttctgaaaaaaaaaaaaaattatcattaaacaagcttctgatcaacaaaataatatcccaaaaaggtggattaaatttttgttttcttcatagacataaggaaattaactttacagtctgaccattgattaactttcagcaatgtgcacaactgccattttgataacaccatagtttaagatgccaaaaaaacaaaggaagatggagcgagaaagatgaattacgctataggaattgattttcctcttaagtgctcaagtctcactttaaattcaactatcacggatgagccaaatgcccagccctaaacaaaaagattaacttagtaattgataccttgtagaaagacaaaccgtgagatcagtgaaagtggtaagttgcctggatatcacgaaagtgtcaagactcttctcttcaccatctttaatcatatcttccatcatatgaatcttcagcatcttgaattgacgatcgaagacaggcttgtagagatgactcaaacgtgtaccacaatggcctcataatatagatgcaagattattatgattgaatgacgattcttcggatgcatatgtaggaataaacactgcgtcatacgagttctcataaccatcaattcactttcgaatagaaatggtaaattttcattacaaactgatccaagcacttcaagacctaatgagaacaaagtaaatcaacacaaagacagtgtccggacttttgataggatttattttttaaaaggtatttcgcatataaacttcttaacatagatctctacatatatagacaaaatgaaataaatacaaagatgtgcttcataagttctcaacaaagcccaagtaatctccacaataaggcttatttataagtcctctaatctgagtgacttcaatgattcttccagcccaaaacaaggcttctctcctccagaaaaataattaggattattatattattatttgttttgtttcctcgaataaaaaagagaatccgagaactttttaagacaaaagccaagtcttcgaaaccttatgagatgtgatagggttacaagggtaaaacaggaactcagaataaaaatatgagaatattacacgtagaggcactatttcaaaactttggacacaatagaacactttaaaaccattagtcactttaactcagtataattaccctttaccctgaaatcgttggtttaataaaacataacaaatttagccggttttctctaatccggttccggttgaaccacgtattatcagttactgtcatttaccaacacgattgtaaaatcttcatttaccaacacgatcgtaaaaaaccgcttacccagtaaaaaccctaatttactgtatctccacatcgccactgctcccaatccgtcgcctgctccgaatccggcgactcctccgtcgctgtccatcaatccgccactcaggcgagtctatactcgctgaataaaaaccaaatagtaatttcccccaaatctctgcaataatcgaattcgatttcgatttattgttctcgtaagccagattcattagcattccagttgattctcactgatcggaatactcaatggaaggtacaaatcgtttccaatcatcttattttggtccaattaactcagaagaagaaatcctcttctcgctgaatgtttctgcaattttttttttgaatcgaaaaatgtttcccaattgtttgtagctaagcacagacgtttgtggttttagtagtttgtacaaatactcgttaatctagtcgttatctcttgaactgatttcttgccaatgaacagggtcgacatcttaggaacgatcttcttagtgggattcaaaccttccaaatagactcttcgccaccgatcattatccgaggggaaggctgaacgtatactctagaccggatattctatcctttatcaagaaggtttttgatgggacagaggaattagattttatacttcagtcttgctttggtcctttattccatttgccagttagtagggttgcgacttgaggtaaggtcattcatgccttgttatgtagacagttgcttactaagaaaaagtatgagttttggacagtttttggtggacaccaatgagatttcactactagaatttgcttccgtgactggcttaccttgtggggagtttctgacgagta

SEQ ID NO: 23447 - DNA, 511 bp, Arabidopsis thaliana
cgtatatctttctgcttcatctcgaagaccatagcgtcgactttgtcatactccctgaggttcatgtagagagtcatcatgacgttgaagggaagcgggtgcagggcgtaacctttgtccctcatggtgttgagcagggcttcagccttttctctcgacttggccctcacataggcattgaggagggaaccataaactctccggtccttaaaattctcagggagctggaggaagaactcttcggcgtctggaatgccacgcactttgccgattaagtcgagctggattgcagcatcacttgcagacaaccgaaacctttcgcctctgttgttcatccagtcgtacacctatgaaaacgatacgcgatcaagtaagtagtgttaaagatacaaaataaagcgagggcaaatacaaggaggacacggacctcgagagcttggttggcacgcttgtacttgcgaacgtccttgacgacccgacagagctcccacttggtaagcttgcggccggc

SEQ ID NO: 23448 - DNA, 596 bp, Arabidopsis thaliana
tagtaacggccgccagtgtgctctaaagtgcaacgttgacaccaccttcgccctggatgggctcgacaatcacaccacaggtcttctcggtcacgagatctttcagctgggcaacatcgttgtacttgccgtatttgaacccggggagcatgggtgagaagggagtctggtatttcgggttcggggtcgcggagagggcgcccattgtacggccgtggaaggagttgtggaaggaaacgatttcgtgctttgcgccggaaggatcgcgggcgcgtccggtcttacgggcgaacttgatggcggcctcgttggcctcggtgccggagttggcgatgaaaacttgggcagcgtcgcgcatggctcccgactcgcgcgtaaggatgatgaggtctttgctgagagcgccaacccaggcattgtgatacaggttggaggcatggagaagggtttcggcctaattaacccgtcagcacttctgatatttgtatgtatagtatgagactagcgtgcgcacctgctcggcgatgatcttggagatctcgggatcgcagtgaccgagggagttcacggcaattcctgctgtgagatcgaggtac

SEQ ID NO: 23449 - DNA, 545 bp, Arabidopsis thaliana columbia
  unsure (1)..(545): unsure at all n locations
nnnnnnnnnnnnnnnnnnnnnnnctaaagtcgacaatgtcactggagcccgctttgcgaaaccccatctgaagttgctgtgttttcggtaagtagttcagacttaaacgcgcgcgacggcgatagccctagggaacatcggcgatcacttcagagacatcgtgtttcattaatcgggcgagtgccgcacttttgcttcgctgctgtaaatccacgctggcgtgttgttgctgacagccaccgcatacgccaaaatgaggacagcgtggcgtttcgcgttccgggctatcgcttaaccggcgtacgactttagcgcgggcatactgttttttatcttcagtaacagtaacttccgcgttttcctgcggcaataatccggggataaatagcgttttgccgttatgtcgcgccacgccctgaccaaaagagtcgaggtcgttgactgaaacggttatgatctgacgcgtcgtcgtgcgtcgttttgcagagtagaattgcgccattgcgagactttctcaatttaacagtgtgcctctttagagnnnn

SEQ ID NO: 23450 - DNA, 5666 bp, Arabidopsis thaliana
tgtaatattttgaatgagtataaatgcatagtgtaaatgattgtattacgtgaaatatgataatgattatcagaattgcgtttgcggaggtgactgcctgtatacctggttaggggattaagccttttgtgatttgattgaagtggtggctgcgctcttaggagctgcctacgtaccctgccaagggatcaaaccttatcgtagttcgattgtttttgagtacttattcgtggtatttcttgagatatatggcattctaaggccgtaactcaggtactccgttgataacttttacgagcttatagacgccgtcacgtaccacctcgatgattcgatagggaccttccccggttagttcccagttttccggcgtttagctctctcgtgttgatgaacacttttcgtaaaacgagctctcccacttcgaatctccgaattttgatattggagttatagtagcgggcggcacttgttgatagttttgaactcggatcattgcctgatctctccgttcatcgatgaagtccatgttgtcctgtaacatttgcgtgttcaggtccgagttagcaggactggcggtccttctcacgcttggttctatggtttcgacagggattactgcttataaaccataggcgagagaaaaggtgtttcttgcgttgatttgcgaggtgtagttaggtaggcctagagaactccgtggagcacatcggaccacattgattttttggaatcaagtcttttcttgatgttgctaagtatagctttgttgctgcttctgcatgtccgttaccttgtgggtaacggggggtggatgtggtaagacggatcttccacttgtcgcaaaatgctttgatttttcccgaggtgaggttagtcccattatcggtgacgatctcataaggtatgccatgtcggcatacgatattttcccataggaaatcctcgacttgtttctcagttacctgttggaaggctttagcctcaatccatttggtagagtagtcggtgaggaccagtaggttttttagtctcttcttcccaccggaggcttccatgggacctacacgtccatggaccacttcataaacaggtaaggagaaaatatcgaggacatttcctcgggaggttgatgaagagtaggtgcatgtcgttggcatttatcgcacctgagtgattgagctatgtaatcggctagcattgttggccagaagtagccttgctttttaattctgagggcgagggtacgtccactaaagtggctaccacattgcccctcgtgcatgcttttcatgaggtctttcgtttgttgcccgtaggtacacaccatatagggacctacgacgctgcgtttcatcaatctcccctccataatgcagtaccttgcgctctgggctttgagttttctggtctcccatttctcgggaggtgtgatccctcgttcgatgtaatcgatgattgggattctccagtcattgtacggttcaggttcatacgaggcaggttgttcgggggtcccgagctccggctcttcctccgctgcacctgcctctgcggccgctgcaagggctctagccgcggcggtggtgcttcgggttacttgcgtaaagttgcaagttgccgaggtttccgtccaacatatttgaccgttaagtcgatgcttgggtgttctattccttcgactggaataattcttttgacgaaaggatctgacgtgtaggcgagagctgccaaggcgtccgcagaggtgttttctcctctagggatcatggtcagttcgaacgattcgaactgttgggtcaaggttttgactagttcgaggtacgcttccatgcgctcgtctttagcttcatattccccatggaactggctgatgacgagttgggagtcgctatgggcgtgtatatcgcgtatccccattccttgagctagcttaatgccagcaatgagggcttcgtactcagactcgttgtttgatgcgctgaatccgagtcggaacgattattcgatgacttccccggtgggggaggtgagttgtattcctaccccggatccttgtcggttggaggagccatcgacgtggaggagccatttcttattggagttggttccatccaggtccgctaacaggagctcgattacaaagttggctaggacttgtgctttcaagctggttctggtgcgatattctatatcgtactcacttagttctatagcccattttgcaagtcgacctgattgagttggactgtgcagaatggttttgattggttgagacgtcatcactacgatgggatgtgattgaaaatatggtctcagttttcgagctgacatgactacggccagtgccagtttttccattgctggataacgagtttcagcgtctatcaacgttttactaaagtaatagatcggtttctgtccttcgtgatcttctctcaccagaacgcgctaatcgcggttcgggagactgccgtgtacaggtacaacggttctccttcttcgggttttgctagtatgggtggttcggacaggtacgctttcaattgtttgaaggcttgctcgcagtcctcattccaatcgaactttttatcctttcggaggagctgatagaaagggacgcatttatcggtagacctggatatgaacctgttgagggcggcgatactgccggttagtcgttggacctcccgtgccgtctttggagatggcatgtcgatgaaggctgcaatctgcttaggattggcctcgatgcctcttttggttactaggtatccgaggaattctcctgagggaactccgaaagagcatttctcggggtttagcttcatttcgaatttgtttaggattttgaagcattctcttaattgcgggacgtggttttttcgcgagccgacttgaccagcatatcgttgatatagacctccatcgttttacctagttggtcggcgaacattctattcaccaatctttggtaagtagctccatcgtttttaaaccaaagggcattactttataacagttggtgcctcggtcagttataaaagctgttttttcttggtcatctgggcgcataagtatttggttgtacccggagaatgcatccatgaaggacaatagttcgtgtcccgcagtggcttcaactagtcggtcgatatgtgggagtgggaaactgtctttaggacatgccttattcaggtccgtaaagtcgatgcatactctccacttcccgtttttctttgtaatgatgaccgaattggcgagccagtcagggtattttacttctcttatcgatccgatcttgagcaatcgatcgacctcatcatgcacagctttagccctctcgggacctaccttgcaacgtttctgctttataggtcggtaggtcggatcgacgttgaattcgtgtgaggttactttgaggcttattcctcggaggttcgcacttgaccaggcaaagctgtctttgttttctttgagaaaggttatgagatcctctcgaatcgctgggtcgaggtcttgacctatccttacgcatcgtttgggatatgattcgtctatgcagacctgtgtgatcaatgactttcgaggtccgcgttgagaaagatcagaggatctaactgttttcatttctgcgagtttatcttctatcagtaatactacggggtcagcctttttgataagatcgtagctccccatatagcattttcgggagctgcgttggctgccgtacacgactgctattcccttgtctgaggggaatttcatgcattggtggtaggttgatgggacggctttcatggcgtgtagcatggtcttcccagtattgcgttgaaaggagctttcttgtcgactacgaggaaactcgtgagtcgcctcactcctcgtgcgatggttgggagctggatggttcctagagaaaaggccgtatctccggcgaacccggtaagtggcgctttcctgccttgcagctcggaatcgaggtgccccattcttttgaaggcgtcgtaaaagagtacgtcaactgagcttcccgtgtcgatcattatacgggagagttcgtagttgcctacattgattcgaataacgagagcgtcatcgtgaggtttatcgaggtcggtggtttcgctttcccagaatgtgatctggtggttaggtcccatcatcggactcttgccttttgtgtaagaatctgccttcctctgatgagttttgatcgaattgattgagtcgttgcagagctgagaccctcccataataaaatcgatgcgtttcggggagaggtgctcggttgcgcttctgcagaatttcgagagacgtaatggaaacctcatgtttttcttatgcgggggcggggggaggtgtggtgactgaccttcctgtcccgccacatagatcgagttctacaaaaactaggtctatgcgttctctcctagcaggtgggggagagtcacttccctccggtgttcgttctcgttttttttgcttgggagtttgctcctcctcctgttcgtcgggaggaggggtttcaactttggggtttgaaccttttttagtctttcccccagctgcgattaactttctaacggcgcgacactccttggtggaatgtactcttttcttgtggtacttgcaatattttccgaggtcaagttctggactctcgtcctcagctgccttgtctattgcgaataaggtatgatgcccctgcgtttggttttcctttttgaagggtttcttaattgcaaggggagcattttgcgttttagattctttgaatcgtaaggtcagcacagcgagctcctcttcggctttggcgaagtggagagctttgtgaagaccatcgtctaaagagactggttgcctaacagtgagttcttcacagaacctagaggagaaccaaaggccgttacgaagggctgctatggctacctcttcgtttaggtttgcaattttcgatttgattgctttgaatttttcgacgttagatcgcagggattcgttttgaagttgagtgagactccagaggtcggcttcggacgtcctatgttcgataagtaccgaatactgttttaagaaagcggcggcgagctggtcgaaggtatcaatggagttcccttcgaggctagcaaaccattcgagggcgtgacctacgaggttttctgcaaagaaacggcaatgacctgcttcgttttcttcatctttcagctacgctcgtgttatagcgaaacagaaggatctcagatgagcctttgggtcgctcgttccgtcgtactccgggaaacggagtctcccgacgtctcggaggcgaaatcgagcgatcctatccgtgaacggggtgcgcctggtttcttcgatcacgcgatctatgtcggaagcatcactcactgctaggtgcattcgcgaatgcatttgagtcatgttcgcatttgtttgagctgcgtaattgcggaatgtttccatatctacgaagttacgcggaccgaccggtgcttggggatcagttagactgttcagaaggtaacttcatggtcgttaagctggtgttgaagatgatgctgatgattcgaattcgtaggctacaaaaccaaatcaaaattaatgaaagaaccaagaaactcaattcacaactagtgtaacaaattatcaatacgtatttataaagg

SEQ ID NO: 23451 - DNA, 3492 bp, Arabidopsis thaliana
cttccacaacttccgagtcatcgtccttttggttatccccttttaggaccaccggatctgctacaacggccttggtcaatgtggctagttgcgccatcattcccttcatcaaatcccactgttcttgggccgttggagtattgttccggttatccgtgctgtcccttgcaccactactctccggtgcttccccatttatggacttcttcccggcctcaggtccggccgagtctgtcccatcgaacatcgtcccgactctggttttctcgttgatcatcgtttcctcctcaaccaaagtctcctcaacaatgcccttgtccttcttactctttcccgttttgctgctcttacccatctgcgaaacctctaaagttaatccacataactcctagtaaaatcgcaaaagagtaaagaacaactaccgcgagattcttaagccgacgagtggtgataccccttaacccaacacctagtcctagaaccaagcatgctctgataccaacttgaaaggccccgatccggactgcctaaagtccgggcgagttctctcgacccaagccactaagtgactcggccctaaccgtttatgaggttctttcctagtctaatccgtttcatatgattccgagattcaatatatgagacgaatagagtaaacaaacaatcggatactttattaattaagcaaaggattcgatacaacctatgagtttgcatataagctattacaagtcatataatcgatccctacactatccgaactatcaccacccatcatcccggccttgagtctctcgcgcctaagccaagtccttcccacgatcatcattcgttcctgaaagtcatagagccataagtaatcttatttacttaatcatatgcaagtccatgcaatgctctatatgccatacactactcggatccgtggagagaattcagagaggggaagatcgcgcatcagtccggccgattctcggcaggtcagttaagacccgccggtcctccgccgagccgcgtccccgcctcagccgatccctacccggaccgagtcttgtgtaggatgcacatgacccggatactactcagccctctagtcggtcctttcaaggatccgactactaactcacatcctagaacccttagactcaaagtctaggatcccttaccttccttctcgaggttaggtcgatccgaccctccttctttattgccggcacagcccggctaccgaatcctaagactatttattctcccaagagggagagagttttaatggtgagttttcttgtgttttcggtgtgttgtggtgagtagaatggtcctgggcgcccttccttatatagggggcgaatggatgctcccgaatcaacacatccgttccttgcacctttccgaagagttgcacctttccgaagagttgcgcccttccgaagagttgcacctttccgaagagttgtatctcttcgcccataaccgcccagctagtccgtcactcgtccagctacctcgagctcatccgtcactcgtccagctacctcgagctcaaccgtcactcgtccagctgcccgagctggactgtcactcgacctgagtaaccgtcagtccttccagctgagcttgagctttgggcgagctgacccagctgatttctttacgatcctagcttagcctgcatgatttcccctttgtccgagcttatggccagctccttctcacttgtccgagactccaccttcatctctcggaccaagtcctagccaacgatcctattgaggatcgcgggcgttacaagtctccccccttgaattggattcgtcctcgaatccgcatcaagttgatctttacccatctccttgaaccactccggaaaattggccttcatcttattctcggtttcccaagtgtattcttcacggcctccacaattccacaagacttttaacaaatcccttgattttccccgagtccctttcgtcattcagtccatgatccgtactggccatgcttccaccgtcatgttctcctttaacccgggaggtacatcttccacactttcttcttgatcacttaaacacttccgtaattgtgacacatggaagacgttgtgaaacgcatttagttttggaggaaggtcaagtttgtatgccaccgcccctactcgttcgatcaccttgtacgggccaacataccttgggcttaactttttccttgaggtgaatcgtcctgcccctttgtaggtcatcgcctttaagtacaccaaatctcctacttggaattccaattcctttcgacgtttgttggcgtagcttttctgtcgatcatgggcttcctttaacttgatttttaagaacttcattctctccgtggtttcatccacgatcgtaggtccaaacaaccgacgattcccacgggcgtccaacacaacggtgttctacaagctcggccatacaacgcctcatagggagacataccaatactagcttgaaaactattattgtatgcagggtctactaacgttagatatttctcccagtttcctcctcaatccaagacgcatgccctcaacatgtcctcgagggtttgaatcgttcgttcggactgtccgtccgtctgtgggtggtaggcagtacttaggttcactcgagttcctaaggccttttggaaagccttccaaaactttgacgtgaaccttgtgtctcggtctgacactatactaaccggaatcccatgtaaccgcacgatctcgtctatatacttctcggcaatgatttctgctccatccttatccgagatcgccatgaagtgcgcagacttagtcaatcggtctaccacaacccataccgcattgtgtttggacttgatccccgttggcagtccagtgacgaagtccatcgttatgtggtcccacttccattccggtataggtaggttttgtaacaacccacttggtacttgatgctccgccttgaccagttgacaagtcgggcacttggccacccatctggccacgtctttcttcattcctacccaatggtagtaccttttaaggtcgcggtacatcttgttcgacccaggatggattgagaacttcgattgatgggcctctcttaggatctcctcctttaatgccctatcgttcggcacacatactcgaccgttcaccacgattgtaccattgttcgaggtttggtactcggtcttattgttttgagcccatccttttatctcctcgtcccgttcctgagccagccggatcctactaagcaggtcggcctgatcggcggctcccaaccctaagggttcaacttctttagacaaggcattcacatgcaatgtccccatcatgttaaccaagtccacttggctccgttccgcctcaacttccgagcgcctcctacttagggcgtcggcgacttggttggccttgcccggatggtacgctatatccaagttgtaatccgccacaagttccatccaccttctttgccttag

SEQ ID NO: 23452 - DNA, 4895 bp, Arabidopsis thaliana
ataaccatcttgaagactctcacgacaaagacatcaattcgccacccagtgatcagaggagacaattctgagaccatatgaaacccctccatctcacggatagcaagaacaagcgaatcgaaagacaaaaaaaatttttgtgaatgatataactgccggcagaagaaatggatttagaatgaggattgtggataaaattaaggaagggaggagacttaaatagaagaaatctggaacagctacagttattaatgcggttccaactacacttgattcaaatttttggtaatagcttggtaaccgtcatatagggtaattataacgttaatttgacaataaacagcaacagttacgtcctttccattaaataccaacataaccacaatatacccaaccatatctccaactccgttcatttaagagggggaataagttagattttcaaaaaacttatttcaaattactcaaaatattgagcaaccacctctatgtacccttattacatgaactttaacacgtacacagacaaaaacgtacatagttatacgaacgtagagtttaaacgtacgtacacaacgtacatagttaggtggattatatataaacttacgtacaccgagaaaacacagaagcgtacactatattggccggctcagaaacttgtcaccagaactagattggatttttgcacgtcttcttgttatgacctgcttgtcgacagcgtgaaacactgatttggtaaaagtcttttctgtctctttttctgaagtgacgtacataggaagttaaaaatctccgcatggtaatactcaaaatacaagtagatgaatgaacgatgttagtacatacccggttttcacctctagattggatccttttggacagtggtcttcctggtggccgtctactgtatggaggaatgagtatcaaatccactatatgttgtgggatgacaacatctttcggatccgcgataggtaggattggttcttggaaagaatcagaaaacgtttgaaggccataccaccatccgacacaagacttcggatcaattccatgctcgattgcagctgctagagcgtgttcacatgggattcttagcttggtgtacctaagacacgtacacgtacactggtccagaacgacatgaaaatgctcaccggatttacttgtcacttgatagctccacggtccaaacatcttcacagcgtatttacctgacgcaggcaactcttgtagaaatctctcatcaacctcaggtgtcacagaagatttgcaccaagcaactttcttcctcctcgatgcgaaccatcgcattaggacatcccgaatgaactcgatcatgtaaacaatcggataagttttcgcttttgttaacacatgattcatggactcaaagttgttgctagacatgatattgtagcgttctcctctacagtgagctcttgtccaatgctcaaatcctatgtcctctaggtattttccgcatttagcactcttttcccttaacagttcaaaatatttctcgaaatccttgaccctataagctttggcagcgctgaaaaataaagcagacacaccaaacttaccataataggtggagaggtttcgctcaaggtgaacagcacatgctccatgatgcgctctcgggtaaacaacacttaggcctttgtatatagatgaatgtctgtccgagacaatcattaaatcgtcactgtcttgaataatctcagctaacttttcaaaaaaccatgcccaagaagcatcggtctcaccatcaacaacaccaaaagctattgggaatatttggaagttcccatcttgggcacatacaataaggagacatcctttgtaaggtccgactagctgcgttccatctaccacaactaccttcctcatatatatcaaacctttgatagaagcgccaagagagacaaagacatacttgaagcgctgtttaccatcatcttctggtgtatagtgtaggtgtgttattgtacccggattagctaattggagaagatacagataggtcggcaaaaacctgtaatttgctatctcatccccccttacattttccactgcaacctcttttgctctccaagcggtagaatatgaaatccgcacattcagatcatttaggagcagctgtggtaaatcgacagctcgcggcccaccctgagtagaactgtatctgctcctcacaacttctccgaggagcttataattagcatgtttattgtagttcttccgagagtcgatgttacacgtatgtgtcgtagcatacgaagtgattttgaaactttctgaatccttcacgacgcgagcagtcaattgccatggacaagtctcatcaacgcacaccatcttcaatgttttaggacatgactgaggttgcttgaagcaaaagcattgctttatcgcttgaagagacattgtttgttgcaagacttttctattcttaaaaacacttccaacaaacaaagtttcgcctgtggtgctgatttcaacctgtgtctcatcagctcaaaaattgagtaagtcatcgaacacaggagcagcatcgttaccgagattcgccaactcgccaccatgtaacttacgaaattcattatacacttggtaagcctcagctgcggtaactacaccattatcattcagtgtcccagttgaggaagctccaataccgtcgatcacttcatccccggtgacttcgtctatacaaataagattggaatccctatgcccttcgcagcgtgtaccgtaacccaatggagaaattgtttctccgccaggtacactaagaccagtgtacgtacacgtttccaatagacgactgaattcccctgtatctccgccaggtacactaacacccgtgtacgtacacgtttcaaataaacgactgaattcccctggatgttgagcagtctgttgagtgagactgacgtcttcctcaagattttgttgtacatattcttctactattacatcgttccacttgttgtaatcgtattcttcgccaataccttcactatcgtctgtggtaggatacagagtacttcccccaatagatccatccacaccaagataatcatcacacccatcatcatcttcgttgccttcctccacttcatcctcttctgttgtatcgtcttcaacatcggcttgtttctctacatcctcattattttcatcaacatttgtagcactatcaaacacacggtcactttcaaaaacttcaccatgagacctagagacagtattcccgaacgccttcacggtagtattgaaagagacgaacaagttgagagaaagatacctaccacgaaccaaaaaaaaacgtgtcgagacccatctgactgtcaatgtatacaggagggcgtttagtatctatcagcactgacatttctcccggcatccagtagctaattatgggattgatctcggtggacttcaaactgaaagcctctcggagtgtacggacaaagtccgtgtacgtcatggtttcctgaacgcgtacacaacaaccaaacatgccttcctcaggttcacatttccattctccttctttgcatttccacccaccgaccatagtaaatacgggaatatccataacccacctgcatcataaattcaggagacacacattaaatgcaactgaaaaatactatacatataaaaaacaaatggaatgtcgatactacacatttataaacctaaataccaattatcatttgactattttaaacaaacaaatatagatttttcaaattttctgataaaaacatggagttcgaacaaaatcaagatcctaatatgacataacaaaaaacttcttaaaagaacttcgttacttacacgagcaatgcttgttttggctccaaacttggtacaaaaacaagatcaacacttcttcagcaacaatatacgttctcaataattctttattcctgggttcatcttctttatctcaacaattattatcaataatttttttaatattatttgatgtaatgatgattttgcattaattgtgacaatagtcacatctaaacttttttggggcattaaatgttgatgtcacttcggaataatggaaataatctcacttgtaacggaaccgaatcgcgtcaacgtgaaacgggaaatcttcaactgaaccggaacagtaactaaacctgctaaactaaactgtacatttcaacagttactaagagagaggtgcaagggcagaaacgtcattttgcaggcgaaaagacaaatggtaaaaaccacatttgactttgacaatccatgaaaataaaacatgatcaacggatgtggcctgcaatttacccttgcgtaaaatcccaaacttaattttgagaagactagagcccagtttacgaaaatgtcgaaactatccccactgatttgcatattcgtaatcagtatatattgtaaaccggcttggttttatgatagtacacataggaaagaaaaaaaagcaaaaaaaaaaaaaaagaaaaaagcaaataaagaattaagagaaaacatattttgaaatttgaacagcttaatcaaagagaaaaaaaaaaagagaatttataggaagagaaggcataaattattttgagatgttgattagcctcttcgtcgtcggttattctaaactggtttaattaaagaatagtgtaatatttatgattttctgattttctccttcgagaaactatatttgttgtatctgttttgccctaaaaaggctatataagcctactataatgccatatcgtcaaagtttttgttttgttttttgttttcttgttttttacgtgcaagtaacaaatcaccatatcgtcaaagttacttgcacgtaaagatacgagaaccaatagaggaaattatgcagggtt

SEQ ID NO: 23453 - DNA, 533 bp, Arabidopsis thaliana
cgtttggatcatagtgagaagattggatcgagtatctccttcttcgtagacgctagtcaagtagttgtgcatctcaataacacccttgtagttgttcacaagacaaatacgtcagtgagtaacttgaaatcatacaatcttttgaatttaaaatgaataagtgtattgtttttacctttctatctgaatcagcaatctcgttcatgatttctttgaaccaatcgaacgagccttgttctcgtgttacccagtaaaagtaagcattcttggtattcagcgtcttccgttgagtttgcggaatccgactcgcagcttctgagtttaagcaactgaaactgtgatccgacgagatgttgctgttactacaactacctgagatgcattcctgagaatataacataactccaaaaaagtttagttgagattctgttactcatcaacaaggtttttaagcttgttatactcacagcttgttcctgttgcttaataatgttattgagtagatctctcaaaatgctaacgaaaggtgttgc

SEQ ID NO: 23454 - DNA, 304 bp, Arabidopsis thaliana
tcttccttaaactcatcttcttcttctcaactcacaaactcccaccgggaccacctcgttttcaggtcatcggaaacatcatctggcttaagaaaaacaacttctccgatttccaaggcgttctccgtgacttagcctcccgtcacggaccaatcataacactccacgtaggctccaaaccttccatctgggtcacagacagatcactcgctcaccaagcccttgtccaaaacggtgccgttttctccgaccgttctctcgctctccctaccaccaaagtcatcaccagcaaccaacacgacat

SEQ ID NO: 23455 - DNA, 676 bp, Arabidopsis thaliana
tagtaacgtgccgccagtgtgctctaaagtgggatgatgaaatgtacgggagagtttcaagcaagatggccggaccttttcccagtccgtgagcgatttgaacccttccgaggatgcaacgccgagcgccccttgcgcgtggtggatgttgccggtggaacaggatatactctgcagcgccttctaaataagattcctgatctccaagccgagctgactcttcaagatctacctgaggtattggagaacggacccgttcaggcggatgtacgtattcgcaggatgccgcacaacttcttcgagccccagccggtgattggggccgatgtatacgtcttaacaagagtgctccataactggcccgacattgaatgtcgagagattctcggacacactgtggctgcgatgaatcatgattcgattctgcttatcggggacaaggtgtccccactggtgcggcggactaacgcctacggacataatggcggacatgagcatgatgatgcttttcggaggcatggaacgcaccatagcccagttgcgagagttgttgtcgtcggttggactggatattgtgaggacttggcggtcaaatgggcctgtggatgaccacgaggggttactggaggcaggctcacagatcagcgaagctatgatattgtaaacatatagatat

SEQ ID NO: 23456 - DNA, 503 bp, Arabidopsis thaliana columbia
gctaagcgatctgccgaagctatgaaaaaggtcttatccagagcgaccaagagttgttctctagccccaatgccactgacacaatccccttggtgagagcatatgctgatggcacacaaacattcttcaatgcattcgtggaggcaatgaataggatgggaaatattacaccaactacaggaactcaaggacaaatcaggttgaattgtagagtggtgaactccaactctctactccatgatgtggtggatatcgttgactttgtaagttctatgtgagaatagttgactcaatatctggcgaccagactatatgttaagataaataagcgggatctcaagttgttacttgagcaggagcagattgtattggtgtttatagtatccaagtagttctctgttttttttttatattggcctttgatagcgttttgttaatcggtctaagcttctatggttttggactgttttacctaataaatatgacaagataaaacgtttatg

SEQ ID NO: 23457 - DNA, 621 bp, Arabidopsis thaliana
tttcctgaagcaatgaactctggtgttaccttggagtctcttaaccctcttctcacagattcatgtccacgccacttcacagcttcagcttttttcctgaaattttcaaaatgaaaagtttgtttaggaatctcgcgtgcatcattggcagacgaatatacgctctcttagcatacgcaccttttagcttcttcgtctcgaacctttgcatcgagttccttgcttggtggatacttaggcaaacttgatatgtgacaagggagaggctccgttgtaaaaaactgaagaggtaaatgagacaatcatttatcagtattcttcgggagaccgaatcaagaatgttaataaagaaaaacaaggctactacctcactcagtagagtcgaagaagctgagcatcgtttctctggttctacagatagaagcttgtcaagaagatctagagaagaagatgatagattcttgaacgtctctagaaggacacgcttataaggatgttgcggtttgtaacttgtcgcatgtgggaactttgtcgtattccagaactcttcagatggtgaacacacagtttaaagatcttgtgcatttgctcgaccttgaagaattatattttgaatatgaa

SEQ ID NO: 23458 - DNA, 3816 bp, Arabidopsis thaliana
tgactcatcatcttggcatgttccaatgagaggtccgtcgagaagatttagagagaatgagagtgacgatgttactcttgacattgggccgttgacatcgatgttgacttggaagtagcagagaatgagagaagtgattgtgaagggatttatgtttgaaatgtagaactttgttttaactttgtttgttgattgtctgtctgttgtgtttgttgattgtctgtctgttgtgtttaatttgttgattgtctgtctgtttttagtgttaattgtgtgtctgctttgagtgctgatttaattttatcattttttctcaggtgatttacaatgggacaacagaagaaaaagcgtggaagacaacctaaaaaagctgctgctaagaaatgcaaagatgaggtggagtatgtgggtacaattgagccaacagatgtagaacaaactgatggagagacagaaaaagaagctgatgaagacatcaatggagagacagaaaaagaagctgatgaagacatcaatggagagacagaaaaagaagctgatgaagacatcaatgaagagacagaaaacgaagctgaagtgcaagcaggagaagaacctgaaggcgagcttgaattatctggagatgaagaagctgttcaacctaagaccaagaggcagcgtggaccaactaggatgaaagatattgctaaggatccaaatgccagagtgagagtggagtacaccatgatgggagagcctattggtaaaggctcagttaagttagcatcatatgcaggcgcattggtccgtgaacacgtccctatcacaattaatcggtggacaaaaataggtgaagaaatcaggacacttctctggaaatctgtccaggtaacacttcactttttattttattgtaatatttgactatctttccttatcacagcaataatcactttttctgtaattgattgaaggcaaggtttgaactagatgaggagtatcaaaaggttgcagtgcttaagcaaatgggatgtttgtggaggtcctggaaatcaaggcaagtaactaagtttagagaagcaaagacaaaccagcagaggatgaatgtgcgacctaaaaatgtttctccatttgagtggagaaaatttgtgaagagcaaaatgagccctgaatttaaggtatgttgagggagttgttttaactaagtatatttactatgtagaaagttactaattaacaatcattgttaggttataagcgatagctacaaggagagaaggcgcaaccaaattcctcacacttgtagtcgcagagggatggttagacttgcagaagatatggtaatcttatgtgcctgttaggttatgttttttattgctttgaaattttaaaacacttagcttgctactaatattggcatgttgtgtttttcagaaaactagtagtgcagacccgactgaagtgacgaggctaaaggtttgggttaagtcacggaccaagaaagatggaacaccagtgaatacaaatgcggctgaaaaaattgtgagtatgttatagtttggaagttgtgacagtttggtttgtgatgattgttaggttagtgatggtttgttaaattagataggttagtgatggaacagaaattggactggtttgtgatggttttgaaatgaatgtgataggcaataggttagccagtgattgtgtggactggtttgtgattgtgtgtgatggtttgcagaaaaaggcagctgagattgttagtagtggtcctcaatcaaatgggacgaatgaagcacaagattcacttagccaactcttagggcctgacaatcctagtagactaagggcgatgggaagaaatatgaacaagaccaaactagcttgtttccaagtaaaaagcaaatgtatggctgaaatgcaacagaaacaggaccagctccagcagaaggtcaatgagttacaagaagtaattgacaagataaagaaccatgtaaacacttgtctacttatacataaagctaatcaatcggttagtacatatatttgactttgttttttttttggtacagagacaatcagctgaagttggtgaaacctcagctgcaagagtaagtcacttttatttgatacttttgatctcttggtacataattagatgataatagcctattgattccttatacagagtgtgaaccaaggatcacaacctaagtgtatcttgatggattgggctggtactgatgcaaccgttgctgagggttgtattatatcttctgatccggatgagatagtcaatggaagtcgcttaggtcctacagatgttaaagtattgattgacactgcggttgtaccagaagcatacctttggagacccgcagttaacatggaaattatggagaaagttgttggtcagatgatagcttggcttgttgctatgtgtgttagcctagaggagaagctcaatccagacgacattgcacaggtaaaatgttatatattcagagtcatactaatatattcagagtcatactaagacattggtttaatgtgtttgacagggaccaagacccacttatggaaacaagtgcaaactactggatttgtcttccaatgacgttattgttgcagaaggacgttggcagacaaaagaccaatctgcattagttaatgggcttcctctcggacctgctgcagtgaaagtatttgtggatgtaatacttcaacctgagacgttcatatggaggccaacgatggatgtgacataccttgaggactgtttacagtcttttgtagcatggcctgcccacaaagtttcctatgaaaacaccacagattcagcagttcagaaagctcctcttcagagttctcaatcaacttatccaacaggatcagcctcaaaaggaaagtcagcagcagcaagtcaacaaaatggagcaacagagaaatctcttggtgagaagcaacaaaatggagcaacaaaaggaaagtcaggtcataattcttctattcaggtatctgcagccaagggttcagaatctgcaggaacaattgcaaaatctcttggtgagaagcaaccaacagtagttccaaagtctcctgtgaagaaaactcagctagcatcacaaacccctctacggagatctccggtaagtttgtctttggtttgacatattgactaataaaatttctacatgcgtttaatcctggtttataatgtaacatgtcagcgccaaaaaacatctgaaggtttgaaggcttatcagaagtgcaagttaatggatataagtggaaagaagcgggtggttggtgtaggacgagtgcattcaatagacccagatcaaaaggtacaccatgttcatttgggagagaatgcagctagagtttgggtagatgtagtgaatgtagatgatgcagcagtctggaggccatcagatgaaattgagtatatgagagattcacttggttcatcaattgcatggccaaaagataagttggtgacctactgactttgcagaatctagggtaagttttgaaattgttgtgatgcttgtgctttggttttatgcaggaactgatatgagacattgttgattattgcatggagtgaagaatctatggtccagattagatagttttctgattaggttaagactagactaatctacttctattatgaaatttggaatcagacttgtgttgttatgtatttggctttgcttaaacttgttttggatgattatgtttaacttttgaatggtgtctcttggattggaatcagacttatttataatataacaactattaagacttatgttatgttgtatgtttatgtta

SEQ ID NO: 23459 - DNA, 581 bp, Arabidopsis thaliana
tgactcttgaagcatcgtttagtttatctgctctctcatacaaagccgccacaaccaaatgcaactccttgctattgacattaggatcagattctaatctctgaaacaacgactcaaccatctcaaaatctttcttcgatgagtataaactcagcatttggaaatgaacttcatcagggaaaacacatccttcctcttgcatttctctgtaaaccgtgtctgctttttcaaactctctttgtttcccgtacgcgttcaacaccatagctatcacattcgaatccggaaagtaaccagcggttctcattttctcaaacacttcgatgacatttacgtatctttggtttcttgagtaaagattgatcatacagccaaatactgatatgtcttttacctccccggattcaaaggcttgacgaaaaacccatgtcgcctcttccgttctcccagctttagccagaatggtgatagcggtttccgaggaatattatccgggagctttaactcgtgaagcagacgtttagcatgacccattagaccaactctttcataagcacaatcatggtttgatacagaacttg

SEQ ID NO: 23460 - DNA, 563 bp, Arabidopsis thaliana
  unsure (1)..(563): unsure at all n locations
nnnnnnnnnnnnnnnnnnnnnnctaaagtggctggagcgaggcctgccgtggcgcaaccaccatcagcaagaaaaactcccgtcgcgtattgcgatggcgctggagtcgctaaaactgtgcggcgtagtagtgattggttttgccattggtctaagtggactggctttcttacaacacgcgaccgaagccagtgaatacacgttaattttgctacttttcctcgttggtattcagttgcgcaataatggcatgaccttaaagcagattgtccttaatcgccggggaatgattgtcgccgtggtggtggttgtcagttcattaattggtggtttaattaacgcctttattcttgatctccccatcaataccgcgctggcaatggcctccggtttcggctggtattctctttccggtattttattgaccgaatcttttggtccggtaatcgggagcgcggcgttttttaatgatctggcccgtgaactgattgctatgatgttgaccctgggctgattcccgcagcgctctactgcactgggcttatgcggtccacatcaatgga

SEQ ID NO: 23461 - DNA, 983 bp, Arabidopsis thaliana
agtaattcacaagtataaactcgccagaactcctcaaacagtgaaatataatatagcttttaactgtttttcggctggaccgggtttttaagtgcatatataacacgaggaattttggcaggtcaccaacaaaacttttaaaaatattaaaaattcccatcaagaatagaaattaataaacaatgatatctctaataatatagatattttgaaacgttaggaataatcgtaataatgttcaacgttggtggtggtactcaagatggaccctccctcccacattttcctcactccttcgtaagtcctttccacgcataagggtattatagtcatttcacataaactaacgactactagacttgtatataaataggaaggtgaagctctctctttatccatgcagagacaacagaaaccacaacaaaaactttgagtcctcttcttctctatacacaaacatgaacacttttacctcaaactcttcggatctcactaccactgcaaccgaaacatcgtcctttagcaccttgtatctcctctcaacacttcaagcttttgtggctataaccttagtgatgctactcaagaaattgatgacggatcccaacaaaaagaaaccgtatctgccaccgggtcccacaggatggccgatcattggaatgattccgacgatgctaaagagccggcccgttttccggtggctccacagcatcatgaagcagctcaatactgagatagcatgcgtgaagttaggaaacactcatgtgatcaccgtcacgtgccctaagatagcacgtgagatactcaagcaacaagacgctctcttcgcgtcgaggcctttaacttacgctcagaagatcctctctaacaggctacaaaacctgcgtgatcactccctttggtgaccaattcaagaagatcaggaaagttgtgatgacggaactcgtatgtccagcgagacacaagtggctccaccagaagag

SEQ ID NO: 23462 - DNA, 588 bp, Arabidopsis thaliana columbia
  unsure (1)..(588): unsure at all n locations
tttcccagacaatcggctttttttcacgaatttgactcttagcaactcctatgttcgaagccaggtgttgtctaattaaaccacgaattacaaatgtctggaagagctctattgctatttcgcgaggcaatccacagcgatgtaatgaaagtgaaggtccaacgacaatcaccgagcgccccgaataatcgacccgtttcccaagcagagtctcgcgaaatcttccctctttgccttcaattacatctgaaaatgacttgtaaaccttattatgaccatccctcatgggttgtccacggattccattatcaagaagtgtatccacggcttcttgtaccaatttttcctgacacattactaattcccccggtgtagatctacttgttgttaatagatcggtaagagtattgttccgatagataactcttctatgagagttcaatngtaaaattttaaaaatttttcccttttggggggaaaaaaaaaacccctttttcccccaaaattttttttaaaaaagggggtttttttttttgtttataaacccccccccggccccctcccccccccctttttttttttcccccc

SEQ ID NO: 23463 - DNA, 493 bp, Arabidopsis thaliana
  unsure (1)..(493): unsure at all n locations
nnnnnnnnnnnnnnnnnnnnnnttaaagatctacagggataagaaactgttccgtaacgcgctggaagtggaaggtctgaccaaagggtttgataacggtccgctgtttaaaaatctcaacctgctgctggaagtgggtgaaaaactggcggtactgggtaccaacggcgtcggtaaatcaacgctgctgaaaacgctggtgggcgatctgcaaccggacagcggcaccgtaaaatggtctgagaacgcgcgcattggttactatgctcaggaccacgaatatgagtttgaaaatgatctgaccgtgttcgaatggatgagccagtggaagcaggaaggcgatgacgagcaggcggtaccagtattctcggtcgtttggtgttcagccaggacgacatcaaaaagccagctaaagtgctttccggtggggaaaaagggcggatgctgtttggtaagttaatgatgcagaagccgaacattctgatcatggacg

SEQ ID NO: 23464 - DNA, 485 bp, Arabidopsis thaliana columbia
cctccatcaacaagctcactacacgcggaggttctcgggtttctccatgccttacaagtgatatggattcacggattgcgttatgtttggttcgaaaccgataacagagaccttgtaacgttactcaacaatgacgaggatcatcgcttgcttggacctcttctttgcgatatacgttattggatgctaaagctaccctactgctcaatcgactttgtcaatcgggagagaaactctgcagctgatacaagctcactacacgccggtgtcttgttaatcagaatgataaagccccaaatttggttctgaaccttagacccatttaaacaaaccaaaggcccaatatttgtacaagtttaggttaataaactttagttcagtacctcagcccatttaatttaaccagaagcccaatatctgtccaaattttatgatggcatgcctaaattgttgtatgggtgatggtgacgcttaacacaattgtt

SEQ ID NO: 23465 - DNA, 729 bp, Arabidopsis thaliana
ggccattgcaaattacataaatgatatccaacctctagaggataaacctcattaatttgtctatattatgctgaattccataacatataaagaattatgtgagtgttaattatttaccaataaattagtataaattttgaaatacaaagcaaaaaagtttttcataaaagttcattaaaccttttgcctaaattatggcatgtgttattaagattagaaataaatattctgctagaaatctagaattctgccacacgtcatgccacgtggcggacctttaatgtatttaaaagcccttaaactcaatgccataatcaattttgaggaaacaacagttacaaagcaaaatgactagtaaggtcgtcttccttcttctcctctctctcgtcgtcgtcctcctccctctctacgcctctgcggctgcccgcgtcggtggttggagtcccatcagcaacgttacggaccctcaagtcgtagagatcggtgaattcgcggtctccgagtacaacaaacggagcgaatcgggactcaagttcgagacggttgttagcggcgagactcaggtcgtatctggtacaaattaccgtcttaaggtggcggctaatgacggcgacggagtgagcaagaactacttggcaatcgtatgggacaagccgtggatgaaattcagaaatctcacttccttcgagcctgccaataatggtcgcttcctttaagcttttaacatgt

SEQ ID NO: 23466 - DNA, 894 bp, Arabidopsis thaliana
gggagccgctaaagtaggaactcacaattccaccaaaagctgaggatccccagcacaaagactgcagcgatcctgacacgctttgtgactcaccacgagcccgttccactaccattgagtctactacctattaaaacgttaaccacttaattaatatttcaatatatccaactctatcttgcaacttaaccaagctaagttaaccagaatggatttgaaaacttacaacatcagaaaaggcgacagagagggaaccgagaagtatacaaaaagcagcactatatttactgtcaacaaaaccagccatcaaactccaagaaaatgcaccaagaagtcccgagagaactagatatgacctccttcgataaccaaatagaggcactgaatcactgcaaaacagaccaacttccttaaacagttatcacagtcaagaggtatagaggtgataaagaactcatacctgataaaaccatagagaggcttaacaagccacggcaatgaagaaagacccgttatcacagctgtctagtcaagaggtatatatttgtcagcctataaagagatattcccatgaaagtccaacaaggaactacaaaaagcatacctcagcaggatcaagatgcaagtcatcttttaaatagaaactaacagcgagcctagcgagtcctaaaacaccttgaacaaaatacaccattgctacagcaacattatctggtgataattcaacaccgtagaatttgattctgctgctactaagatttcttcctttacgagggggaggctgtgttctaatactagaagtagtatctctgtctccttctacatctgtattcgatgtatctccttcagctacacctattcatatacacacatttctgaggattcagttaatgg

SEQ ID NO: 23467 - DNA, 611 bp, Arabidopsis thaliana columbia
cggtttagtgtccagatatgttatatcgtctttagaacaagaagcattcaagatatcagatgaagggttaagtgattttacgacggtaacttacccatagatcagcccataaggtggcaccggatttgggaacaatcactgtaacattagacatacgttttgcgacagggataacatcgctgctccaaccaacagtgacccagacatctccgacattgaaagcttttaaatagttgttactatcaaatagtctaatctataagcaaaaggggaaacaagatcagccaccattgtcattttttctcaataactatagaggttgagtgaaacacgtcagcctaaactcatctgttctctttagggtatggagagatagtaaagaggtaataacctgtttcatgagtgatgccagatttttctccactgctaatcttccgccaggaaccttgtgaatccaggtctgtcgtattgtatgatgctctcatgtatttgagaacagcaccaacaacctctctaggagaattcccattgcgatcctcctgcaagctcgggtcgcacagatcagccagcctaaatcacaaaatgtcagtgatatcactcttttaatagga

SEQ ID NO: 23468 - DNA, 588 bp, Arabidopsis thaliana columbia
  unsure (1)..(588): unsure at all n locations
cttatagtcttgcttaagaatagactgagccgcttgattatttgctccaacagctgcagcttgccatccaccatagtttccacttgggtcactcatatacagctgaaacccgtggttcctgtcccagcctgcaaaaagaaaggaaactccaaacgggcggagaccaccaaactgggtgtatccttgcttggtgtcacaaagagactgaaccagctgctaaacgggcattggctcttggtacataaaggtgtaacgctgagcttgaactcgagcagtgttaatcagaatgttggcatcagacattataccagcaactgcacaagccacatggtcatcgatcttgtacattttctccatggatgaagaggtttgaagaagtttagaagtgactttcttctcaccaaccaacaccactccgtcttttgccaagattccaatggcagaaccagcattgccaatagcttccatagcatattcaacctggtagagacgaccttccggtgagaagatcgtggtgcgactatcatacctccgagacattttgaaacagcttcacaccaaggaaganagaaagaacacccaaattat

SEQ ID NO: 23469 - DNA, 522 bp, Arabidopsis thaliana columbia
ttaaaatacccattggttattattagattttataaagaaaatgacaaccaaataggaatatttttaataccaccattgtatttattaatgagaagttgaataaaagaaaataggagcgtctcatctctttttgaagggcttttttaaaaaacaaatactagtgtgttttctctttataaaacaaacctcactcttttgtttctttcattcatcatctccacacaaaaaaaaaaaaaaaaaatgaacaacttaattagctctctcgaactcacatctcttacacttgaagacccatggcctgctttctagcctaaatttcctcgagaaaacaagcaaaaaaacacaagaaagctagaatcttattttcttcttggtctttcttggtttcttcaactttttcttaaaaacgttttcaaaaaatcatgggcaccggagaaaaaaccctgaagagcttccagttacatcgcaaacaatcagtcaaagtcaaagatgttccaaaagggtgtttagcgatcaaagtgg

SEQ ID NO: 23470 - DNA, 545 bp, Arabidopsis thaliana
gtgctttcatatgcgaatatgcaggtgtagttgtcacgagacttcaagccgagattctgtcaatgaatggggatgttatggtctatcctggtcggttcacagaccaatggcgtaactggggtgatttatctcaagtatacccagattttgttaggccgaattatccatctctccctccactggatttctcaatggatgtgtcaaggatgaggaacgtggcttgctacattagtcacagcaaagaaccaaatgtgatggtgcaatttgttttgcatgaccacaatcacctgatgttcccccgtgtgatgctttttgcgctggagaatatctcaccgttggccgagctaagcctggattacggcttggcagatgaagtgaacggcaagctcgccatctgcaactagtttttacaaagtttgtttttgtgctatagcttgagccttgaggtaaattctcatcatagtgttgttatatctttggtctctctgtcttgcttcctatggcattaatctcttacagcaatgatgcagatggagaaaattttg

SEQ ID NO: 23471 - DNA, 527 bp, Arabidopsis thaliana
tatcgagctatcctggaccattggagattgtctcaatcttggtaagtgataaaagaaagttgtaagcatccgagaaagctatatttaccggctctttcttcaggtggtgatgataatccaacttatttgttttgacgtgtaaaaatgcagtgtccggatcctcatttcaagaaacgtcatcaaaagagacgtgttgttcaaaagcctttggtgaattccattcttcaaaacctaaaacccggtggaaaagtaagtgttttgcttactgcctaccaacactactggttcttttacagtttaaacttaactatatacattgtcattgttactggttgtgcacagatatttgtgcaatccgatgtgctggatgtggctcaagacatgagagatcagttggacgaggaatccaatggtcttcaacacatggacacagttgacacagaggatgggtggttacggacaaccgatgggtataagaacagacgagagatcacgcagagttcgcaggtgcaagaatctacagagac

SEQ ID NO: 23472 - DNA, 587 bp, Arabidopsis thaliana columbia
tgttgagatagatgttattgttctatgaaacagattctagggcttgacatttgcaaggacactatagttggagatgacatgatgagaggtatttcaggaggtcagaagaagcgtgtgacaactggtgagatgatcgttggacctactaagactctgttcatggatgagatatccaccggacttgacagctccacgactttccaaatcgtgaaatgcttgcaacagattgttcacctcacagaagccacagttcttatatctcttctccagcctgctcctgagacgtttgatctattcgatgatataatcttattgtcggagggacagattgtgtaccagggacctagagaccatattctagagttctttgagagctttgggttcaagtgccctgaaagaaaaggaacagctgatttcttgcaagaggtaaatatatatattagaccgttagacctaacttggtattaatatttgacccgaaagtgacttacaaattacatttacgtgtggaacaggttcctcaaagaaagatcaagaacagtattgggttgacccaacagccctatagatacatccagtgcggagtt

SEQ ID NO: 23473 - DNA, 441 bp, Arabidopsis thaliana columbia
gatccctgttcttctccaaaaagccatttgtatcatagagaacctgtaaacaaaatcatcattccaacaaaaccgccataagtacacgaaaagttgcacaaaatcagttccgtataaaacctaatcagtatgcagagtctggcttttgagctaaaggaatcaactgacctctccagcataatgattaactctgaaggctcgacctctctctcctttgaagcaagagttggtcttcaaatgttgcttgagcttgttggcaaaggtcaaatcagttgcttttggaaaatttgattcctcgtctagtagagacaacaaaccaattggtttctgcacaagcaaacatatgcaagatattactttaaaataatgtcagaaggtccttataagacaacgaatacaaactgtggcaggccattaattaccttctcaattagatctaag

SEQ ID NO: 23474 - DNA, 1147 bp, Arabidopsis thaliana
tgtcgtttgtaaagaagtagagacaaggccacggaaaagtcccggtccaatcaaaccaaccttgcttccagcttaatcttgtgacatactgtaatgcgcacgcagtaaaccgctctttcctctagcgaatttatcgcatttccagtctcctccccatgagcaacgtttcccaccaccatgtgccttacagaaatcagtgctaccttgcgcactcttctcacaaccatcagacttacaccgtttcccaccaccgtgcttcacgcaacaatcagtcctcccacgagcgctcttagtgcacccggccacaacacatctcttcccaccaccgtgagctacacagaaactcgtcccaccatgcacactcttaggacaaataccaccaccatcaaacatacagcgttttcctccaccatgtgctttacaaagcggagtactaccttccgctccttttgtacatcccgcaaatatgcagcgtttcccaccaccatgagctttgcagtagtttgtacttccttgagcaccttttgtacagcctgaagactgacaacgccgtccaccaccgtgggaaatacagagtccagcttgtccctcagcacttcgtgtacagctttcaatcctacaccttttaccaccaccgtgcttgatgcagagcccagatttgccacgtgcagccttagcacatccctcagggaatccacaccgtcttccaccaccatgtgatatgcagagatcggttttgccttcagcactctttgtgcatcccaagtgttggcatctctttcctccgccatgggctttgcagaaagtagttttgctctcagcacctttgttgcaacctagcttttggcatctctggccacctccatggccaatgcagagccccgaagctcctctagctcctttaacacatcccataaacttgcacttcttcgggttgctcatcctttgctgagaagacgtggcagaggccgacctgtcagagaaagcgcttacagagaactctgactcatggctcagctgtgaattataagcatcagttccacaattagtactacactcttgcatccttgaaggttttctacattctcgtccttggagcgacaagaagcgatggcatatagcacctgatcgccttgctgaggtagac

SEQ ID NO: 23475 - DNA, 562 bp, Arabidopsis thaliana columbia
  unsure (1)..(562): unsure at all n locations
cgccctcaggattcatgtaccattgagtttgatggtgcttctaaaggaaacccagggaaggctggtgcaggagctgttctccgtgcttcagataatagtgtcctcttctatttacgggaaggtgttggcaatgccacaaacaatgttgcagagtatcgagctctgcttcttggtttgaggtctgctcttgacaaagggtttaaaaatgtgcacgtcttaggcgactcaatgcttgtctgtatgcaggtccagatataaaattcactcttatcttttgtcttgtttgaattattcatgtttgtgccttaattgttttgataacttggattcgacaatggaacaggttcaaggtgcatggaaaaccaatcacccaaaaatggctgagctgtgcaaacaggctaaggagctcatgaacagttttaaaacattcgatatcaaacacattgccagggtaagcaccaaacccgcttggtctagctgctgatttgcttgtgatcaactctgtagtccgtctgcgcaacaatcattagatatcaatcatgtntggttttgagagttttag

SEQ ID NO: 23476 - DNA, 478 bp, Arabidopsis thaliana
ttgcgtgtcttcaatcagaaaccaggagggattatttcacttctagatgaagcctggtatgctttatctttctcagattaacttgcatgcctttctcatagtactatccgttcatgtattttggttgattcaactcagtatgtttcccaagtctacacatgaaaccttctcccaaaagttgttccagacgtttaaagaacacgagagatttgccaaaccgaagctctcgcgcactgattttaccatatcgcattatgcaggagaggtacagtattgcttcttcatatttgtctatttctaaatgaattgaagttgaagctttctgttcttgatgtgtacctacatttgcaaggttacttatcaatcaaacgatttcatcgacaagaacaaagattatatagttgctgaacatcaagcactatttactgcatctaattgcaagtttgtggcgggttttgtccatgcgcttcatgaagac

SEQ ID NO: 23477 - DNA, 529 bp, Arabidopsis thaliana columbia
catctcgtgacctatgcaagtctgcgccgtctgtgaaaaacaagcagcataacaagtatgaatcattagctaacattctctatcactctgttggctaagctattttcatcaactgtggagacattcgtgaatatgcctaatagtttgtaaatctttgtcaaaagtctcaatcggctcttaagctccaatcccaattttttcttgatcatggccaaattaaaaagcttatccatggataaaaaaaaaagtttcatgtagttttgaaataggactagcttttgatatacctggcaatgtttagcataactcttaagtaaggatctttctctccataactcttaggtaaactggttcactttcaatgacaaatatgctgccataacaaatcttttatgagactaccgctaggactttcatggatatgttatggtgactatttagagcagaatcggaagaaagaaatccaagatgatcctcgttttctttcatggcttagaacatagcaaactgatctcaagcaatagtttgg

SEQ ID NO: 23478 - DNA, 604 bp, Arabidopsis thaliana columbia
  unsure (1)..(604): unsure at all n locations
cgtaacacaaccgtagtaaaggcctttccccgttttggacaagcttaaacctgtagaatgatccagcttctagcccatttactaagcagaagtctctccagcctccactgatactagcctgatcattgactgtactgtatctcagaccaagtgtccatgattttccatgtttattcattagatcaatctcacagcatctctcgttcaggccatttgacctcgcaaaagcctttataagatactgcaaaagcgtaacgcttaatactaattagtgtgaaggtacgagactatgctctcaaattataagaagagaacagtcaagtaatttaccaatctatctcggcttaggttcgaaggcgtgacatgcgcaacaagataatagtttttggatgaagactctgcttctgttcttggcttcttcttcgacacaatgttcttggaatctgaatacacgttccatgcatcatcttcatcagccctatcttcgtcagaggatatgtactgtaacttacagaaactgcgaccggaggctgtgacgtgaaaggtcatgtcccgatttcntgaaaacgacacgtcgtcacttggagagagtgtcggtggagaa

SEQ ID NO: 23479 - DNA, 5856 bp, Arabidopsis thaliana
tacttatataataagtaattattcttagtattaaaatatattttttctaacaacattctcaacaatgcattatacacacaattcctaaacaatgttcgtcttaaactaattaaatagagggtaatattgggattctcgaaacctaagaatttgatgattaaacttcttacatactcttcaccctcggcgatttattatatagatatataacaatatgcaaactattcaaactattaattaatccatgactactatacactcataatttgagttaagattatagaaaaaaatcttttgagtatgagaaaaccaatcaaattattttattgaaaaacatttaataacaaaataaatttagtattagtacaattaaatatgtaaaattaaataataaatacatcattaatctataaattaaaagttgaagagcttacattaattattcagtggacacatggcaaatgttaaagtgatgatgtgtcaatcatatggagagagttggccaactttcatatatatgattttgagtctagtttcatccatctttcatagcattcaccatcatttttgtacattttgcatctttggtcgagtctaggactagtcttgcatacattctgcattctagagttgtttcaggtgttttggagctattggtgctcagaaagaaggaaaacagaacagaaagtcacacttccaccaacatactcgatcaccagtagcagagagggaagcagtcagctcagcagtccatccagacacttctaatcgatcgcagagtagaccaggcagtccattctgccagatatactcgatcgcagaggagaggaggcaatccattctacaattctactctatcgtataggcgaccaggcagtccactttgccagtccaccagttatactcgatcgcaaaggagaagaaccagtccatcctgacagctgacacacttactcgatcacagaggccaagaagcagcacagaccattctgtcaaccaacctactcgaccaccacctcgaccctctgatccatccgcactcaaccaaacaacctgagcatccgaaagagaagagaagagaaggcccattcgaagcccatttgaagcctatcaggaagcccactttgagccgatactcttgatcacgtcgtctatgggccgttaagtgggctcgaagcccgctttcttatcttagtataaataagtctctaagggtttcgccttgagacatgcacttttagagacacgaaaatcaaacagaaacagcaaaacactcgaccaacacaactctgtgtagagcactggatgaggtcgagtgacaggtcgagtaacaggcagaaagtgaaacagggatactcgactgcacagtctgttgccagacaactgggtggtcgagtatcaggttgagtaacaggaaagaattgcagaaactatgcaacagataacaagatgcagtaaacaacagtagagtaaacaaagaattcaatcagataaagaattcccgaggatggggtaatcgagtagtttcgttttctcagtttacaggtgattgacatgctcaataaattaaccctagacaacaagttccttaaccaaatctaagtgccaccgcaacagagactctcaagttaacctagtcccagactcaatcaccattgacgagagctaacctaacaggcattacgaatcaacaagttaaagccaaaacgctccctgcaaccaataccttggtacagggtcacgaatccctggaattagtggttcagacatttcatcgaacaccttttgggcgcagaaatgtctgggctcaaattccagttgatcagaaagcaataggcattaagaacaactaattcaaaagggatctatcaatcaaactcaaccacctagcatactgagaattctacactactctaacccatccttagaaacctattcactactcagacatcattgtagagaacataaacgttgaacaggatgaaaacatgataacaacaatgtaatagcagaatgataacaggatgaacaacagtaaacgaaatcaagaacaaatactgaatactgaatactgaatagataaagagaaatccggattacaaaaaggtctagaacacaatgtctgcggaataaaaccaagctaaaaacttgttttcgaaaatgtaaagtacatgttacttatagcaaaatattccgaaaccctaatactcaaaacgacgcagtattgggatgaattaagaactgtactcgacccaggtggtcgagtgagaggttgagtgaataactggggtcttcttttctttcttgtgctcgagtgtctggttgagtgcggaatgaagaagactctgaagctcgccatcgagtaggtagtcgagtggtggtgatggtaatactcgacttccaggtagagtggtgtgatcgagtggtggtcaggtggtggaggtgaagacactcgacctgggggtcgagtgaagtgatcgagtatctctcgtggtggtactcggccaggggtcgagtgatgagatgaaatcgagaagtcccctactcaaccagggggtcgagtggtctgttgaggccttgaagcttctacccgacctcggggtcgagtggtttgacatgatcaggtccgcttcttccagttagctcgtcaacatctccaaatcacttgaaatcaacacaaatgtgcaacatgcatgcaaacctatcctaaatatacaaagagatgacaaatgatgagaaatggtataaaacaatgatgatatggtgctatagtgatgacaaatggatgctcaaaacatgcaaaatacacacttatcagaagagaccaaaactcgctctagtgggtcttctaatttcatctctgaaatactatataaagctgatgaagtgaaagaatctatcaagaagtttttcccttctatgatcggtttcttaaccaaagtgttcatatcgaacagcatagtaagatcgccaacattcagccctatcctcccttctcgaacatctatgattgctccagctgtgtgcaagaaggatctcccaaggattaatggatccttaggttccttctcataaggcaagactacaaagtctgtaggaatcatgctctttctaatcatcataggagcatcaataagaattccatctttaattcgggtagaacgaactgccaacacaagagtgataaaggtatgctcaagattggaatacccaagacgcatagcaactgaacgaggcatcagattcacactagaaccgagatcacataaagctcttgggaagaaatcaagattgatggtgacacttagtacagaggttccaggatcaggcagcttttttgggattcgttcctgaatgatgtcgctgccctgctctgaaatcatcgtaacactgcattctttcgtcaaattcttagtgaccattgtcttaacataccttctgattgtgggagatagatgaatagcttcaactagaggcatctcaacaatcagattatcaatcatagccttgcatctgacatcatctaaggcttgtcttgactttttaggactcttggagaaggaaattcgccgatttgctgacttggtttcagctggaatttgcacactgtctgaacgagctcggtgtcgatcgacaggagctgggtgtcgatcgacacatcgagaatagtttcctcctccacgcgaaattgtcgattccactcgacaaaggaaaaacagagtcgtcaagagtaattggtgtcgatcgataccatggtgtatcgatcgacactgagtttttctctgcaattggaaaagatgaaggctgagctgatcgttcgcgctgaagtattgggttgagctgctttgcgctgcgtagtgtgactgcattgatagaagctgatgtaggtgagagattggagatatgagagcgtagattgtcaatcttgctattgagatctgtggagagagaatcatatttgctatcaagcttggttaggcctgcaagaagctgcacaagcataaattccattattgtctctgatgagggtggagggggggcttggataggagcagaaattgctgaaacaggagtctctttgctcgcggtggctatctcagctgaaattctttgttctatgtcaacttcctgcgtcgaaagacaagttaaagcattggtgatgaggagtaatgcttcactagtggttcttgtcatgaagttacaatagcttgctgcatcgagttgactccggtatggcttgtctattcctttgtagaataggtagatgagttgtctctcttggaagccatgttggggacattcacgctgataagaactgaaacgtagccaagatgcactaagggactcggctagagcctgagtgaacgaagagatttgcaaacaagtgtttcatggatgcattctttgtatcagtccaattggttaaaagctggttccagttgacgcaaccatgatgttcctctgctcgcgagagagtgggggaagagtttgcaaagaaggtaatcagctggtacaccttctactttgatagaggaaactatgtcttcgaagacttccaaatgatctaatggtgtttcatcaggagatcctctaaactttcctctagatacaagatcataataggcagggtgtatagcaaagtcttctctttcaaatggaggtagcttaaatgctgatcggttggtgtataagagatcagttctgttaaaatcgcctattgtagccgtctagttctgcagagggtgtcgatcgacaccctgatggtgttggtcgacacagccgtgaaagtctgccatggaaacgtgattatcaatctgaaggtacatgaaacacaagagaccaaaaaagacaaagaaccacgtgagtaggtgatagaaaagaagtatctagacttaaaaggacacctagtctaatggtaaactaaaagagaacttcggcaacggcgccaaatttgatattgctcaaatcgccttaagcttactccctccaataagagatcgtcgttagcacttaagggtcaaattccaatgagctctcgatgttcacacaatagatttatgatgttatttaataggcaagatgaagtaattaaatgtaaacgacaaataagcaagtaaacgaggtgtagattcaagtgattaaagcgtcgggtctaaggaattgtcttgggagatagataaattgtagatctagctaatattagaattgttatcgcaccgttctcgaactcaaactatgattctagagtaaccggtggcgtttcgtgaaactctctatacttatagctaagacaaccagaggagccgagatatcttacgctaaagcatgcattgttattatgcttgattagttcacctagtatctaaaccatagcccttctatgagcctacctgttctttcttaaatgcctaggttcatctatgatagtacctatggcgggcatacctattatctaatatcaagttctaggtgatcaatctaaaactagcaataaaataatcaagatgaagaactctaaaaataattctaaggggttttcgagctactaatccatctaaatccctattgaaactccctaaaacccaacaaggtgattactcagacatgataacaaaaacacaaatcataatttcaatagtttgtattgaataagaataagagtaaaaagagttcagaatcctctctacagggattcgattcttctctccaaaagtgtatctcaaaataataaaactaaacttttgtctaacaatgaacaaataattaggtatataagtgactaaaaacgtgcagggactactttgcaaataaagaaaacttcagggcttctcaaagacttggcagaaataaaaaatt

SEQ ID NO: 23480 - DNA, 619 bp, Arabidopsis thaliana columbia
  unsure (1)..(619): unsure at all n locations
ctctagagnatnacccgaatgtcacctgttcgccagtcaaaattgtttatgaagtgtcaactatattcccttacataattttctaatgccagtcctctttatttcattgctttccagatgatccttcagcagatggagcttattactagcacagatgtgattcgaaatctttgcaagaagatggctcctcccctagttacattgctttctgcagaacctgagatacagtatgttgcacttcgtaacattaaccttattgtccaaaagagacccactattcttgcccatgaaatcaaggtagcttgatcctgtctcgtagactctccgaaataagcaattgatatattcttatatttgttgataatgcttcatggttttattgcaggtgttcttctgcaagtataatgatccgatatatgttaagatggagaagttagagattatgataaaacttgcttctgacagaaacatagaccaggtaatccttactacacttttatcatctgccgtttgtccaagttattttgttttggtgcacatcatgatggtgtctagaccattccaatgtaggttcttctggagttcaaagaatatgccacggaagtagatgttgattttg

SEQ ID NO: 23481 - DNA, 610 bp, Arabidopsis thaliana
tagtaacgtccgccagtgtgctctaaagctctaccgctggcgcccctgccactggagaggtgcgacgcggtcccatttctggcagtgccagtcaaatggcagaactgtcaagcctgcgacgagatctggcggtgctgcgacaaacatacaccgacttctcggcggatattgcgagctcgatgggtgcgatacgggccaaagcggataccgtcaaatcttcagctgtcgaagcttctgtgccgtcttacgaaggggatgcaggccgggcgcgtgtcaaccttgggaagaaggagctcgctgaagagtctgaacggcttgttgcgcgagtcgatgacctacaggatctgattgaggatctacggaaagacgtggtcagccgaggagtacggccgcttcctagacagctggagactgtgggtaaagatatcagcgccgttacaaaagagatcaagaagatgcaagaattcctcaagcgagagaaaccaatttggaccaagatctgggagaaggagctgcagcttgtttgtgaggaacgtgaccagctcaccatgcaggaagatcttgcagctgatctgcaggatgatctggaaaaagcagccagacgtttgct

SEQ ID NO: 23482 - DNA, 608 bp, Arabidopsis thaliana columbia
tttctctgtgtgtatacaaatgacgtaccaattgggcaacaaagaaagcaataagaagaagaagtcccgggcgttcgacaaaggaccagctccttgatcgagtgacaaagatgagagcctgactaattatactgacttgcaaatacaatactgctattaattcctcgtctttgccttgtaacgaccttactccaaatttatcctacacacaccaacacaacacaaagatgatatatagatcataataataaaattaaatacttatatatactagtatatattgtatagattaccgagaagaaggttgtgtcatgggctagccagaagaagacaacagtgacgagagccatgtaggttccaagaacaactccagtagcgaaaatctctttaagcttccatgaatcaggaattggggaaggcttgactctatctttggaaatggtcatgatggttccgtcgtttaggattgcaataatgaggaccatgaagggagaaaagtcaaattcccaaataagagccacaagcatgaagccgaggactatacggattgtgatggagactgcgtcgattgtgtagtcttcattctttgaaagatagctcgactggtg

SEQ ID NO: 23483 - DNA, 4089 bp, Arabidopsis thaliana
tctccactattccaactagcttcggatgtgatggttgagagtactataggcatctacagaacaaagaaagaaagagatatgaatcatgaacgctataaaccctagatctatttgaaatcacggcggctataaaccctagatttatttgaaatcacggcggctagaaaccctagatctactaattacggcggctagaaacccttaagaaactcaatatcataccttggttgttgttgttgtcgtcgtcggcggcggataatgggaaccctaatttcagttgtcgtcggcgatgttgggaaaggaagagagaagaacgagagagagaaagaacgagagagagagagaagagtgaaatagaagagagagagagagaaagagagatgaacgagaataaatagggagaaactttgtagtgtgaacgcaaaaatcgtagtgtgaacgtaagtcgtggggtctatttttaaaaaatattatttattagaatattcagaatacacatagttgtatgtatatgtacagttggccagaatcacaaacagttgaactattctaaaaattgtgtctttgaagttgaatctgaaaatacaactcatttttttagttggtcccataagtttaaacatattaatggattttaataagttttgatagaatcatatttagtaaatatctgttttcatacataacgtatgtacattggacaatcatgaactatatattctttgttatacataggtgatttattaggaaaccagtttatgatcaagtttagtaataacaatgttgtaatatcatattttggatttattcaatgtttagatgttgataatagctgaaaatattgagaattattttatcattttgttaaccttaaaatacagatacatatatcagttgtcttagttgaacttaaaaaaatacattaaacttgcaataattcaataaacttgcaaagaattcaatacaaatacgaaaacataaaacatagtacatcacacttacaaataatataatacaaatacaaatgaacttagttgtattggttgaaccctttctggagttggccaggttgttccggttgaaccctttctgcatcagacttaatcttcctcaggctgcagccaagcctccaagtttattccatgttgcgattttctcctctttcgcgcttcaccagctgatggaaaccgcttctcttgatttcgtcctggtccttttggtgtgtattccggcggaaaggcaactaactctttaatatgggtaggaagaacccaaaccgactcatgtgggactacatacaacgtctggtaataggccaatgcccaactctctatcaagtaatacacagagcagagtccgtagatggttatattcacatttctcccttccttgcgggcgaggtgccttgctacggccatagcatggacacacgggatcttgtctatatcaaaacatttgcatgaacaacttttcattttcaaatccaccagaaaacttaccgagttgagatcaatcacgttgtattcttggttgtaactgttaagctcaaacacagttaatttggctgcaattggacatctaatgtgcaatatgttctcgacagtaggcacaacttgtgctgtgattggacaagaacttgaatcttgcctatgctcgttgaaccattcagaaaacttagaaatcatcacatcaatcattggtaacaagtgatattttctcgcttttttaaacacaccattaatggactccgcagaattactagtgtcaatgttatacttgtctcctttaaaatggcacctcgaccatttctcaaaccctactttcacaagaaagtcagcagctttaggccataaacttgtaaaatgaccaaactctttctcgaactcactctcagtatatgcatgagcacaatccctgaacttgacagcagctccatccttgtcaattttcacacgatctctcatgttttgacacaaatgccatatacaagctgcatgaagcgcattcgggtacaccgtcttgacagccttctttatgctttgatgcctatcactaataaagaccaatccgggaacatccgaatatacagttttcagcttttctaagaaccaaatccaacttacatccttctcgctatcaatgattccaaacgcaagtggataatgatgatgattaggatcttgtgctgttgcaataaccaacatcccaccatacacagttttaagatgagttgcatccacaactatcactttccgcattgccctaaaaccttcaatgcaagcgcctaatgcaatgaagaggtacttgaactttttctctccttccaactccacataagttactgtccctggatttaccttctctaacatgtaaagataagaaaataacatcgtgtagcttctttccggagtccctcgcacatcactaacatgtagcattttgcctcttaaggcagtggagtatgaacaatgcaccccaagtcttcctcttacaatcgacataatgttttttggagttggggtctctaaatttccgggataatcacaatgcaaaaccgatgctattaatcttggtgtgcctcgctgtatactgttgcttgtagtctcaacactccgagagcatgtatgcatctttctatgcactctaacactccaaaaatgagatttcttagttctcgcaactcttagataccaagtacaccctttagaagcttggcggcatcgtagcataagtctcaacgggtctgacttaatagtatagactccaaaaacttctttctttgcagctctgttaaccaattcccacacagcctcccttgaacaaaattcttgaccaatttcaatacccgtaccatcatcccattctataacctgcggagtaacttctacacttcgtggaatatcgtgaatatcatcataatcaatcctatcatcctcatcttcttcctcaacagaattcaccggcctttccatcggcctttcgacagccacgatctccgtacctactacattctcacaatcattcacatcattatcatatccatcatgcaccatctcacatacttcatttaaaacatcatcctctattacatttacaccaactgaacttcgacgctccggtacagaaatttcctctctcctctcaactcctataccatttaattcctccacatgcaaaacaggaatccgactctcttcatcagattctgttaaaaatatgaagacatcctcatcatctacaatatatgtctctctcctaactttagacagattgtaactcagtttcaacttgacagaagcttcatcaatcgcaaccttcttcatgatcttgtcaactaacatcgaatagctaatcttctccaaactactcgtcttaaacgaatatagcatatagtgaatttttaccaatccactgattcacttcagaatagtatcctccaaagtcaaaatgtaccttagtatggatcttcttcttcatcgctcctgaaaatacaaccagttcaactccaatcaaacattttaatagttataccacatgtactcttatcatacgttgaaatcaatctctcgtcgcactcgattctactgaacctaattcgttacctttcaattgatttccaatgttaatacatacctattcgttaaactaattggttaatctaaactttgcaaacacaaacccccaaatctttaatatgaaatctcggaattcaaattcaactcacattcaacctacatttctttgctcatcacctcaaataacgtttcggcaacctctaatcgattactctttactttgcaaaccaatcatcaaactatcaaattgaatttgggaattatatataattcaaaatcccaatctaaaatcacaatgcaccaatgtcaaaggaaatatgagaagaaactgacctaattcgttgccttttacgacggatttcaagtcggcggcggccagaatcgatggtggccgacgaagaagatgaacgtcggcgaaagaagaagaacacgacgacgaaggagagagaactgaggatctcgattttctttatttagcttttgaatttctttttcatttttttaatcaactcat

SEQ ID NO: 23484 - DNA, 540 bp, Arabidopsis thaliana columbia
  unsure (1)..(540): unsure at all n locations
cccggtgttgacattgtccgtaaacaatctattggagagcctgaaaaacgtcagtttttagttgacgttaatgagatttctgatgttatcaccgacaatacagtaagtatatttacagttgtctctttcctttctaatattgtttgtctattaactaaatcataattaataactcttgatattttcttgctttggacataccttagggcactgggactattctaggcataatgcttcatgtctctaagatcgaggatgtattagttatagaagaaacggtgtttgataggatgactaatctccagtttttaatattggacgagtgtttgagggataagttgaacttaccactaggcctgaattgtctacccgtaaaatcaggttattgcgttgggactattgtcagttgagcatttggccctctaagttctctgcaaagtttctcgttgagcttatcatgcgggcgaacaaatttgaaaaactgtgggaaggaattcaggtaaaattttataattgtattgannacaactgtttttatgt

SEQ ID NO: 23485 - DNA, 476 bp, Arabidopsis thaliana
cgcgccagtgttctaaagaaaatcaaattgcggttcttgagcttcttttttatgacgatttcgtctttttttactcatgagtatccctttctattttacctcttgccgtttgacacgctgaccaaaatattgatataaatccactttcaaggttccgttgtataacttacgcttcttatctgcttggctaccatacttgctttcaaaagcttcatcactagtcaggataaatttgctccaagttttcagcggtgcaaatacttgccccatctcagcatagagcttggtcacccctgcatcatctgacaaacgttcaccataaggcggattggaaatgattactccattgattttatcggaacgtaaatcctgcacgcgcatctgcttaaaagtaatgtctcctgcaacaccagctgcctgagcattggccttagcaatttccagcatgcgagcatcaatatcacagcccatgatat

SEQ ID NO: 23486 - DNA, 618 bp, Arabidopsis thaliana
tttattttacatttttaaaagtttttttacgatcaaatatttcaaaggaattgatatgtttgaaaagaaaagaaaaaaaaaagaggaattgatactttttgtgctaatgaagatcctgaaaaaaagatcatcaacagaaacgagattacagatttattttaacggtaaaaaattacaaatatgattggctggaatttacgatacataaacatgaaacatctacgtagaattcaacaaagcaacaaaggaacattcttttgtggcatcactcgatcacttttcttaaattaagaaagacagaggattttgcatctttatcaaggatgagaagggaaaggaggccattttccgaacttagggtgtggaatgtatttaggtgggaagtgtggaaacttgggaagtggtggacatggtttctttggaatcaccaccactggcggcttgaagattggtttgtagataggaactgggtgcttgtagatcggcttgtgaagtggaggaaatgtcttctttgggatcccactggaggcttgtagataggcacgggtggcttgtagatgggcttgtgtatctttggtggacacggtttcttggggataccactggtgcttgtagata

SEQ ID NO: 23487 - DNA, 5083 bp, Arabidopsis thaliana
tcaactcaagagtatatacaatgcaacacacacttcctgagacctcccccaaacttaaatcacatagtcctctgtgtggcaaaatttggaagagagtacttaggacaaaacacataacagaaacaaaatataagcaagagatgatatagtacaatgttgaagtgaggcgcttacctcagtcgaagaatgaacggagttggtcatcaatggctacatgtgattgctcccaggccatagatgagtcgcccagttctgtctcagctctagcatgtcggtactcgacctcatcagctctatggcggccagtaccgccatgagtatactcgatctcccttcttctgttgcggccaacaccgtgatcgagtgatctcctagcgtggataagctaaaacatggtcgagtatttttcattgctctgtggtcgagtatacttctgtactctcagagccagaatccacttcactcagctctttatacttatctcctgaagacactaaccaaatgcatcaaaaacaataaggaaaaataaagatatgtacaaagatagacatgggattccctcccaagtgagcctcttttatgtctctaagcttgacttctcatactcattaggctcaaggtgggttgcggagaggaaatgtggtctcctctccttcttgagtagagtgatcatcatactcattagggtttcttgacaagtctgcaattgggtactcagtggccatgtcctcatagtaagcttctttttttattaagatagtcttctcctctataccattccgatgtgaattcacatccttctttgctgaccagaatagtggctccattgtcaggggcgtccttgatgttgagtggtacttggttgagttttctattgagctccttgatttgatccttcagctctttcacaatatgtgttggcctttgtatggctttgtcctaccatttagatctccccttgagttctaaccaatcatctgacgtctgaatgcttgccttgagttgtttggtcgagcatgagctttcaggacaagttggaggcttctttgagttgttggtggaatcatttggtcgagcatgtgttgaacttacttcattagcttttataatcttcgtgtcagactccatcaagcccttgtaaacctgtgagccaactgctgccttgtgtgactctaatgacttctcagaactcaaagtttcactagggaatacctaactttaccactcttggtcaaaacagtttttgagttatttgcttcttcaagttccacttgcagttcaccagctagccgacccacttccttaactaagaaggtctgttcttctattgtgggcttcttcataacatcattgatatcaaacttcatttcaaaattcttcgctagattaagatcaatctttccttgcttaacatctatgattgctccagctgtagccaaaaagggccttcctaatatcaagggatgttttggttcttcatccgtgtttagcactacgaagtctgcaggcacctccacatttccaatcttgatgggcaaatcttctaataacacatgaggtagtttaacagacctatcaaccaagattaaggagatattgcagtatttatacatgttaaaacccaatctctcagctactgagagtggcatgagatttacttatgctcctaggtcacaaaggcatttattgaaagtcaatgaacctagggagcatggaagagtcaatgaaccagggtctcctagcttttctgagacatcgttctcatgtatgatggcactacactcatggctcagaactgttgttttctaaacctcttgaattctctcccatgatcaagtctttgaggaacttttaggaatctgggatacgcgtgagagcatcagcaagaggtatccttaattcgacttctttgatgttcttggcaaacataactctatacttatcttctaactctttcttgtgtcgaccagaaaatggaagtgggggcttgtaaggaggaggaatgaagactttttctttgttttttacagtaacaggtttcaaagcagttggtgatgttgttgggaaggtcggtcgagtaaagtggtcgagtggctgctcgagtgactggtcgagtggctgctcgagtgactggtcgagtggctgctcgagtgactggtcgagtggctgctcgagtgactggtcgagtggctgctcgagtgactggtcgattggctgctcgagttgtttctcagcttgatctttattgagactggaatcctccccatcttggtatgcactgtcctcagtgactgacttgggtctctctctagtggataactctcttccactccttatgatgatagcatgaacattagaatactccttgagattctgaattgacttccctggaagtcccgtaactttgggagtagaggtagatgtggattgtccttctaagtatctgactttagaattcaacgcctccacttttgcattcaggtcattgtagctacagtttagcttatggtgtaattcagataacttattagcaattttcatggagctagatgcttgtccctggagcagctgttgtaccatttgtttaatttcagcatcaggagcagcaggaccttggttttgctgaggtgcaaaccaggtggtggttgctgctggtagttccgttgaaattgctgcttgggaacaaaaccttggttgtatggaacaaaaggtttgttctgaccttgttgttgttgtggaggatacacatgatcctgaggattagcaacgttggtgctgcggtaagagaggttggggttgttcatcttgaagttgttgtaccctttgtagccaccttgattgttgatgtacctaacttcttctaactggttaacctccccatcttggacttggtactgcttgtcatcaacaaggaagtgcacatgcttctactggctaagaagaatcctgtccagcttgtcattcagcgctttgatctccttcctgtgtttgtcatcagagtcagttgtgcctctgatagttctgtcgcagtcctcgttgtaattaccatctgattgagcaaggttctcaaccaattcccaaccttcttcaacatctttgttctggaaattcccattgctggcggtatccagaagcattctgatccgtggtagaactcttctgtatagagtgctgagcagagaagctttcttgaagccatgatgagggcattggttggtgtaacctttgaaacactcccatgcttcacagaagcattcaccagtcttctatgaaaaggcagaaatctcatttcttagtcttgcagttctggcatttgagatttgctagaaaagccttcttgcaatcatcccatgtggtgattgagtcatggggcagattcttgcaatcatcccatgtcgagcttgaattcgtcttcactgacaccattgatttttgttaggttgcagagcctatcaaattcatcaagttggttgagtggatccttcattggcagaccatggaatttgttcccctgaatcattgagatgagaccactcttaatctcgaagttgttgttctggatagcaattcctttcctttgccgatggtcccgtgttgcatctccaacaccaatgttggcagggccattctgttgattctgttcgtcagccatatcgagtggttgcaggggtaaaaggttgactgtgtttctccttccctgagttcgcgagcgatgcggtcgatgttatcgttgaaaaggaggttcaggttgcctgttgatcgagtttgcatacagccgagatgtacctggaacaagaagacgacaagaaaaacacacaataagtaactgaaattcaaattgaaaaaaaaactttgtctaagcaagcatgaaatctcaaatgtaataaacaaacacccaattggcaacagcgccaaattgataataggtttttagtcaattatcctaaaacaccaaacatgtcgttgtagtattttaggttgtcaatccaaatgggtgtgatgctaacaatcaagatgcaatcagagttcacagagtcaagccaagcaataacaggttttggtgtgttctagcagtcctaagtgaacatgcataaaataaaaatttaagcagaacaataaaaacacccgatcaacacagcttgttgccaagcactgggtgtggtcgagtaacagacagaaaatgtaacagagatactcgactgcacagtctgttgccaaacaactgggtggtcgagaataaggtcgagtaacaggagaaaaatacaaaaactaagcatcaggtaacaagatgcagtaaacaatagcagagttaacaaagaaatcaattagataaagaattcccgaggatggggtaattgagtagttttgtttcctcagtttacaggtgattgacatgctcaataaattatccctagacaacaagttcgataaccaaatctaggtaccaccgcaatagagaccctcaagttaaacaagtcttagactcaatcaccattgacgagagctaacctaagaggcatgttgcatatttgtgttgttttcaggtgattttgagttgttgccgagctaattggaagaagcggacctgatcattgcaaaacactcgaccccctggtcgagtagatggttccacgacttcaacaacgcattcgaccccctggtcgagtagatggcctcatcactacacatcaccactcgaccctgtggtcgagtaccaccaagacaaccactcgatgttaatactcgaccatgtggtcgagtatcatcacctccaccacatcaccttcactcgatcactctaccaccaagccgagtaccaccatctcaatcactcgactagatactcgaccacctggatcgagtaccgttcttagtccgtcccaatactgcgtccttttgagtatgagggtttcggaatattttgttataagtagcatgtactttacattttcgtttatcaaagttttattccgtagacactgtgttcctgacttttttttgtaatccggatttctcttaatctattcaatattcagcattagctttcgatttcgtttattgttgttcatcctgttatcatctt

SEQ ID NO: 23488 - DNA, 3305 bp, Arabidopsis thaliana
tcatttcgaattctttctttagatattcgactgtttgggcgatttccccagaggttcccaggatgttcaaatcatccacatatactgctattatcacaaatcctttgctagcaaacttcttgatgaagatgcatggactgatggggtcatttttatagccctctttgactaagtactcacttaacctattgtaccacatgcgcccactttgtttcagtccataaagtgatctgttcatccttatgcagtattggtctcgagacccatttttatcttttcctttgagctcaataccctctggtaatctcatatatatctcattatccagtggaccatatagatatgcggttacaacatccattaaccgcaagtcaaggttctctcttattgccagacttattagatatctaaaagtcgttgcatccaccacaggggagtatgtctcttcataatctactcccggtctttgtgagaatccttgtgccacaagccgtgccttatgtctcacgatttcgtttttctcatttctcttcctcacaaagacccacttgtgtcctactggctttatattagatggtgtcctcaatattggaccaaacacatctcttctctttaatgaacctaactccacgtcaatggcttctttccactttagccaatctgacctttgagtgcactctattatagacgtgggttcatgatcctcacttatctcatatgctacctcatatgcaaatttctcgtcgacgtcgacttcttttcggttccattttattccagacatgatgtagtttattgagatctcatcattatcaattccttcaggaccatgagcttcggcgtcccgaatctcatttggtggttccttaggacttgccgcggccatgtctatggtttcctttacctcggttcccattgcacctttcttagtctttcgaggatttttatctttggaacctattggtctaccacgtttcttctgtgggttagactcggtagcaattacattgattcccttctggatatcaatacgtactggtgcattacaagctggtatgtacgatttcacaactctctttgggtcagcaaaggaatctggcaactcattagctagcttttgcaaatgtataattttatggacctctgaatcgcacatcagagtccgaggatcttgccaattcaaggatgtttgattccatgctatctcttttatttctttacccagcttgttcgtctcaccacctaacgcagggaactcggattcactgaagtgacaatccgcgtatctagccttaaatagatcgcccgttgtcggctctagatactttataatggtgggagaatcaaatccaacatatattcccatcctcctctgaggtcccatctttgttctctgtggtggagcaattggtacatatacggcacacccgaatgtccttagatgggatatgtctggctcatgacccgttaacaattgggatggtgaatatttgtgttcactagatggcctgatacgaataagttccgatgcatgtaatacagcatgtccccaagcggctactggaagcctcgacctcataagtaatggtcgagctatcaattggattcgtttaatgaaggattccgctaatccgttctgtgtatgtacatgtgccacgggatgttccacacttacccccatggacatacagtagtcattaaacgcttgggacgtgaattcaccggcattatctagacgtatagtcttaagcggaaaatctggaaaatgggctctcagacgtatgatctgggccagtaacctagcaaatgcttggttcctagaggacaacagacaaacatgtgaccatcttgtcgatgcgtcaatgaggaccatgaagtatcgaaacgtcccacatggtgggtgtattggtccacatatgtccccttgtatcctttccagaaagtttatggtctctttattgacctttgccggtgatggccttattatgagtttcccttgtgcacatgcagcacacgtgagcttctttgggataactctcttttcttttagggtgtgcccctttgaacttatcattagctttcgcatcatgttatgacccggatggccaagccggtcatgccacaaagtgaactcctctatgaactctttgttcattgccaaattagcttcgatcatgttgatcttagtatgataaagaccagtggacaatgcgggtatagtttctaggactctcttatgtccttgggcgatctctgttacatgtaggaattctctattcccttcaccctttgtttcaacgtggaaaccattaagacgtatgtctttgaaacttaacaagctcctctttgagctgggtgaatacaaggcatcacttatttcaagatgtgtgccgtttggtaagagtacatgggcttggccgtagccctcaatgagactcgctatacccgctatagtgctaatgttggcatttctcaatgttagatttatgaaatatcttttgtctctcaatatcgtgtggcttgagccactgtccactatgagtatgtccttgtcctcggccatttctaaatgtggacaagaactatatcttaggcgataaagcaaacaataatgaagcaaagcaattccattaaaataaataaatccaagacatcgcgcaatagagatcaaactacaaagcaaagcaaacaaagcaaatttaaaactagatgtatattctcccaagatgtccgaagtctcataatccattaggtcatcgttctcgtggtcaaaatccccttcaccatcgagatgaaccaaattggcttcgggtcccttttgctttatcatctcttgatatgcctcaatgaggtgcttagaggttctgcacgtctttgcccaatggtcgtccatgccacacctatagcacacggacttagcctttcctcgcggtttgttaacaccgcggcctctacctctacctcggccatagttcccacggcctctaccaccatagtggtttccttggccgtagaaattgccacgacctcttccaccacgtcctctgccacggccacggccgtgagggttacccctatggacgtagttggattccttggtcgcctgaggttcattaggcgctttggccatttcggctctattggcttcgggcacagctgtggatccgggaggtctcaatgcgctgttcatgagtaacagctcattgttcttctcagcaagaagcaagcaggaggctagacttgtgtaagtcgtaaaccctttcgcacggtactgttgctgaagcagtacgttgttcgcgtgaaag

SEQ ID NO: 23489 - DNA, 3568 bp, Arabidopsis thaliana
tctgtgttagagtgatcaatatggtgagtgtgtgaccgtggctacgagtccgagatcgtttcttgtgtagtttcattatgtgagttaattgtgtggtttattctgatgcatgtatgttataaccgagatctgatttgttgggttgcgatgattgattcaggttgggcgagaatgtagatcagggtgcgcttggggggtaagagtactcgttggggactggccgattggggtagtttgctcgttaactccggatagtcatgtgtaacagtttttgttatgatgtgcgatagactttctgtgctttatttgaatgcaattgtttattgtagcatggtgagacgagccaactgctctcactaagcttatgcatttgcttatgcctcatttgttatgcaggaaaggaaggtaatggtagtggctaagcaagttcgcgggactaaggctattatatgtcattaaacgctctggtccaagtgatcccgtctgacagtgaagacggtgacgacgaagaggaggacagcaacccttggaagcgcgtgaagaatgaacccgacgtggacgttaaaaacgaggcgtccacttcgaaccccgaaccggcgatgaaggagcctgttcctgagccccttccctaaatattctttgagactcaaaactctcttttgttatattttcgcatggacttacctattggtcttcggcccattttatttaaggaaactttccaactttccttgattcatcaaatattcgttttggagatactctttgaatgcagggcgaacaaggcgacgtgaatgcttccgcgaatcactccggctttacatagaatcgcatctttgaaagctaagaaacctccctatagatttcctctctagggttttcttcattcctcactaacaataccgttcttttctttcgcgcttatggccttcaacctccgatgctcggaatccatgccaaacttttcgaggattgggatgatcgaggaggacattccgaacgtaccagacagaggatgctccccactttgcaacttcagatcccagatccgagctccgtgtgcgttaatcaaggacctttcgagcagagatcaggacatcgcgatgtcctttatcaaagctctcgcggctcaacaaaaaaaagatcaacggaaaagaagaaacttcgaaagaagatcaaccaaatgctgcagagagtcaccgtgatattaagggagttacacaccctcaactctcaccccggagactggatcgaactcgggatcgcagaatttgcccgcatcccggattgtatgatgcccattcttgacatcgccagtcaaggggtcgaggtgttttacaagacgaggaggatttcctagttcgaagtgtgtctaagacttcggcatcttttccttgtttttctttttgaataaatttagctttgcttcctgctttgtatgttcgcatagtcgaactccctgtgttcattcgttcgtataatcgaactctttttcaacatgaataaaacaaattttattaatagctgaactcgtttccgagctgcctacgtacccatttcgggatcaagccccaccgtagttcatacaaaaaaatgcgttttttttttaaacataaaatttcttcaagttcaccacattccaaggacgttagactggtctgttgataataggtttttcagtcaattatcctaaaacaccaatcatgtcgttgtagtattttaggttgtcaatccaaatgggtgtgatgctaacaatcaagatgtgatcagaagtcactaagtcaagccaagcaataacaggttttggtgtgttctagcaatcctaagtgaacaagcaggaaacagaaaatcaaacagaaacagtaaaacactcgaccaacacagctctttgcagagccctgggtgaggtcgagtgacaggtcgagtaacagacagaaaatgaaacaaagatactcgactgcacagtctgttgccagacaactgggtggtcgagtatcaggtcgagtaacagtaaagaattgcagaaactaagcaacaggtgacaggatgcagtaaacagcagtagagtaaacaataaaatcaatcagacaaagaattcctaaggatggggtaattgagtagtttcgtttcctcagtttacaggtgattgacatgctcaacaaattaaccctagacaacaagttcgttaaccaaatctaagtgccaccgcaacagagactctcaagctaacctagtcccagactcaatcaccattgacgagagctaacctaacaggcattacgaatcaacaagttaaagccaaaacgctccctgcaaccaataccttggtacagggtcacgaatctctggaattagtggttcaggcatttcatcgaacaccttttgggcgcggaaatgtctgggctcaaattccagttgatcagaaagcaataggcattaagaacaactaatccagaagggatctatcaatcaatactcaatcacctagcatactgagaattctacactactctaacccatcctcagaaacctattcactactcagacatcatgacagaaagcataaacgttgaacaggttgaagacatgataacagcagtatgataacagaatgaataacagtaaacaaaaatcaagaacagaaactgaatattgaatactgaataggtaaagagaaatccggattacaaaaagtctagaacacaaggtctgcggaaataaaaactaggtaaaaaaaaactccttgcaaaaatgagaagtacatgctacttatagccgaatatcccgaaaccctaatactcaaaacgacgaagtatttggacgggttaagaactgtactcgaccaacgtggtcgagtgagagctcgagtgaatagctggagtcttcttttcttccttgtgcttgagtgtctggttgagtgcggaatgaagaaggctctgaagcttgtcatcgagtatgcagtcgagtggtgtgatggagatactcgacctctaggtagagtgaggaggtcgagtggttatctgatgatggaggtgaagacactcgacctcaaggtcgagtgaagtgatcgagtgaccgtctggtgatggagatgatggcactcgacctcggggtcgagtggtgaggtgaagtggtgatgtgctctactcgacctggttgtcgagtggtctcttgagatcttgaagctcctactcgacctctgggtcgagtggtttgtcatgatcaggtctgcttcttccagatagctcgtcaacagctccaaatcacctgaaatcaacgcaaatatgcaacatgcatgcaaaactatcctaaacatgcaaagtgatgacaaatgatgtgaaatggtataaaacagtgatgatatgatgctaaagtgatgacaaatggatgctcaaaacatgcaaaatacacacttatcagattgaatataaaactagaacctcaacgagataccgaagagtaaagtagtgcttccttgttatacgattcaaaaccaaaaactgttaagaacttcggcttcaccatcaaagctttgagagtcaagaagaagcttggtttgtgtttttgt

SEQ ID NO: 23490 - DNA, 3746 bp, Arabidopsis thaliana
gtcatagtaagggtttggcggataaggagatggagggatcgatgtgtttggaaacggaaatagttacccaactcacgatcgggaaccaagatattatcctagtagtcaaaacttttaacatgacgggaaagttggttgatatattcagagatggaccaataactatggaatttggatctagtcgaaacttgactaagatcgggtatagacttagtcgggatttgactatttctggggttttgatattggagattgaccaagatcatggaaaaacgacaaggtcgaaaagagacctaagtcgagaataatgatcgagtccggtggggaccaaggtctgaaatattgataaagtcggaaagagacttaagtcgagaatatgatcgagtccaggaaaggaccatgatcagaaatttgatcgaatgtcggaagagacaaagatcagaaaacattgatcaagtccaggaaaggacaaagatcgagaaataatgatcgagtccgagaaaggaccaggatcagaaatttgatcgaatgtcggaagagacaaagattggaatacattgatcaagtccgggacaagacaaagatcgggacataatgatcgagtccgggagaggaccaggatcaggaatttgatcgagtgtcttaagagacaaagatcgggaaacttgatcatactcggaaatagcgatttgatcaaatatgatatctaaagtctcggagagaccaaagatagaaaagcgttcaggagtaaacaagctcttacacccgctgaattcgaggacgaattcagtttaagggagggtagacttgtaacgcccgtgtcccgagttagggagtaaccaagatctctcacccgccgaattcgaggacgaattcagtttaaggggggtagacttgtaacgaccgcgtcccgcgttcataaaaaaggccggtttgttttaagagaaaactagatcatggtcgaggaacggaccaaaatacttagtaggaagaacgagaaagttcaagccgaaccagctaggtgagctggacaagctggatgaactagctagctaagctaggtgagctaaaccagctgtaaaactagctagctcagctaggtgagctgaccgacagctcgactgagctcggtgagctaatcaagtactgacccagctgggtggtccggtcagctgacactcgagctggtcgactgtggtagctcacgggtgaagaggtgtctcggccaaaaggtgtaaggtcgagcgggtaccaacgaacggttgcatcgcccaaaggatgcaaggaacagatgtgacctttcgaaaggatgcaaagaacggatgtgacctttcggaagggtgcaaggaccggatgtgatgcttcgggaagcatccattcgcctcctatataagggaggacgcccaaggcatctcacatcatctcacaacatgcaaaacaccataaaacattcttaaaggagttccaacacatcctagagttgttggtcggaaagggggtgcggctcggcgagtataactcgaccgaactgatgcgcatgctacctcccgatccaacggttcgatggagtgtagaggatggagagggtagaccgttcggcttagagacgaatcggatctggtagaccgatcgttggatcagatcggccagaccgatcgtcagacggatcggatcggccagacggatcggacagaccgatcgtcggacgggtcggatgggacatgccgatcgtctgacggatcgggtcggacagaccgatcgtcggatgggatggatcgagaaaagtgttcgaggaagcacaaggataagtgcatccgaacacacccaagggtcgcccatggatgcaatcttaccgataaagggagaaagcaccaagaatgggtaaggaacgtgattcaccatataggatcaacatcgcggccgccttcatgtatctatctcctcagccatggtgaaaccgatcagagatcggtaagaccaaagggtgactcgacggataaccaacgggaaagtccacggtgggaaccgatgaacaaaacggatgttggacccgcgagcaaacctaaggccgacggaagaaagatttcatgggctagcctacgatgatccagtggatgaatccacggacccttgggtgtgataaggatatcgttcggaccgcatggatggatcattaagccgaaagctttatcgaccaccatggaccggacgggtaaacggttagtaaaccgtgggcggtcgtagtgttaaacgaccggaacggaaacatggatggtttgataagccgatggctcaatcgtccaccatgtagccggagggcgtacgtttggagaacgaatggaccaataagccaagagcttgattcggccatcgtgaaccaagagaatcgtacgatccccaatctctatcattgtacttagaccagtggggttggttggttgtatggctaagtaacgatagggattggttcatcaattcacgaccgatgacgagtcgttgaacgaatggagtaaggcgacaaacgggctaaggaatcaaatccgcatattgaccaaggtatgtaacgatctagcttattagttaagatagacgtttggtaattgaccgtgaaagtaggataaaggaatatgcgattgttttccttagaatagttagcgaacatatgcatgtcttgaccgagtaaaggatcgatctatgtctaaggaacaaagacgatgaaaccggtacaagagttggttagaattaaaccaaggttagaaagacttccgctgtgtaataagagagcgattatagattttagcctcgtaaaggcaattctatgttgcatagcgaaaaattaagaggttcggccgggaagaggcgcgaacttgagtacaacgtcgccggacgccgagacgtccgggacggggtctcacaagttggtatcagagcattcttgatcctaggatggataggtgctcgagaaaacgtcatagtgagagtttggcggataaggaagttgagggatcgatgtgtttggaaacggaaattgttaccgaactcatgatcgggaaccaagatattatccttttagtcaaagcttttaacatgacgggaagttggttgatatattcggagatggaccgatatcaacgaaatttggatctagtcggaacttgactaagatcgggtacagacttagtcgggatttgactatttctggggttttgatcttatcggagattgaccaagatcatgaaaaaaacgacaaggtcgaaaagagacctaagtctagaataatgatcgagtccgggaaaggaccaggatcagaaatttgatcgaatgtcggaagagacaaagatcagaaaacgttgatcaagtccaggaaaggacaaagatcgggaaataatgatcgagtccgggaaaggaccaagatcggaaatttgatcgaatgtcggaagagacaaagatcagaaaacgttgatcaagtccaggaaaggacaaagattggaaaacgttgatcaagtccaagaaaggacaaagatcgggaaatattgatcaaggccaagaaaggacaaagatcgaaaataatgattgagtccgggaaaggaccaggatcaggaatttgatcgagtgtcgtaagagacaaagatcaggaaacttgatcaagctcggaaatagagatttgatcaaatatgatatctaaagtctcggagagactaaagatgggaaaacgttaaggagtaaacaagatcttacatccgctg

SEQ ID NO: 23491 - DNA, 993 bp, Arabidopsis thaliana
ctctgagaatggtgatgaagaaactgagaagtaagttactaccgaaatattcatccagcgctgaagcaatatttgctgatagtttatcataattctgttgttttcaggataaccataatctttgttgataaggacggagaggaaattcctgttaaagtaccaattggaatgtcagtgctcgaagctgctcatgaaaatgatatagaccttgaaggtgcacacttctcttccattttcttctcgttttcaattgcttactctcatagctttagatgggttctattaattatattgatcctttttcgaattgaaaattcatggattgcttttacttgatctccaggggcttgtgaggcttctctagcgtgttcaacgtgtcatgtgattgtgatggtaaacatattcttccattattaatagatcgaatcctctgcttttccggaaactagctaagattgtatttacaggatactgaatactataacaaacttgaagaaccaacagatgaagagaatgatatgcttgatcttgcttttgggctcacagaaacgtaaagtcctctcttactcttaaagcaaacacaaaacaagaagtctaattgtttactttaatgagaaagtatcatatgttcccggacaaatgtttcaggtcacgactcggatgccaagtcattgcaagaccagagctagatggtgtgcgcttggctattccttcagcaacaaggaatttcgcggttgacgggtttgttccaaaacctcattagtttccgcagagattcttcgacttgaggcattaatgatcaaagagctgattcatgtttctattggagttttgatgattgcttaccgagaggaaacagttcttagacctgaggcatgaaatgatcaaagagatgattatgtttctattggaggacttgatgattttttttattacttatcttagttttgatattggcatttctcgttgttgtctgagtttctaaacagacac

SEQ ID NO: 23492 - DNA, 402 bp, Arabidopsis thaliana columbia
tctctgatcctaataatatcatttgccgtcgtacaagacaaagacttgcaaacgtcacgacgcttagaagaatgtttaatacaaacacaacttctaacttaataattcagataataaaacttaattaaattcaacagtttgatgttagttttaatgagcttgttggtccgtttccggagattgttggtggtatggtggaagttgggcagttgaatgttgctcataatttgttatctgggaagattccggcgtcaacttccaaagcttgagaatttcacttatagttatagtttcgattagaaatcaaagaagaaggagaatgcaaggaagaaggttaaataagaactgaatcgagaaaataaaacgtaatgagagtttacttgttttgttttgttattttta

SEQ ID NO: 23493 - DNA, 541 bp, Arabidopsis thaliana
ctgcacacgcgggaaaatatgaaaccattcagcattcccaagagctttatccaatcggatttggatccacatgtcattgcgtttacccgcccacgagaatttattaccagaaaaaggtatgtcacggagacgacaatcttgtaccatgttgcgaaatggaataaaggaagattcttcacgaccaggcccaccaaacttttcagagttatcccatatctcattcaggtcgcctacaacaaaccatggatcattccttgctaaaccaatagttgttaaattgtcccatacatcttgtcttaaatgccaagctggatctccataaacaaatgaagcaaaaaaccataaggacccaagcttaacttttgtatcaatgattctcttgtccgagcggacgacttcaacttcatatgatgctttccaaaacaatgcccttcaggatccacgatatgaacattatcgtagcctaaccattgcttaactttcagtatgtaatcactggagttcttcgtctccatgaggagcagaatatccggaaaatgag

SEQ ID NO: 23494 - DNA, 277 bp, Arabidopsis thaliana columbia
atgatatttaacatgggtggtcgtcctgggcaaggtgactgtagacgcttgttagagcggcgaggagtccgtgttacacagatgtggcagactaaaatacttcaggtaagaattttctctttaaagtcggaaagattatactcctccacaatggccacttgacatgtgttttcacaggctgcagatactgatatctcagcattagttgaaagtgagaggagcagccctcatcgttttgagttcgttaagggactgtctgtgagaccaacaaatttgt

SEQ ID NO: 23495 - DNA, 552 bp, Arabidopsis thaliana columbia
tgctccaagaagaacttccggagctctataccatagagttagaatctgttgcaaatgaaatcatgggggtaaaatcatcctgagttataactccagataaactaagatagaattaaaaaaaaaaaaaaaaactagaatgaaacaggactaatgtttcatcaacgtagacttatatacctcatgtgtatactttttcattgggagagtgaaggctctggctaatccaagatctgctattttgagcgtcattgtcttccggtccatcaagagattgtgaggcttaagatccctgtaatgaaaccaagacaagtaggattagagatctgtgtcaaaatgggttatctcaagtcatagttcttccaaaacaaagacgatttttacctgtgcaacactccatgaccatggcaaaaagccatgcctttgcataactggtacatcaagcactgcaattcaagaacatgtttctcttagcttaaaggggcttatcggatgagagaaaaaaagcagaacaaaatctccaaatatccaaaccttgacagtattttgtggaat

SEQ ID NO: 23496 - DNA, 566 bp, Arabidopsis thaliana
tcattttcttacattttctctggtcctgtcttattgctctgctgcagattgtctggattgattgtggatgtgtttggagatatagctgtggtagcatcctctgctgcttggcttgaaaagtacaggattgaagtggagagttgcttaagatcaattgacggaattaatcatataaactggagaccttctcttgatgtgcttaaagaagatggttttgacatctcaagtctgaaacagacacaatcatctactctcccacagagatcaatggtacggtgtgtggtgcccttaatcaggtctttctctcttcttcagatatcttcatgaatatggcaacattacaggggtgagagctgagtaatgtttcttataccaggttgtggaaaatgggatctcatacgcaatttcgctagagggacagaagacagggttctacatggatcagcgcgaaaaccgtcacttcatatcaaccatctctgctggtaaaagagatcttgatcgttgctgctatagtggtggatttgcactgaattcagcgagaggaggtgctacagtgttatcggtac

SEQ ID NO: 23497 - DNA, 507 bp, Arabidopsis thaliana columbia
tgctctagactagcaaaaaatgctaatgtggtatgtctaccgctctaaaaaaaaaaaaacataaacaaaacaataataaaaacatttcttgatgttgtaatgaatttaaatgataggtgagaacgatggttggcgatcggatgtaattgcttgtacaaaccatatcagcagtaatcatagcttgcataattagcttggtcatcgcttggcattaagccatcgtgatgatttcagtgcaaccactaattgttgtttgcttctacactcaacgtgttctgctcaagagcttgtccgaaaaggccagcaaagccccagctgaaagtcgtaacttagcggcagaggcggtatctaacattcgaaccatcactgccttctcgtctcaagaacggatcataaagctactaacaacggtcccagaaggtcctcggcggaacagcgtccaccgatcatggttcgccgggcttgtgttggggacttcagaagccttatcacgtgcgcttcggcttt

SEQ ID NO: 23498 - DNA, 568 bp, Arabidopsis thaliana
tagataacggacgccagtgtgctctatagggttgccagaaaaccgagtacgctcaaacccgtcagccagactataaatcttttctcaggttgtatgtatattctctaaatctctcaattaaacaccgccgtaaagtgtagcggagtgaaattagtgttgtgaaacggtaatatttgatgactggtttcaataattttgcaggcagactatgtggtcagaatattcactcgaagttgttgatgcggtacgctgtaatggtagttttagctgctgcggcacaggatctgcatctgcgttccttctgcggtcagctatatcgtgcgtcacttggaagagtggctggcggtgtgctctttgaacgacggcaccgtgatgttgagctgaccgctgctgtagcgtggtttctcaaagaagggcgctctgttgtcgataaaatgcagatctaccgacagcaatgtcagcagatagcgaacggtctgcgcggtcagttagctatcgctgtggataatagtgtcaggccatgtcgttcactgcagatgatcgttgatttgtatcgccattttgatga

SEQ ID NO: 23499 - DNA, 642 bp, Arabidopsis thaliana columbia
  unsure (1)..(642): unsure at all n locations
gatgacgcgtttatcaaagaaaagctggaacacttgtgtaagcctcagtctctttatatttttttcagacagctatgctctcttgtgaaatgctgaaagctttctaatgttttgtgctgttgtttaggcaaaacgacaaccgtgaagacgcgatacactgtgttgacgcgagagatactggctaaataccctgagctaacaacagagggttcaccaacaatcaagcaaagacttgaaattgcaaacgaggcggttgtggaaatggcattggaagccagtttaggttgcatcaaggaatggggaaggccagtggaagacatcactcacattgtctacgtttcctcaagcgagatccgtttaccaggtggtgacctttacctctcagcaaagctaggcctgaggaatgacgtgaacagagtgatgctgtattttctgggatgctacggaggtgtgactggcctccgtgtggccaaagacattgctgagaacaaccccggaagccgtgttctgctcacaacctctgaaaccaccattctcggatttcggcaccanacaaagcgcgtcagtacgacatagttggagctgctctgtttggagatggtgcagctgctgtgatcatcggagctgacccgagagagtgtg

SEQ ID NO: 23500 - DNA, 529 bp, Arabidopsis thaliana columbia
  unsure (1)..(529): unsure at all n locations
tgtgtcagcatttttggtcgaagtggtttttcaaacttctgagtcggcagctttacttaccagttttagagattctaccatttgtccaacaatccctgttttgcttgtaagatttgtgaaagtcagagatgtcttagtcttcttgttaataattgatacgtttcttgtttactaggtgggaattgtgaagttgtgagcaaaaggaaccatncaatgtcatctgagagttctctgagtgctgacatgtcgaagaaggtctcatttttaggtttgaagggtatgaaactgtgggtactgatttgtttagtagttggcacatttgtagttttggttttctgtatattatctctatggattgcattccgccggaaatcccggagatcatctcacaagctgttacccttcagtcgaataccacgcgtggcgaaagatatcagggttgatgatagagttgggtttcaaaatcataatgaaaatttatctatcacaaatgctgataaatctagctgcagaactctgggaagatgat

SEQ ID NO: 23501 - DNA, 525 bp, Arabidopsis thaliana columbia
ctgtaacatgaacttcataataatcagtttatacttaatagcataactaatcgatcattgacttcgaccaaaaaaacgaaacaactcgactacaacgctttgtcaagaatgttagatttcgaagagaaaaaggacgacataacataactatagagaaactagactagattctcatatatatgagtttccacattcctcatacaagtacaacatcctctgacttaactcttcgcaattcagcttgtaattttcaatcttctccacttgtaaatgcaaagtgtagaaaagcctttctccttgagaccttgaagatgacatgtccacaagaacaaacctatcttcttctaacgcacttaaaacattagatatcgaaaagttatgaatcattggacgatgagatttggaccatcacttcgttgtcaccaagcctagtcgcagaaacggtcgagatataattcgcgacggccttaggtggctgcttaacgtaacattcagtgtttctttgacctgaaatttgcaccaaga

SEQ ID NO: 23502 - DNA, 547 bp, Arabidopsis thaliana columbia
  unsure (1)..(547): unsure at all n locations
nnnnnnnnnnnnnnnnnnnnnnctaaaggcatgaagacgcaacgtcaagtgcagcatgttcaagaacagtgatcttgggttttccggtagttcctgacgtgaagattgcataggctgcattctcaacacttaaagtgggcagacttctcgtggctggcgaatctggaatttgctcaagggtatagtggctcacagctagtgcagccatgcaaatcctcgacgatttgtccagatatctagtcgagcacagaacgattggggccgcaatgtcatcaacaaggcctcgtaggcggctttcggggtgagcagggtctaaggatgcaaaggctccaccagcctttaggacagcaacttgtgcgatgacagcccaagctgacttctcaaagcataacccaacgaatacttctggtccaacaccccaatccatgagatggtatgcaagcttagttgtcagagagtcaagctctgaatatgtaaagttctcatcccatgaacatatggccggtgctgaaggttgcgcaattactcgatcttggatgatcgtgtg

SEQ ID NO: 23503 - DNA, 522 bp, Arabidopsis thaliana columbia
aagaaatatacgtaccagcagtctctgaatgatgccattatggtagaccatttggtgggacacgtagctggacgagtagtagtttgtgaagaatttgctcagcgtgtcctgtaagattgctcaggagaccatggaatagcacggataagaacggtaaattgacttggctttgaggcacatccagtaatatgcccaagcctcattttagctatggtgctatactcctacagtataaaaaaaatgtcaaaaggttgggaaataaactaataagaagatacatggaggaaccaagagtaagtattcaagtatgctgtatgcatgagataaactaaggtacgaggtcctcacaaagtagagcagaagacatgccgctgaggttataatgtacagtgcaagacaatgaacccacagcctgagagcaataaatgtcatgagaaaaaatcagcactttacacactctgcatagagtaacatctttcaaagagacataggtagagatgaaaaacacatttaccattttga

SEQ ID NO: 23504 - DNA, 634 bp, Arabidopsis thaliana columbia
attatctagttcacaaacaaagaagcaacaagaaacagttaacacttaagcacctaatgttcgttaacatttgaaatttatctgctaaatttgaaattgtcttaccaacagacatccaccccggaggccggaaagtgcattttcctctcctcttcagtgccactgcaagccacagaggcacctttgtcggaatctgaggaatgaaccgaccgaaatcgccctgtcattgattaacatattaatcacatggttaacaaaataggttacaagggaaatgattacaggattgtataaaacaagagagattacactgatgaaattgagttgctccatgttcatattaggaacaatctcgaccagctcgtcctctgccataaactcaacctggtatgaatatagctaatcaattaaactattgcagacagaacatgaaacgcatacaagtaaagaggagaataaagacctcttgtggagaaaacagtgaaatatgaggatcagtctggccagccattgatgtatctcaagaaatctcagtttccagacctaaatgcaagcgtgataaaaattatacttggtagagacatttaatcaaacactttatctacactcctacagaagttcctcgttatttttt

SEQ ID NO: 23505 - DNA, 515 bp, Arabidopsis thaliana columbia
ctcaacaagtattaaataacgcaatgggccaatatgcgacggtaataattaagagctccttaattattcaccttgcttgtctctcctatttaagacgtatttcttctcttctaccatccaacaagtcacacacttaaaacaaaacaaaacaaaacaaaaacagagcacacaaaaagagaaaccaagttttcttaaaaatggagctagaatcttctcctcctctacctcctcatgtgatgctcgtatcttttccagggcaaggccacgttaatccacttcttcgtcttggtaagctcttagcttcaaagggtttgctcataaccttcgtcaccactgagtcatggggcaaaaagatgcgaatctccaacaaaatccaagaccgtgtcctcaaaccggttggtaaaggctatctccggtatgatttcttcgacgacgggcttcctgaagacgacgaagctagcagaaccaacttaaccatcctccgaccacatctagagctggtcggcaaaagagag

SEQ ID NO: 23506 - DNA, 983 bp, Arabidopsis thaliana
cagccacgtatcaaattccggcagcgatttcggaagcagctctgattacaacaagtacctcgtccagatccctccgacgccggacaacaatcccggtccggcgtcgctttcaatcgttctcctggaaatcgattccaatcaggagtcggttccgtccgtttccggagacatcgtttccggctcatccggggtaagacaacgaaccggatctaaccgatgtgagaatcaacgtaggtgaagaagaagaagacgataccttgctttccaagatatcttattctcttactcgtgtcgtcaaaatctctccgatcatcatcgctctttatcggtaataataatatatatttaaaaaatctcagtcgtgtctgttacaaacactttgatttgtcataaagcatgatcttttaaggatgtttttctgatttaggttttgtttttttattacaggattctaatagttgttcgagtagtatctctagctctgtttctcttctggagaatcagaaacccaaacaacaaagcattatggttatggttactctctgtaatctgtgaactctggtttgctttctcttggttacttgaccaaatccctaagttgtttcctgtgaaccacgcaaccgatatcgaagccttaaaggcgacattcgaaacgccaaacccggataacccgaccgggaaatcagatcttccggggattgatgtgtttgtttcaacggctgatgcagagaaagagcctccattagttacagccaacacaattctttcgattttatctgttgattatcctgttgagaagctctctgtttatatctcagatgatggaggatcgcttgttacgtttgaagcaattgctgaagcggctagctttgcgaaaatatgggttccgttttgcaggaaacataagatagagccgaggaatctggagagttactttggtttgaagagggatctttataaggataaggtgagacatgattttg

SEQ ID NO: 23507 - DNA, 474 bp, Arabidopsis thaliana columbia
  unsure (1)..(474): unsure at all n locations
nnnnnnnnnnnnnnnnnnnnnnnnnnnnnctaaagaagagctgactcgctggtaagcgcggttgacgccgaacgtatgaagcagtttatcgatggtctggcgttgccagaagaagagaaagcccgcctgaaagcgatgacgccggctaactatattggtcgagctatcacgatggttgatgagctgaaataaacctcgtatcagtgccggatgcgatgctgtccggcctgcttattaagattatccgctttttattttttcactttacctcccctccccgctggtttatttaatgtttaccccataaccacataatcgcgttacagtattttaataattaagacagggagaaataaaaatgcgcgtactggttgttgaagacaatgcggtgttacgtcaccaccttaaagttcagattcaggatgctggtcatcaggtcgatgacgcagaagatgccaaagaagccgattatta

SEQ ID NO: 23508 - DNA, 543 bp, Arabidopsis thaliana columbia
  unsure (1)..(543): unsure at all n locations
tttggagtagagccttggttgagtccatgtgaagcagcttctaagacacaatccatagcttggaagccaattctctctttctccaaatcatacacaactttcacattctgctgctgaaagctcccaaaaactccggccggtccgtagtctccatcttccatgttctgaaacaacaagcattgcaccacggaaccatcgctaggggcgctcattgcgtaaaaagagttaccttgcgggagaagtaaggttgcattgttcaagaaatggaatgtaattgaaggaaatatcatcattacatcgttttcgaggctagtgagattgttgttaggacacgggactttgtagcagagatcaaagcctgttcttgattcagtttcagtggctcttgggtatgtgattgttgattggagagttgtgaggagttgtgagtagaaaggttcgggtaaatgtgtgtaagtcgtacccgaatcgaccaacattcctcgatttccttgtgaatcaattgntcttaaggtaaaggaacttgtgtgggagtgatatttg

SEQ ID NO: 23509 - DNA, 569 bp, Arabidopsis thaliana columbia
ctggattggacggaatggttttggaattatcgatattagaaggttcttgatttaggggttgatgggtcataggatcgattcccatcttaagaagtttcttcttgatatgagtattccaatggttttttatttcgttatctgttcttccaggtaatcttgaagctatcttagaccacctataatacaaccaatggttttaaataacaaattaattacaagaataaataatattttataacgtgttggtggatatatatgttacaatcttggtatagaaaaacaagaagattgacaaaataagttaacattatctctggaagagaaggacgttactttgtcttgaagtagcttgaagttgatttcaacgaaaaatcaatgcaaatcaaaacttattctacttatttgaccaacttatttggaaccatttggcataatttacacaacacacattaatacactaaacatgttggatcacatgcaattgactttatattttatgatgatcaaaccaatgtttatcttaagtctctagtttttgttcaacgtaaaatttgaatttttaatataaa

SEQ ID NO: 23510 - DNA, 491 bp, Arabidopsis thaliana columbia
tagcaattacttatatactaagcaaatgatcattctttgtatgcaggggaactttgatcttgttggaaacaactttcctgttttcttcatccgcgatgggatgaagttccctgacatggtccacgctcttaagccgaacccaaaatctcacatccaagagaactggagaatccttgacttcttctcccaccaccctgaaagtttgaacatgttcactttcctcttcgatgatatcggtatcccacaagattacaggcacatggatggttcaggtgtcaatacatacatgttgatcaacaaagctggcaaagctcactacgtgaagttccattggaaaccaacttgtggagtcaagtctcttttggaagaagatgcaattcgtgttggaggaaccaccacagtcatgcgactcaagacttgtatgactctatagctgctggaaactaccctgaatggaagctctttatccaaatcattgatcctgctgatga

SEQ ID NO: 23511 - DNA, 611 bp, Arabidopsis thaliana columbia
cttcttgcttacaactctgtaaatctgtgtaagaacctctgtgaaagcgttttctacatttatagcttcgagtgccgaagtctccataaagaaagtgttctctctctctgcaaaatctttcacttcttccgtagagatggctcgaaggtgattcaaatcagctttgttacctacgagcataatcacagtgtttgcgtccgtgtggtctcttagctcctttagccatctttcaacgttctcgaatgtcacgtgccgtgtcacgtcgtagactagtaatgcaccaacggctcctcggtaataagcgctcgtgatggctcgatacctaattgcaaatattcactgattaagaaaaatggaacacatactaaaagcaaaggtggtgacaaattgttattagggtgtatggatacttcggtttagggttgttattagggtgtgtttaccaatctgtctatgaaatcatttaggtttgattagctacattaatttaagcatttggatttgtatttggtttagtttggtttatgtctacctataaataattgattacctttcatggccggcagtgtccatatctgagctttgacaatcttgtcgtcgacctggatgct

SEQ ID NO: 23512 - DNA, 561 bp, Arabidopsis thaliana columbia
tacctcactacttgggcaaactaaagatatgaaagaggcaaacggatgagcttccttgctgtacaccaacgagccatcaataagacatgaaatgattggaagaatgactgcatgaccatgctccggatgatgaaggacaaacatcgctgtttcatcagaaaacgaaaatcagatagacattcacccacaaaaagagaagtgtggatcataaatgttgatcatacccagcacatcgtctaaaagtcgcttctcagttgatggatactgatgccggaccaactgatacagataaattatacatgaatcaaaacgtcactactaagagaatactcttattaaactcattaggtatcaagtacctcagcaatgtcatctgggaattgctctgatgtaaattgaccaaaatattcaacataagcaacgacttgatccttatgttgttgaggatctcgtggcggaggcataacaaggaagagaactgaagaccatcgatccatctctcagatgaagatgaactagccatccaggaaccgaaactaaacccgaactagatgaacgaac

SEQ ID NO: 23513 - DNA, 570 bp, Arabidopsis thaliana columbia
tcgatgttgctctttggaatttactacacggtggtagaacgccgccgcagagaccggagtttcctcttagatcatctggatttatggttttgagaaagccgttgatagggactggacctgtgagcttgttgtatgagacgtttaggagttccagagctggagatgttccgatgctctctggtagtactccggttaaggaattgttggagagatctagcactgctaatgcagacattgtcgtgatctgtctagggatttcgccggtgaggttattatttcttaggttgaggcttacgagcttctcgcatgaagcaatgcttgaagggatagtgccagtgagagtgtttgatgagagatcgagattagagagtgaaggacaatcctggaattggtctggaacttcgccggagataaagttatcggcgactaaaaacgtcctgtaggttgtgaattgagaggattgtggaagggagagatgatcggatctggtttcttgagaaatcaatgaaagacagtgaaactgaatcggagatgtctccagggatccctcgctgagacgatttcggctag

SEQ ID NO: 23514 - DNA, 387 bp, Arabidopsis thaliana
caacgatataaagaatctcagcagtacagaagttcagaaccacatagaatcttaagagatgattcatcagaaagtgtgcaattgctcaaagacaagttctttagagaagtccaagagacagtgcatctgggaatcaaatgaacagatccagagtcgacaaagagttgcttcacagatgaattggtgtagaagaaatcaggaaacttgtaatttctgacacgataatcacgagactccagtgaaagcttctctgcgttgtgagaaatggcgaattcgatgcagccatctacagaatcaaccatgttgagtaaggttgcatgtagatgagagcttgtgaatttgggagcggagaagagagatagagttatatcgatcgaattaggatcg

SEQ ID NO: 23515 - DNA, 846 bp, Arabidopsis thaliana
ctaagatgataaggagacatcaaagctccttcaccacctgaacttccgacgatgagtttcccggagctctttgtgtatttatcttcagttccagtcatgcttgattcacaatctggatttttgtaatatttcaataatcaaagcaatcttcacaggctaaaggtaggctctgatatcatgtaaagtcaaagattgctctgaatatattcagttgtgttattcatattgaaggtggcgatacaaatatatatgtgtacatatcgattttaaacctaatacacaaactaataaggcttcgtacaaaccaatattctaatcatctttgttttcctctaagcccatctctaatactccccctcaagatggacagtggagatctcgaacacccatcttgccaagtagatactgcaactgttttcgaccaagggttttggtaagaaaatcgaccaattgctctttcgtacgaacatgtcgagtagacacaatgtcatcttttatcccatcgcgaacaaaatgacaatctctttcaatgtgtttcgtacgctcatggaacaccggattggttgcgatgtgtagtgcagccttattgtcacaatgaagaattattggttctggatggggaatctgaaagataagaagcaattccttgagccatatgagtttctgataagtataagccatagctctgtattcggcttcagcggaagaaagtgacatacgttcttgcttctttgtcttccaacatataggagattttccaagtaaaacaacataaccagacagtgaacgacgtgtttttgggcacttttgaaaatccgaatcacaataggcattcaaatgaagatc

SEQ ID NO: 23516 - DNA, 430 bp, Arabidopsis thaliana
atatgtgacatttttgtttgcagcaaaaaagtcaaatgagtaaaaaaaaacatttttttaaaaagagagtatagtaaaaaaaacagaggataaaaaacgaacaaacggttaaagctggcaaagatcccatcttccccacgctgtcaaattttgtcactacttcccaaaaaaaactctcccgcctctctctctccctctcccttcttattctcctccttcttctccttcaccatctccagatcccaaaatcttcatcgatcatcatcatcatgagagaaatcctccacgtccaaggcggccaatgcggtaaccaaatcggttccaaattctgggaagttatctgcgacgaacacggcgttgatcccaccggacgttacaacggtgattccgccgatcttcagctcgaacgtatcaatgtttattacaatga

SEQ ID NO: 23517 - DNA, 558 bp, Arabidopsis thaliana columbia
caggtacaagtgtaagcctgcaagtctacacggtgaagatctccaccatgcctcacttcatacatcccattggtacttggagacaccttcgcagcagcagcgactttgtgctcaccagctaagaactttgtaacataaggtgtacaaacacctacaaagtaagagaaatatatgctttaaagggagtcaaggctatatcacatgttaagaatctgcaaagaacaaggcttaatagagtagctaacctgtgtgagtatgggattcaacagatcttttagcaatcctcaccatagccattcttctgattgtctctaacatcgcaacaaatggcttctctcttgccttgttcaaagatccgttgaaagactccactgagttgttgtcaacgtcttcacagaagctgcctatcttctggaatgcctaacccaactccttggttttgtcttcacacagactcatagactttagtgtcatagcaccgtatcttctccaaatgctgcttatactctttctcattgtaagccaatccaaattccatagcagtggttttacattgtt

SEQ ID NO: 23518 - DNA, 499 bp, Arabidopsis thaliana columbia
tggtcgatagacacagagattctaccacaccttcagcgtaattcacaaagaaattcaaggctgcaggggttaaaacccagtaggagaaagcaagtccagcatagaagagcaatgaggagccaaatacaattggccccagaaaccttctctcagcccgtgtcagaccgggaaggacaaaagctataatctcatacaggatcactgggctccctagtagaagcccgcaataaccggagacctgcaccgcaacacaagaaaaagaaaatcatctatcttgaatatgatgctatctgtcgtcaatctgatcattacctttaaagttgtgaagaaaaattcgccaggagcaagctggagaaaccgtacaccctgagttttgacgggagcttcaagaaagacaataagatctttggagaaggcgaacgatcccaagattgcagctcctacagccaaaacagagacgaatattctctcccggagctcctcgagatggtcgaaaata

SEQ ID NO: 23519 - DNA, 561 bp, Arabidopsis thaliana
ttcacgttaaacgcaatgctataagatggagtggagatacagattcttatccaatttacaaaagtcggagggagatccattgccttaagaacgttgagaagaaattcccaattcacattatcataggccttagataaatctatctgtaaacagcctctagagacttccccctcaagatgaaacccttccattaactctgaagcaagcaatacgatttcaaagagtaatcttccctttatgaaaccaacttggttattttggaccgcctgagagatgaaaagctttagaagctgagatagattcgagtaataaccttgtatatcgtgttgcagcaagtcactgggcgaaactgagatagcttatccgcccctatcaccttaggaataagagttatagccgtcatattgaaccttcgcagcaaatgacatgtggtaaaaaactctttcgcagcagcaataatgttatccttaaccacataccaagaatcccaaaagaactctgctgggaacccgtccgaccccggggccttattctttggcatagagaagacagactgagtga

SEQ ID NO: 23520 - DNA, 521 bp, Arabidopsis thaliana columbia
caaagctgaatatggagtctgtggaatccgtgacaaacctcgtctcagtcacactacacaacattaagagaagtctacaaatcgaagattgctgatgacaagtcacagcagatattatttacctatatataattatatgataatgtatagcagcagtgcattaaagttttgtacaaaaacgaccagctctctcttctccaatcctattattatccaacacctttttggtccattccattggcaaatgaaccataacaagaggagcaagaaccgtagaattagcagaaacaaaagtcggatcactgagaccacaagcacacagtagcaacagaaacatattaattcacattctaaatgtaactggaggtgaagatgaagtaagagcaaacaattggtagtcggaaacaatcagattgaaaacacactcatggcataagcaatgaaatcacaaaagcattccataaattacactggttccgggatcacaacaaacaaacagaagcagacaaaaaaaagacggc

SEQ ID NO: 23521 - DNA, 464 bp, Arabidopsis thaliana
attaacatcatctagcgcacgatccagattttcatttagctgctgaatctcctgctctttcctgctgatgagctctgcatctgcagctgcttgcgtctcagaagtcaatttcaaagcactataatcttttgaaatactatcaagcttctggatataactctctttctcagccactaaagttgttattcttgtgtttaactcctcaatcgcagagttcttcgagtccaattcactctgagttcttatgagttcttccttctgctgtttgatctctaacttcgcttcagcaagatctcggctagtttgagtgtaaatagagttgagttccttcaattctgcttccttttttgccaacgatgcattaaaacgttgagctttttcttcactatctttcagctccaaactaagcaagttgatccgatcttgtagtccttcaaccaaatcaagcttttctctgagctttg

SEQ ID NO: 23522 - DNA, 531 bp, Arabidopsis thaliana
taaaccccctcccctgaatcaagcaatcaccagaaatcttctgttagcaagaggaagaaggaaaatggagactccagtggcgaattaaggagctgcaagtaccaaaagtccgatgataaatcagtcgctacgaacaacgaaggtgatgatgacgacgacaagaggaagttgataaggcagattaggaaccgtgaaagtgctcagctttcgaggttgaggaagaagcaacaaactgaggagcttgaaagaaaagtgaagagtatgaatgctaccattgctgaattgaatggtaagattgcttatgttatggctgagaatgtcgctttaaggcaacaaatggctgttgcttctggtgctcctcctatgaatccttatatggctgcccgcctttaccgtatcaatggatgccgtatccgccgtatcctgttaggggatatggatcacagacacctttggttcccattcctaagttaaatcctaagcctgtctcgagttgtagccgaagaaggcagagagtaagaagaatgaggg

SEQ ID NO: 23523 - DNA, 5967 bp, Arabidopsis thaliana
gtggagttggaaggagagaaaaagttcaagtacctcttcattgcattaggcgcttgcattgaaggttttagggcaatgcggaaagtgatagttgtggatgcaactcatcttaaaactgtgtatggtgggatgttggttattgcaacagcacacgatcctaatcatcatcattatccacttgcgtttggaatcattgatagcgagaaggatgtaagttggatttggttcttagaaaagctgaaaactgtatattcggatgttcccagattggtctttattagtgataggcatcaaagcataaagaaggctgtcaagacggtgtacccgaatgcgcttcatgcagcttgtatatggcatttgtgtcaaaacatgagagatcgtgtgaaaattgacaaggatggagctgctgtcaagttcagggattgtgctcatgcatatactgagagtgagttcgagaaagagtttggtcattttacaagtttatggcctaaagctgttgactttcttgtgaaagtagggtttgagaaatggtcgaggtgccattttaaaggagacaagtataacattgacactagtaattctgcggagtccattaatggtgtgtttaaaaaagcgagaaaatatcacttgtaccaatgattgatgtgatgatttacggactctgctctgtgtattacttgatagatagttggtcattggcctattaccgaacgttgtatgtagtcccacatgagtcggtttgggttcttcctgcccatattaaagagttagttgcctttccgccggaatacacaccaaaaggaccaggacgaaatcaagagaagcggtttccatcagctggtgaagcgcgaaagaggagaaaatcgcaacctggaataaacttggaggcttggttgcagcctgaggaagattaagtctgatgcagaaagggttcaaccggaagaacctcgccaactggagaaagggttcaaccaatacaactaagttcatttgtatttgtattatattatttgtaagtgtgatgtactatgttttatgttttcgtatttgtattgaattctttgcaagtttattgaattatttgcaagtttaatgtatttttttaagttcaactgagacaactgatatatgtatctgtatttttggattaacaaaatgataaaataattctcaatattttcagctattatcaacatctaaacattgaataaatccaaaatatgatattacaacattgttattactaaacttgatcataaactggtttcctaataaatcacctatgtataacaaggaacatatagttcatgattgtccaatgtacatacattatgtatgaaaacagttatttactaaatatgattctatcaaaacttattaaaatccattaatatgttaaaacttatgggaccaactaaaaaaatgagttggtttttcagattcaacttcaaaaacacaaaatttagaatagttcaactgtttgtgattccggccaactgtacatatacatacaactatgtgtattctgaatattctaataaataatttttttaaaaaatagatcccacgaagtcgcgttcacactacgattattgcgttcacactacaaagtttctacctatttattctctctctctcttctatttcacttctctcgttcttctctcttcttcacttctctcctcagatcgtcctcaaagctcctcagctcgtcttcaagctcttcccatcacagcgaccatctcctcgcctagctgtcaacaaccaaggtattacatgcactggagttcttcctctctctcgttcttctctcttcttctaaagggtttctagccgccgtaattagtagatatagggtttcttacgggtttttagccgccgtaattagtagatctagggtttcttacgggtttctagccgctgtaattagtagatctagggtttatagcgttcatgattcatatctctttctttctctgttctgtagatgccctatagttactctcaaccatccacgtccgaagctagttggaatagtggagaggcgaatcgctggcaaattggggggttccagaaaaatgtttttgtggtaagcctgtaaaacttgaagtgtgcaaaactggttacaggcaaggcgacagagtctacaaatgcccaatgcttaaagtaagttattgtgttttcatttcattggaacaacaaagtacaagtgaattatatttatgaagtcttctctctttcgcaggatgaagagtacgagtcccgaaaccaccttattcagtggtgggatcaggcggtaactgaggagcttgagaaggtaaatcacaaacttgattccacactaagacatggacaactagcatgcaatcatgctttggagtccatccgggaaactattcaactcatgcaaggtgaaattgaaacccttaaagaaaggttactcgccaaagaagtcgagattgataggcttagggcattactttctacatggtgattatgatgtgttttatgttattgaggatggtgtatggcatttgaacctaaatatgttactcttgtattttaagttatgtgtattgaccggccaactgggacaacttagctactcttgtattttaagttatgtgtacgaaaatgttgatacacgaatcacagctagacgaggagtcggacgagctgactagctgacagctaggcgaggagatggtcgctgtgatgggaagagcttgaagacgagctgaggagctttgaggacgatctgaggagcttgaggacgagctaaggagcttgaggacgagctaaggagattgaagagctgacgagctactctctctgggtgtcccggccaactgggtcaacttagctactcttgtattttaagttatgtgtattgaccggccaactgggacaacttagctactcttgtattattgaccggccaaccgggacaacttagccaaacgttttgattttaataaaatcctaaaacacataaaccattacagaaaataagtttgtcctctacacataaactacgcataacattcccaaatacacaaaaagaaagtcctatttctcccaacacctaagagtccacacacacataagcaagaaagaaaagtcaaagtctcttcctcgtttgcttcccctcagctgtaaactcttcccccttatacttggaaggtttccttccacgttttttcccagattccagagtaggaccaacatgctttctcttcgtcttcaatatctgcttcttcttcttcttcttcttcttcttcttcttctacttcttatcctcttcattggattcatcgctgccatcacctacaaaaatatgtaaccaaacatgtaagaactattgtgaaagcatcactacacaaaagttcaacaaaaactcacttagagactcaatagttggaggtgctgggtcacggattccactgtgaataaccaaggccttgctctgagtatcccttggctgataagacggtggcacaaaatcagcagctgaaccaggacgcatatcttcatatttgtctttctctgcctctttctcaagctgatctgccacatattcctctattccttgtactctcacacaaatccgcttgatttcgctatccatcacagcaagcttgtccgtgagcttgtcaaatcctctctccatagcttccttgaacgagagaatcgatgtcccagggatttcaggttcaggtacagctggaacatcatcaacagtttcaatacgtctaccatcaatgtctgcttggtagagactacgccagaaaatcttctttttctctacgataagcctctctctccaactatcaacaattggatcgatatatccaataccatcatcaacatgcttctctacaacgcgtgacaacatttttctctcatccatatcaggttccaagatgcttgaaatatcctgtcaagtaaacatatatttcaaacaccacaaagattataaacatagatttcaagagaacaaagctaaccgttatatctccaagtgcttcatttatttcttccaaagtaaatcccttcatgcaactttcactgaacttgtgcttgcacattcttggacattccttgtctgcacgtacaacttctctaaatctcttcccaagctgcggaatgcactcaaatgccagaatctagacacaaaaacataaaagtaaatgaaagttcacaataacaaaatctagccactcatataatttactcgactacttacctcaagtggagtaataaatccataaaaagcagtctgtgccttttgtttcaccacacctttcatgttcttcattactctctgcaccccttccatacactgctcaaaggaaaaacgtccccacgggaatgtctcacaagctctgacattatccacaatcctaagcaaaaactcctctatcttcgaatcccctttagaatcagctttcataaccttagctaagaataacagaattgccaacttcaacctagcagtagacttctcactcttaaactcttccagcttctcttccacgtctttaatcttgatgtcctcagtcctcttaaacaacttctcaacaaacttcaaactgcctaaagtcttatagttttttgggtactcacggcagttcaaaccggtcaacaatgcatgctctctaattgagtaccttataggtactccattgacaacaaaccaacactctctcgccaattctgtcttagccgtgcgaaccataagcatccacatgccttgaatcatgtgattgggctccttaggcatgtggaatatgtgcttaaattggtcatgattcctaaaccacttcagttcttcatccaaagtctctataaattccactgtttgtaccaactgacacctcgttcctatcttacacaccttcgtgtaggtagttggatcaaagtacataacttctggcggcaatggttgattatcatcatcatcatcatcatcatcctgcatattctgcggcaggttatcatcatcaccatcatgcatattctgcggcaggttatcatcatcaccatcatcctgcatattcaattcaaaatactttcaattccacattaactacctagttgtactacttgttcctgaatgaccattcacaaatttacgacctagttgtactacttgttttatctgaagcaccattcacaaatccaatcatttaccaatgcataatatcctaaaacgagcctaatccaaaaaataacggtcttctctcataccttatttgctccatcatcatgttgaacaactgcattcgttgcctcctcttcttctgcacaagaatcggcatttgggtctgaaagatcgtcaattgaatcccatgcgacggcgtttgaattacccaaatcggcggcgtcacaatcgccggttgtaggctgaatttctccggcttcctcttctgttgttagaagctctacgccttcttcatctctttggggaatctcggcggcggtctcttcgactgatggaggaatttcgccggtcacttcaaccctagttgattcatattctccagatgagtcttttactctatccattggaaaataaatttgcggatatgaaagagacaaagacgaacgaaaacggagaagaaagaagaagagaagagattgatttttccggtgaaattggtgtcgtcggagacgagagaagacgacgacggagagaagaggaagaagtcgagaagttgaaaaggggaagaacattttttacttaggttttttctgtagtttctagggtaaataatataactggggcgaatatttacattttttattggtgcctaaatctaacaaattaagttttcttgtagttttcgtggtttcgcaagagtttttcgtcctttcctcatttttcgattttaataaaaatcaataatattattccaagaatggcacgagtgattatttcttctcaaatagtggcataagaggtga

SEQ ID NO: 23524 - DNA, 260 bp, Arabidopsis thaliana columbia
caatattttttttagacttgtgtatacactgtatcctgatctgtaggtgttgatgcgtcaggttattctgtcctagattacactatccattgttgaatagaagaccgaagtaactgcgcgtctatcgcaaagctgagtactgatatcctaactgttgaaaatcctcttcctattccagctcgtctatgcatggcaattgttagcatcagtgcttgtcagtaaaaccctgtagtcttccaagaagatttctgcccgaaaag

SEQ ID NO: 23525 - DNA, 276 bp, Arabidopsis thaliana columbia
tcattggtccctcacaaccgtctctgacgtctcccacgttgaacgtgagggcgtagaagctgttcagtgacgtcctcactatctgagaaatggcgctctcttgggcctccaacaagctcgatggctcggtgtccttcggggacagcgaagtgtgctttgtctacgtacttaacggctttgagagactcgatcatccaaccgggcaatgggctgttatcgtcctcgatgaacggtgggatcagtactccccattttgccgtgggaaacacgtaaggt

SEQ ID NO: 23526 - DNA, 5266 bp, Arabidopsis thaliana
gtcaaaagaattatcccaattgaaggaatagaacacccgagcatcgacctaacgatcaaacacgctgggacggaaacctagacaacttgcaactttacgcgagtaacccgaagcaccaccgccgcggctagagcccttgcagcagccgcggagagcagatgcagcggaggaagaaccagagcacggaactcccgaacaacctgcctcgtacgaacctgaaccgtacaacgactggagaatcccaatcatcgattacatcgaacgagggatcacacctcccgacaagtgggagaccagaaaactcaaagcccagagcgcaaggtactgcatcatggaagggagactgatgaaacgcagcgtcgcaggtccgtacatggtgtgtacctacgggcaacaaacgaaagatctcatgaaaagcatgcacgaggggcaatgtggtagccactgtagtgaacgtaccctcgccctcagaattaaaaagcaaggttacttctggccaacaatgctagccgattgcgtagctcattcactcaggtgcgataaatgccaacgacacgcacctactcttcatcaacctcccgaggaaatgtcctcgatatcttccccttacccatttacgaagtggtccatggacgtcgtacgtcccatggaagcctccggtgggaagaagagactaaaaaacctgctggtcctcaccgactattctaccaaatggattgagctaaagccttccaacaggtaatcgagaaacaagtcgaggacttcctatgggaaaacatcgtatccgacacggcataccttatgagattgtcactgataacgggactaaccttaactcgggaaaaatcaaagcattttgcgacaagtggaagatccgtcttaccacatccacccccgttacccacaaggtaacggacaggcagaagccgccaacaaagttatacttagcaacatcaagaaaagacttgattcaaaaaaatcaatgtggtccgacgtgctccacggagttctctgggcctaccgaaccacacctcgcaaatcaacgcaagaaacactgttctcccttgcttatggtttagaagcagtaatccctgtcgaaaccatggtaccaagcgtgagattcgcccgctactataactccaatatcaaaattcggagattcgaagtgggagagcttgttttacgaaaagtgttcagcaacacgagagagctaaacgacggcgtttataagctcgtaaaagttatcaacggagtacctgagttacggccttggaatgccattcatctcaagaaataccacgaataggtactcaaaaacaatcgaactacgataaggcttgatcccttggcagggtacgtaggcaactcctcccaagagcgtagccaccaattcaatcaaatgaaaagggcttaatcccctaaccaggtattcaggcagtcacctccgcaaacgcaattaccatctcaacccttctatctgtaagacgaaacttcaacaagggaaatagacatcgcatctcccatcaacgaagatcagctgctcacctgacagttcaatctcccttcggtatcaagcaggtccctgctcgatgaccaaacgccagatcgtcgcttgctttacctccttttgtacttaacaatttcgagataagaataaaaggaaattttgatactcattatcatattcgcaaaaaacaatcatttacactatgatttaaaactcattcgtaatcttacgatacctaaagcccaacaaccgaacgttagcggatccattttgtgatctcgcttccaaaaagtggacagtgaagtaaaacttataagaacacatcacttcggcttcatcggagctcacctactacaaccaaatctaactctttcgctatcaacgcataacatagtaaacaagaaagaaatgaaggtttcattcgcgacctggcgataccacaagcctagctcccaaaatctggcaggtcccttgtgtgacctcacttcaacaggttcccaagacaaaacaactcaaactcattcaaagttttaaccttcgaagaacataccatatcacatccgaaataatttggatgcgaaacaagtccaattattatccggaacatggacaaagcgaggtggtctcgcaccaaaatcaacgaagtgtcaacactcgaacgaaagacaaaaaatacttgctaaaaaggataaaagccttcccaggcaccaagttcaaaaggcaataaacgaaaggataaaagccttcccaggcattaagtctgaaacaaaacacgaaatcctaaaacaaacaaggagcgaaagtgatcactccctcgattctccggctggcgtagcgaagacaacaccagaaccatccgcgagacctctcggaaacacgtctttgttgctcccgaactcatccaagccaattggcgtcccttgttcgtcgacgtccatcggacgtaccaccgaaatctttaaaacctgcgggagatccaacttgcttagagtaaagtctgatacctcctttgacttgcactacgcctctaagtcatccagctctgctcgcagccgaggtttctccacagtcagatcgatagcagccttggtgatctggtcgatcaaagccaggttcgattccacctcagccgcttgcccctccagtaccgtgtactcctttttggcgacccacttctccttgatcccagccagtagcttcgaatacgcagcagccagctcaaccttagcatcgtgaaccgccctcttcgccccttgtgcaatcgaagtcaggtccaccacctttttggagagctcttccctcttctgctccaagcaatggattaggctcctcgacgtctgcttgtcagcttgtaacccccagatctccatctccatgaacccgatcttctcagcaaaacctttctcgaggtcttttgaagtggacagctccattttcagcctctcgatctccgcctgaaataacaatcaggttagaatcatcaaatcatcgacgaattatttataaacaagtcaaaaccgaggtatacctggaacgagacttcgcgatcttgaccagccttcacactcgacgtcagctcccggatgagggcctttccttcttcaagctcattcaccgaggggacctagctcagacgctgctcatagagagcatccagcttgtttgtggcagctatcgcctaccgaaagcaaaacagaaagtcacaactagcataaagatataaattagaaggagacagttatcgataattacctggccctccttcgtcatcatgtcagcataggccgccgcctcggccatgttcttcactccaggaatctggcagttcctccctttgatgtggcgaagcaggttcgctaacccagcctcttcctcaacgatcgtgtgatcacggtcgtgagtgtaagaccagtggaaaggcctgcttcccgcggatcctccaccggagttggacgtctgcctcacttcctgagaccagtttaaagactggcccccacctctggagcctcgtcctccgccatgcgacctgcccgaggatcacctatccgcagacgcagctgcctccggagtagcagccgcaggttccatcagaacgaagaactgcagatagtccagatacctgagcgacctgattgttatccggttgacatgctgtagctgaggtcccgacgttgacctcaggaagcgagggatgagatgctgaggcagatgcgctggaaacaggtagagtgtttcaagccgcggtcaccgcgtctgacagatcaccagcacgagcaggagccccggcgttggctcgttgaatacgaaggcttgggcgcctcattcttctgatgagcgggagttccaaagtggagctggaatcaggaggaactgaataaatagagcacgacatttgttagttagcaattcaaattgcgcacgtgtcttgataactcgtacatttttaaaaaccaaagtaaatataacggaactcgtacctataggcagatcagcctggggaactggttcaatccgcgagacctctttgatcggatctagcggtgctgctgaaggaacgattgcgggaactgctggagctacgggaactgctggagctacggcaagagcagctacgatgcgatttctgctgaaagtggaccagtcagtctgaccacgtcggagaagggttaacagctcaagttccgtctccaagagagtaacttccttggtccttgctacaaatcatcaaaaacaagcaattagtttcagtactaacgattagcaaaagcagtcaaggactcaacacaaacaacaaagaaaaatcaagaggctcaggtctccatctgacccaggttggtagaccaggtccttgttatcctcgcgggatcaaaattgccaactgaatgacgatctactttgaaaaagaaatacttggatcgccaattggtgtctcgacaggctttcaaaccgccgaggaccagagatctgggacgtgcactgatgtagtacgtctcttggtcactcctagcattggtcttgacctggcagagctgaagcaggtcatggcagctgaattctctgtttacttcccgagcccgggtgaataacgcgagcacatggcggacgaagttcgaacacatctggggaaaggcgaggccgagacagtagagcatctcgagaatacacgccggaattgcgaaaaataggccgcatttcgcgaagaaattgtcataagcacgacaccacccgaccggcacgttctcagggatgcagcagcggccttgggagtatcatatgtacctccaccgaaacctggcatctcctccggaggtcgacctgccgtgtttctttcctttagaggtcgagtaaaccgtcagtcgacggtcaggaattggcagggacggaaccacgaatgtacagtcgagtatcaaagatggtgaacttggttacagttgaaaggtggtcaagtccgctggttaaaatcgagtactctcggctgaactcgagtggttcttgaggtttcaactgtgaatgagatggggaactcgactgcgacggcgcagaggtggtcgagtatggagagtggtgatcgggtgtctttgctcttcgtggtagagtaattcgttggacgagagaaagagaaagagggcgatttgtggcgaaggagagagatgaagagagatgggtctagtaaactttgttatgatgagggcgatttcaaaaggtgtggtggagattgaatttgttattctctctccatcttatcttcagggagaatca

SEQ ID NO: 23527 - DNA, 554 bp, Arabidopsis thaliana columbia
acagtaaccgtgttgtcgctcttctctttgttgtctgtactattcacagcttttacagaatccggttggctcctcatgcgcagtatctcgccctttgcagagcccaagtcctcctcgagcttcttcactttcttctctagcacttccctttcttttcctagactcatcacgaggatatgtgcatcttccacattttccttagcttcttttgatgcattctttgcctctcctagtgatcgttgaagtacttctttctcgtcctccaagtttgaagcatgggtattcaccttctcaagctctcgtgacagtattgatgtgttcttgttcatctcatctaaagactttacagcttcttcgagatctgtttcaagggattttctcgcctccctttccatcaagatctgcttttccattcctttcacctctttgttcaacgacaaaacagtctttttctcctcttccaattccttgttactggttcaactttcttgtaaatctcacaagttccttctggaggctctggttcttgacagaagactctttgagttcatgag

SEQ ID NO: 23528 - DNA, 3266 bp, Arabidopsis thaliana
tccttcactctctccttcactcgacgatggtactcgatttcgccatttcttccttctcaccgtcgcctccttaccactcgaccgcaactcgacctctccgtgcttcatcttcatcttcatttactcgacttcgccggagcttctcgccgttccacgttcgcatactctctcaccgtctctgtttcactcgaccacttcacacttcgcctcaacatcttcgccggagtttctcgccattgtccgtgcttccgtcatctccgttcactcgaccaccggaccggcttcaccatctctcaactatccaccattcactcgacctcgccattcactgcgcctccattcgtctctttactcgactactcctcaaaccgccaccgtcttctctaaattcgccgtttactcgaccgtttcactccaccgcgtacttgactggtttagtgtgtgtgtttatttaaactaacatattgatatttggttttgagttacattctttttcagggaatcaatatgagtaactacagtggcgaatcctccatggatgcggattacaacgtcgatgaagctgaatcttggtcaactagaccagagagagagcaacaggcttatgagagcttcagagccgagacccaacgctcagtagctcgacgcaatgaaaggagagctgagattgctagaggaaagagagcgatgaccagcagatatgagttgatcgacgaagatattgacgtcgagtatgagcctgagtcatggcacagagaaacaaaactgttgaacaagcctgatgaagttacagtggaggagtacatcagacttttcaagctgaacgacttctggggaacgaggtacccctgttacgagactctagcccagcttgggctactggaggacgtacagcacttattcgagaagtgccatcttgagacgctgatgtcttacccgtacgtcgcttagaagaaggaaacaatagagtttctctccactctgcaagtggagttgtatcagggacttactgcagatgaactggagagtgaagggttggggttcttgactttttcagttaacgagcagcgttaccagctatctatcaagagcttggaaggattatttggttttcctagtggaaagggaactaaacccaagttcgagagggaagagttgaaggatttgtggttaaccattgggaacgatttggcgctcaactctgcaaggtctaagagcaaccagattcgaagccctgtgatccgttactatcagtgctcagtagcgaatgttctgtaccccagggaatctacgggcaccgtgtctaacacagacatggaaatgattgattctgcactcaagggcattctccggagaacaaaggggaagaaggtcctaaagggcgacctcaatgatacaccaccggttatgcttctgttgatccacctgtgtggatacaggaagtgggcgcacaccaacggaaagaagaaggtgcgaggagccctttgtgtaggtggcgttgtgacaccgattctgattgcatgtggtgtatctcttacgtctccaggttttgatccgaggatgatggatttagatcacttgcgtcgttgtgagtttctggagtacgacatggttggcgatttctatcgctacaaattcgagcactccctgacccgaacagccaacattttgcttccctgcatcgaggccacaaccatacttcagggtgagaacattgacttcagacctgcgcgtgattacctctactttgagagcactccaccgactgatgacaatgtccctacgacggaagctacagaggatgattttgctgagacggatgaggatagggaggaggagtatgatacgagcatgtatcatttcagtgagcacgtacctccagcgcgggagagcaagagcttgagtgaagctcacagaaacaacagtaagttgcagaggtggtgcaagaaacaagataggttacttatcaagtgcttcaaggccatcacgtttctgacggacaagataagttgcttctcttctaccacagctattccgcagggagagcgtcctcaggacatgccttcgaggagatatgacgcgccggagccaagtcatcacaggcctgagccaagtcaccacaggcctgagcctagtgaccaagtagtaccaccagtccctgcaaggcattcatcattcgagcctcgggagctcgggagaaagaagaaggctgcactcgctaggtctggcagtaggagtacacgacttctccagtcccgtagcttacgcgaccgcggtgctggccgcagcagaagaagagaggtcgagtatcatcagagcggtgctggccgcgacgaaggagcagaggtcgagtacccccagggggaagctgagacacaacagggagattcttcgatggcctgggagcaatcacaggcagctattgacgaccaactccgctcctttttccactgaggtatgcacctcactccaccattgtaatataccatctcttgtttttatttagtttttgtgatgtgtttttgtcctgagtactctcttccaaatttggtcacacagtggactgtgtgatttaagtttgggagagggctcaggaagtgtgtgttgcattgtataatcttgagtctgcattcatataaggcataaaaaaaacaaaacaaaattttaaaattttttgaaaatgatttcacaaaaatagagtgttcatgtagttgcatcacatttagggttgagtctaggatgtttcatataggattgttgcattcacattgcatagggaataatgatgagatagtcttgtaagcattttggttcacccgataaactcagtgccctcgttgttagttgtatgatgcatagtcaatgaaattgaagtagaactgcaccatgcctaaaatgctctactcgaccacactgtgaagatttgataccattctctatcaattcgaacctgaatctgatttaaaattatcatgtcttaacatcgaatttaaactcatggataccctaaaatacttggacttccttacaggactcttgtttgtccaagtagctgactccccttattggagcagttaaccccaaccttaagcctacaccttctttcaagcctttatcacttgtgagtgtctgtgaggtcttactccgactgagcttggtagacagtgttaggttcgtaacgcaagagatagtgcttcatgtagttctaacttacgtgatccagactagataggactaggtgagcgcctatatagtgggttgggatg

SEQ ID NO: 23529 - DNA, 3868 bp, Arabidopsis thaliana
gataatacgactaatcagcgactaacgacgttagtcattattacattgtcgctgaatgagatagtcgtgaattagtcgttgatcgacgactatattacgacaataacacaatcagtaaacaatgatcgttgtatagtcgtatcatattggcgactatttaacgaccatagcacgattaattgtcctgtacgaagcgtgtgaaacacgtggtcgtataattgtttccgacgatttgacgactaattctatcaatgtaaggaaataattctcgtagtcatataatagtcgtataatgttttacgactattatacgtctcgtgcacgattatattgtgactaggtatcttagtcggataataatcggtaattagtgtgactattagatgactattttacgtctaatttgctacctaaatatgactactgagcgactacttgttttgtccgaataagaatttggtcatcgattgttgggtttcttgtttcttgtttgttggttatcgattgttgttttcttgtttcttgttttctccttttttatttgaaatgctaaaaagatgaaaagacttgtatatatagaaaatcaagtacaaatacacatacaattatcttgtttattacacaaacaacttattcaaataaacatatgttcaagtagagtttgggcaaagataatctaaggatcattaggtggaggacttggtagacgttctgtggttgtggtagagtgacttgccatgaagtccaagaactgcggatcggtttggcggagatacttctcgactaaagacaattgctcgagcttgtccttttgctcagctgtgactcgggatgactcagcttctcgggcagcaatctcagcatctctcttctcattatatgcagcctgctcttctattttcctttgagcttcctgcagccgttcttctagggcttgaaaggatgatgaggaaccggagtgatggcggttggcgctgcctagagtgtcttttagacatcctagtcctagtccataaggattgcctcttgaatcattttctgtggactgcaagaaatagagaagaagctcattagtgacagaatattaattggactctaagactcataattatactaaaacatcttacctcgagaaagatggctgtataatcatctagtgtgagctccggaggtcgtgaagagccatcagagacagcagaagcagacgcctctagtgctgacagcctatctctcacattctgctgataagcttgagcaatcttctccgacttctgatcaacaaatgagccatccgacttagtgtgtgtttcgatgaacacctcaccaagatggaccggtcttcccaacttctcttcctgcaaacacaaatcaatatcaacagtagtcactagacataagaactcaacatactcacaagaaaacagactatattggattgaaaacagaaaacagaaaactctaacttatgagaatctgcagaaacacttaccaattcatcttggatttcttgaaaagattttggcccagagtagtggacgtgaggaccgataccgttacggtcagagagacgagctttggaataggtccgactccttttttgtgctgcttctgtgtcccagtaagcacacattgttccccacagcgtttctccaatccatggaggctgctctcgagttgtccttgcggtgctaaccatgtccttcaagcgcctcttgacgatctcattgaagtaatattggactgtccctgttattaagggatcccagtggtgagttttctacaaaaaaaaggaagaagttagtgaaactacataaacttaacttgaacaagagcagatatagaggaagcttaccgcaaactctaaaaataatctttctcttttatcaactggcacacatgaccagttatagaagggagcatcgaatttttgtaagaaaattctagtgatcttcctaaccaagcgagatcctctgtctcgagtaaacctccaaacacatgcaacaaagaaagaagtaaacatgttacaaaagtgaacaaagttattttcccaaaagaaatacaagtcacacacgactataaaccatgttccacaatagtactgtctcacaatatagcatcattcacaatcaaagcatcatcatttgtgtaatatagaacaacataacacgagtttagaactgaactaaactaatgaccaagaactaatgtaatcacaacacaacactcaactatgtttgaccgattaacaacagagcatcaaacaacaataaaacaggcattactacataaactaatgagtctagaactaaacttgactaaatgcctaacccgaaaacactagcaacacaagagccaacaatgtttcacaacacaacagccaacaaggttcacattttcggtttgattccaaagccaacaaagaaagaagtaaacatgttacaaaagtgaacaaagttatgttcccaaaagaaatacaagtcacacacgactataaactatgttccacaatagtactgtctcaacaatatagcatcattcacaatcaaagcatcatcatttgtgtaatatagaacaacataacacgagtttagaactgaactgaactaatgaccaggaactaatgtaatcacaacacaacactcatctatgtttgaccgattcacaacagagcatctaacaacaataaaacaggcattactacataaactaatgagtctagaactaaacttgactaaatggctaacccgaaaacactagcaacacaagagccaacaatgtttcacaacacaacagccaacaaggttcacattttcggtttgattcacaatagagcatacagaacaagaaaacagggaatttaaagtgaacttaccattcggtttttggccggggaatgggagacaacacacaacaccacgcttctctgccaggcacagagagaatgtcattcagagcaaccacggagtcttcttggagctccggcaacactgcaggaatgccctcttggaagttgttgccttgagacgagggatgactgtgagatgcagtttctggatccggcgaaagaggagggtcttgctgagcagtctcttgtggtggcaacggatctacacgctgtggttgattggtggagtgttggaagagttgctgcggtggtgggtagttacggtagtggggggcagaggatgaggcgccggcgccggctccttgaggcggaatcgatgcagaaacttgaaccgccgtcgccgccggggtgaaatcgtactgctgcggtagcgaagagggtcttccagcaggcgttgaacctccggctctttgagtcacgtttggtgtggtcttcctctttcgagatcctccacgaccggcgttaggcatcctcttggagatgagagaatcgatttagagagaatcgaagattagagaaccgaagaagagagaatcgaagaagagagaatcgaagatcgatttagggttaagaagaagaagaagaagaagaagaagaagaagaagaagaagaagaagaagaagaagaagaagaagaagaagaagaagaagaagaagaagaagaagaagaagaagaagagaatcgatttagggttaagaagaagaagaagaagaagaagaagaagatcgaagaagatcgaggaagaagaagaagagagaagaagagcagaatcgaagaagtggctaagtgtttggaacgaaggagaaatgaatcgaattagggttttcaacactggagtagtcgtatatcagtcgcataatagtcactaaatcaattgggtttgggcttcgacgattaaaagcccaataacttacaccgttgtctccccatagtcgccgaaccgtcaccacataaattgggtta

SEQ ID NO: 23530 - DNA, 600 bp, Arabidopsis thaliana
agtctaggcgatcccctcaaatactattttagattcctatcatatcatttcaagaaagatcttttttaaaagtttgttttcgtgaaatatttcagaacagctacagagaatatctgaagcttaagggtagatatgagaaccttcaacgtcaacagaggtacatatctgtctacctccgtatatttactcaattctgtatccatgtagattcatatttgtaggtgtgtgtggcttttgttggtgcagaaatcttcttggggaggatttaggacctttgaattcaaaggagttagagcagcttgagcgtcaactggacggctctctcaagcaagttcggtccatcaaggtatctttatacatggaatcaatgattcaaatgagattaatttgtgttgtttaattataactactatggtggtatgatgattgtttgcagacacagtacatgcttgaccagctctcggatcttcaaaataaagagcaaatgttgcttgaaaccaatagagctttggcaatgaaggtataattacagaataaatgcatttggtgcattgcgatcaatctctttcacagagtttaagtttctaaacatttttggaa

SEQ ID NO: 23531 - DNA, 313 bp, Arabidopsis thaliana
cacctaacacgccctctatagtatttaagctacgaccattgtttatatgtctcatcatatgcgtcattccattggtcattaaccatacatacccttcctccatcatcccgatatccctagctatctgaaaaacccgtaaagcgagacttgattccatgtggacaacgaatactctcgcttgcctctccatgagcttacgaagttctttctgaatctcatcatcgatagcctccggagggatcacacttctcttgacttccacgtcttgtaaagcgtcaaacaagaaaggcatgaatccttcaccaaactcgtt

SEQ ID NO: 23532 - DNA, 2360 bp, Arabidopsis thaliana
ggaatactcgaattgacaagtatttcaaggatttcatcaagtatccatatgagcatgcactctatataaaaattcaaaaagaagatatattgatcgcatgtttatatgtagatgacttgatattcacgggtaacaatttaagcatgttcgaaaaattcaagaaagagatgacgaaggagttcgagatgacggacattggattgatgtcttactatctcggaattgaagtaaaacaagaagacaatggaatattcataactcaagaaggctatgctaaggaggtacttaagaagttcaagatggatgactcaaatcccgtttgtacaccaatggaatgcggaatcaaactatcaaagaaagaagaaggggaaggagtggatccaacaacctttaagagcttggttggaagcttaagatacttaacatgcacaaggcccgatattttatatgcggtcggagttgttagtcgttacatggagcatccaacaacaactcatttcaaagcggcaaaaaggattcttcgctatatcaaagttaccgtaaactttggcttacattattcaactactagtgattacaagcttgttggatatagcgatacatctggggtggagacgtagatgaccgaaatagtacaagtggttttgtgttttacattggagacacggctttcacatggatgtcgaagaagcaaccaattgtcactctatccacttgtgaagcggagtatgtagcggctacgtcatgtgtatgccatgctatttggttaagaaacctcttgaaggagttaatcttaccacaagaggaaccaacaaagatctttgtggacaacaagtcggcaatagctttggcgaagaacccggtcttccatgatcgaagtaaacacattgacacacgctatcactacattagagagtgtgttagcaagaaggacgtgcaattggagtatgtgaagacacatgatcaagtagccgatatttttaccaagcctctcaagcgtgaagactttatcaagatgaggagtttgcttggagtagcaaaatcaagtttaagagggggtgttgaaagttaaacttgattttgaatcaagtttaattattggatcaattatccaataattaattatggccaaatccaagttctagagttttctctagaaatatcatcatttccacctccttaaaagattctagaaattttctagaatcatcttccacctccttaaacataaaaatctagatactctaatagaataatctagataatttgaataatgtaatctagatcttatgtaagaactctctagacttaggattaaaatattttagatattttgtagtttggaggctataaatacctcctccccctctcaaatgttgcaatgttgtgaagttgtattcaagtttaaagcaaagtaataaaagttctatttcctaaaaaactctctcaaaacacttaaacactttctccattacctctaaaagaattttactctaacaaagtggtatcagagcttgaagatcctaaagatggcgagtaacaatgttcccttccaagtcccggtgctcacaaagagcaactatgataattggagtctacgaatgaaggctatcctaggagcacatgacgtgtgggagatagttgagaaaggtttcattgaaccggagaatgaaggtagtctttctcaaactcaaaaagatggtttgagagactcaagaaagagagacaagaaagctctctgtctaatctatcaaggattagatgaagatacgttcgagaaggtcgttgaagctacgtcggcgaaagaagcatgggagaagcttcgaacctcttacaaaggtgccgatcaagtcaagaaagtacgtcttcaaactctaagaggagaatttgaagcactacaaatgaaagaaggtgaacttgtctccgattacttctcaagagtgttgacggttactaataaccttaaaagaaatggagagaagctagatgatgtgagaatcatggagaaagttcttagatcattggatctaaaatttgagcatattgtcaccgtcattgaagaaacaaaagatttagaagctatgacaatagagcaacttcttgggtcattacaagcttatgaagaaaagaagaagaagaaagaagatatcatcgaacaagtcctcaatatgcaaattacaaaagaagaaaacggccaaagttaccaaagaagaggtggtggtcaagtacgaggacgaggtcgtggtggatatggaaatggacgtggttggaggccacatgaagacaacacaaaccaaagaggtgaaaactcatcaagaggtcgtgggaaaggacacccaaaatcaagatacgacaagagt

SEQ ID NO: 23533 - DNA, 3425 bp, Arabidopsis thaliana
cactatcccgaggaaaaagattacttcaagatggtctgaagagatagattatccaccagaagagaaagaagcctatttcgaggaaagaagaattgagtattctgcaactcatctctcaagagaggatgctgaatatgatgatgagattagagaggactatgcagaccctctctatcacccattttcttcttaatgagtgtgaggagtcaagctagagactttaaacaagctcacttgggaggaattcccaagactgtttctgtaaataaaacttttattttctcgttatttttgatttgtttttggttgtgtttgtgattctcaggaacagagaaacagcgtggaggtagagtaaaaatttaaaatttttactctacagagcaacaggagatcgagtatttcagaaattcaagaatttgaaaaaaacctctgttgcactcagaggccatgagttcgagtagtttggtcgagtattaaggattacagaaggctctgagacattcctagacaacagtaaacaatgcttcaggacaaacagacagagcgtggcccaccacctctcacttttgttccccaagcgtttctaaggataagaaaatcccagcactccatctcatccactcgatccaaccctatctctccccaccgacactatctctcttcctcactcgaccacgaaaactcactccacctcacgtccatcactcaaccaaacctcgcaatcccttttcctctccaaacacttgacctcgcccgtcactcgatctcgcccctccggcttcgtctctctccttcactcgacgacggtactcgatttcgccatttcttccttctcaacactcgacggttactcgaccgctccgcccttcacttcgctggaagcttcaccgcctcaccgtcgcctccttaccactcgaccgcaactcgacctctccgtgcttcatcttcatcttcatttactcgaattcgccggagcttctcaccgttccagcttcgcatactctctcaccgtctctcgtttctctcgaccacttcacacttcgcctcaacatcttcgccggagtttctcgccattgtccgtgcttccgtcatctccgttcactcgaccaccggaccagcttcaccatctctcaactatccaccattcactcgacctcgccattcactgcgcctccattcgtctctttactcgactgctcctcaaaccgccaccgtcttctctaaattcgacgtttactcgaccacactgttacgtctctcattcgtgtacagtcgaccgctatacccgaagccacaatatcactgtactcgaccgtttcactcgaccgcgtgcttgactggtttagtgtgtgtgtttatttgaactaacatattgatatttggttttgagttacattctttttcagggaatcaatatgagtaactacagtggcgaatcctccatggatgcggattacaacgtcgatgaagctgaatcttggtcaactagaccagagagagagcaacaggcttatgagagcttcagagccgagacccaacgctccgtagctcgacgcaatgaaaggagagctgagattgctagaggaaagagagcgatgaccagcagatacgagttgatcgacgaagatattgacgtcgagtatgagcctgagtcatggcacagagaaacgaagctgctgaacaagcctgatgaagttacagtggaggagtacatcagacttttcgagctgaacgacttcttgggaacgaggtacccctgttatgagactctagcccagctggggctactggaggacgtacagcacttattcgagaagtgccatcttgagacgctgatgtcttacccgtacgtcgcttacaagaaggaaacaatagagtttctctccactctgcaagtggagttgtatcagggacttactgcagatgaactagagagtgaagggttggggttcttgactttttcagttaacgagcagcgttaccagctatctatcaagagcttggaaggattatttggttttcctagtggaaagggaactaaacccaagttcgaaagggaggagttgaaggatttgtggttaaccattgggaacgatttggcgctcaactctgcaaggtctaagagcaaccagattcgaagccctgtgatccgttactatcagcgctcagtagcgaatgttctgtaccccagggaatctacaggcaccgtgtctaacacagacatggaaatgattgattctgcactcaagggcattctccggagaacaaaggggaagaaggtcctaaagggcgaccttaatgatacaccacctgttatgcttctgttgatccacctgtgtggatacaggaagtgggcgcacaccaacggaaagaagaaggtgcgaggagctctttgtgtaggtggcgttgtgacaccgattctgattgcatgtggtgtacctctcacgtctccagggtttgatccgaggatgatggatttagatcacttgcgtcgttgtgagtttctggaatacgacatggttggcgatttctatcgctacaaattcgagcactccctgacccgaacagccaacattttgcttccctgcatcgaggccacaaccatacttcagggtgagaacattgacttcagacctgcgcgtgattacctctactttgagagcactccaccgactgatgacaatgtccctacgacggaagctacagaggatgattttgctgagacggatgaggatagggaggaggagtatgatacgagcatgtatcatttcagtgagcacgtacctccagcgcgggagagcaagagcttgagtgaagctcacagaaacaacagtaagttgcagaggtggtgcaagaaacaagataggttacttatcaagtgcttcaaggccatcacgtttctgacggacaagataagttgcttctcttctaccacagctattccgcagggagagcgtcctcaggacatgccttcgaggagatatgacgcgtcggggccaagtcatcacaggcctgagccaagtcaccacaggcctgagcctagtgaccgagtagtaccaccagtccctgcaaggcattcatcattcgagcctcgggagctcgggagaaagaagaaggctgcactcgctaggtctggcagcaggagtacacgacttctccagtcccgtagcttacgcgaccgcggtgctggccgcagcagaagaagagaggtcgagtatcatcagagcggtgctggccgcgacgaaggagcagaggtcgagtaccccagggggaagctgagacacaacagggagattcttcgatggcctggaagcaatcacaggcagctattgacgaccaactccgctcctttttccactgaggtatgcacctcactccaccattgtaatataccatctcttgtttttatttagtttttgtgatgt

SEQ ID NO: 23534 - DNA, 2169 bp, Arabidopsis thaliana
tgcttacaaggctatctcatcattatcccctatgcatatgcaacaatcctaaacgaaacactctagactcgatcctaaatgcaatgcaactacatgaacactctatatttgtgaaatcattttctgggatttttcaatttttttttgtttttctatgccttagatgaatgcagactcaagattatacaatgcaacacacacttcctgagccctcccccaatcttaaatcacacagtccactgtgtgaccaaatttggaagagagtactcaggacaaaaacacatcacaaaaacaaaaataaaaacaagagatggtatattacaatggtggagtgaggtgcatacctcagtggaagaaggagcggagttggtcgtcaatagctgcctgtgattgctcccaggccatcgaagaatctccctgttgtgtctcagcttccccctgggggtactcgacctctgctccttcgtcgcggccagcaccgctctgatgatactcgacctctcttcttctgctgcggccagcaccgcggtcgcgtaagctacgggactggagaagtcgtgtactcctgctgccagacctagcgagtgcagccttcttctttctcccgagctcccgaggctcgaatgatgaatgccttgcagggactggtggtactactcggtcactaggctcaggcctgtggtgacttggctcaggcctgtgatgacttggccccgacgcgtcatatctcctcgaaggcatgtcctgaggacgctctccctgcggaatagctgtggtagaagagaagcaacttatcttgtccgtcagaaacgtgatggccttgaagcacttgataagtaacctatcttgtttcttgcaccacctctgcaacttactgttgtttctgtgagcttcactcaagctcttgctctcccgcgctggaggtacgtgctcactgaaatgatacatgctcgtatcatactcctcctccctatcctcatccgtctcagcaagatcatcctctgtagcttccgtcgtagggacattgtcatcagtcggtggagtgctctcaaagtagaggtaatcacgcgcaggtctgaagtcaatgttctcaccctgaagtatggttgtggcctcgatgcagggaagcaaaatgttggctgttcgggtcagggagtgctcgaatttgtagcgatagaaatcgccaaccatgtcgtactccagaaactcacaacgacgcaagtgatctaaatccatcatcctcggatcaaaccctggagacgtaagaggtacaccacatgcaatcagaatcggtgtcacaacgccacctacacaaagggctcctcgcaccttcttctttccgttggtgtgcgcccacttcctgtatccacacaggtggatcaacagaagcataaccggtggtgtatcattgaggtcgccctttaggaccttcttcccctttgttctccggagaatgcccttgagtgcagaatcaatcatttccatgtctgtgttagacacggtgcccgtagattccctggggtacagaacatttgctactgagcgctgatagtaacggatcacagggcttcgaatctggttgctcttagaccttgcagagttgagcgccaaatcgttcccaatggttaaccacaaatccttcaactcttccctctcgaacttgggtttagttccctttccactaggaaaaccaaataatccttccaagctcttgatagatagctggtaacgctgctcgttaactgaaaatatcaagaaccccaacccttcactctgcagttcatctgcagtaagtccctgatacaactccacttgcagagtggagagaaactctattgtttccttcttgtaagcgacgtacgggtaagacatcagcgtctcaagatggcacttctcgaataagtgctgtacgtcctccagtagaacaatgttgatgtttttgagtccccttaagccacaacatcaccagctattctaatctttaactcgttgaaactaattagattaaagaaagaactagttacctgtccatggaggatagaggcaatggtgaggtaccaagcagtgtaagtggtcatcaagagtccaagaaaagaccagatcctgtagttgtggaaggaaggaataaagatctcagctctcctttcattgcgtcgagctactgagcgt

SEQ ID NO: 23535 - DNA, 585 bp, Arabidopsis thaliana columbia
atgtagtattacaaactcttttcttcggaaaaagatatatgtaagaaattaagaaaatatgaaatgtcaatacaaacctagtataagaaccgtgaagacaataagaacagtaaacgagagttgaaaggatttgatcatcgtaaatgatagaaatgaattgatagtactttgaaagttacaaaagaaaaccaattgtagttatatataataaggaatatgtatctcacattcaaacacatatatctattttaagatttttactactttgtactccgaattaaaagatctaccttgactcaggttccaggttttttgcttatatgataagtaaaagtgtcaaactcttatttcattttttattaaaaggttgtaacttgtaagccaaaaggctcgataataacatgtgatattattattattttttaacgacttcatttcattgatagaatcaatgatcataatacaaagttgatgttatgaaagcgggtacatagtagtgaaatttaaaactctgatttggttgaagatgatgctttgcgaggatatctgcaggttggttgtttgtcttggacccatttgaagcag

SEQ ID NO: 23536 - DNA, 519 bp, Arabidopsis thaliana columbia
gaaaaggaaaggttaatgtaatgtattattattaccttgaatagatctctgctttggcagctcgtttagcttgttgtttctgtttcacttgtttgtaaaattcatcttctgattcaccatcattatcaaccatgtcattgttatcaccatcgttatcaccctcatcatctgatgcaaatgccccatttttattcctgccatctccctctgatgacttcacaccagctccagccaaaactctgagctcaaactttctacgccgttctccaatatcatctctttgcggtaaatcatcatctccagaaatagtcttccaaaacataaggtgaaaagattatgaaaaatactagcgtaaaaagtaacaaagacatatctaagtttcacatctgtgatatgttgttaccttgggcttccgtttggtggacacaagcttggtgagcttatcagctgttacattatgtgtgctattgtctgcatcatccacataatcatcgaatgtctctagcttcatggttagat

SEQ ID NO: 23537 - DNA, 3564 bp, Arabidopsis thaliana
gcctaaatatctataatatttttttgtcacttattatattagatcttagtattttcattaaaactcaatagtatttttatttatatgatcaaccatgacatttattttgtactcaattcagatggtgatttagtatcaacaaataaataaatatatatatatatatatattaacaagaagtataactgaattgtattaatagaattttttttctaaattatttattaaaatctttgtttttgtaggaatctaattctttatttatgtgattgataatactacaatagcatgatgttgaaaaattagagttggtttttttttttacgtcaaaacaattatattaatcaattagagtcattacaaaagtatcgatcaagccaaataggtaaagaaccagaaccagaataaaaggtagaataagtacaaccatatttcgctaagacatgagctaatttgtttccctttctcctaataaaaccaaactgaatgcttgcaaatttatttgcccaaaaactgatgtcctccaggtgatttgctaaggaactgtgaaacgaaatcccattaatcaagttaattagcgtctgacaatcgccttccatgaatacttgtgtgtatcctcgaatccaggtttgttgtaaagccgccaaaagagctttggtttctgcctcaagcggattactcgtatgagccaacttcattgaaccccatgaaattggtgtcccgtaatgatttctgatgatccagcctcctgtagcttccaacttctgtacatcgaaaccagcatcaaaattacactttacatatgtggcaggtggattcctccattctattttattctctgcaatttgtcgagtcggtgatggtgttttcttatggctttgtgttgcattgagccaatcatgtgtttcagcctttgcacttaaaacagtttttgacgggctttctctgaacttattgaatactacattatttcttgccttccatattcgccatatgagccaaaccgggagaagcttatggaaatctgacattgtggtatcctggacaaagttcaagatattggagatgttttcttcaaagtcgtttgacataagttgattatgaatgagtgacgaatctgataaccgccaagccattgttgcgaaagggcaagtaaagagagcatggttaatcgattcattttcccgatggcaacgaggacaactaggatctatacgcattcctctagtagttaacctctcagttgtagcaagagcttgagatagggctcgccaaaggaagtgttttaatttcggcatgattggcaaattccagattctggttttcaaatcgatcgaaccatgaggagggtttatggcgggaatgtttgtggacggatcatgagtaaggagccaatagccagaacgaaccgtatattctcccgttgtattgtaattccaaataattttgtctggttttttactcttagcaaggtagatacggtgtatgaatccatgatcgctttggtcgacaaattgagaaattttagaatcatcccagaagtagtaggagcctttacgttcgaacaagttattaattgtcatctccttatatgtttcttctgtatttaacggtctaggaggatgagagtccacaatattatccaatccgatacgaatattctgtccatcaccaatcaaatgtcttgttcctttttttaaaagtgcaatgccatctaaaagcgatgcccatccataagattgttgttttcttaccttagcatcaagaattgaaacatctttgaaataccgggctttcatgacacgtgcaaacagggagtttggatattgtatgagacgccatgcttgcttggcaagtaaagcatcattaaattttgcgagatctcgaaagcccaggccgccttctttttttgagtattggagtctcttccacgctacccatgggattccacgctggtttgaagctttttcccaccaaaaattcataagtaatgattcaatctccgaaactatacctttaggtaatttgaagcatgacatcgcatagacgggcattgccagggcgaccgactttagcataatctcttttcctgctggcgagaggaaacgtgcactccatgttgacgttcgtttttttactcggtcaattatatattcgaacatttctttctttttacgaccaaattgctcaggtaagcccaagtattttcctcctccaccctggtttggaatttccagaatttgttttagccttgattgtgttgaaccatagacccgcgatccgaaggttatcattgatttttgaacatttattttctgtcccgaatagtattcataaacatcaaacacatcctttagagcctggcaattccgtacgttggcttggcagaaaaatagagaatcatctgcaaattgtaaatgggttattgctggtgctccattgccaatgcgaactccccgaagatctccacttgacgctcttccatttattaggtgactaagaatatctccacataggatgaataaatatggtgacaacggatctccttgtcgtataccccgtgttggtgtaatatatccatgtggtgatccattaatcaagactgagtagtgaaccgatttaactgcagccataatccacccaatccatttgttgcaaaaaccaaagagtcacattgttgtttccaggaaatcccattccaccctatcataagctttgctaacatctgttttcactgccatatatgtttttgacacgcgctttcggactttgagtgaatgcataacctcatgtgctatcatgacgttatcgttaatgattcgacccgggataaaagcagcttgagaatccgaaacaatcgagtttagatgagattttaaacgattcactaagcatttggagatgaccttgtataaaacattgcaaagtgctataggtctatagtcggagagtgttgtagggttagtgatttttggaatcatacatatgttagtatgatttatgctgggtttcataaatgatgtttcaaagaattttttgacttctaatataacatcgtatccgactatatcccaacaattcttataaaatcttgctgttaacccatcaggccctggggctttatcatctcctatttggcagatagcatcatatatttcggtgtcactaaactcttttgtaagatctaaattgactgtattagtgactgtggatttgaagtccgcaaagtctattggtgatacctttataccattggtgctaaagatatttgtaaaaaagtcctgagcgtggtttccaatttctttatctcctgtgaacatccttccttgatcgtccatgattgtgttcactcgattttgagaatatcttgtttttgtacaggcatgaaaatagccggtgttttgatcgccttccttcatccattgattacgactcttctgcttccaataaatctcttcgtcactaaaggccttcgctagtgactcttgaagttgtggaattagttgtctgtcaaccctccttgtactctccattgctctgtttaggctgctttgaagttttttg

SEQ ID NO: 23538 - DNA, 538 bp, Arabidopsis thaliana
caaaaggctctttcttgctcaacgcatcaacactcttagttcaagatttcacctgtaatgggtgaaacatgttggctcgtagacttctgcccatttttcgaaccgaccactaccataggctttggtggtatcaaaccggccctgaaaagcatgctttccactgtgtctgttggttgagctccaacagataaccagtacctgcattattcgagtaccatagagtgaaaatcaatttctttcaacagttgcacaaaataaaaaagaagtttagttagacaccaagaactgtgtggatttagacttttaaaccagtctaatcaaatcaatcatacaagcaaaaccaagcctcacagaaaacttgcaccagatgaaatgcattaggtgtagaaacaaccaaacatgactgagagaagcaaatgaattaaggattgtagccttatgcaaatagagttttggacacagaatcaacagaaagcatctcaatttgtcacaatctaagcaattaggcagcatcattgtggccagaacaagtttatga

SEQ ID NO: 23539 - DNA, 511 bp, Arabidopsis thaliana columbia
tattgaaccttgagtttagacctcttacatggaaagacaaagatgaacaagcaatcaatcaattatttcatgatcaaggatatagtggcggcacttgtggtgcttctaaattcctcaataatcaatttaagaaagaatcttgtatcaaaatgtcaccttttgcaaaaggaaaccagcaactgatggcttcaagaacttagtgactccctctgttgaagcatgggctctgtgagcagtcccgaacgcatcgttgacataaaggtcagctagagaagcaagcttcttagcaaaatcaggttcgttcttctcttcctccttgtaaaacctcacgttctcaagaagcaaaactccaccttcaggaagggaagccaccaaggtttccacttctggaccaatacaatcatcagctttcacgacctgcacatttcacccccaaaaacctcaagagatttccacgcaagatgacagattcagatccgttgaaaatcagggtagtactcaataccaagga

SEQ ID NO: 23540 - DNA, 577 bp, Arabidopsis thaliana columbia
cggaggaggactaatggagtgttgaaacgcactttacgagctcaagtcatgcaccaacgaaatcgttctcttcttcctcaacggtgaaacaaccgtcgaggtcatcaccaccgattgttggcctgcgatgctcacgtctctaggatttacctctgatgaaaccaacgttcttcgtggtttctgtcaatctccaaattccggtggttcttctccggcgccttcctctgtgaaactttgatgtatgcaaactccaataatgattctgttataatatatggtttttaaatgatataatggcatctccctttggatttttccgtgtgactaaaaccgcatttataatttatacctggacaaagaacaaaaacagtgttgtcaagaaacagagcatagtaagaacagagaaagtttctattcaagtaacttgtaaaacaagtagtagattcatgtttttgcaaaaccttataaaagtcaatgtttcaatgcttttaaacagaaaaaaccagggaacaaaccatatagaaagacaagacaaagtaacaagtccaacaagaaaacggattcatgattttgtacc

SEQ ID NO: 23541 - DNA, 572 bp, Arabidopsis thaliana
tgatctccgatttttagcttgggagagccttaaaggttctgtgaggtttaatgttgctctagaggcgttgcaatcagtagcaacgagatatgggagcagtaatgtctgtgtagtggggcattcgttaggagctggttttgctttacaagttggtaaatccttggctaaagaagggttatttgtagatgctcatttgttcaatccaccttctatatctgtcgctatgagcttgagaaacatcagtgagaaagctggtgttgcttggaaaagactcatgtcaatgcttcctcccaaacacgagcctctgatacagaatagtaacgaaggtcaggtttctcctagcaatgtttcatcagggttcaggaactgggtaccgagtttctacgggtcgaatcagaaacctactgtggatttaagaaaatgggtgcctcatctatatgtgaacgatagcgactatatttgttgccactacactgaccaggatggagtagcagagaagagggaaatgaacaacaaagagaacaatagccctgttgtaacactaatttcaagcagcacaaagttttcgtgat

SEQ ID NO: 23542 - DNA, 1536 bp, Arabidopsis thaliana
tctacacaagttcctcttgccaccatcgtatcctcctcgtctcaacatctccggaagactctcccgagactggagattccacaaacatagcggaagactcaacggaggggactaatggagtgttgaacgcactttatgagctcaaatcatgcaccaacgaaatcgttctcttcttcctcaacgtgaaaccaaactcggcgtcgattgctgtcaagccgtcgaggtcatcaccaccgattgttggcctgcgatgctcacgtctctaggctttacctctgatgaaaccaacgttcttcgtggtttctgtcaatctccaaattccggtggttcttctccggcgccttcctctgtgaaactttgatgtatgcaaactccagtaatgattttgttataatatatggtttttaaatgatataatggcatctccctttggatttttccgtgtgactaaaaccgcatttataatttatacctggacaaagaacaaaaacagtgttgccaagaaacagagcatagtaagaacagagaaagtttctattcaagtaacttgtaaaacaagctagtagattcatgtttttgcaaaaccctagaaaagtcatagtttcattgcttctaaacaattaacagaaaaaaacagggaacagaacatatagaaagaaaagacaagtaacaagtccaacaagaaaacggattcatgattttgtaaccatgctcaagaaaatctcagaatctagacgtgatcgagactccatggtccacctgctccgttaaaatctcagctgacgactcagggagtaaagagttggccacatcgatcacgaacccggtactgacatcagatttagccaaacggtccatcgcagagttgatatcactcatctttatgagctcaatatccgaaacgattttatgcttggcacagaactcaagcatctcttgtgtctccttcatccctccaatctgacttcctcccaccattttccttcctaaaacaaaacacaaaaaaccctaacagttacttccacaacacgtcaaacatagattcacagcttataacaacgggttatcatcgttttctttaccgagaactagagggaaaattggcaggtcgagtggcttctccagcaagcctaaagccacaagctttccactcactttaagcaaactaaacaaaggtaatagagcatgttctgctgataccgtatcgataatgaaatccatagttccaactgcttccttcatcttttgagaatccgttgtaacaagaaacgaatcagcaccgagtcgatcaattgcttctctctctttctctgatgacctactaatcacagtaactcttaaaccaaaggctttaccaatcttaacagcgatatgaccaagtccaccaagtccattcacacctaaacgtttccctgattctttagtcatgccataatacttcatgggactgtacacagtgattccagcacagagcagcggcgcgcctgaatcgcttggtaaaccgtcgggaatgcttaggacaaagcggtgatcgac

SEQ ID NO: 23543 - DNA, 602 bp, Arabidopsis thaliana columbia
tacggcatttatgaacatcttaaggattggcctggctttgaacttggagaaactagaattgccttcaagctcagaaaagacaagtaatattatccccattctctatcttatgtaatgtctaatctccttaagagaagaaagttagaaatgttagtgattgcctgtccatgtgaagagtaccatagattccaagcaaaagaattgtgcaatatgtcagatatctatttattgggtttaattgttcgtaaacacaaaagtgtgtagttgtttgatactcatatattttcctgttgcgattctttttttacagattccattacatggctgtggcagatgacagaaaaaggataatgccttttccagatgatctatgcaaaggaagatgccaaactctagattaccaggaagcttctctgctcactgctccttgtgatccacgcctacaaggcgaagtatgagttccatatttttccatcgtttagaaattcaacattttgttcttctcatgcgttgttgagctgtttatcacccatttactgatacatgaatgcgtatattatgaacttatgctcgttttgtgatgtatacaactcaaataatga

SEQ ID NO: 23544 - DNA, 542 bp, Arabidopsis thaliana columbia
tgtttgattcaacacatatagtgcaactgatgaatatttccgtacaagatatctccattgttgactgttaaagaaatattcatgactgtttcttattattctttggcctagtacttacaattgcaagctttaatgcagttttgagcaattttgcatcaatttgaccaatgaaaaacttcaacagcattttaatcaggtttgatcagaacaagctctttcccttttctattattggctgcattctgcagtgcccttggttctgaggtctgtaacttctctccttgcagcatgtctttaaaatggagcaagaagaatataagaaagaggaaatcaactggagctatatagagttcgtagacaatcaagatattttagacttaatagaaaaggtctgtggttgatgatacctttctgtatatttatgctcactgttcagtggacctgttagcttactcataaaagttttatgagacttcttaagcgacgaagccatcccttcttattatctcgtcttttctcaaggcgatttgtttccctgttgc

SEQ ID NO: 23545 - DNA, 582 bp, Arabidopsis thaliana columbia
actggtttatatgaatccaaaaacataagtcaaagtttaacacatatctctctgttcttcatgttgtaataaaagggaaaaagaatcattccctagtcagacaaattcaagagcggcagatacataacaactcttgaatgtacaagaaaactaaaaagacaaattctttttgttgttagaagaatcaactctccaaacattaccagaccatcaaagagtatattaaaatgtacgaagatctaccaatctttattcaaggctggtgatgaaatgattcggaaggcggatcattgcgtggaacgttaggttcaggagacactaccgggatatccaagctgtttcttctgtcccgttcagtctctgcagatatttctcttacatcagaaactcttgcctctgttgcctgaatatcattccattcgttttctcccaccggaggctgagcgtttactacctgctcttcactcatatggactacattctctcccggtatagaggctgttcttgaaatgctcagacatgctttatcacattcttttctgtttcctttgtcattggaagagaagcttcgcagttagtaga

SEQ ID NO: 23546 - DNA, 596 bp, Arabidopsis thaliana columbia
cctgtggtaagagtttcttcgaccattcgtcgttgttatgcagaaaagcagttccgcggagattagagagctaatagtccgatgtgtttctcaaatggttcttagtcgagttagtaatgtgaaatctggttggaaaaatgtcttcacagtaagtaacacacaacatttctcaatacaatatccatctttgaatatgtttactaatgatcttgtttgtttaggtttttacaactgcagcgcttgatgagaggaagaacattgtactgttagctttcgagacaatcgagaaaattgtgcgggatcattttcattgcataatcgagacagagataacggtatacgcagactgcattagatgtctcatcaccttcacaaacagcaagtttgaaggtgacattggcttcaacaccatagaatttcttcgtttctgcgctttaaagcttgaagaaggaggacttgtcttgaatgagaactcaagaacaatactatctcagcgttaaaggaagatttttctgatacacagagttttactgaccttgatgaacaagtatcctattggattctctgcttacaggttcaacaagatattgcttatg

SEQ ID NO: 23547 - DNA, 617 bp, Arabidopsis thaliana
ctctagtaacccgcgccagtgtgctctaaagccatcagtttgcgggtggcaccattggtaacaccatgcacaactactcggtgctcgcggacgaccgttcggtgctgctgggcgtcatgtgcagcaatattgaaattggcagttatgcctatcgttacctgtgtaacacttccagccgtaccgatcttaactatctacaaggcgtggatggcccgattggtcgttgctttacgctgattggcgagtccggggaacgtacctttgctatcagtccaggccacatgaaccagctgcgggctgaaagcattccggaagatgtgattgccggagcctcggcactggttctcacctcatatctggtgcgttgcaagccgggtgaacccatgccggaagcaaccatgaaagccattgagtacgcgaagaaatataacgtaccggtggtgctgacgctgggcaccaagtttgtcattgccgagaatccgcagtggtggcagcaattcctcaaagatcacgtctctatccttgcgatgaacgaagatgaagctgaagcgttgaccggagaaagcgatccgttgttggcatctgacaaggcgctggactgggtagatctggtgctg

SEQ ID NO: 23548 - DNA, 594 bp, Arabidopsis thaliana columbia
tatcacttttgcgccacacgcgagtgagagctaagctaattctccgtcttcaatggcttttctcttttccccaattgaaattgaatctattccctagaacaaattgattgtgaatccggcgtcatttttgatggaccaagagtatcgaaactctagaacgacggtgacgcaccaccaacatcatcatcaaatgagaatgacggttccaccaccaccgtctcctcaaccatcgccaccggttcttcctcatgctgaaagtgatcagagtacctcggagcttcgttctctcgattgtaatcttacttctttatgcgatcatattcaatccgaaggtttcggctctggtgcgttttctgacgttgttgttaaagctatgggatccagttaccatctccaccgcttgattctatctcgcagctcctacttcaggtgaattttttgaatattgaatttctgtgggaggattttgatattcaggttttgcaatttgttttaaactatgcaattttgcttaaggactatgctgcaacggtcatcgaaagaagctagctctcccgttgtgaacttacttgtggatgatagaatgttaatgga

SEQ ID NO: 23549 - DNA, 1002 bp, Arabidopsis thaliana
tgcatagatccttgaggctttggtccttttatgttgatctggaagaaagtctggggacgttagaatcgacaagagctgtctatgagaaaatattggatttgagaatagctacacctcaaattataatgaattatgcttttcttcttgaggaaaataagtactttgaagatgcgttcaaggtgtatgaaagaggtgtcaagatattcaagtatcctcatgtgaaagacatttgggtaacctatcttacaaagtttgtcaagagatacgggaagacaaagctggagcgggcaagagagttgtttgagcatgctgtttcaatggtaagctcatctgtccttttacccatacttttgtgctgtctgattacagatccgatgaaactagcaccgaagttgactaattggccagtggcttagagaacttgtttattgatgtgataatattgaaatgtgatctaacttgttttttgtctctcttgcaggccccatctgatgctgtcaggacgttataccttcagtatgctaagctagaagaggattatggtctggctaaacgagccatgaaggtttatgaggaagccaccaaaaaagttccagaaggtcagaagcttgagatgtacgagatatacatttcccgagcagcggagatatttggtgttcccagaacaagggaaatatatgaacaagcaattgaatctgggcttccacataaggatgtgaagatcatgtgcataaaatttgctgagctggagagaagcttgggagagattgatcgtgctcgtgcactctataagtattcctcccagtttgcagatccaaggtccgaccctgaattctggaacaaatggcatgagttcgaggtccagcacgggaacgaagatacctacagagaaatgctccgtatcaagcgaagtgtttccgcaagctatagtcaggtctgcatcagtttctcttctttcaattttttgtcatttgtttttggagtcgaaatctgactatattg

SEQ ID NO: 23550 - DNA, 567 bp, Arabidopsis thaliana columbia
atgcgatcatgcaaccaaccagtagcccataactctctcatcccggcatcgaccaacggatatccagtccggccttgctccatgccttgaaatagttctcatccacagcccaagggaagaactttagatggccaagaagtggtctttcatgggaatatggatggttaaaacttatgtacctagaatactccctgagaccaatagatttcaggaaaagattcacgctttcttccccggcctcgtttccttcgtttgcccacgcgacctgtttgatccgaacaagatgaaaaacttttctcacactcacttccccaaaatgcaagtgtggagaaagaaacgaggttgtagcactatcggcttttctgcggttcttagagtattcaagcaatggaccgtttataaacgttgtgagagctttagtcacattacgtccatcaggagaccaagcacgagccagaagtgcattgcttcctttctcagagtcatctcaaacaccaatggatccgaacacatttagacacatcccgtgcaacataaaagaaacattattgaatgatacagatttgg

SEQ ID NO: 23551 - DNA, 505 bp, Arabidopsis thaliana columbia
gcaacaagcttggataagaggatacaaaagaatacaattcgagggagattgcgaggttctcatcaatgctatcaatggcaagactactagatgtgaattacctagtttacttcgagatgtggattattgggctttgatgttttcttctgttgtctttcaattcacaaaaaaccattgtaatagtatagcacatcagttagcctctcctatctacacaactagtgtgttccaatcatattcaggaattcagccgaggtggctcaaacacttcctttgtaaagaattacatatataaataaaattcagtttgcaggaaaaaataaaaatatatatatcaaattcaacctgtgcatgaagtctatattttcacattagactcgcaatgaaaaaattgcgtgcgcaatccatcattcaatattttcaaaattgcatgcagaaacaaaatttcaaatatttagaagtgtcaaaccttatttggcacatctcatcatatattcgtaacatg

SEQ ID NO: 23552 - DNA, 612 bp, Arabidopsis thaliana columbia
  unsure (1)..(612): unsure at all n locations
nnnnnnnnnnnnnnnnnnnnnctaaagctttaganggttgaacccagcatcaagtctgaacccgtgcctgaaactcaagagggccctgtcacagtcgtcgtggcccactcatacaaggatcttgtgatcgagaacgacaaggatgtccttcttgaattctacgcaccatggtgtggacattgcaaggcgtaagttttgcccctctgtgcttggaaaatttgctgacaatacttgggatagtcttgcccccaaatatgatgaattggccgagttgtatgccaagagcaaagatttcgcatctaaggtcactattgcaaagatcgacgcgacggccaacgatgtccctgactctattaccggttttccgaccatcaaattattccctgcaggcgccaaagacgcacctgttgaatattcgggttctcgtaccgtggaggatctcgcaaatttcgttaaagagaacggcaaatacggtgtcgatgctttcgccgctcaggccgaggaggcganagaagttgccgaagatgccactgagaccgccagcgacgctgagccctctgctgaaaagcctgagcatgacgagctttgaatttctacttgttggttagggtg

SEQ ID NO: 23553 - DNA, 652 bp, Arabidopsis thaliana columbia
tccctgcatgacttgcgcatgattcatacggaccttaaaccagaaaatattctgttagtctcctcagactatgtgaagattcccgagtacaaggtatatctcgaatgcaactgtgtgtgaccttaatgtggccaactatttaagtgctgaaggaatttggttgtgtttcctgatgcaggggtcccgattacaaagggatgtatgctataaaagagtgcctaaatcaagtgcaataaaggtgattgattttggtagcacaacttatgagcgccaggaccaaacctacattgtatcaaccagacattatagggcaccagaagtcattttaggtgagtagctcttgttataaaaactcattaaaatttttagatatcacaaacttatggagaaacattgccttgtgtgcaggtcttggctggagttatccgtgtgatgtttggagcgttggatgtatcatagtggagttgtgcacggtgtgtgtctgaagtagttgattgttaatgaatgtttgggagtcttttattgaaagatttgagatttgtagggtgaagccattgtccaaacacatgaaaacctggagcatctagcgatgatggagcgtgtcttgggccgtttcctcacaaatgctgaagaaagtggagtgagttgaata

SEQ ID NO: 23554 - DNA, 599 bp, Arabidopsis thaliana columbia
  unsure (1)..(599): unsure at all n locations
nnnnnnnnnnnnnnnnnnnnnctaaagccaaataaagacttgacaggctattggaaaggactttccatgtgtcctcgtcgcggcggagagacccatggtggttgtttgtggtccaagcgtggccttgaccattccggaacaaaccgtatgcgggccgacctcgagccagagagtctgatcaccaccgagctttgcatttctcactgcttcaaacgcactcagaaaattgacagtttcccggcagtgtcttaccaggtattcagcgtttaggatgttagagcccgcttccgtaattacttccccgagcaacgctgaaacagacggcacggacggtttgttgaaggtgattccctgcagagccttctcaaggtcttccaaaataggttcaacctgggcagaatggaaagcgtagggcactgtcagaatagttgatttcagtcctttctctgagcaggcccgggagagctcatcaatgctagacttaggaccgctaatgacggtttctgaaggcgaattaatacatgccatatcatgaaccttctcgttcaagagctgtttgacctcgactagtggggctttaatggccagcatggcatgtg

SEQ ID NO: 23555 - DNA, 571 bp, Arabidopsis thaliana columbia
gacaaagaacatccacgaatattcaaaccctttgaatacacagattttcttcacttctttcagacagaagctggacgtatagctcaatcagctctccatgctttcgctgccttttgaatcagaagtatgtatgaatgtataacttcatgttgttgtgttgtagttttaacattccaaaaaccaaatctatgtttgaagaaatataaatcatctctcactaaagagttttttagaagaaaagcaaaaaaatagtactataccattctcactctctggtggtatagtggattatattacacatgtgcggcagagtatatgaacactgcaaattttgaaacataaaatcttactatacttgtataaagttgtaccaaaatccaatattggttgacttcatgagttgcaggcagaaaccgggaatgcaatcagattcagatgtatgcaagcgagcttctgtcaaaatctggttgtggcctgcatcgtgttggagtcggcggtctctggatattcagctcctgcaaaagataaattgtgtactttcagtgtctctggttcgtagcaaaaaaagata

SEQ ID NO: 23556 - DNA, 558 bp, Arabidopsis thaliana columbia
ccgcgtgctctaaaggaagggaaaacaattggcaatctcgatgacgtcgatattgtggatggaaaggtctacagtcttcccgctgactgtcctgcctgtgccaaggagtgcaccgtcaacatgcagaaggtggatattccatacttcaaggaagtctttatcttgagcaacgtctgcgagcactgcggataccgctccagcgatgtcaaaactggtggtgaggttccagagaaaggaaagcgcatcacgctcagcgtcgagacgattacggatctccaccgtgatatcctgaagtccgatacctgcgcactccacagtgaggagcttgaagttacggtccagcctggcactttaggcggacgattcacaacggttgaaggtctcctcactgaaattcgcgaccagctcaagggccagatctacgatatcgacgattccacacaaagcggaggtgacagcatgtcagctaccgacaaggagaaatgggctcgcttcttcgaccgtcttgactccgccattaagggcgacttgaagttctcatcacgcttgaagacctat

SEQ ID NO: 23557 - DNA, 538 bp, Arabidopsis thaliana columbia
gagacatcacttctggtctcacatagtttttcccacggtacaacacaatggtgttgttacggtttgacatcaatcacaatgcccttacttaaccgagcaagctcttctgcatactcatgaacctgcccgggtttgttgcagggcttgcaaataactttaacagtctcatgctttttccaatgaaggtgcaaattcaaaaccacacctccaaacactcctcgtcttccgacaagtacaaagttctttctcttctcacctgtacgttttaagtaatgctgctcttcctctgtcaaactctctggatcataaggctccgctggtgatttcggaacatcgtatttcctcagtttctcaatcaaccattcttctttcctcttagcctacacaatcaaccacaccaacagattttaaataaactccaaagctactaacatgttacattgactaatacaatgttaagacgtaaccttttcaagcttgtaacgaattctaacttcagggtttggagaattcatcttctttttagccttcagacgat

SEQ ID NO: 23558 - DNA, 610 bp, Arabidopsis thaliana columbia
gtcgacgtatccctctaaaagacaatgagtataatgtcctgtgtgattcagaagtatttatgtcgtttaccaaagcattctgtttaagataatttcttgttgatttcagctctccgaagtgtcaagaagtatgttggtgtcaaacatgagttggaagctggattttcatggtctctagttcatagggaatgcacaaattcagatttatccttaagtggacaccctcatattgtggaaaacaattccaagcttgcattagctttgacagtcatggatgaatgctttctgcccattattgacaggaggagtggggtgaatatagtacaaaatgtcctttacaattgtgggtaagcttttcagcactgcaaaaaattttgtctgcgtaattttactacagtgattttctttggtatttctttgtgttggttcgtttgcttatacattgcttttcgtaggtccaacttcaatcggctgaactttggtggattctatactgctcttcttgaaagaggcgacgaaatagttgcttcagcatctattaggttattccctccttataacctttgttttagttcaatctatatgtgagatgcgacaatatggcagagat

SEQ ID NO: 23559 - DNA, 561 bp, Arabidopsis thaliana columbia
ctgcccgaacctctcgatacttctctaatgaattcacaatctggaacccgtactccaatagtaccaatccctgggttcaaggacttttcaagaatgcttgattcacctgtttaaaacactacaagaacactctcacataaagagatcatatcaaatgcaaccacattaagaagaagatgcaaacctcgttgaagtacaagagtgactggaccgggcaagagcgaatcaagtaaaccgtgaggtaagtgacttgtggtagccactctcttgatatctaatacatcaccaacgcagatagctaaagggcttgtaagtttacgccctttgatctcataaatccggctaaccgcttctaaagaactgtcatgttacataaatcacaacttagtccaggcaatgtaaaaggttatatcagctgataaagtgaagatttttagattaccaagcatcacaagcgacgcataaagcgtatcggtaggcacagcaataactttttcggatttgatagcttcaatagcttcttgtgcataggcttcagttgcaggatgaactaaacatgat

SEQ ID NO: 23560 - DNA, 575 bp, Arabidopsis thaliana
actctagaggagccttagacgaattaatacgagtccaggacagtagctcagcccaagagttgaaaatggcttgcgaaggggtcaatctgaagaaaacaagtttccagattacagccgagaagacacaatacagcagtagatggtctctagattcaggccgagaagaacatagacaacagtctgttgtagttgtgacaccccaggctgcaagctttgtcttgttggcaatctgtttaggtgagagacccacatgttgaaggcatgtttggggactgaacccttaaaccatacagacttggtccaatccttaacaggtttctttggtctcatagcttcccaagttctagcagcagagaaaccgtgacaagtgaaatcatcaacaatccagacaaaggtgtccggtgaagagtcaaaacaaggcaacgccaatggttgttaggtgaataagcaaggcaagtgcctggtccgttctaggcggagagatgagccaaccacatcagagcaagcgtcacgaaccttagcctggatagggataccaatgctctagggcccgacgacccaacaacttaacagag

SEQ ID NO: 23561 - DNA, 444 bp, Arabidopsis thaliana columbia
gatgtcattgaaaatgctgaatcccaaccagtgtacaaagaaagtgaaatacttatagttttcactgagtattttcataaactcttcacctctcaggaaggagacagactctctactgttaatgaagccattcttccacgcatctcaaatgaaacaaatgagatcctaatagctatgccctcctctgcataaataagaaaaagcttgttatgcaatacatctagacaaagctccaggccctgatgggttttaagcaagcttttttcaatctaattaggaaactgtggtccctcaaatcattttggaggtgcaaatttttttctcatcgagtcatctaccaaggcgaataaatgcaactcatatacgacttattccaaagatcttaagccctacaaaggttgctgaatacagacctattgccctctgcaccgcgttttacaagat

SEQ ID NO: 23562 - DNA, 565 bp, Arabidopsis thaliana columbia
  unsure (1)..(565): unsure at all n locations
nnnnnnnnnnnnnnnnnnnnnnnctaaagatttattttttgctcgatttggatcaagtactaaaactcagctcagtgacctcgatctgaatgatgcttacaatgatatggtttgttctccgctagaacccattaattagtattgttttgactgacgagattgcagccacaattgagtgtctacgttgctcgtggaatgttgatcgaaagtacctctgctacttggctatatggcacatcctcggaacactgtgtcttctatcagtacaatttccaccatgcacagaatatcttcactacagtgatccagacagagccaccctactaccaacctaatcctaggccacctgcacctttcaacaatcaagtcgggaaatacagttcagatccagcctataactgtaatgatgcaaattttaatggctgcgacgaggcctgggcagtcatcatcacagagagtcaaaatatccatatcggcagcgcgggcacctactcctgggtttagtgcatatactcaagactgcatcgaacgccattcttgccagcaagcgttgtggcgtcttaga

SEQ ID NO: 23563 - DNA, 527 bp, Arabidopsis thaliana
gagaaaagataaagagaagatagaaaatatagaagaggtatagacaaagggagagacaaacgaacagaagaaccagaggcattttgctttcactttggattcacaaagcctataactcacatctaaagagggatactaaggagaaatctctctctctctctgtcttcttactcttctcgcttttgtcaccacaacaactaaactagtcatgcaatgaaagcacataatatgatcggagaggaaggtcactagaagaaaaaggcaacgcggccggagttatggataggatcatcaagatacaacgaagaagacaatcaacaaaacacaaattgggtttggtacagaagcaccaataataacccaagtacgagcctcaacaatcagatatggcagcagccaagcctcgatctatatcagggtcagatcgaggtctgtgatttgaccacgtcatcgagatctctaacgataagctgtcaagactcaagagtatggaaaccaagccaagatagggtgcacgcacgggcgtt

SEQ ID NO: 23564 - DNA, 549 bp, Arabidopsis thaliana
ccccgaacttttagcttcagcaaactgatccattgtgtcagaaaagcctcttttgtttcccgatgcattgttcttttgcgaggaggagcatatctcatctttagaaggaagcaaaggaaagaatggcttctcatctagctttgctgggctcaaaaggttaagctctgtgtctctcgcaggagattgtgatccaggaagaccaagtgtcagctccgtagccttgaggctgatagtagctttgtcatcttcagcaaggggagagagagtagagcttccaacagaagaacaatcagagagacccaagtagttatgctctttaagtcctcctagagtgttcctggagatgcaattgctagtaggtgaagaactagccaccgatacattgctctgtagctcctcttccggggacattggatactcaaggtttctttaactgcaaagctgctttacctgatgatttacacagcacaaagtccccacattaaattcacataaccataaacaaatcctcaaacaaaaccctaaattaccagaaaaaatcaagaactc

SEQ ID NO: 23565 - DNA, 592 bp, Arabidopsis thaliana
  unsure (1)..(592): unsure at all n locations
ggaagccttggagcgagccaatgcgacggcgattttccgcctggcgattatcaacgggagaatctacgtcgagaaatttcgtgaggcttttcagacaagagatgtgttcacgatctggggattcgtacagctcctacggagatatccgggaaagattccggatctcgagctcatgtttgactgcgttgactggccgtgatttttacgatctgaattcgccggagttgatcaacctccaccgccgccattgttccgttattgcgcgaacgacgagacgctcgacattgtatttcccgattggtcctattggggatggtaattgcttcttcttcaagcacccataacttatagggttttgcaatttcaccactgaagttttagatttgacaaatgaaaccgcacagaccatagtaaatttacttggtagcttaaggaatatagctgtgagagttgtttagagaatgttaaatgcaaataggttagtgttgaggattgcattggttttgtagggctgaggtgaatataaagccatgggaaagtctgttgaaagaactaagagaaggaaacccagagactanatggatagatagag

SEQ ID NO: 23566 - DNA, 541 bp, Arabidopsis thaliana
tcaaggaaggtaagatagatgaaggagctgcgtattacaaaacaatggttgagtctaatctaagaccaaatttggctgtgtataaccgtttgcaagatcagttgatcaaagctgggaaactcgacgatgcaaaatctttcttcgatatgatggtgagcaaactcaagatggacgatgaggcttacaaattcatcatgagggcgttaagtgaagctggtagactcgacgagatgctcaagattgtggatgagatgctggatgatgacacggtaagagtgagtgaggaactgcaagagtttgtgaaagaagaactgaggaaaggaggaagagagggagatctggagaaactaatggaagagaaagagagattgaaagcagaggcaaaggcgaaagagttagcagatgcagaagagaagaagaaggctcaaagtattaacatagctgcattaattcctccaaaagcagtggaagaaaagaaagaaaccgcaaaactgctttggggaaacgaagctggtggtgttgaagaagccgatgtggtgga

SEQ ID NO: 23567 - DNA, 381 bp, Arabidopsis thaliana
ttctctgtatcggtatacacccgatcggagaaacaccaataaatcctattttttttgctcctgattcatatagttgctgccaaaattaaactcatattcagtaggtttgatatactagttcatattataaacaactaaatcggaggattggtttcacgtaccatagcaaaacttgcagcagagctagccataaaagaggtatatgtatctatgtcatacaagaattcctctaagtgttcaccatagtaggtattggccagatcgtcgctgcccgctaccacaatggctaggcctttggatattatgtgctcggctttctcttttcccacaaagcctttcactttctctatgtattcttgaaagtatgtcaattgttttgac

SEQ ID NO: 23568 - DNA, 514 bp, Arabidopsis thaliana
ttgacagattgatataatggtgtaagttaaaggattttattgaaagttagaaactttgtgtgtcaaagtgattgttgcaattgtcattggaatttgaagtaacttaagctctgtagattgtataaagagattaagttttgtctccggtcgtgttatgcttttgactgacggagacgagtagtttctgattgcctgtgaaactaataatagcagacctcaaaggttgatagttgttttcactctcgaacttggactttttaaattcattctcggtcggggttttgtggcaggtttacgaggctgagtatgtttcgttgcatgtgaggagaagtaaccgagcagcattcaatctatacactgagacattaggctacaagattaatgatgtagaagcaaagtactacgccgatggggaggatgcttatgacatgcggaagaatctcaaggggaagcagaaccatcaccacgcccacggtcatcatcatcaccatggaggaggatgttgttctggtga

SEQ ID NO: 23569 - DNA, 599 bp, Arabidopsis thaliana
ttcaattttatcctctacaatagtttttctttgttttttgatcaaaggagagatttcattaaaccgaactaaaccgggattggtacagagttgtgaattgcaagctttgctaaagcatccgccttgctattcaatttcctagaaacaaagacaaacctaatttgtttaaaggagggagatagagataggatatcaaagagaatcccatagagttccatctgaggaatctctgacgatatggcttcaattaactgtttcgagtcagaagcgattaaaaggtttgtgaaacccaaacgaacggccgtttggagtgcaaagaggacagcggtagttcagccaggagtgacgatctgatacagtccaccctgacagatccgtggttgcttggacccgcgctgcagtttgagaagatcatccaaggcctgccactttgagatcgcctatccaagccgcatcggtgtgacagactacagctcttgggtcctgttggggaagatgttgccgctgtgagagttgaggggttaggctggtgggagcttgagaacggttccattcatgagctagggatatggcttgagtaagggtttcgcctgggttgg

SEQ ID NO: 23570 - DNA, 2899 bp, Arabidopsis thaliana
gggtgcatcaaacaactaacaacgagggcactgagcttatctggtgaaccaaaatgcttacaaggctatctcatcattatcccctatgcatatgcaacaatcctaaacgaaacactctagactcgatcctaaatgcaatgcaactacatgaacactctatttttgtgaaatcattttctggaatttttcaaattttttttggtttttctatgccttagatgaatgcagactcaagattatacaatgcaacacacacttcctgagccctcccccaaacttaaatcacacagtccactgtgtgaccaaatttggaagagagtactcaggacaaaaacacatcacaaaacaaaaaaaaaacaaaaaaaaacaagagatggtatattacaatggtggagtgaggtgcatacctcagtggaagaaggagcggagttggtcgtcaatagctgcctgtgattgctcccaggccatcgaagaatctccctgttgtgtctcagcttccccctggggtactcgacctctgctccttcgtcgcggccagcaccgctctgatgatactcgacctctcttcttctgctgcggccagcaccgcggtcgcgtaagctacgggactggagaagtcgtgtactcctgctgccagacctagcgagtgcagccttcttctttctcccgagctcccgaggctcgaatgatgaatgccttgcagggactggtggtactactcggtcactaggctcaggcctgtggtgacttggctcaggcctgtgatgacttggccccggcgcgtcatatctcctcgaaggcatgtcctgaggacgctctccctgcggaacagctgtggtagaagagaagcaacttatcttgtccgtcagaaacgtgatggccttgaagcacttgataagtaacctatcttgtttcttgcaccacctctgcaacttactgttgtttctgtgagcttcactcaagctcttgctctcccgcgctggaggtacgtgctcactgaaatgatacatgctcgtatcatactcctcctccctatcctcatccgtctcagcaagatcatcctctgtagcttctgtcgtagggacattgtcatcagtcggtggagtgctctcaaagtagaggtaatcacgcgcaggtctgaagtcaatgttctcaccctgaagtatggttgtggcctcgatgcagggaagcaaaatgttggctgttcgggtcagggagttctcgaatttgtagcgatagaaatcgccaaccatgtcgtactccagaaactcacaacgacgcaagtgatctaaatccatcatcctcggatcaaaccctagagacgtaagaggtacaccacatgcaatcagaatcggtgtcacaacgccacctacacaaagggctcctcgcaccttcttctttccgttggtgtgcgcccacttcctgtatccacacaggtggatcaacagaagcataactggtggtgtatcattgaggtcgccctttaggaccttcttcccctttgttctccggagaatgcccttgagtgcagaatcaatcatttccatgtctgtgttagacacggtgcccgtagattccctggggtacagaacattcgctactgagcgctgatagtaacggatcacagggcttcgaatctggttgctcttagaccttgcagagttgagcgccaaatcgttcccaatggttaaccacaaatccttcaactcttccctctcgaacttgggtttagttccctttccactaggaaaaccaaataatccttccaagctcttgatagatagctggtaacgctgctcgttaactgaaaaagtcaagaaccccaacccttcactctccagttcatctgcagtaagtccctgatacaactccacttgcagagtggagagaaactctattgtttccttcttgtaagcgacgtacgggtaagacatcagcgtctcaagatggcacttctcgaataagtgctgtacgtcctccagtagcccaagctgggctagagtctcgtaacaggggtacctcgttccccagaagtcgttcagctcgaaaagtctaatgtactcctccactgtaacttcatcaggcttgttcaacagttttgtttctctgtgccatgactcaggctcatactcgacgtcaatatcttcgtcgatcaactcatatctgctggtcatcgctctctttcctctagcaatctcagctctcctttcattgcgtcgagctactgagcgttgggtctcggctctgaagctctcataagcctgttgctctctctctggtctagttgaccaagattcagcttcatcgacgttgtaatccgcatccatggaggattcgccactgtagttactcatattgattccctgaaaaagaatgtaactcaaaaccaaatatcaatatgttagttcaaataaacacacacactaaaccagtcaagtacgcggtcgagtgaaacggtcgagtaaacggcgaatttagagaagacggtggcggtttgaggagcagtcgagtaaagagacgaatggaggcgcagtgaatggcgaggtcgagtgaatggtggaaagttgagagatggtgaagccggtccggtggtcgagtgaacggagatgacggaagcacggacaatggcgagaaactccggcgaagatgttgaggcgaagtgtgaagtggtcgagtgaaacgagagacggtgagagagtatgcgaagctggaacgacgagaagctccggcgaagtcgagtaaatgaagatgaagatgaagcacggagaggtcgagttgcggtcgagtggtaaggaggcgacggtgagaaggaagaaatggcgaaatcgagtaccgtcgtcgagtgaaggagagagtgaaggaggtggcgcgaacgcgacggttgtttcgaggtagagtg

SEQ ID NO: 23571 - DNA, 5066 bp, Arabidopsis thaliana
ggtaatcgagctccacattggagaaagtgaagtcactcgaatcttaatcgatacggggagttcagtaaacgttatattcaaagatgtcctgcaaaaaatggaagtccatgaacgtcacattaagccgtcagtccgccccttaacaggcttcgacgggaacacattgatgacgaacggaacaattaaattaccgatctatctgggaggggcggcaacatggcataagttcgtagtcgtggataagccagtaatctacaacataatcctgggcacgccgtggattcacgacatgcaggcgattccttcgtcatatcatcaatgcatcaaaatcccaacaagcgtcggcatcgaaacaataaggggaaaccaaaagttagctcgtacgtgctttttaattgaatgcaaacttcgaaaggagctcgacttatagcaattaaaggacgccgaacccaaggaatctgtcgaaccatccactaaaaagcgagcttccgaagccagcagtgacgagcccgcacctaagaaaagagcagaagaagaaagttctcctaccagagaattggtagttcaggttaacatcaatgactcaaacgcagagcggtgtgtggggatcggcgctgatcttgctgaagatataaagaccgagctcataacatttcttaagaggaacgtcgcaacgttcgcctggtcaatagacaacatggtcggcatagatcccgaggttgcttgccatgaattaaacgttgacccaaccttcaagccaattaaacaaaaacgatgaaagcttggtccggagcgctcaaaagctgttaaagatgaagttgataaactcctcggcgctggctccattgtcgaagttaagtaccccgaatggctggcaaaccccgttgtcgtaaaaaaaaagaacggcaaatggagggtttgcatcgatttcacggacctcaacaaagcatgtcctaaagtgctttttaattgaatgcaaacttcgaaaggagctcgacttatagcaattaaaggacgccgaacccaaggaatctaccgaaccatccactaaaaagcgagcttccgaagccagcagtgacgagcccgcacctaagaaaagagcagaagaagaaagttctcctaccagagaattggtagttcaggttaacatcgatgactcaaacgcagagcggtgtgtggggatcggcgctgatcttgctgaagatataaagaccgagctcataacatttcttaagaggaacgtcgcaacgttcgcctggtcaatagacgacatggtcggcatagatcccgaggttgcttgccatgaattaaacgttgacccaaccttcaagccaattaaacaaaaacgacgaaagcttggtccggagcgctcaaaagctgttaacgatgaagttgataaactcctcggcgctggctccattgtcgaagttaagtaccccgaatggctggcaaaccccgttgtcgtaaaaaagaagaacggcaaattgagggtttgcatcgatttcacggacctcaacaaagcatgtcctaaagatagttttccgctcccccatattgatcggatggttgaagccacgaccggcaacgagttattgtcattcatggatgctttttctgggtataaccaaataccgatgcataaagacgaccaggaaaaaacatcttttattacagacagagggacgtactgctacaaggttatgccgttcggactaaaaaacgccggggctcgctatcagcgattggtaaaccaaatgttcgcccctcagctaggaaagacaatggaggtttacattgatgatatgttggtcaaatcaaaaaaatccgcagatcacattgaacacctaacagcctgcttcgaaacgttgaacaaatataacatgaaattaaatccggctaaatgttcattcggtgtaacgtccggcgagttcctcggatatattgttacaaagcgcggcattgaagcaaacccaaaacaaatacaagcaatcctagatctcaaatcgccgcgcaacaaaaaagaagtccagagattgacagggagaatagcagcgttaaacatattcatcgcgcggtccacaggcaaaagtttgccgttctaccaactactaaggtcggcaaataagacattcgaatggacaaacgaatgtgaagacgctttcagtgaactcaagcggtatttgtcaactcccccggtgttatcaaaacccgaagaaggcgagcccttatacctatacattgcagtatcaagttccgcggtcagtggagtaattgttagggaagaccgaggagagcagaagccaagataatcttggacggacttaagaagcgactcgaggcaaaaaagggaacctgggcagacgagcttgatggagtcctttggtcacacagaacaactcctcggcgttcaacgagcgcaacacccttttctttgacatacggaattgaagccatggcacccgcagaagtaagcgtcggcagtttacgcagaactatgctcgtcaataacccacaactcaataaccgaatgctcttaagtaacattgacgacgcagaagaacttcgcgatagcgccctccttagaatacaaaattatcagcaagccgccgctcggcattataacaccaaagtaaagcctcgatccttcacagtcggcgatttggtcctctgcaaagtctatgaaaacacagccgagcttaatgcaggaaaactcggcgctaaatgggaaggcccttatctagtatccagagtggtacgcagtggcgtttacgaactactcaccatggccggcgaaaacattcctcgatcttggaacgcccacaatctgaagaagtatcattcctgaagaagaagttaccctacaaacctctgtttatccacctttgaataagacttatgtacaacaacataccatgtgaactacgatcggcttgatcccctctgaaggaggggtacgtaggcaacccactctcgggtgcagctgtcctttgtaaataaaaaaaaatggactccttacctcaaggagacaccgttcaaaacgggcgaacattttaaagccgggcccagaattcattttcgaatgatttcccgcaaaactttgctcgaatgatggaaaaagtttagccaatctcaggttgcataaacatcaattcaaagcaaaaaggggtaagccgggcaccagatggcaagataagccacccgcaccaaaagagagtccagcctaactaaaagttcggcgtaaaatggataaaagccgggctccagtgcaacgtgttttagtgtcacccgcaataataagggtcgcatgaagacgttctgcgacccattaagcgaaaaagacacaaagctgaaacacaaaaagttttgcaaagggaaaccagatttttcattaataggataaaggtgcaaacaacgtccggcgaagcagataaaaaaaaaaaacaacttaaaagcaacataaacaaaagaaacaaaaggaagcagagtaacaatcagggccctctcgacgagctagcctcatcctcgtgaagtttagcacgacagtacgccctcagaaaaggcggcagtgggttcaacttgcccagtccgaagcgttcccagtccttgggatcggcctccaacctcctcattccaagctccatttcctgcatcatgcggaggagctcagcatggcggcggcagtaagctcggtgttgcccctccaactgcagaaaaccaccatctaaaaaattcaggattcaggaaaaagcaagaacatgaagaaagattctttaaattaacttaccgtgcgaaaccaatatcggaatcgcgccgcctcttcaggatgaagatgacgaagcagatccgccgggtacttcacactgccgggaacaaaatcacgaccgacgggagtgaatgacggcgaggcggcgatcaatggaggcctcctccaggggtacagcggttcgccaactggaagcgccgggcggcgaatcacgcgatcctccactacgcagatcggagaaggtgaacggtcacgacggggacacccgaaataaccacggatcgacgtcgacgaggaatcaagctcatcatcggaatctgatgacgtacctcgagagacctgagaacctgacatagtcaagaatattctaagaaattttttttttttcagaggaaaggcgaagagaaatcgttggggtgaagaacactcatctccgagaagttccttttatagagtccgagcaatgattgactccttggacgagacgcctcactgactccttgcagtgaaccgtcgcttcgtttggtgtgacacgctataatgattaaaaagaaaacagaacagaacacggcaacatttaaaacggtacaatcacaagcacaaatagcaaaaaaaccgcattcattaatgcacaggagggtacgaattattcaagaaagggaaggagaaatgatgaaaggacaaagttcaacaaaagccccaagaaaaaatagggcccatagtcaaaaagagacgagcatacatcaggctcgcaaaagacaagagcaaaagaacaaaacgccaactcaaggctcggcattcgaagctagtacggaactgtccccaatggttggcgcagtctcggcatgtgaagcaggaacggggccgtcttcagtagtaatcacgcgcgctggctcatcatcagagatcgtcacaatcgccttcttaactcccgcagaaaccaaagcagcgagtttaggatcggtgaagaactcggttatgggatcaatctcgcaagctgccaggaccccgaggttcgagccaaattggttaatccagaagggagactcctccgaacccagcacattttccgtcgaaccatgaggagcgacaggcgtgatgacactcccgccgttcaccagctccgtcacgacgaacgcatcaattttgtctttccactccttggcctcgtcctcaaactcttcaaacgtactcgccggtatagggattttatcctcatcggctagaaacttcagacagctaagtgtaccggttgttgcgcatgcatcttcaccatatgcgaggcattttctgtctcagcgac

SEQ ID NO: 23572 - DNA, 6266 bp, Arabidopsis thaliana
ccctcaggatcagtgtatcctccacaccaacaacaaagtcagaacaaaccttttgtccctacaaccaaggttttcggtcctaagcagcaattccagggaattaccagcaaccaccaccaccaggtttgcacctcagcaaagccaaggtcctgctgctcgtgacgctgatatgaaatagatgctacaacagctacttcacgggcaacctctggctccatggagatggcaaagaagatatctgagttacataacaagctggactgtagctacaatgatctcaatgttaagatggaaacactgaataccaaagtccgttacttagagggacattctgcatcttcttcagctccaaaacagacaagccaactaccaggcaaagtagttcagaatccaaaagaatatgctcatgctatcaccttgcgtagtggaaaagcacttccaactagggaggaacccaacacggtcactgaggacagtgaagatcaagatggggaggatttaagtctcgagaaagatcaagctgacaaaccactcgaccagccactcgagcaaccacttgacagcattactcgaccgaccactcgacctgtcatcccagcagcatcaccaactgctccaaggccagttgttgtcaaaaacaaagaaaaggtctttgtccctcctccctacaaaccgcagcttccatttcctggccgtcacaagaaagcgttggcagacaaatatagagctatgtttgccaagaacattaaggaggttgagttgcggatacctcttgttgacgccctagcgctaatcccagactctcacaagtttctgaaagacttgattgtggagagaattcaagaagtgcaagggatggtggtattgagtcatgaatgcagcgctatcatacagaagaagatcattcctaagaagcttagtgatcctggttcgttcactctaccgtgctctttaggtccattggctttcaacagatgcctatgcgatttaggagcatcagtcagtctcatgccgctatctgtcgccaaaagattggggttcactcaatacaagtcctgcaatatatccctcatcctagctgacagatcagtaaggattcctcatggtttgctcgaaaacctcccaatcaggatcggtgctgtggagataccaactgactttgtagtcctggagatggatgaagagcccaaggacccgttgattctagggagacatttcttagccactgcaggagctatgattgatgtcaagaaagggaagattgatctgaaccttggcaaagactttagaatgacctttgatgtcaaagacgcgatgaagaagcctaccatagaagggcaactcttttggatcgaagaaatggatcagttagctgatgagttactggaagagctggcagaagaagatcatcttaacagtgctttaaccaaaagtggtgaagatgggtttctgcatttggaaacattgggataccagaagctgttagactcccataaagcgatggaagaatcggaaccctttgaggaattgaatggaccagcaacagaggtaatggtaataagcgaagaagggtcaactcgagttcaacctgcactctcgaggacgtactcaagcaaccactcgaccttgtctaccgacgaacctagggagccgatcattccaacttcagatgactggtctgaacttaaggcaccaaaggttgatctcaaaccgcttccaaaaggtctaaggtacgcgttccttggtccaaactctacttaccctgtgatcattaatgctgagttaaatagtgatgaagtgaacctgctattatctgagcttagaaagtataggagagcaattggttattcgttatccgacattaagggaatttcacctagtttatgcaaccataggatccatcttgaaaacgaatcctattccagcattgaaccacagaggaggttaaatcccaatttgaaagaagtagtgaaaaaagaaattttgaaactgcttgatgctggtgtcatctaccctatctctgatagtacttgggtttctccagtgcattgcgtccctaaaaagggtggaatgactgttgtcaaaaatgaaaaagatgaactgatccctactagaactataactggtcatagaatgtgcatagattataggaagttgaatgctgcatctaggaaagatcattttcctttaccattcattgaccaaatgcttgaacgtttggctaaatatccatactattgctttcttgatggatacagtggtttctttcaaataccaattcaccctaatgatcaagaaaaaaccactttcaggtgtccttatggaacttttgcctataagagaatgccatttggtttatgcaacgctcctgcaacatttcggaggtgtatgacctctatattttcagacttaatcgaggagatggtggaggttttcatggacgatttttcggtctatggcccctctttctcctcatgtttgttgaatcttggcagggtattgactaggtgcgaagagacgaatcttgttctcaattgggaaaagtgtcatttcatggtgaaggaaggcatagtattgggtcacaagatatcagagaagggtatagaggttgacaaaggaaaagttgaagtgatgatgcagctgtagccacctaaaacggtgaaggacattagaagcttccttggtcatgctggattctatagaagattcattaaagacttctccaagatagccagaccgttaaccagactattgtgcaaggaaaccgaatttaaattcgatgatgactgcctcaaatcctttcaaaccatcaaggatgctttggtatctgctccggttgttcgagcgcctaattgggactatccatttgaaatcatgtgtgatgcatcagattacgcagtaggagctgttttaggccagaaaatagacaagaagcttcatgtcatatattacgccagccgaacgttggatgacgctcagggaagatatgcaacaactgagaaggagcttctagctgttgtattcgcatttgagaagttcagaagctatttggttggatcaaaggtaactgtctatacagaccatgcagctttgaggcatctgtatgccaagaaggatactaaaccaagactgttaagatggatacttttattgcaagagtttgacatggagatagtagataagaaaggcattgaaaatggcgcagcggaccatctgtcgaggatgagaattgaagaaccacttccgatagacgattcaatgccagaagaacagctcatggttgtagagttcttcggaaaaagctacagtgggaaagagttccaccaactgagtgctgttgaaggagaatctccatggtatgctgatcacgtcaattacttggcatgcggggtagagcctcccaacctgacaagttatgaaaggaagaagtttttcagagacatacaccattactactgggatgagccttatctttacactctctgtaaagataagatctacaggagatgtgtctcagaagatgaagcggaaggtatcctgctgcattgccatggctcagcatatggtggtcactttgcgacgttcaagacagtgtccaagattcttcaagcaggcttttggtggccaacaatgtttaaggatgctcaggagtttgtttcaaagtgtgattcatgccagagaaaaggcaacatcaatagaagaaatgagatgcctcagaatccaatcttggaagttgagatctttgatgtatgggggattgattttatgggtccattcccatcttcatacggtaataaatatatactggtcgccgtagactacgtatcaaagtgggtcgaagctattgctagtcctaccaacgatgcaaaagttgtgctgaagttgttcaaaaccataatcttcccaagatttggagttcccagggtagtaatcagtgatggcggaaagcatttcatcaacaaggtttttgagaacctcttgaagaagcatggggtaaagcaggttgagatctccaatagggagataaaaacaattctggaaaagactgttgggattacaaggaaagactggtctgcaaagctagatgatgcattatgggcttacaggacagctttcaagacccccataggtacaactcctttcaatcttctctatggaaaattatgtcatctacccgttgagctcgagtacaaagcaatgtgggcggtaaaacttctgaactttgacataaaaactgctgaggagaagcgattgatccaactcagtgacctcgatgagatccgtctagaagcttatgaaagttctaaaatctacaaggagagaaccaagcttttccatgacaagaagatcatcactaaggatttccaggttggtgatcaggtgctgctattcaactctcgcttgaaactctttccaggaaaacttaaatccagatggtctggccccttctgcatcactgaggtccgtccttatggagcagtcactctagctggtaagagtggagattttacagtaaatggtcaaaggctcaagaaatacttagcaaaccaaatccttccagagttgacatcggttcatctccaggagcttcttgatgatcaaaggagtaaaggagtcaagctaatgactttaaacaagctcacttgggaggaagtcccatgactatccttgtaaataatttttactttcttgatatttttgatttgttttagttgtgtttgtggttttcagagacaagagaacaacgcggagatagagtaaaaattcaaaacatttactctacagaagacctggagatcgagtgtacagcccgttggagtacaaaattttgaaaatcttctgttgcacctggagaccttgcactcgagtacattggtcgagtatgtgtgatgtttaaaacccaaaaatttttaaatcatcattttactcgaccaacagaagctacagagacttgcagaaatttcctatagtttacagtaggttttctgcaaaattttctcaatcaacagtgtgtggaccacgcgctgaggataagctggagagagaatctaaaattcaacctagaccactcattttgaagcgctactcgaccactccaaatccactcgaccttcctcttttcatttcaccgccgacactctaatctccctactccacaaatcgccgtccaaacagctactcgacctctgataatttcactcgaccaccttgccgccgtcaccagctcattccctccgtcacccgaccaaaccacttcacacgattccttctgtatactcgaccaattcatccacattaaccgccgtctctttcataaaaaatcgctcgacctcgcttcccggtctcgtagaggcactcgactgatgccgtcctagccgacttcaagaactcactcgacctcgtgaaagcactcgacccctgcaaaattctactcggcttcttgttcgtgaattcagtagagccttccaacttcagagaagctactcgactactagctttcacgattcactctatctccacgattcactcgaccggctgtagcattccaactcgacctctgagaagatactcgattcaattcatctaagctcaggaacagctcaggttactcgagtacagaattgtactcgaccaattcaatctgtttcattgcctattgacaataattttggtttcattgctatctttgagactaacctattgacatttcagctttgagttctaaatccctacaggagaatcatgagcaattacagtggcagttcttctgttgatcctgactacaacatggatgagacagaatcgtcatcttcaaggccagagagagaacagagagaatacgaaagtttcagaaggaaagctgagatagcccgaggaaagagagcgatgacagagaggtatgagcttatagacgaagatctggaagacgagtacatgcctgaacagactcgcagagctaccaaacttctgcacaagcccaacatattgcctgctgaggaatatgttaggcttttcaagctgaatgagttctgtagcacgaggtatccttgctcgacctcacttgcacaactcgaattgttggaagatgttcagcacctgtaccaaagttgtcatctggacactctgatggcttatccgtatgtagcatatgaagatgagacaatacaattcctctccacactgcaagtagagctctaccaaggtatgacctctgatgagtatgattgtgaaggattgggattcttgcgattttctgtgaatggtca

SEQ ID NO: 23573 - DNA, 4979 bp, Arabidopsis thaliana
tgagaagttcaaaagctatttggttggatcaaaggtctatacagaccatgtagctttgaggcatatgtatgccaagaaggatactaaaccaagactgttaagatggatactcttattgcaagagtttgacatggagatagtagataagaaaggcattaaaaatggtgcagcggaccatctgtcaaggatgagaattgaagaacccctttcgatagacgattcaatgccagaagagcagctcatggttgtagagttcttcggaaagagttacagtgggaaagagttccaccaactgagtgctgttgaaggagaatctccatggtatgctgatcacgtcaattacttggcgtgcggagtagagcctcccaacctgacaagttatgaaaggaagaagtttttcagagacatacaccattactactgggatgagccttatctttacactctctgtaaagataagatctacagaagatctgtctcagaagatgaagtggaaggtatcctactgcattgccatggctcaacatatggtggtcacttcgcgacgttcaagacagtgtccaagattcttcaagcaggcttttggtggccaacaatgtttaaggacgctcaggagtttgtttcaaagtgtgattcatgctagagaaaaggcaacatcagcagaagacatgagatgcctcagaatccaatcttggaagttgagatctttgatgtatgggggattgattttattggtccatcccatcttcatacggtaataaatatatactggtcgccgtagactacgtatcaaagtgggtcgaagctattgctagtcctaccaacgatgcaaaagttatgctgaagttgttcaagaccataatcttcccaagatttggagttcccagggtagtaatcagtgatggcggaaaacatttcatcaataaggtttttgagaacttcttgaagaagcatggagtaaagcacaaggtcgccactccctatcatccacagacaagcgggcaggttgagatctccaataggaagataaaaacaattttggaaaagactgttgggattacaaggaaagactggtctgcaaagctagatgatgcattatgggcttacaggacagctttcaagacccccataggtacaactcctttcaatcttctctatggaaaatcatgtcatctacccgttgagctcgagtacaaagcaatgtgggcggtaaaacttctgaactttgacataaaaactgctgaggagaagcgattgatccaactcagtgacctcgatgagatccgtctagaagcttatgaaagttctaaaatctacaaggagagaaccaagcttttccatgacaagaagatcatcactaaggatttccaggttggtgatcaggtgctgctattcaactctcgcttgaaactctttccaggaaaacttaaatccagatggtctggccccttctgcatcactgaggtccgtccttatggagcagtcactctagctggtaagagtggagattttacagtaaatggtcaaaggctcaagaaatacttagcagaccaaatccttccagaggtgacatcggttcatctccaggagcttcttgatgattaaaggagtaaaggagtcaagctaatgactttaaacaagctcacttgggaggaagtcccatgactatccttgtaaataatttttaccttcttgatatttttgatttgttttagttgtgtttgtggttttcagagacaagagaacaacgcggagatagagtaaaaatttaaaacttttactttatcgaagacctggagatcgagtgtacagcccgttggagtacaaaattttgaaaattttctgttgcacctgagaccctgcactcgtgtacattggtcgagtatatgtgatgtttaaaacccaaaaatttttaaatcatcattttactcgaccaacagaagctacagagacttgcagaaatctcctacagtttacagtaggttttctgcaaagaaattttctcaatcaacagtgtgtggaccacgcgctgaggataagctggagagagaatctaaaactcaacctagaccactcattttgaagcgctactcgaccactccaaatccactcgaccttccacttttcatttcaccgccgacactctaatctctctacaccacaaatcgccgtccaaagagctactcggccactgagaacttcactcgaccacctccctcgccgccgtcaccagcccatccactccgtcaaccgaccaaaccacttcactcgattccttccatatactcgaccaattcatccgcatcaaccgccgtctctttcaaaagaaaccgatcgacctcgcttcccggtctcgtagaggcactcgaccgacgccgtcctagccgacttcaagaagtcactcgacctcctgaaagcactcgacccctgcaataatctactcggcttcttgttcgtgaattcagtagagccttccaacttcagagaagctactcgaccactagctttcacgattcactctatctctacgactcactcgacctgctgaagcaccccaactcgacctctgagaagatactcgattcatttcatctaagctcaggaacagctcaggttactcgagtacgaaattgtactcgaccttttcaatctgtttcattgcctatctttgagactaacctattgacatttgagctttgagttctaaatccctacaggagaatcatgagcaattacagtggcagttcttctgttgatcctgactacaacatggatgagacagaatcgtcatcttcaaagccagagagagaacagagagaatacgaaagtttcagaaggaaagctgagatagcccgaggaaagagagcgatgacagagaggtatgagcttatagacgaagatgtggaggacgagtacatgcctgaacagactcgcagagctaccaaacttctgcacaagcccgacatattgcctgctgaggaatatgttaggcttttcaagctgaatgagttctgtagcacgaggtatccttgctcgacctcacttgcacaactcggattgttggaagatgttcagcacctgtaccaaagttgtcatctggacactttgatggcttatccgtatgtagcatatgaagatgagacaatacaattcctctccacactacaagtagagctctaccaaggtatgacctctgatgagttggattgtgaaggattgggattcttgcgattttctgtgtatggtcatgagtacaggttatcaatcaagcgattggaaggattgtttgattttcccagtggaacgggatctaagccaaagtatgaaagagaagagttgaaagacttgtggatcaccatcggcagctctgtaccgttgaatgcttccaggtcaaagagcaatcagatacgcagccctgtcatcaggtacttccagcgttctgtagccaacgtactctactcccgagagattacagggactgtcactaactctgatatggagatgatcgcaatggccctcaaaggaactctccgccaaactaaaaatggcatgtccctccagggtgaagtcaataacacacctctctctatacttcttctgatccatctgtgtggatacaaaaactgggcggtcagcaataaccgcaagagagcacgaggcgctctgtgcataggtggcgtggtgacacctattctgatagcttgtggagtcccactcatttctgctggactcgagccacgagcaatggatatcgagcacctacgtcactgcgaattcctggagtttgcaatggttgacgatttccacaggttcaggtttgagcactctacagacaggagagctaacatccttctccctagccctgaggtcacacggataatcgagggagataacattgattttaggcctgagattggacgcctctactatgagaacgctccaccattagatgaggacgatcttcttgaagaagctgcttcggatgggatggatgaagatggagcagtaaagttcgacactagcatgtatcactttgctgaacatgtacctccagcgaggcagagcaagagcttgactgaagctcataagaataacagtaaattgcagaagtggtgcaagaagcaggacaggctgatcgccaagtgtttcaagcttctgacagacaagctgagttgctcttcctccaccactgctattccacaggtacaacctcctatggaaatgccatcgaggagaattaatgcacctacgcacaggcctgagcttagcgagcagagagtcccacatgtccaggctaggcattcgtcattcgaatcccgggaacacaagagaagaaggaaggctacactcactcgatctagcagcagatcacgcctcattcactcgaggagatcactcgaccgcggtactggccgcagcagaaggagagaggtcgagtttcctcagagcggtgctggccgccacagagctgatgaggtcgagtacccatctgctggagctgatacagaacaaggaggttcgtctatggcctgggagcaatcacaggcagccattgacaagcaactacgttcattcttcgactgaggtaagtgcctcacttcaccattgtattataccgcctctcttccaagtttattcacacagtggactgtgtgatttaagtttgggggagggctcaggaagtgtgtgttgcattgtgtatattttttagtgttgcattgaaaattttcagaaaatgatttcacaaaaaaaaagagtgttcatgtagttgcatcacatttaggatcgagtctagagtgtttcatttaggattgttgcatatgcataggggatgatgatgagatagccttgtaagcattttgattcaccggataaactcagtgccctcgttgctagttgtctgttgcatagtcaatgaatttgaaaaaaaaaaaaaaactgaaccatgcctagattgctctactcgaccacactgtcat

SEQ ID NO: 23574 - DNA, 428 bp, Arabidopsis thaliana
tgaaggagataaagcaaacgaccaacaagtcttcgatagggtttggcgtcggcgagaagcggaccgtcatcagtggccaagtgatggttttgttctaacggggttaaagctgggcgacatccaaggttgccactgtcggtgatgatgtccagtgcatacttgcgttgtgataaaaaaataccttcagagccccgacttacttcaataccaaggaagtattttaacttccccaaatctttcatggagaaacaccgtcctaaatactccttgaatttctgaagcatataaccatcattaccacaaatcaagagatcgtcgacatataccaacacacggagttctataccattacgtgtataagaaaagaaagagtagtcttcatgaccttgcaccaaaccaaaacgtaagagggcatcagacaacttctt

SEQ ID NO: 23575 - DNA, 5293 bp, Arabidopsis thaliana
gtgtacgttttagtgtacgtccacatttacatttctacatttgcccaacaaacagtgtacgctgtagtgtactatcagtgtacgtccaggcataaatatcaccatttatgagacaaaccaaagacttcatatgtttgcatgtgtattttttagtgtacgttagagttgatatctcatgctagcgtacgtccatatctagttttccgagataaaccaaaaacctttaagtattatttggtagatgcacgtgtacgtagttgtggacgcttagattttaatatccaaatttacatgtactacgggaactaaatatcatatgcgaatttggctgaaaaatattcaatttgagaaacataacaaaccttgcaaatttcttaagcaataatataatttcaacataaacataaacaacatagtagaagccttatcataatttgaaacatgacatagcggataaaataaacaaacatataaagtagaatggaataactatagcatttgattaacacgcttggcacacgaccagaggtaacagcggttgcaaacgttttagaaagctcctgataccatgtaacaatataaggcgcaaggaggcatactaattccatggctggtaggataagagaacgtaggaccatatgtattgctgtatggagggtcaaacttctttatttcctcgatgaactcatcacccaaaactcgagtggcaaccgagtccaatggataatggttgcgggtgaagagctgtagaaacaagccgcccatataatcatacccagcacatatgaatacaatggcgcatgcaagtgttgcatttgctcgtactggagcatgacgctgtaagagcctgatggctccattgatgtttcgttcatgcgttagaacacgaataccttcgtaatacacggccgtgggattattagctacaaaacaccgtaagaaaatgttcgatgtcggccttcatcagcggatccggagggattgtggccccctccagcttggaagtcatcgggcgagtcacacaaggtgagaatattggcatctttgaggacatccggacggtagacaatgtctcttccacgagtgccggatcgtaccagtggaccagcattggtcagccaggttcttagctatctttgagagtaaatcgttgggaagagtcgggttaaccatgtttgaaatgagatagtcagagatcgtcagtaatttcttcactttaataaccactactgtgaatttggttggggcaattacggttgaaatgaatgtcatacttgtgttggtaagcgttggctgtcaaatcaatttatcacttgagttatgttataaagttaatatgcagtgtacgagacatatagatatgtacgtacacatttacattatgtaattataagtgaacgatgtgtacgacaatatgatagaggacaataaattaacttctgacaatctccaaattaaatgtagttgcaatcatatatataagtcaggtttgttcataataattggttgcaaagaaccagaatattgttcttggacgattaaaccaagtgcacagtaccggcctcccgcttgccgtgctcgtagatgtcaacggagtatttctgacggtagaagaccatatctgcttctcgaatggttgtcagatccgaaaaagggtgtccaaacgcaagcaactccaggaacttcatcgtgtatggcccgcaatctcctgtagttgggttttgagcaacggtaggacaacgcacatactcaaaaggttcaactgagtacggagaaatcaatacatcctggcacatcgctctgactaagtacggcatcatttcgcaaataggagtcattctcgccttcacagccgactcccgcgtgtgcgatattaaagcgtcatacacagttattagccgttcattaaggttgattcccaaagcaacccaatgttcactcttccagttcatcggagcatacacaacatcgacatccttcagccacttcatattgggttcacggtttatgtgtactccattagcaatgtcggacagtaatttaccccatttgaacctgttcttattaatacacttcttgaattcgcccacccgcttggtaagtagatgcgtcagcatcatgtccaatacaatacatctgtttgctatcatctgttccccgttcttgtgccacatcaacattgccatcatttctaaatgctgaaatgttcaaaaaatatatcagtgtacgtacacttccacgaaaaatttaatcatctatgtacaatttataacaaggaatgtacgtatataaatgcaacgtaccgaactttcgacccattcaccaggtgttagaaggttcgcaaaaaactcgttgggcactttgcgaaacccgaaaagagtgtgaatcctgtaaatccagaaaaatatttgataacaaccttaagacttggaaaaatgatgattgagatattaaataatccattttaatataatatacttacacagagggtcctttaatgatattgctgaattcctctacttttagagggtcaaccatgtccaggggattgtatgagacatttccagccctgataacaacctctgtctattgagttggtacatctggcaccaagactgtttttgccttaaaaccatgatgatgagcatcatcctgttcatagataagttgcttcttcacttttttttgggacctttggggacgattttttttcttcttttgcttcgacagcagtagcattgtctgattcatcctgttaacaaataggattgtcaacaacagtttcatacgtttttctatgtttaaaataggtacatacattatttttaggaatatcggtcttgtctgcttcatctgaccctgggttaggatcctcagttcttacagacccctcgacaatacccggctcttccatgactacctgtgcaagttaacgtacacaagtctatataatgtacacatataatcctatgtatgctattccgagaataggaattgaaacacacaaattgttacctccacattagtagctgcagccaaatcaccaacggctttggtatccaactcccgtatgacctgcataatataaattttatacatttgaacagtaaatagtacattttacttgttgcaagagttagcttacattgttaactacttgaaatggtgacgggggatcactgtgggtcttctcaggtatttcaacttccatccctgtcactaatttggattctcctgccgcctcaacctgtagaatttatcatcggaaaaaaactttttagtaatgtatgctttttagtaatgtatgaaacaatatatatgtacacagaacatagtgacaaaaatgtacgtacacttgtggcaggtacgtgagctgtgtctccatcagaaggctcataagtttcttctgacttgctgccattagcttcagtcgatgcactggcatctcttgcttcatcctgaaacaaaaataatttgcaaagtcttatgggcgtacacatatggaaaaagaacaagtgactaacacatacctgtgcagatgttgaaggtaaacctgatggattgtctaccatctctatgtcagcatcagctatttcatcggcccctgtatgggtaccaactaagccaggttcagcaacatcctttggtccattatcctgaaacataggctaccatagagttaagcgttagataagtgaagaaattaatgtaatagttatgcatatagtcatggaaatctgtatataacgattaccagaagatctacctctgaaactcttgcagacacattagatggaacttcttccatctcggtgtcaacagtagcttcttccacaggcctctcttcctgtgttacaaagacagtcccagacattgaacctaagcagacagtcttaccaacaacaacatttcctctatcctgaaacatagtttaactaacttcttaagcgaatatgtacgtacaccatttaaacagattgttaagagtattagtagacgacataccagatgggattgtgtggatccagcataaggaactattaaaaatccagtgtctaatatctcttcttcagcggcagaagaattcaatccatcatttgcagtaaaatcactttcattattagcgccatcctgtatcgaaccagacagtacagttatacatatggattataaaatatttagcaatgtacgtacatgacttacctgttcatcaatgaatccttgcatatcttccttattggaatcaggttcctcaatagtgtcaacagcaaaagaaacatttttcttcggctttgaaggttttcttcttccgccgaaagcagtggtatgtactccagggacatccaaatcttcctctttggaattacagccaacagaaagtgcaggagtgtccacatcatgagaaacacgagtcagccttgaagactttctcgttccagtgcttccttttgtagacatccttctcgatggcttcttcgcagtaaccggtgccttatccatagaagtaggtggttcccgcgaatcatgggaaggtatggtttgttctggccttttgccttttggatcaagggcagcacgtatctggtcacggacaaagtctttcatatcttcatgcatttgatacatttggtcttccagctccttgaaagacctcctcatttcaacaataaacctctcaggcacaggctctccaaaacaatcctcagcagtcccttctttatcacagtccatttcagatttctgttttttcatagcaggttctttagggctcgggcccggtgcatttcgtttcctcttaagatctacaatagaccagttgctgctattaattggttttcttctgggtgcaataccaaaaaaatttgtaaaaacatttatacttatacttacgtgtctcttctagttgtggtgggcgcgactgctttggtactctagcatagcctccaacccattcatcctcctgccactggtgcccatctatcaacagtgcctcaatgtaatcaacccttggatcatcaacttcatcatcccatgaaagagatggaggacaaacattatcagctggtttcacaatatagttgacctcaacctacacaaataagtatgttaaccatagataatgtacatttacttattatgtacgtacatacacaatttaacacacctcatcagcagcctcacactccaaaatgcgagatgtccggattgctcgcagagaggcaagacgatggatagacctctcagtaaatgtcctgttaggtacatcatcaggtcctagcttagcaattgatgg

SEQ ID NO: 23576 - DNA, 2477 bp, Arabidopsis thaliana
ggctcaccttcctccggtaagaccaataccggtgcattagtcaacatggcctttaactccacgaagctttcccgcactcatccgaccagttgaatgcggtgtcttctccggtcagtcgagtcaagggttgggccatgctcgcaaaactcattacgaaccttcggtaataccccgctagtccgagaaaactcctaatctcggtggcattccttggtcgtggccactcctttatcgaccgtattttctccggatcaaccgatactccttggtccgagataacatgaccaagaaaaccaacgctcctttgccaaaatgagcatttacttaacttcgcaaatagctcatgttcccttagccgttccagcaccgcccttagatgttcttggtgagcttcccaagattttgagtaaacaaggatgtcgtcaatgaagatgataacaaactcgtctaagaaatcccggaataccccattcatcattttcatgaaggctgctggtgtattggtcaatccgaatggcatgaccacaaactcaaagtggtcgtaccttgtccggaaagccattttcctcacgtccgttggctctatgggaatttggtgatatcctgaggccaagtcgatttttgaaaaccactgtgcacctccaagttgatccatcaactcatctatccggggtaaaggatatttgtttttcaccgtaactttattcaatccccgatagtcgatgcatagcctaaagctaccatctttctttttcacaaacagaaccggcgcaccccatggtgagctactcggcctgatgaatcctttatccaacaactccttcaactgtttctttagctccgccatttccgccggtgccatccggtacggagcttttgatatgggggttgtcccgggctcgagttctatcgtgaacgcgtctgaccggtccggtggtacaccactaacggccgcaaacacgtccgagaactcgttgacgatcggaatgtttttcaactccgcactcgcccccacttccttggttgtgatcgtggctaaatatgcctcacatcctttcccgagcatcctttcagcctggattgccgagattaccaagcttcccgaggttgttcttattccttgaaattttaacataccctcgtccctctcgaattgtatccgtcctcggtgaccatctatgtgagccttgtacttccccaaccagtccatccctaagataacatcatgtttctttagtggaacaatgattaggtctgcatgcatattgacaccgttcactacaaccgagatgccccgaacaagtccggtcggatacattgcatgtccgtcggccgctcgtaccattccataatcggtgtttggttctttcctgaacccacctgttttaaccaattccggactaacaaaacaatgtgtagccccagaatcaaatagagtgcgcgttactacgtcacctactctcaaggtccatacacattcccttagaatgctgagtacctcccctttcccatatgcatgatgcaatgcaaatgcagttattgaaataatgaatagggagttgtgagaacgtaccagtgatcgccctgaagtttccggcatcgttagcttccttcgacaactcataaactcgcggtgccacggcttgccgctttgggggaggcggcagtccatttcccccgcgattgtccctttgtccggcctgcttctccgcagtcaacttagggcactctcgctttagatgtccagtctttccgcaatagaaacaagtccttgtctcttcaccgagaaccttggactgtcctggttccattcttgggcaactttggatcgcatggtccttgcttccacaccggccacatgcacctatggcctttcagcaagttccgctgtggctcttaccacaggtcacgcattccccggtcttagcatcggacttggtgttatccaccttgtcaaatttccttttcttatccgcgggtttggtgggtttgttggtaacctctcaacaacctcatcgacatcctccatagaataaagacgtgagtagtaatcgacagccatcttctcaagttcctgctgttgtgaaacccaactcccatcatccgctttgagcatttcaattctgtttctccgcctcctaacaacagtcatagtatggaaatactttgtgtttcggtctcccaactctacccacttctctcgggatttctgaaaccatagtacttcctcctgctcaaggaccacatcaaattccttaatcaactcctcctccttacttaagagattatcagtttggttaatttccaaaagctcttgaaccaccttaatttcattcatcaaactctccttccttctattcacgtctccaaagacttcacggttccacttttttaatttactctttagagctgccaatgctacaggcgtctctccttccgtattccaagaagcctgaagcaaatccttaaaaccacta

SEQ ID NO: 23577 - DNA, 587 bp, Arabidopsis thaliana
gtcaagagcagagactactagtttacggatccacttcatgaagaaaacccagttacctccaaagtgagtcttttgtctgcgacgctgaacagaaggacgatgcatctgtaatcgatgttcttctcaatcgcaggaacaacccagaagctgctcttcgtttctataattgggctagaccatggcgtggaagttttgaagatggtgacgtcttctgggtactcattcatattctggtcagttctcctgagacctatggacgtgcaagtgatttgctcatacggtacgtttctacgagcaatccaactccaatggcaagtgttttggtcagtaaattggtggattcggcgaaatcatttgggtttgaagtcaattcacgagcttttaattacttattgaatgcttattctaaagataggcaaacggatcatgcggtggatatcgtcaacgagatgttggaactagatgtgattccattttttccatatgtgaataggaccttgagtgctttagttcaaaggaattcgttaactgaagctaaggcactctacagtaggatggttgcattggtgttgatggtgataatggta

SEQ ID NO: 23578 - DNA, 6161 bp, Arabidopsis thaliana
tccaaggagtggataaccaaaaggacgatgacttagaagttgtggaagtgaattcgcaaccgaatcatggcggaaaaggggagactatctaagccttctcgaacatgtctcaaggctgggcacgagacacttcatgggcagtacggacccgattatggccgatgagtggaggagtagactcaaaaggaacttcaagtctactcgctgccctgaggattcaaaaggaacttcaagtctactcgctgccctgaggattaccaaagggacatttcggtccacttccttgaaggagacgctcataactggtggttaaccgtcaagaaacgcagaggggacgaggtccggtcctttgcggagttcgaagacgagtttaacaagaagtactttccaccggaggcttgggataggcttgaatgtgcgtacctcgacctagttcaagggaaccgaatggtgcgtgaatatgatgaggaatttaacggcctaaggcgttatgtgggacgtgaacttgaggaggaacaagctcaagtgcgccaatttatccgtggactaaagatagagatccgcaaccattgtttggtctggacattcaactcggtttctgaattggttgaaaggacagcaatgattgaggaagggatcgaggaggagaggtacttgaatcgagagaaagcaccgatccggaacaatcaatccaccaaacccgcggataagaaaaggaagtttgacaaggtggataacaccaagtccgatgctaagaccggggaatgcgtgacctgtggtaagaatcacagcggaacttgctggaaggccataggtgcatgtggccggtgtggaagcaaggaccatgcgatccaaagttgcccgaaaatggaaccaggacagtccaaggttctcggtgaagagacaaggacttgtttctattgcggaaagactggacatctaaagcgagagtgccctaagttgactgcggagaagcaggccggacaaagggacaatcgcgggggaaatggactgccgcctcccccaaagcggcaagccgtggcatcgcgagtttatgagttgtcggaggaagctaacgatgccggaaacttcagggcgatcactggtacgttctcacaactccctattcattatttcaataactgcatttgcattgcatcatgcatatgggaaaggggaggtactcagcattctaagggaatgtgtagggaccttgagagtaggtgacgtagtaacgcacactctatttgattctggggctacacattgttttgttagtccggaattggttgaaacaggtgggttcaggaaagaaccaaacaccgattatggaatggtacgagcggccggcggacaggcaatgtatccgaccggacttgttcggggcatctcggttgtagtgaacggtgtcaatatgcccgcggacctaatcattgttccactaaagaaacatgatgttatcttagggatggactggttggggaagtacaaggctcacatagattgtcaccgaggccggatacaattcgagagggacgagggtatgttaaaattccaaggaataagaacaacctcgagaagcttggtaatctcggcaatccaggctgaaaagatgctcgggaaaggttgtgaggcatatttagccacgatcacaaccaaggaagtgggggcgagtgcgtagttgaaagacattctgatcgtcaacgagttctcggacgtgtttgcggccgttagtggtgtagcaccggaccggttagacccgttcacgatagaactcgagcccgggacaacccccatatctaaagctccgtaccggatggcaccggcggaaatggcggagctaaagaaacagttggaggagttgttggataaaggattcatcaggccgagtagctcaccatggggtgcgccggttctatttgtgaaaaagaaagatggtagctttaggctatgcatcgactatcggggattgaataaagttacggtgaaaaacaaatatcctttaccccggatagatgagttgatggatcaacatggaggtgcacagtggttttcaaaaatcgacttggcctcaggatatcaccaaattcccatagagccaacggacgtgaggaaaacggctttccggacaaggtacggccactttgagtttgtggtcatgccattcggattgaccaatgcaccagcagccttcatgaaaatgatgaatggggtgttccgggatttcttagacgagtttgttatcatcttcattgacgatatacttgtttactcgaaatcttgggaagctcaccaagaacatctaagggcggtgctggaacggctaagggaacatgagctatttgcaaagttaagtaaatgctcattttggcaaaggagcgttggttttcttggtcatgttatctcggagcaaggagtatcggttgatccggagaaaatacggtcgataaaggagtggccacgaccaaggaatgccaccgagattaggagctttctcggactagcggggtattaccgaaggttcgtaatgagttttgcgagcatggctcaacccttgactcgactgaccggaaaagacaccgcattcaactggtcggatgagtgcgagaaaagcttcctggagttaaaggccatgttgactaatgcaccggtattggtcttaccggaggaaggtgagccctatacggtttatacggacgcatccatagtgggactaggatgcgttgtaactcccgcgatcctcaataggatcgttggctaggacttggtccgagagaggaaggtggagtctcggacaagtgagaaggagctggccataagctcggacaaaggggaaatcatgcaggctaagctaggattgtaaagaaatcacttgggtcagctcgcccaaagctcaagctcagctggaaggagtgacggttactcaggtcgagtgacagtccagctcgggcagctggacgagtgacggacgagctcgaggcagctggacgagtgacggttgaactcgaggtagctggacgagtgacggactagcttgaggtagctggacgagtgacggacgaagtgggcggttatgggcgaagagatacaactcttcggaaaggtgcaactcttcggaagggcgcaactcttcggaaaggtgcaactcttcggaaaggtgcaaggaacggatgtgttgattcgggaagcatccattcgccccctatataaggaagggcgccaggaccattccactcaccacaacacaccgaaaacacaagaaactcaccattaaaactctctccctcttgggagaataaatagtcttaggattcggtagccgggctgtggccggcaataaagaaggagggtcagatcgacctaacctcgagaaggaaggtaagggatcctagactttgagtctaagggttctaggatgtgagttagtagtcggatctttgaaaggatcgactagaaggctgggtagtatccgggtcatgtgcatcctacacaagactcggtccgggtaggggtcggctgaggcggggacgcggctcggcggaggaccggcgggtcttaactgacctgccgagaatcggccggactgatgcgcgatcttcccctctctgaattctctccactgatccgagtagtgtatggcatatagagcattgcatggacttgcatatgattaagtaaataagattacttatggctctatgactttcaggaacgaatggtgatcgtgggaaggacttggcttaggcgcgagagactcaaggccgggatgatgggtggtgatagttcggatagtctagggatcgattatatgacttgtaatagcttatatgcaaactcataggttgtatcgaatcctttgcttaattaataaagtatccgattgtttgtttactctattcgtctcatatattgaatctcggaatcatatgaaacggattagactaggaaagaacctcataaacggttagggccgagtcacttagtggcttgggtcgagagaactcgcccggactttaggcagtccggatcggggcctttcaagttggtatcagagcatgcttggttctaggactaggtgttgggttaaggggtatcaccactcgtcggcttgagaatctcgcggtagttgttctttactcctttgcgattttactaggagttatgtggattaactttagaggtttcgcagatgggtaagagcagcaaaacgggaaagagtaagaaggacaagggcattgtcgaggagactttggttgaggaggaaacgatgatcaacgagaaaaccagagtcgggacaatgttcgatgggacagactcggccggacctgaggccgggaagaagtccataaatgaggaagcaccggagagtagtggtgcaagggacagcacggataaccggaacaatactccaacggcccaagaacagtgggatttgatgaagggaatgatggcgcaactagccacattgaccaaggccgttgtagcagatccggtggtcctaaaaggggataaccaaaaggacgatgactcggaagttgtggaagtgaatccacaaccgaattatgggcggaaaaggggagactatctgagtcttctcgaacatgtctcaaggctgggcacgagacacttcatgggcagtacggacccgattgtggccgatgagtggaggagtagactcaagaggaacttcaagtctacccgctgccctgaggattaccaaagggacattgcggtccatttcgttgaaggagacgcccataattggtggttaaccgtcgagaaacgcagaggggacgaggtccggtcctttgcggatttcgaagacgagtttaacaagaagtactttccaccggaggcttgggataggcttgaatgtgcgtacctcgacctagttcaagggaaccgcacggtgcgtgaatatgatgaggaatttaaccgcctaaggcgttatgtgggacgtgaacttgaggaggaacaagctcaagtgcgccgatttatccgtggactaaggatagagatccgcaaccattgtttggtccggacattcaactcggtttccgaattggttgaaagggcagcaatgattgaggaagggatcgaggaggagaggtacttgaaccgggagaaagcaccgatccggaacaatcaatccaccaaacccgcaaataagaaaaggaaatttgacaaggtggataacaccaagtccgatgctaagaccggggaatgcgtgacctgtggtaagagccacagcggaacttgctgaaggccataggtgcatgtggccggtgtggaagcaaggaccatgcgatccaaagttgcccgagaatggaaccaggacagtccaaggttctcggtgaagagacaaggacttgtttctattgcggaaagactggacatctaaagcgagagtgccctaagttgactgcggagaagcaggccggacaaagggacaatcgcgggggaaatggactgccgcctccccaaaagcggcaagccgtggcaccgcgagtttatgagttgtcggaggaagctaacgatgccggaaacttcagggcgatcactggtacgttctcacaactccctattcattatttcaataactgcatttgcattgcatcatgcatatgggaaatgggaggtactcagcattctaagggaatgtgtagggaccttgagagtaggtgacgtagtaacgcacactctatttgattctggggctacacattgttttgttagtccggaattggttgaaacaggtgggttcaggaaagaaccaaacactgattatggaatggtacgagcggccggcggacaggcaatgtatccgaccggacttgttcggggcatctcgattgtagtgaacggtgtcaatatgcccgcggacctaatcattgttccactaaagaaacatgatgttatcttagggatggactggttggggaagtacaaggctcacgtagattgtcaccggggacggatacaattcgagagggacgagggtatgttaaaattccaaagaataagaacaacctcgggaagcttggtaatctcggcaatccacgctgaaaggatgctcgggaaaggatgtgagggaaaggatgtgaggcatatttagccacgatcacaaccaaggaagtgggggcgagtgcggagttgaaaga

SEQ ID NO: 23579 - DNA, 5047 bp, Arabidopsis thaliana
tggatcattgagatgagaccactcttgatctcaaagttgttgttctgaactggtggaggcactatcccttgtctttggtgatgattccttggggcatcaccagcaccaatgtttcttggttgatcaacattaggtgggtcttgaacatcaactggtctgttatgttgatcaatagcaggtggtctgttctgatcacaagctgcctttgctttggtttcttgtaactcacgagctattttgtcaattctgtctctgaatggtagtaggtgtgcagaacctttggatcgagtttgcatgcacaaagattagtacctataccacaaaaacaagcagacgaaaatatgagttcgtaacttgataaatgtaaaagaacttgatcttaaaagtttctgatatcttgaatgtaacaatgcaactatgaattggcaacggcgccaaattgataaacaggtttttcaggcctgcttatgttgaatgtgtgattcagttcaatcccctacaacacaaacatgtcgatgcagctatagggggtgtcaatccagtccactgtattgctagcaatcaagatgtgtacagaaactactaagtcaagccagattataatgatggtgggtttctagtaacaatcctaggtcaggattcaaacaagtaaaaatgagaacctaatagccctactcgatcattgggtcgagtagaaccaacatgtgacaaaattaagaactaaaatgcaatcaataggggatgcaaatagaggatacaaataaccggtagataaaagtgcaatcaacaggggatacaaataaatctaatagaagttataaggatggattcattgataagggcagctctagggttcatcagatggctaataggcgaaaggtagatacccatgacgatagattcaaaaaccgggtcaatccactctcgtgatagagaccccataactctaccacttcctaatctcaactctcgttgatgtaacatagcagagcagggtttaagaaacaatctaccaaagccaataggcagacaagccaatcccttggtcgagtctacaaatctctggaattcgtaggtcagacatccatttgaacgtcttttggacgctgaacgtctatgctcgaatctccacattagccagcaaaaaccgcataggggccaagcgaatccagaaggttataaacctaaacactaaccacctaactaacctagagattaccctaatctaatccatcctcaagaaccctaatcactactcatgcaacattctcaagaacacaaacccagaaattactaaaatcataccaaaatgtagatctaaacaagctaaacaactttacttaaacaatcaaatgcaaaaacaaaatagattaagagtaattaaggtttcaagattcataaacacaaagaaaaactgaaagataaagcatagatcctttggacaaatcccaaagtgatctatttatactaaaatgttggaacccctagattcactagaagacaagagacttgaggcggtttgggcgaatactcgatcttggggatcgagtaaagagggtgctgcaaagtctgcgcctttgtgtctatgctccgagtgatctgtaacgcccgcgggctgagtagtatccgggtcatgtgcatcctacacaagactcggaccgggtagggatcggctgaggcggggacgcggctcggcggaggaccggcgggtcttaactgacctgccgagaatcggccggactgatgcgcgatcttcccctctctgaattctctccacggatccgagtagtgtatggcatatagagcattgcatggacttgcatatgattaagtaaataagattacttatggctctatgactttcaggaacgaatggtgatcgtgggaaggacttggcttaggcgcgagagactcaaggccgggatgatgggtggtgatagttcggatagtctagggatcgattatatgacttgtaatagcttatatgcaaactcataggttgtatcgaatcctttgcttaattaataaagtatccgattgtttgtttactctattcgtctcatatattgaatctcggaatcatatgaaacggattagactaggaaagaacctcataaacggttagggccgagtcacttagtggcttgggtcgagagaactcgcccggactttaggcagtccggatcggggcctttcatgatctattggtcgagtagatgcttcatcctctcctatccgtatgctcagatgtctggttgagtggggaatgaggaggatccgaagacgctttgatagctcaacaagtcttgtagagttggtcacccttggtcgagtaaatggatcgagtagtggatcgagtaggaggggcgagtagatcaatctgctgcttcatctaaggctgccttgatcgagtaagaaggttgagtaaactgcagcctcctttgtagcatcctggatcgagtaaagaggtcgagtagaatgatacctctgctgtagctgcctggatcgagtgaatggatcgagtagagtcctttttagctccttctgcacctgaaaacacaccaaaacatgcaatgcgaatgcaagacgatcctagatgcctaagtatgcaaaataagctaaaatgacatgatataatgagcaaatgcaaagctaaatgatgatatacatatacctaaaatgagtaaaatacagtgtaatcagctgcgttccgtctacaacaacgactttcctcatatatttccaaccttttatagatgtcgagagagaaacgaatacatatttgaagcgctggcgaccattagattcaggagtggagtggagatgacagattgtaccgggatttgctaattgtagaagatacagatatgtaggtaaaaacctgtaactggccatatcatcaacccttatagagtttactgcaacctctctagctctccatgctgtagaatatgagatccaaaattaagatcatttaagaccaattgaggtaaatctacagctctcggacccccttgcgtagaactatatctattcttcataacctcgcctaaaagcttgtaagtagcatgtttacgataatcatgcacaaagattagtacctataccacaaaaacaagcaaacgaaaatatgagttagtaacttgataaatgtaaaagaacttgatcttaaaagtttcggatatcttgaatgtaacaatgcaataatgaatcggcaacggcgtcaaattgataagaaggtttttcaggcctacttatgttgaatgtgtgtgagattcattcaattcccctaaaacacaaacatgtcgatgtagctatagggggtgtcaatccagtgcactgtattgctagcaatcaagatgtgtacagaaactactaagtcaagccagattataatgatggtgggtttctagtaacaatcctaggtcaggattcaaacaagtaaaaatgagaacctaatagccctactcgatcattgggtcgagtagaaccaacatgtgacaaaattaagaactaaaatgcaataaaaaacggatgcaaataaatctaatagaagttctaagaatggattcattgataagggcaactctagggttcatcaaatggctaataggcgaaaggtagatacccatgatgatagattttaaaaccgggtcaatccactctcgtgacagagacccccataactctaccacttcctaatctcaactctcgttgatgaaacatagcagagcagggtttaagaaacaatctaccaaagccaataggcagacaagccaattccttggtcgagtctacaaatctctggaattcgtaggtcagacatccatttgaacgtcttttggacgctggacgtctatgatcgaatctccacattagcccgcgaaaacttcataaggccaacgaatccagaaggatctaacctaatcttaaccacctgactaacctagagattaccctaatctaatctatcctcaagaaccctaatcactactcaagcaacataactatgaacacaaacccagaaattactgaaatcataccaaaatgtaaatctaaacaaactaaacaactttactcaaagaactaaatgcaaaaagaaatagattaagagtaattaagttttgaagattcaagaacacaaagaaaaagtaaaggataaaagcaagatcctttggacaaatcccaaagtgatctattatagtaaaatgttgaaaaccctagattactagaagacaagagacttgaggcggtttgggcgagtgctcgatcttgggaatcgagtaaagagggtgctgcaaagtctgcgcctttgtgtctatcctccgagtgatcaattggtcgagacgatgcttgttcctctcctatttgtttcctgagatgtctggttgagtggggaatgaggaggattcgaagacgctttaaacgatcaacaagtcttgtagagtaggttgcccttgatcgagtaactggtcgagtagaggattaagtagggggtcgagtagagtatgctgcctcctttgtagctgcctgaatcgagtaaactggtcgagtagattgccctgttgcttcccttctggtttgatagagtagagggtcgagtagattccttgtaagctccttctccacctgaaaacagaccaaaacatgcaatatgtatgcaagttgattctaaatgcctaagtgtgcaaaaaagctaaatgtgatgcaacattatatgaaacaatgagtgattactaagctaaatgatgataaatacctgcctaaaatgagtaaaatacagtgtttataaagtttttaagtgaggttaagagagagaagcggaggaagttcttgaggagaagttggagaagccaagatcgccggtgaagcccatctgaaaccccaacctctcaatccatagtttgtttgggagttcgtgtgactactttgcttgttgcattctcattctaggatcatcatattagaatttggttgcttgcatgatagtttgtttgtgggttcatgtaactactttgcttgttgcgttctcattctaggatcatca

SEQ ID NO: 23580 - DNA, 601 bp, Arabidopsis thaliana
taacggccgccagtgtgctctaaagttgtgctcgatgacgaggactgtattgccatcgtctacaaagcgagctaaaaccttgagcaggcgagcaatgtcctctgtatgaagccctgtcgtcggctcatccagaatgtagaaagattttcctgtcgagcgtttgtggagttcgctagctaacttcatacgttgggcttctcccccagaaagggtggtagctggctgtcccaaggtcacatagcctagccctacatccttgatggtctggagtttgcgttgaattttcggaatgtgttggaaaaattctaccgcatcgttgaccgtcatatccaagacctgcgaaatattcttttccttgtagtgaacttctagggtttcactgttatagcgggttccgtggcaaacttcacaagccacataaacatctggcaagaagtgcatctcaatcttgataatcccgtcacctgagcaagcttcacagcgacctcccttgacgttgaaactgaagcgccccttcttgtagcctcgaatcttggcttcatttgtctgagcaaaaaggtcacgtatatcgtcaaaaactcctgtataggtagctgggtta

SEQ ID NO: 23581 - DNA, 416 bp, Arabidopsis thaliana columbia
ttggacttaacatctctatgcaagatcaatggtgaacaatcatggtgaagataacacaagccctttgcagcttccacggctactctatgtctcgtctcccattgaagatgaccacctttagatccatgcaaaagctctccaaggcttccattaggcatgtactcataaagaaggagattcgtatccttgttcgctacgtaaccaagaagtctcactatgtgacggtggcggattctccccaaagtttgaatctacgccgtgaatccatgatcgctcctcgcggtcccacgggcaacgagtcgtataatcgcgacgtctacgatgtttggcaatgattcacggtagacaaatccagctccgcgctttacgattatggtctcttcttcaagacactcgagaacgtcttcagatgtgaa

SEQ ID NO: 23582 - DNA, 538 bp, Arabidopsis thaliana
gggtacgagctcgctcggtgtcgacgacaccaactaggtgtcgatcgcacttcaggagcagaatgcagacgtgatcggtgtagatcgacacaacagagcggtcgatcaacaccaaccacagatttctgcagctattcctccagctgtggaaccacgtcgtattcttgggggtttcaacaggcctcacctgttatatgctaatcgatcagtgatcgtatccccacccttcgagaggaacaattacgagctgaagcctggctactttactttagtaagccagcatcctttccatggcttgtctcatgagcagccaatggaccatatcgagcattttgaagactttgttctgagcatcaaagttaatggagtctcagaggactacctactgtgcaagctcttcccttattcacttgctggagattctgcttcgtggctgaaacaactcaaaataggtccctcaagagtttgagaagcatcaagatagcctttttgaacaatttctatgatgatgctaagtctgagaagctgagaaacaagt

SEQ ID NO: 23583 - DNA, 667 bp, Arabidopsis thaliana columbia
taatgttagcgctaggaatatgtggtactgtagctccagctcatgttaggttcttaccctgtgcacatattgagtttggaattaggtagtggcctgaacgaagagatgtgctgctattgattttagcggttgattaaaaataattggatgttttcattatggtgacagaggtaatccaggagatgtgcacactgatagaagtggacagaaggaggaatatgccacctccacctccacctccaagaagagagttaagttgggcaatacctgcagccgtaaagccggtccatatggctagagcttatccgtttcacagctaccctttgcagtcctatagacaggctggcatctggtgagccattgttgagcagcatgaagatgtaatctctcttagagtcttgagttggtttagcaataaaagatttccgtagagactcatgagagaggcagtgtagcattatatagagatccgagtgaggtgcttctgtctaagttaagcgtctcatgtatgaccaaagtggattctctcgagattcttggtctctgttctcgatagagagagattatgtatagaagtgtccattcacatgttataatactagctgactttatatcgtttgtatatctggaatctatgtttttggttcctttaaaagtgtaaagtgtt

SEQ ID NO: 23584 - DNA, 603 bp, Arabidopsis thaliana columbia
tggatttttagaggttctggaaccggtggagctaagaagtagctgattagtgagggttgcacacgacacggttacatgagaatcaatccactccatacctaccaaccgtaattcctcaatcacagggaaacaaggaagaagcttctgaagcttatcatcacaaaaaaccatcgcagagcttatatcaagactttgaagccttggtaagaaagtgccttcagctccaggccaccaatgaatacaaccaaattcagattttaacctgagattgacgagtgtctcactgacgaacaactctcgaggcagaagataaccatcttcgaagtcgatgataagttcaaggtccgcaacaccacgctgcagcactttacataaccaacgattcagacgagctggaggaacaccgctttcacacctgagggagaacctacgaatgggaccatttccctgcaaagacaatactctttccacaaaatccaagaagctatccagaatttcttctctttcccacttagtctcttccggatgaagatactcagagtcatccaagtcgagattagggacaagcgtgaacagattccgcacttcttagacagaacagat

SEQ ID NO: 23585 - DNA, 539 bp, Arabidopsis thaliana
catccacgaattactcattcttacatctttgattagtataagccctgagtaattatacctgaagaaaccttgaaacaccagctaaagtcccgcctgtacccgcagcagcaacaaaggcgtcaatattaccctgagtctggtgccagatttcagggccagtaccttcataatgagccctataatttgccaagttttcaaattgatctgcaaagaagccaccggtaactgaatctgagaataaggaaggctctttcacttcctcaaccgtgcaaccattagttttctcctggtgtatgccatttgtttcgctccctagtcttctctttgatgctaactcgtttgcttcgtcagcccgtcgcctcgcaatgttgacatagtgatccttgtgagttattgacactggcctcactctctcaacagaagctccaagggcttcaattatttgagactaaaataagtccaacacgatacaaatttgagtgtatgacaataatgcatacaagggaatttgaatcatcatcaaggtatttaaaagatat

SEQ ID NO: 23586 - DNA, 574 bp, Arabidopsis thaliana columbia
gctaagctaaagaacaaggaacaaaaccaaattatgtgtttgcgagatctgtctcatagtttatggagttggagaggtgtttaagcttggtattgagaagctatactgttgtcagcttgaggtgtttttagcgaaagggtctatcgagtgaatagaagttaaagtatgggttcgctctgttgtgtagctgcgaagtcagatagatcaaattctacaagtggggacttttcatttggcctgcatgagccttattggaggactaatacaagtttctctcctccttcatcgagatgggacgtccatggattaatggatggtattagctgttatggatcttccacatcatcaaatgctaatgttcttcgtagtcccgacctttctcaagctcttcattggacacctaacgattttgaatctgctacaagaagaggtttgttgcctcaaattcacattctcctctttatgatatttacatctacggaacttgaacagtgtatctttttgtttttcatttctctatgcagatcagattgttaagcaactaccaggtacatcaagaaatgtcggtattggt

SEQ ID NO: 23587 - DNA, 610 bp, Arabidopsis thaliana
gagagatttgccggcatgcagattcatgctcagtttaatctttcttaatcatctgtcgcttataggcttgtatagtcgtggatgttcagcatccacagattaatctggagctttaagatctctatccactggtcctaataggaatgagaagattgaaattctcacttttgcgtctatgcatttatttcactctatacgcttcacattgcacaattcccgttgctccatatctattttaacctttgtccaatgttataaagaatagcctcctccgagagaatggcgtaacaaatgacgtaaaccaaagacattctctctctcatcattgatcaaattaattaagtagttaattcgacaaagacgtttcaacaagcaggaaaaaacaaatagtatgtgaaaacttaaagggtgaatcacgtgggattacgagagaaagagtcacgtttatatcgagacagctaaaacacccaacacctacgaaagacttttttgcatggttggttcaatcttctttcttgctagatacgagagtatttaatatcaattaataacatattatttaacatgctaaaattgataaacgctcgtctggttggtgagatattggatg

SEQ ID NO: 23588 - DNA, 381 bp, Arabidopsis thaliana columbia
tccaagatgattgattcacagaaaagaccatcaagtagcaatagatagggaagtctcacctggcctctgcgaacgatctcagccttcttgagctttttcattgcataaacttgacctgtcgtcttttctctacaaactctaacctagagaaacaataacaacaagaacatatccttttaacaactgaaagatttgtaatccttctaacacagatgaactcaggaaatcatacctccccaaatgcacctatcccaatcattgtaagcaaatcaaaatcagcagcacctaacttatggcgttgaatgcgcatgtactctgtctccttcttctctaaaaactatgagaagattattttgatcttcttcagacacgtcagcatct

SEQ ID NO: 23589 - DNA, 359 bp, Arabidopsis thaliana columbia
  unsure (1)..(359): unsure at all n locations
nnnnnnnnnnnnnnnnnnnnnnnctaaagcaacgttcggtctggtgctgggcggcttgattggcggtccggtggcgcgctatctaggtgaaacactccaccacgccgaacggtattccggatgaccaggaagtcccgacggcgtttgaaaagccggatgtgggacgcatgatcacctcgttggtgctgattgaaactatcgcgctgattgctatctgcctgacggtggggaaaattgttgcgcaacttttggctggcactgcttttgaactgccgaccttcgtctgtgtactgtttgttggcgtgattctgagcaacggtctgtcaataatgggcttttaccgcgtctttgagcgtgcg

SEQ ID NO: 23590 - DNA, 529 bp, Arabidopsis thaliana columbia
  unsure (1)..(529): unsure at all n locations
gtcgactcttccccaagtttcattagattgacgagatcatgatcgttgggatgcttctaactccgtactggccgtgagtttttttagattcatcagtgtttaatttgtagaacttgatcttcccagtgtaatgctgtgctagatcgtttacaagcggatcaatcatcttgcaaggtccacaccatggtgcccaaaagtcgacaactacaggcccagttgctttaagaactagagagtcccatgtcgagtcattgaccacttgaactgcaggatcaataacacaaatcaacaccttattgccaaagcttttagaatcatgaatgaaaacaaaatatatcagccaaggtggacgaataaaacaaagagacagctgacccgtttatccatcttcagctagatcagtatgttgtagcaagtctatatgatatttcctaaaaatgatctagaagtgaaagtttttcaaaataganatttgatagatccagtgaaggataaagctttatggtttcaccagagaggagagaccaat

SEQ ID NO: 23591 - DNA, 1148 bp, Arabidopsis thaliana
tgtaacaacatgatgaaatttatttacgctttcgctgtaactaatgctattgctactcttctgcagataacttacagcgtcccatatgcgttgatttccatacgtattgaatccctgggcttaggtcaaggtgtgcaggcttatctttgggtgttgtttcttataaaagttctgttgtgttgtttcttagaaaagttctgctcaatgattttactctacatatgagtgttgtttcttataaaagttctgttgtggcaggcttatctttgggtgtgctaaatttggcgatagtcatcccacaggtacacttctttcaaccatccttttagcattatatttgccgcaactcaaaatcatattcttctttgaatgtttctgcctgtaaaaggaagtctataagcataacatgcagcagagttactgcattatttgtcaattgtcattaataaacgattcgtttttttagttatggtcattggccagtgatgaaagtacactttttatttctctatattagttgattgatgaatttcttccctatgttggttatggtttttggcatcaaactcaaattctgttgttcaatcatttatgtgtttgcaggtaattgtgtctgttggcagtggcccatgggatcaactgtttggaggtgggaattcaccggcacttgcagtaggagcagctacaggcttcattggcggaattgtagctatcttggctcttccacggacaaggattcagaagcccatccctctcccatgagattctctcttttgttatataaggtaataatgtcacaattctttcacaaaaagtacatagtaagcacttaagttgtcactgattattaaaagcggctaatgcgaaatagatgagtgtcaagcgaggaacgcataaggggagtgcttggaaatggcaaggagatggaacacttaatgtgatccttgtcgaaaattcgtgcaatggcttctcgtgtgactaacttatttgcagctactaggacttaatcccctctactttggggactatgatccttgtatacacgaggcaccatagaaccaatgaaaataatacatcattcagtttgtgaggtatatgcatctctcctttattggaagttccagttcgggatcttctctgtttttttt

SEQ ID NO: 23592 - DNA, 534 bp, Arabidopsis thaliana columbia
cctattcagtaacgttggcaaaattaaaggttagacagtgtccaaaacccgaaaatctggtctaaaagagcattacagctatgcttatttcttaattcactggctaacaagatggaaactctaacacatttaacatttctctggcatttctataaaataacataccgtaaatgaatagacaaaatataaggctgcaaccatactttaatatcagaacgctattcacttatgagttacctggaacggaagaattttctttttctccctgtcgaaagcaacaacttcacaatccagaataaaagatttcacagaaggcttctttaatctgcattgagatgtttcactaacttcagtagaaagattgaatctctaatgttttcaaccagttacaccagatgtttaccttgataacgcaagagcaacatccgggtacttcccagtgtttctttcagcatttcgactgtatatctcaaatgtaccatcctccataaaatgtatctgcagaaattgattgatgataagccataccatatt

SEQ ID NO: 23593 - DNA, 852 bp, Arabidopsis thaliana
tttgtggataccaattgtgaagtttgaactcggaaatggtgtgggattgattgtataggtcggagaagacaaaggtcggagccgctatgagtggtgcgttagtcagcactctagttggtcttgcagctagtaatctagggatcatttcttctcaagctcctgcttttgctgttgtgttgaattttctgcttccattagctgttcctctgttgttgtttagagctgatttgcgtcgtgtggttcagtccactggaaagcttctcttggcctttttgattggatcaggtataaggatcataacattcacactattcctatggttatgctcttgatatttctgactttgaattatcagaaaaacctgagcctttgctatttcataacagttgccacaacggtgggtacagctctggcatactatttagtgccaatgaagtcacttggccctgatagttggaagattgcagctgctctcatgggaagacatatcggtggaggtaacaaaaaattcatgtctttgaacatctgcatctgtatcttccattttcttgacgcgccaatattgttcacttatttctatagtggtgtataagttgcatgtgattattttttttccagccgtcaactacgtagctatatcaaatgctcttggagttacaccatcggttttagctgctggactggctgctgataatgttatatgcgctgtatatttcacgacattgtttgctttgggctccaaaatacctgcagaagctgtaccgccaccgactactagtaagtctgaatgttgctgtgatgtctggttccgtttgatttggcttcctttggaattgatcattgaaggttgtg

SEQ ID NO: 23594 - DNA, 875 bp, Arabidopsis thaliana
gaatattcaaatcttaaagttgtgcctcccacgtaaaagcatcacattacgtttccaaacccaattgtatatataaattactacacaacacacctctcatcaaacaaattcatcaaagccaatcaaattgagagagatatcaagaaagcaaaataatgaagttggccgtggtctcagtcgttgtcatactcggagttctcgtggcttggccggtatcggctggccgaaaagacttacctggagcgggaggatacggaggcgatgacgatgatgatacaaagtcattgttccctttggacaacctattatcgttgaattattatgataggatttgtccagattttgagaaaatcgttgttacgaaagtgagggaatggactaagagtgactcttcccttggtcccgccctcctccgccttatcttccacgattgtggcgtcacggtattgcaattaatcgttcaattatatatagccaatgttttgattcatatatgatttacattgttctaaaaatgggtttcactattactctattagagattagaattgttcttccgtctatctagaccatacttggaacattgatagtatatagatataagtttcttaatattgaagacggacttgcgcactttattctgtgtataaacgcatctgagtgttttgcgcatatctaatatagttatgcattttaaaagataacaacttgacatttttgtacatgaattaacacaactttcagggatgtgatgcgtctgttcttctagactacgaagggacagagagaagatctccggctagcaaaacactaagaggcttcgagctaattgacgatatcaagtccgagatggagaaatcatgccccggcaaagt

SEQ ID NO: 23595 - DNA, 441 bp, Arabidopsis thaliana columbia
ccgagagttaaacctctcgtgtcacaatttactgcttcatatggcatggtactgaatctggtagctggttcaaaagttactcgtaaatcaagtggaactgaggccgggaaagtcttacaagcagggagaagtctggaagaagccaagaaattagttgagaagagttttggaaactatgtgagcagcaatgtgacggttgctgcgaacaggaacttgctgaaatcgacaataagatcgagattctgtcatctgaaataagtgatgaagcaatagataagaagagtaggaaacttctttcagcgagggattacaaggagatcactgtacttaaagaagagctacgggaagagaaacgcaagcgtgctgaacaacgaagaagaatggaactcgaaaggttcttagctctagaaccgctcttaaaagggatggaagagggggact

SEQ ID NO: 23596 - DNA, 491 bp, Arabidopsis thaliana columbia
atgaaatttcaaagattaccaatcttgaaacactttatctcaacgattgctcgagtttagtggagcttccttcctctatcaagaatctgaataaactgtgggacttgggtatgaaaggatgtgaaaagctggagcttcttccaaccgacatcaacctcaaatctctctatcgccttgatcttggtagatgctcacggttgaagagttttcctgatatctcaagtaacatttcagagctctatctgaatcgaacagcgattgaagaagttccttggtggatccagaaattctccaggcttaaacgtttacgtatgagggaatgcaaaaagctcaaatgtatatctccaaacatctccaaactgaaacatcttgagatgctcgacttttcaaactgcatagcaactacagaagaagaagctcttgttcaacaacaatcagttttgaagtatctcatatttccaggaggacaagtgcctttgtatttcacttcc

SEQ ID NO: 23597 - DNA, 461 bp, Arabidopsis thaliana columbia
  unsure (1)..(461): unsure at all n locations
ggtggagtactcacgtcggctattccataatcccaatcgataccagcttttgctagagttaaggattgcgtatctctctctcacgcagatagatatagttcactatcagacagacacaaattgcatatatgcaaagcatacagtcagtcttccaaatatccgtcatgctaatctcagcatttgagagaagccagtagcctgactcatcattctgcaaaatacaagacgaatatcaaacaacaattatgagggtagattttgagtcaggttaattagtttctctgnanaactatctatataaatgttcattataaaaataagcaggaagatggcttaccttaacatcagagggagtaatgttaagnattcgtcntacttgctcttggaaataattaagattagaggtatcgcngggttgaggatgaggatgattatgagacacaataggagttgttgggttg

SEQ ID NO: 23598 - DNA, 601 bp, Arabidopsis thaliana columbia
  unsure (1)..(601): unsure at all n locations
nnnnnnnnnnnnnnnnnnnnnnctaaagagccctggagccctagcgtgtgctgggccccaggcatggtctgggttcggtgtggattgctggccgctggcataccttctctcccgtcccaatccatggggagcgccgcccttgagtagccgccgttcgccggcgtgactcttgggtccggtcatcccgaacgaggcccgtatgccgcagcccgttgcctccctcagggagcgcatcggatcctgcgtgcggaccggtgcctggtgggcttacagtgggggcaattggatggttgctagtgacctcccggtacgccgggggcgccgctgcagccgggcgagctcgtctcgcgccttccagagtgaatacctacgtgctttctgcccctccgggggctttcgggcgccgggggtgccgggtaaaaccgcgcctccgggttacgtccgggaggaacaaggtatctggttgattctgccagtagtcatatgcttgtctcaaagattaagccatgcatgtctaagtataagcaatctatactgtgaaactgcgaatggctcattaaatcagttatcgtttatttgatagtacattactacatggata

SEQ ID NO: 23599 - DNA, 555 bp, Arabidopsis thaliana columbia
  unsure (1)..(555): unsure at all n locations
nnnnnnnnnnnnctaaagttacatgaccagccctgcgaacctgttccacttgctgcgtcgccagatccaccgtcaattccgcaagcgtatgttgttccctcccttacaatatggacctaagctaatcaaatctagcccttgtgatcttcttctctaagtctctccttcgtcacccactagctcgctcctctattgaggagttcactggcgactctcacttccaatggatcattcccgaccctgctcatggaaccgccatcgatgagcctgagaagattgagcgtgtcattctctgctctggccaggtgtacgctgccctcaccaagcaccgcgaacgcaacaacatccgcaacactgccatcacccgatgttgagcagctgcatcccttcccttgggctcagttgaaggagaaccttgacagctaccccaacgctcgcaacattgtgtgggctcaggaagagccctgaatgccggttcatggagctacgtccagcctcgcattgagactctgcttaacgagaccgagcatcacaaccgccagcacgtcatgtatg

SEQ ID NO: 23600 - DNA, 482 bp, Arabidopsis thaliana columbia
tcatttaatcgccattccttttttgcatttctcgactctttaagtgcgtttgttcattgataattataagctttctagccttgagccatgcataaagaattttttagaaacgcaatggatcccaaatacttatcttgacccatatgctctatgaaattgttatgatcttattgtttggatttggaaacatcaacttcacagaaatcatcagagttttggtacttatattcttccttctcactcagatggctgatgtatggtcttgtggtgtgactctttatgtcatgctggtgggagcatacccatttgaagaccaagaggatcccaaaaacttcaaaaaaacaatacaagtaggtttctttgtttttgcattctttgcttaagagttgacacgacaccaccactgatcgttgtgccacattgttacagagaataatggctgtcaagtacaagatcccggactatgtccatatctcacaaga

SEQ ID NO: 23601 - DNA, 953 bp, Arabidopsis thaliana
caagccaatcatttaaccatttagaagttaaattaaatggagtaaaataatcaaataatcatcttgagaaataattttttcaaaaacaaaattccaaattgcgtaaagctcttctctatataaaccctttcccctcaatccatctatcatcattacatcttttcttgcccttaaaggtcagtataaatacactaaaaagctcccaataagatgtgtaataacaataacacaagttgtgtcaacatctcaagtatgcttcagcttgaggacattttctcccgtcgttgcatctgggtgaatgggcctgtcatcgtcggtgctggcccatcaggcctagctgtcgccgccgacctgaaacgccaagaagttccgtttgtaatcctcgagcgagctaactgcatagcttctctgtggcaaaacagaacctatgatcgtctcaagcttcatctcccaaagcaattctgtcaattacccaatttacccttccccgaggatatcccggagtatccaacgaagtaccagtttattgagtaccttgagtcctacgctacccactttgatctccgccccaagttcaatgagacggtccaatcagctaaatatgacaagaggtttgggctgtggcgggtccagactgttttgagaagcgagctgctcggttattgtgagttcgagtatatatgcaggtggctcgtggtggcgacgggagagaatgctgagaaagtggtgccggagtttgagggtttagaagattttggtggtgatgttcttcacgctggagattataaatccggcgagaggtaccgcggaaaacgagttctcgtagttggatgtggaaactcaggcatggaagtctctcttgatctatgcaatcatgatgcgagcccatcaatggtcgttcgaagctccgtaagtaaaattcagtaaattatacccaccaagttacgaaaaac

SEQ ID NO: 23602 - DNA, 544 bp, Arabidopsis thaliana
tcgtcttggtaccacagtaattttttcagataacacaacaatggccttgctttgcaccttcacactaaaatttgctttgatgcctctctgcagtggtactttaagttacctcttcaacaactttgtcggcaccagaagcttcagtgaagttgtagcagaagcaaagcaagcaggtttcacagaaccagatccacgagatgatctatctggaacagatgttgccagaaaagtaaggtttttttcctgtcaacaaatcgagccaatgcaccttgtaaaaaaatattgaaccttctcgtatctgctacttctgcaggtaacaatccttgccagagaatcaggcttaaaattggatcttgagggccttccagtccagaatcttgtgccaaagccgttacaagtaagactctgtataatcacacaattaaattcatcaacaataaggttaatccttttgacatttcttattcacaggcttgtgcatcagcagaagagttcatggagaagcttcctcagtttgatgaagaattaccaaacaaagagaaga

SEQ ID NO: 23603 - DNA, 815 bp, Arabidopsis thaliana
ttcttctgttttctcctcacaaccagacaagcaaactctaaactctgtggaagatgtatggaaataataacaagaagtctatcaacatcacgagtatgtttcaaaacctcatccccgaaggcagcgacattttctcccggcgttgcatctgggtcaatggatccgtcatcgtcggagctggcccatcaggtctagccgttgctgcgggcttgaaacgtgaaggggtaccattcataatcctcgagcgagctaactgcattgcttcattatggcaaaacagaacctacgatcgtctcaaactccatctacctaaacagttttgccaattacccaattatcctttcccggacgagttccctgagtaccctaccaagtttcagtttattcagtaccttgagtcctacgcagccaactttgacatcaaccctaagttcaacgagacagtccagtccgctaaatatgatgagacgttcgggctgtggcgggttaagaccatttcaaacatgggtcagctcggttcttgcgagtttgagtatatatgcagatggattgtggtggcaacgggagagaacgctgagaaagttgtgccggattttgaaggtctagaggattttggcggcgatgttctccatgctggtgactataaatccggtggaaggtaccaagggaaaaaggttttggtggtgggatgtggaaactccggtatggaagtctctctcgatctctacaatcacggagcaaacccatcgatggtcgttcgtagcgctgtaagtaccaaaagtcttaaaccaaaaaaaaaaaaaaagtaccaaaag

SEQ ID NO: 23604 - DNA, 571 bp, Arabidopsis thaliana
ccctaattttcacctgcgatagttccaagcatgaaaatttctaggaatccagcttctggaatttttccaaaagtctcaattcattcccgacggatgaatgccctttactcaaaacccaatttcgatgatgccaagcaccataggacttgacattctgtctgaaaaatgtcaccagctgacagtcgatcaattctcaagatcgtggcacgcgatcggagctgcagcagccggtttagtagcagccagagagcttcgtcgtgaaggtcacaccgtcgttgtccttgaccgagagaaacaagtaggtggtctttgggtttacacacctgaaaccgagtccgacgagcttggtcttgacccgacccgacccatagtccactcgagcgtctacaagtctctccgaaccaatctccctagagaatgtatgggttacaaggatttccctttcgtgccacgtggcgatgatccgtcaagagactctagaaggtatccgagtcacagggaagttcttgcgtaccttcaagactttgctacagaggtttacatagaggagatgatcaggttcgagactgag

SEQ ID NO: 23605 - DNA, 543 bp, Arabidopsis thaliana
aacaaaatttaacaattaggagagaaaaatagttagcaagaaatttattgatttgcttagaagttctagtcaatagcaattatactttatgtcctacttataatgcagtttcttaatcttataattatgatttttgtagacaagaaacgtatgtccaatgctcaataaacatatactgaaagttctgaaattggtttagtttattttgattatttataaaagcataagtagtgctaagatatggttaaaatttgtaaaattttctcatattagcctaatctataacttaagatattgtaactctccagttcatagattattgccttagcatcctccaggacctccaaagtaaacagctcttatccaaggttcatcttcatcatgaacaaacttggctttataacaatttggactgctctcatgtgtctctatagtgtagatttgtggaatcaaagcttctcccttaccattcatgatatgtatattgttacaaaggctgctttccgaaacatccttaggaaaatgccactgcccatgattgga

SEQ ID NO: 23606 - DNA, 495 bp, Arabidopsis thaliana
cagatgaatgcaatcctaccgaagcctctcttaaatttactgtgacaggaggtacaagtgagaatggaaaatacaaggtgttgaagtgtggtttaagtttggtgtatgctaaggataaagacaaaaatagtgctcttgaaacaaagtacgatatgcttattggaaagagctttcaagaaacttcagaaggggttgatggaagggtaaagaaaacgaaaggaaagtacgttatgcctgttgaagagaactttcaagaaactacagaaggggttgatggaagagtaaataccaagacaaaaacaagaatggataatggacggccaaagaagaagcagagatcaggaagagatgataatcagactaggatgcaagtggaactccaagaaggaaatatgaattcagtgatcatgcacacggttaagaatttctgagtgggagccctgacaagtttaatagcagaaagttaatcttttggtttagaccttacttggctgt

SEQ ID NO: 23607 - DNA, 482 bp, Arabidopsis thaliana
tcaacctcaccaaagtcatatcctattgcatcactctcctttaaacacagtcagagaaaacagcaactcttgtctgaaaaactagagagagaaaatggatcatggtaggttaatggatgatcaaatgatgctaggctctcaagtgtacccctacacgacccaaccccaaaattcacactgcatcatcgttaaccagatcgatggaggcgaagaatcaaaaccggtgaagcggaggaggaagaggaggagtaaaggttcatcagccaccaacgaagaagacgtggcggagatcggagggatgttgaggaagaggaagttgaccgatgaacaagtgaacatgctcgaatatagcttcgggaacgagcataagctggagtcagggaggaaggagaagatcgccggagagttaggtcttgaccgagacaggtggctgtttggtccagaaccgccgtgcacgttggaagacaagaactagaggaaga

SEQ ID NO: 23608 - DNA, 634 bp, Arabidopsis thaliana
tagtaacgtccgccagtgtgctctaaagtcgtgcccatcagtaggaggaagcttaccccagattcgcttcggaattggctggatgtcgagttcctgggccagcttgcagaagacccatggatagcgggacattgccacacgcatctgctgtcgacactccttttgtttgttcagtcgcaggtatgctaaagctaaagagcactggatgtttggcaggtatttccactcttgcgataacctggtctgtgtacagagatcgatgaagtgtgaccactctctgccacgaagcgctaaattgtcgatcatgagtttaatgcaataagggtctttcagatccaggctcagtagcagcttcgcccattcatatgcagttctccaagtccccttcattccgaggttggcaatgtacctccaaccaacaagccacagctcgcggttctccgcgtgtagaaagtcaagcctagctctgccatctctgaggcgattcccgaatgacgaatggaccgaacgaccgaaattgaaaagtgctcgctccagtaggtctgcagatactgcatggtcaccttggtgttttgcgatctctgacacttggaggagcgttgagatgtggtaaggattatactgaaggagatgg

SEQ ID NO: 23609 - DNA, 2629 bp, Arabidopsis thaliana
caccgacagtcattcttaaatcatgacagctcacaacgcatacacggatcgagttgactttctgtccgccggagtatcggcaccgctgagttcgagcacgcctcgattttcaaggaggcattagtccaagcatccaaacttcgcaggcgggggcaaatcagcagactccgccacctcagttgcctcgcgtctctccaatcgaaattggaaccacctcgaaccaaaaccaggttgttctgactaccccgacaaatcccgacattcatgtggatggagttgccgcccggactccatcattgtttcgaggggagccctctctcaagcacccgacctcagaatcccctaggagcctgatgttgtcagcaatgagcttcagattctcaaagaccaaatttgggccatgaatacaaaggtttatcgacctaccaccgcggcccccgaggttgatagagtaatcgaaacaacccgcaggactctgttcactccaaggatctcgagacttcgcattcgtgacttccgagattttaagctcccgagctacaacgacaagggagatcctaaggagcacttgacctcttttcaggttattgccggacgggtacctctcgagccgcatgaagaagacgctggactgtgcaagctcttttcagaaaacttgtcaggaccagctctcacctggtttacctaggtagaagaaggttcaatcgactacttcaaacagctctccaccactttcattaaacaatatggatacttcatcaaaaatgacgtcagtgaggcccagctttggaacctctctcagtctgacgagccacttcagacatacatcactgcgttcaaggaaattatggtccaagtgcctaatctatccgactcagccgctcagtccgccttaaaaaatggattggggcatgaatcgcgtttccgcaaggcgttaacagtaaactgacccgaaacaattcaagatgctctccatcgagcaacgaactggataactgctaaagaggagcgagctccttctagctaaaaattttaatgctacaccaaagtcttctcctcgccctatttcaaaaaaaacggccgaactccaaaaacccgcagaaggaactttctcggtaaaaaagagtcgccaaaggcctctccaaaagcttctccatctaaaccgcctttctctccgaagggcaacaacggggcatttccgagtaagaaatggatcagagacccaaacgcttattgtgatattcacaaaatgaatggtcacgccaccaaggcatgcaaagctctgggaagacttttggctgccaagtacgcatcgggggaaattcacgaagttgatgtcacaacaatcgagcaggcacaagcagcatatgaagcgttggagtccgaaaaaacttccccccccccccgaacaagaagcaaaaaagtgaatctactcctgaaacctccaaaggccctaagaaaatggtcaaagtgattatgggatgatcgaaacattttcgtgactctatcagtttgattaagcagcacgagaggaaagcagttgctccggtggcgaaaaaaacaaaagcaagccgagctgactagcccgaaatttccttttccgaggaagagaccagctacttggacaaacctcacgatgatgcctttgtaattacgttggatatagcaaactgcaaagtgcaaagagtactcatcgttaccggaagctcagtggacctgatttttctcgataccctcgtgcgaatggggatctcaaaaaatgatataagagttgccccaagcccactcgtctccttcacaggcgagacttcaatgtcacttggcacagtaacgctccccggcactgcacaaggagttgttaagatgatcgaattcacagtattcgaccgaccagccgcatacgagttgttaagatgatctccgtggcattacgagatgaaggccgtcccatcaacttatcatcagtgtgtcaaattcccaactctgttaacattaggccaacctaggccaaaacttccgacgtgaactgattcaatttctcgagaagaataaaagtacttttgcctggactatcagagaaatgaccggaattagtacagaggtaatctcacacgagctgaacgtagatccaacctttaaaccggtcaaacagaaacgtcagaagcatgggccagatcgtgcagaagctgtaaacgtcaaagttgttagacttctcaaagcaggtttaattcgagaagttaagtatccggactggctcgcaaatccgtagtagtcaagaaaaacaatggcaagtggcgcgtttgtgtggactttactgacctcaataaagcttgcccaaaagattgctttccgctccctcacattgatcgacctatagagtcaactacagggcaagagatgctctcttttatggatgcattttctgggtacaatcaaatcatgatgaatccagatgaccaggaaaaaacatctttcatcaccgagcgcgggacgtattactacaaagttatgcccttcggactaaaaaacgtgggtgcaactaccagcttttagtgaacataatgttcaaagatctcctcgggaaaaccatggaagtttatatcgacgatatgttggttaagacagcctt

SEQ ID NO: 23610 - DNA, 2669 bp, Arabidopsis thaliana
ctctaacatgaaatggatttctcccagtcagcactaggtttgctcttcacatcttttaagaccctgcacaggtcaacaaacacgagggaaggagagccatacacagaaaaatcatccatgatacctctaccatctcctctatcaaatccgagaaaatagaagtcatacaccgctgaaaagtagctggtgcattacagagaccgaaaggcatacgcttgtaagcaaaggtcccataaggacaagtgaaagtggttttttcttggtcatttgggtgaatagggatttgaaaaaatccgctataaccatccaaaaagcaatagtaaggatggtttgctaatctttctagcatctgatcaatgaagggcaatgggaaatggtcttttctagaggcagcatttaacttcctatagtcaatacacatcctatgtccagttatagtcctagtgggtatcagttcatctttagaatttttaacaactgtcatacctccttttttaggaacgcagtggactggagatacccaagtgctatcagagatagggtagataaccccagcatctaatagtttaagtatctcctttttgacaacctctttcaagttagggtttaatctcctttgaggttcaatgctagagtaggattcattttcaagatggattctatgggtgcataaggtgggcgaaatccccttaatatcatctaacgaatatcctatagctttcctatacttcttgagctcggttatcagcaggtttacttgatcagcagttagcccatcattcactatgacaggataagtagagtttagtccaagaaaaacgtaccttagcccttttggtagcggtttcaaatctactttgggtgccttgagttcagaccagtcatcagatactaagttggcttcagaggggttgttgtggtcgagtagctcggtcgagtacacagaatgggctgttggtcgagtgatgaggtcgagtatatattcctcccttgctctttcacccaaatcttcatactctcctggattctcaactgctttgtgttcatctaacagcttttggtaccccaaaatctccaaatgtaaatctccttccttgctatcctttgttagagcactctgtagatgatctgtttctcccagctcttctagcatttcgtcagctaacatatccatctcttcaatccagaaaacatttccttctatcgtaggcttcttcatggtgttggtgatatcgaaggtcatcttgagatctctcccgaggttaagatcaatttttcccttcttaacatcaatgatagctccagctgtagctaaaaatggtcttcccaatatcaaagggtctttgggttcttcatccatttctaaaaccacaaagtctgtcggtacttcgaccatgcctatcatgactggtaagtcctccagcagaccatggggaatcctaacagatctgtcagctaggatcaaggatatattgcagggcttgtacttgttgaagcccagtttctttgccacagagagaggcatgagactcacagatgcacctagatcacagaggcacttgttgaaggctaaagggcctagagcgcaaggtaaggtgaaggaaccaggatctcctagtttttttggaatgatcttctgctgaatgatcgcactgcattcgtgacttagcaccaccattccttggacttctttgatcctctctgtaatcatgtctttcacatatttgttagagtctggtataagtgcaagacagtcgacaagaggcatcgtgacttcaagatttttcaattgtttctccaggagagctttgtacttctgtatcatgaccttcttgaatcgaccaggaaatgagagtgggggcttgtaaggtgggggaacgaagacgttgtctttggttttggcggcacgtggtttttcaacaagaggagatgctgcaggagctagtagtcgagtaggttggtcgagtataggctcttctattgctttttcagcggaatttccattttgacagaaatcctccccatcttgatccacactgtcctcagtgttctggttcgggctctcttttgtgggtaattctttaccgcttctaagtgtgatagcatgagcgtactcctctgaatttgacattgattttctggaaggtcctgtaaatttgggtgctgcggtcgacccagtttggccttctatgtatctaatcttagatgtcagtgcttcaaccttgatattgatatcattgtaactgcagtcaaccttgttgtgaatttctgccatccttttggacaaatccattgctcctgttgcttgcccttgtagaatctgctgtaacatgttcttcaagtctgaatctggagttgttgaagctggttgttgttgctgctgtgtgaacccaggtggtggaagttgctgctgatagttgccctgatactgctgcttaggaacatacccttgaccttggttgtatggaacaaagggcttgggttgattctgctgctgtgaagggtaaacttggtcttgcgggtttgcaacgtttgtacttctgtaagacagattgggatggttctgcttgaagttgttgaaacctttgttgtaacctccttggttctgcacataactgacctcttctgactgcatagtctccccatcctgaacttggaggggatcttta

SEQ ID NO: 23611 - DNA, 674 bp, Arabidopsis thaliana
tagttcttccttcacccacggcaacgacttcacctccttgaggttttgattgagcagtggatggaagtaagataccacctaaagtcttctcctctgcctccttgatcttgaccaaaactcgatctcccaatggcttaattgaagtatactgtaaataaccatacacatattgcagagcaaagtattatctagaagagccgggacttctcaaaatgtctcacaaggcgccattaagatacaaaccaagcttgcaaaagagaagctagaagcatctaaagcttagtttctttagacatcatttagcggattggattgtataacacaaacgaatggccaaaacaacaaaacaacaatccaagattcagataagttatcatccagaacaagtaaccaaacaacaaagaattgagaaaagtaccttaggggcaacaacagaagcagctttgacaaccaaacgacggaactggctctgtctaagggtccctggtttcaaagatgaaaacttgacactcgaagctctgagaccatccagcgaggctaagctccttgctgacatagtcactggtgacgctgtaagttgagtcgccgccatttctcctatccgtcaaaacacacaaactctcaattagtatgaaactgagagagacagataaacaaatgggcaaaaatgaaga

SEQ ID NO: 23612 - DNA, 2130 bp, Arabidopsis thaliana
cccaacgagtaccaactggtgaagctagtgatccgtagtacctaaatcaaaacagacaaacagaaataacacaaagttagtaactttcagaaaaaatgaaaaagaacttgatcttaaatattctgaaatctcaaatatagcaaacaaacacccaattggcaacggcgccaaattgataatatatttttagtcaattattcctaaaacaccaatcatgtcattgtagtattttaggtgtcaatccaaatgggtgtgatgcaaacagatgagatgtgatcagaagtctctaagtcaagccaagcaataacagatttggggtttctaacagtcctaagcgaacatgcagaaaacagaagcaataacagaattactaaaatcactcgaccacaacaggctgatgccagaagtaggatgtggtcgagtaacaggtcgagtaacagacaggatatgaaacagctatactcgactgcacagtctgttgccagacactgggtgtggtcgagtatactggtcgagtgattgtaaaaactaagaaacaggcaatgagaacgattaagcgataacgataaaacagagaaataaggtagacgagaaattcctaaggatggggtaatcgagtagagtggtgtcctagcctattcgaatggttaacaagcgcaatcaagctatccctagacaacaggttcaacaacagatcaatccactcccgtgatagaaatcctcaagcaaagctagcccagactaattcccattaacggaatctaactatgcaggcaatacgaacagactgataaagtcaataaacgctctaaacggccaatcccttgggatagagacgcatatctcaggaactagtggatcaagcattccatcgaacaccttctgggtgcgggaatgcttgggatcgaattccagttgatcagaaagaaataagcagtaaacgcaactagtcctaaagggattcaatcaattctaaaacttaaccattctacagactacggattccacaactactctatcccatccctaagaattctaagtcactactcagacagcatgctcaaagacataaacgcaggtaaacgataatattgcataagtaaagagataaagagtagagaaacaagaggactaatgaaatcaaacgcggaatctcaataacttggaaaaatcgtgaactacaggttgcagaagcaaaagcggcgtacagagtaaaactgaaaataaaactgaagcaaaaacgcaatgtcgactagatgtctcaggacagaaccctaaaacatctatttataccaaacgaaataaaatgatagtagacgggccaataacctaatcgcccggcccatagagtgataatgggccgagatgggcttcgtgatccgatggaggtccaggccgcttccaaacactttgtcttctcctcttttcttccttgtgctcagcttgtctggttgagtgcggatttgagtagactgtgaagacgtgatcgagtgtccggtcgagtgatggtgatggtggtgagtgatgatactcgaccagggggtcgagtaacgtggtagagtgaatggtcgagtgtggtcaggtggtgtggcgaagcggtactcgaccagggggtcgagtaatgtcgtcgagtggcctgagctgaggttactcgacctggtggtcgagtggacgggaagaatggctccaaagtcactcgacctgggggtcgagtatgtgggaagaatggctccaaagtcactcggcctgggggtcgagtatgtcttctggttctggctcgtttcttccaatttgctcgcaaacagctccaaatcacctgaaaacaactcagaaatgcaatatgtatgcaaagctatcctaatcatgcaaagtgtgcaagaatgatgagaaatgatataaaacagtgatgaatgatacgaaactagactcaaagtgatgatgaacagacactgaaaacatgcaaattatagacatatcaactcccccaaacttagtctttgcttgccctcaagcaaataagaagacatagttgaaggagaggagtgaaggcggggactcagaaccaaagcatatgatagagcaaataaaatcaatgtccaagttggtagttctaagatgcgatatgattga

SEQ ID NO: 23613 - DNA, 9237 bp, Arabidopsis thaliana
aacgtcgcgaagtgaccaccatatgctgagacatggcaatgcagcaggataccttccacatcatcttctgagacacttctcctgtagatcttatctttacagagagtgtaaagataaggctcatcccagtagtaatggtgtatgtctctaaaaaacttcttcctttcataacttgtcaggatgggaggctctactccgcacgccaagtaattgacgtgatcagcataccatggagattctccttcaacagcattcagttggtggaactctttcccattgtagctccttccgaagaactctacaaccatgagctgctcttctggcattgaatcgtctatcgaaaggggttcttcaattctcatccttgacagatggttaactgtaccattttcaatgcctttcttatctactatctccatgttaaactcttgcaataaaagtatccatctcaacagtcttggtttagtatccttcttggcatacagatgcctcaaagctgcatggtctgtatagacagttacctttgatctaaccaaatagcttctgaacttctcaaatgcgaatacaacagctaaaaagctccttctcagttgttgcatatcttccctgagcgtcatccaacgttcggctggcgtaatatatgacatgaagcttcttgtctattttctggcctaaaacagctcctactgcgtaatctgatgcatcacacatgatctcaaatggttagtcccaattaggcgctcgaacaaccggagcagataccaaagcatccttgatggtttgaaaggatttgaggcagtcctcatcgaatttaaattcagtttccttgcacaatagcctggttaacggcctggctatcttggagaagtctttaataaatcttctgtagaacccagcatgaccaaggaaacttatgatgtccttcaccgtttttggtggctgcaactgcatcatcacttcaacttttcctttgttaacctctatacccttctctgatatcttgtgacccaacactatgccttccttcaccatgaaatgacacttttcccaattgagaacaagattagtctcttcgcacctggtcaataccctgccaagattcaacaaacatgaggagaaagaggggccatagaccgaaaaatcatccacgaaaacctccaccatctcctcgattaagtctgaaaatatagaggtcatacacctctgaaatgttgcaggagcattgcataaaccaaatgacattctcttataagcaaaagttccatcaggacatgtgaaagtggttttttcttgatcattaaggtgaattggtatttgaaagaaaccactgtatccatcaagaaagcaatagtatggatgattagccaaacgttcaagcatttggtcaatgaatggtaaaggaaaatgatctttcctagatgcagcattcaacttcctataatcaatgcacattctatgaccagttatagttctagtatggatcagttcatctttttcatttttgacaacagtcattccatccttttaagggacgcaatgcactggagaaatccaagtactatcagagatagggtagatgacaccagcatcaaacagtttcaaaatttcttttttcactacttctttcaaattgggatttaacctcctctgtggttcaatgctggaataggattcgtttttaagatggatcctatggttgcataaactaggtgaaattcccttaatgtcggataataaataaccaattgctctcctatactttctaagctcagataatagtaggttcacttcatcactatttaactcagcattaatgatcacagggtaagtagagtttggaccaaggaacgcgtaccttagaccttttggaagtggtttgagatcaaccttaggtgccttaagttcagaccagtcatctgaagttgaaatgatcggctccctaggttcgtcggtagcaaggtcgagtggttgcttgagtacgtcctcgagagtgcaggttgaactcgagttgacccttcttcgctcattaccattacctctgttgctggtccattcaattcctcaaagggttctgattcttccatcgctttatgggagtctaacaacttctggtatcccaatgtttccaaatgcagaaacccatcttcaccacttttggttaaagcactgttaagatgatcttcttctgccagctcttccagtaactcatcagctaactgatccatttcttcgatccaaaagagttgcccttctatggtaggcttcttcatcgcgtctttgacatcgaaggtcatcctaaagtctttgccaaggttcagatcaatcttccctttcttgacatcaatcatagctcctgcagtggctaagaaaggtctccctagaatcaacgggtccttgggctcttcatccatctccatgactacaaagtcagttggtatctccacagcaccgatcctgattgggaggttttcgagcaaaccatgaggaattcttactgatctgtcagctaggatgagggatatattgcaggacttgtattgagtgaaccccaatcttttggcgacagatagcggcatgagactgactgatgctcctaaatcgcataggcatctgttgaaagccaatggacctaaagagcacggtagagtgaacgaaccaggatcactaagcttcttaggaatgatcttcttctgtatgatagcgctgcattcatgactcaataccaccatcccttgcacttcttgaattctctccacaatcaagtctttcagaaacttgtgagagtctgggattagcgctagagcgtcaacaagaggtatccgtaactcaacctccttaatgttcttggcaaacatagctctatatttgtctgccaacgctttcttgtgacggccaggaaatggaagctgcagtttgtagggaggagggacaaagaccttttccttgtttttgacagcaactggttttggagcagttggtgatgctgctgggatgacaggccgagtggttggtcgagtaatgctgtcgagtggcggatcgagtgattgctcgagtgacaggtcgagtgcttgctcgagtgacaggtcgagtggtttgtcagcttgatctttctcgagacttaaatcctccccatcttgatcttcactgtcctcagtgaccgtctttggttcctccttagttggaagtgcttttccactacgcagggtgatagcatgagcatattcttttggattctgaactgctttgcctggtagttggcttgtctgttttgtagctgaagaagatgtagaatgtccctctaagtaacggactttggtattcagtgtttccatcttgacatggagatcattgtagctacagtccagcttgttatgtaactcagatatcttctttgccatctccatggagcaagaggcttgcccgtgaagcagctgttgtagcatttgtttcatatcagcgtcaggagcagcagaaccttggtgttgctgaggtgcaaacccaggtggttgttgctggtagttcccctggaattgctgcttaggaatgaaaccttggttgtagggaacaaaaggtttgttctgactttgttgttgctgtggaggatacacctgatcgtgagggttagcaacgttggtgctgcggtaggagaggttgggattgttggttttgaagttgttgtatcctttgtagccaccctggttgttgttgatgtagcttacttcttccaactggttaccctccccatcttggacttcatactgctcatcatcaacaaggaagtgcacatgcttatgctggctaagaagaatcctgtccagcttgtcattcagcgctttgatctccttcctgtgtttgtcatcagagtcagctgttcctctgacggtcctatcacagtcttcgttgtaatttccatctgattgagcaaggttctcaaccaattcccagccttcttcaacatccttgttctggaaattcccattgctggcggtatccagaagcattctgatgcgtggtaggactcctctgtaaagagtgctgagcagagaggctttagtaaagccatgatgagggcattggttggtgtaacccttgaaacgctcccatgcttcacagaggctttcaccagtcttctgtgagaaaccagaaatctcatttctgaatcttgcagttctggcattggagaagaactttgacagaaaagccttcttacaatcatcccaggtggtgattgagtcatggggcatggggcagattcttctcccagatgtgtgctttgtctcccaaggagaatggaaacaaacggagcttgaatccgtcttcactgacaccattgatctttgttaggttgcagagcctatcgaattcatcaaggtggtcgagtggatcctccattggcaaaccatggaatttgttcccctgaatcatcgagatgagaccactcttaatctcgaagttgttattctggatagcaggaggtgcgattcccttcctctgacggtgatcacgtggtgcatctccagcaccaatgttggcatggccattttgctgattctgttcttcagccataacgagtggttgctgaggtacagggttgactgtggttctcctttttctgatttcgcgggctgtgcggttgatgttgtcgttgaaggaggttctggttgcctgttgatcgagttcgcatacagtagaggtgtacctggatcaagaagacaacaagaaaaacacacagtaagtaactgaaaagaaaattgaaaaagaacttgatctaagcaagtctgaaatctcaaatgtaacaaacaaacacccaatcggcaacggcgccaaattgataataggtttttcagtcaattatcctaaaacaccaatcatgtcgttgtagtattttaggttgtcaatccaaatgggtgtgatgctaacaatcaagatgtgatcagaagtcactaagtcaagccaagcaataacaggttttggtgtgttatagcaatcctaagtgaacaagcaggaaacagaaaatcaaacagaaacagtaaaacactcgaccaacgcagctctttgcagagccctgggtgaggtcgagtgacaggtcgagtaacagtaaagaaaatgaaacaaagatactcgactgcacagtctgttgccagacaactgggtggtcgagtatcaggtcgagtaacagtaaagaattgcagaaactaagcaacaaatgacaagatgcagtagagtaaacaataaaatcaatcagataaagaattcccgaggatagggtaatcgagtagtttcgttttctcagtttactggtgattgacatgctcaataaataaaccctaaacaacaagttcattaaccaaatctaagtgccaccgcaacagagactctcaagttaacctagtcccagactcaatcaccattgacgagagctaacctaacaggcattacgaatcaacaagttaaagccaaaacgctccctgcaaccaataccttggtacagggtcacgaatctctggaattagtggttcagacatttcatcgaacaccttttgggtgcggaaatgtctgggctcaaatttcagttgatcagaaagcaataggcattaagaacaactaatccagaagggatctatcaatcaaactcaaccacctagcatactgagaattctacactactctaacccatcctcagaaacctattcactactcagacatcatagcagaaagcataaacgttgaatggaatgaagacatgataacaacagagtaatagcaagatggtaacaggatgaacaacagtaaaacgaaattaagaacaaatactgaatactgaatagataaagagaaatccggattacaaaaggtctagaacacattgtctgcagaataaaactagataaaaacttgttctcgaaaatgtaaagtacatgctacttataacaaaatattctgaaaccctaatactcaaaacaacgcagtattgggacggattaagaactgtactcgacccaggtggtcgtgtgagaggtcgagtgataagctcgagtcttctttttcttccttgttctcgagtgtctggttgagtgcggaatgaagaagactctgaagctggcagtcgagtatgtagtcgagtgataaagatgatggtactcggcttgctggtagagtagtgtgatcgagtgaaggtgaagtggtggaggtgatgatacttgaccagggggtcgagtggtgtgatgagtgtctctcttggcgatactcgacttgggggtcgggtggtgacgtgaagtgctgaggtcttctcctcaaccaaggggtcgagtggtctgttgaagtcgtgaagcgtctactcgaccaggggggtcgagtggtttgacatgatcaggtccgcttcttccaattagctcgccaacagctccaaatcacctgaagacaacacaaatatgcaacatgcatgcaaaactatcctaaacatgcaaagtggtgacaaatgatgagaaattatataaaatcgtgatgatatgatgtgatataaccctatttaaaccgattttagctatgatttatgtatagattttagagtctaattgttatttctagagtcttttctagtctttttcaggtctttacatgtttgggatgaatttggagattatggagcattctggagatcaacagacaacttaagctgttgaagaaatccagagacgaaaatgcacgtaggtttcgaacgataccacccctggtgtcgagcaacaccaattcctgacggcaatttcgagacgcaacttattgatgttttaaagattttcaaattcggcctataactttcttctatgtttaatgaaggcccatcacgtgttttagacatataattaggtttttagggtcattgtttagacctaagctttgggggcgattccctttatctcttctgtactttgggagcaaaaccctgtggaactccctttggatctttcttactctattatcttcttgttttattcattgatttctattctaatcatgttgtttgttttattcatcatgcttgagtagttttcttgttaggtttagggtttctcattagagttatagatgatttagtagattgcccccttgctaggttatctgtaggaattcttcattttgattgttattaatgctagttctagagtagctaactagaacttgatattagataataggtatgccaccataggtacttgctacttgatcatcatagatgagcctaggcatttaagaaagaacatataggctcatagaagggctctggtttagatacttaggtgaactaatcaaacttgataataatgcatgtttaagtataggatttcacggctccaccaagaatcttagctttaggcatagtgagttttgcggaacaccacaagttattctaatattagagttttgagtttaagaatggttcaataacaacctagctattactagaactactaatcatttattttctgagaatagcctaagcctgactcttttcccatctgattttcatcttgatatttattgctttctttgtttcttattttataatctatttggtttagcttaattcaaaaccttagtctattgtgtgatcttagagctttgtggaattcgacccttaagtactacaatcgatctcttatttgagagagtggtcttaaggcaatttgacttatatcaaatttggcgccgttgacaaagttctctatgattcaccattagattaggattaggattttgtctaagcttttattcttggtttcttttttgattttacttagtttttctcttttctttttcttgtgtgtttcaggtgtttgtctaatcatagaaccaagaccaaacgagaaacatgaacgagaataagattgcagggatcatggctaagcttaacgcggtctacaataaacttacggaggatgtcgattatgttcgtagcagagattttccgaatcagagatttgatcaccaacaaggctacagagtttcctatgggaatggtccaaccagctacactgagaattctcagttccagcaaccacttcagaatagcaatagtttcagcttcacaaggaactatgatcttgcttcttaccaagccccactccaccagcacctagaagcaagatagaatcattgctggaacagattctggaaggtcaacagaggatcttagagaaacctatctctagatggaataagaggagcctcactacatcttggcatgctgcttcaatggaaagtgagtatgagttagtgaagattgacgagagtggcgattttgaagttgaagagatagtgtcgatcgacaccatcgcatatataagagacatcaagctgtgacgaagcaaaatcgaccaggctcgacactgatctccataatcgctcgacacacattgatagtgtcgaccgacaccagtaccaacctgaggaagtgtcgacgtttaactggaagcaaatcaattcgagattgacagagcaggatcgataccagatagtagtgttgaccgacactcacctagtgtcgatcgacactggatgtagacttcaccactcagccttgactttccacatgttgatgaactagtctacacacctgaaattctttgtccatcgcctcaacagtatatgcaagggattcaggaggggcgttgcaaggctccacgtcaaggacaaaaggaagacaattatcgtctcagaacagatttcagagctgacttatcgacaggctaagggaagacgagttgtagcacgtgtatcgatcgacagcactactagtgacgatcgacacccatcactggttgtagcagaatcatctccaatagctatttttccatctgggatcacagctataagtccaggttctgctgtaacgtcacccattgcacctctgatacttcatacacctcctaaacggctaaggtactcatctcctcgtgaatcattgaatcgagaagtcgccatgctcttcgtctgatggtccagacgttccgcgaggcgtcgtcatacgcgttgagcacttgctcactatactgatgattgtgcacgatggtaagattcgtcccaggacgcgaagctctaatctcatccgtgaaagttgcagcggagtatgagtgtcagatacatagtctacgatgaatgcatctatggatgttgtgtcatgtcaatgaatcgattcttccgttaaatatatggggatcctcttgatccccatactcc

SEQ ID NO: 23614 - DNA, 4663 bp, Arabidopsis thaliana
ctccaattcttgagcgtctggactcgcggcggagatggaggcggagatggaggcggagatgttgagttggttttggtggaggccttttgataacctgtatatatatttatagatcagatcaaaagataaacataagcaaataaacaagggctacaccaaaatcagtagagtgaaggagatagacggaactcacgtcgtatgctccaaataatcagaaatatgttgaaagttaaacttgattcaaaagtttaattattggatcaattatccaataattaattatggccaaatctaagttctaaagttttctttagaaatatcatcatttccatctccttaaaagattctagaaattttctacaatcatcttccacctccttaaacataaaaatctagatactttaatagaataatctagataatttgaataatgtaatctagatcttatataagaactctctagatttaggattaaaatattttagatattttgtagtttggaggctataaatacctcctccccttctcaaatgttgtaatgttgtgaagttgtattcaagtttaaagcaaagtaataaaagttctatttcctaaaaaactctctcaaaacacttaaacactttctccattacctctaaaagaattttactctaacaaagtggtatcagagcttgaagatcctaaagatggcgagtaataatgttcccttccaagtcccggtgctcacaaagagcaactatgataattggagtctacgaatgaaggctatcctaggagcacatgacgtgtgggagatagtcgagaaaggtttcattgaaccggagaatgaaggtagtctttctcaaactcaaaaagatggtttgagagactcaagaaagagagacaagaaagctctctgtctaatctatcaaggattagatgaagatacgttcgagaaggtcgttgaagctacgtcggcgaaagaagcatgggagaagcttcgaacctcttacaaaggtgccgatcaagtcaagaaagtacgtcttcaaactctaagaggagaatttgaagcactacaaatgaaggaaggtgaactcgtctccgattacttctcaagagtgttgacggttactaataaccttaaaagaaacggagagaagctagatgatgtgagaatcatggagaaagttcttagatcattggatctaaaatttgagcatattgtcaccgtcattgaagaaacaaaagatttagaagctatgacaatagagcaacttcttgggtcattacaagcttatgaagaaaagaagaagaagaaagaagatatcgccgaacaagtcctcaatatgcaaattacaaaagaagaaaacggccaaagttaccaaagaagaggtggtggtcaagtacgaggacgaggtcgtggtggatatggaaatggacgtggttggaggccacatgaagacaacacaaaccaaagaggtgaaaactcatcaagaggtcgtgggaaaggacacccaaaatcaagatacgataaatcaagtgtcaaatgctacaattgtgggaagtttggacattatgcttctgaatgtaaagctcctagcaacaaaaaatttgaggagaaggccaactacgttgaagaaaaaattcaagaagaagacatgttattaatggctagctacaagaaagatgaacaagaagagaatcataagtggtacctcgatagtggtgcaagtaatcacatgtgcgggagaaaaagtatgttcgcggagcttgatgaatcggtgagaggaaatgtggctttaggagatgaatcgaagatggaggtaaaaggtaaaggaaacattctcattcgattgaagaatggagatcatcaatttatttccaacgtttactatattccgagcatgaagacaaacatcttgagccttggacaactcttagagaaaggttatgatattagattaaaagataataacctttcaataagagaccaagaaagcaatctcattaccaaggtgccaatgtcgaaaaatagaatgtttgtcctcaacattcgaaatgacattgcacaatgtcttaagatgtgttacaaagaggagtcttggctatggcatcttcgattcggacatctaaattttggaggattggagttgctttcaaggaaggaaatggtgagagggctaccttgtataaatcatccaaatcaagtgtgtgaaggatgtctacttggaaagcaattcaaaatgagctttccaaaggagtcaagttcaagagcacaaaaatcgttggagctaatacataccgatgtgtgtggtccaatcaagccgaaatcacttggtaaaagtaattacttccttctctttattgatgatttttcaagaaaaacatgggtatattttttgaaagaaaaatccgaggtgttcgaaattttcaaaaagtttaaagcccatgttgagaaggagagtggtcttgtgatcaaaaccatgagatccgaccgtggaggagaatttacatccaaggagtttcttaagtattgtgaagacaacggcattcgaagacaattaacggtgccaagatcccctcaacaaaatggtgtagcggaaagaaagaatagaacaattcttgagatggcaaggagcatgctcaaaagtaagagactaccaaaagagttgtgggcggaacggtcgcgtgtgcggtttatctattaaatcgatctccaacaaaaagtgtctccggaaaaacaccacaagaagcttggagcggaagaaagcccggtgtttctcatttaagagtctttggaagtattgctcatgctcatgtaccggatgagaagcggagcaaactagatgacaaaagtgagaagtatatcttcattggttatgataacaactccaaaggctacaagctctataatcccgatacgaagaagacaattattagtcgaaatatagtgttcgatgaagaaggagaatgggattggaactcaaatgaagaagattataacttctttccacattttgaagaagatgagccggagccaacaagagaggagccaccaagtgaagagcctactacaccaccaacttcaccaacaagttctcaaatagaagaaagttcgagtgaaaggactccgcgttttagaagtatacaagagctctatgaggtaaccgaaaatcaagaaaaccttaccttattttgtttatttgcggagtgcgaacccatggatttccaagaagccattgaaaagaagacttggagaaatgccatggatgaagagatcaaatcaatacaaaagaatgacacatgggagttaacttcacttccaaatggacacaaggcaattggcgtgaagtgggtgtataaagcaaagaaaaactctaaaggagaagtggaaagatacaaagcaagattggttgcaaaaggttatagtcaaagagccggaattgactatgacgaggtatttgctcccgttgctcgtctagaaacggttagactaatcatctcactagcggctcaaaacaagtggaagatacatcaaatggatgtcaagtcggccttcttaaatggagatcttgaagaagaagtttacattgagcaaccacaaggctacatagtcaaaggtgaagaagacaaagtcttgagactaaaaaaggcgctttatggattaaaacaagccccaagagcttggaatactcgaattgacaagtatttcaaggagaaagatttcatcaagtgtccatatgagcatgcactctatatcaaaattcaaaaagaagatatattgatcgcatgcttatatgtagatgacttgatattcacgggtaacaatccaagcatgttcgaagaattcaagaaagagatgacgaaggagttcgagatgacggacattggattgatgtcttactatctcggaattgaagtaaaacaagaagacaatggaatattcataactcaagaaggctatgctaaggaggtacttaagaagttcaagatggatgactcaaatcccgtttgtacaccaatggaatgcggaatcaaactatcaaagaaagaagaaggggaaggagtggatccaacaacctttaagagcttggttggaagcttgagatacttaacatgcacaaggcccgatattttatatacggtcggagttgttagtcgttacatggagcatccaacaacaactcatttcaaagcggcaaaaaggattcttcgctatatcaaaggtaccgtaaactttggcttacattattcaactactagtgattacaagtttgttggatatagcgatagcgattggggtggagacgtagatgaccgaaagagtacaagtggttttgtgttttacattggagacacggctttcacatggatgtcgaagaaacaaccaattgtcactctatccacttgtgaagcggagtatgtagcggctacgtcatgtgtatgccatgctatttggttaagaaacctcttgaaggagttaagcttaccacaagaggaaccaacgaagatctttgtggacaacaagtcggcaatagctttggcgaagaacccggtcttccatgatcgaagtaaacacattgacacacgctatcactacattagagagtgtgttagcaagaaggacgtgcaattggagtatgtgaagacacatgatcaagtagccgatatttatacatcatac

SEQ ID NO: 23615 - DNA, 6439 bp, Arabidopsis thaliana
cttccatatggagtatggataggggcagacccgaaacatggatggctgggtgatgatgtaagttattgttaaattctgtctgagcttggctaatgttatggctgagttatcgtgtcgttctgtctgagttaaagtagataatggctgacttacgatgtaagttattgttatattctgtctgagtttgtctaaggttatggctgagttatcgtgtcgttctgtctgagttaatttagctaatggcagatttatttaggtgttaaggctgagttttacttggttacggctaagttaatgttgtgttttgtcttggttttatttttgtccagcacattgctgcgtatgtgaaaatcctcaccatgaggctcctgcgagatcccaccccatactacagcgaacgcatcatgattctagacccgtggttcacgtcaatgtggactagggattacacacagtagacgatgaagccgaagagggtttctttcaaaggtaccgcgtatgaaggttggatcaacggtacggctggagaagacccgacaaacaagaagtggataacagatgtggatcacttgtatactatcctccaaaccggagtaatcattggggactcttcacgtggacttgcctaggtgtcacgtggactgctatgattgcatcatcggatgtcatacaaagaaaagcgatggaaaaatcctggaacattgtagaccgttcacgaggatgattccacagatcatgagctaacttatccctcccgaagtccgtgtcccgcaatacgaccaattttcattccggcggaggaacattacaagggtcccgcagaatactatcactggggactgcggcgtttacacgttaaagattcttgaatgtttattgcttggtgtttcttttgatggccttactgattcaaatatccaggggctacgggttaggatggcaacagagatctacgatgaactacctcacagaatgctcattcggttttttgagacatgatttgctttttcgaacatgtctgtgtcttttgggatttttagcatgtgattgtactaaatattgacactttaggatttataaccagaattatgtctgtatgaatctattattatgttaattataacaaaaaccaatgtaatggctgacttatcatcgctcgattcgttttacggctgatatatgctaacgtgaaggctgacttatcatcgctcaaatcgtgctacacggctgagttattgttgtttaattcgatgtttagctgagttattataacgcggtggctgacttgtcatcacacaaatcgtttgaaggctgagtttgtataacgtggtggttgacttgtcaaacccaaacttccctcccatcaaataaaccagacgtgactttaggactatacatacaccagtttacgacacctgaatagtcaagaacccaaaagtcgttaaaggaccaaacgtcattacgttagaggaccaaacgtcgttacgttagaggaccaaacgtcgttagagaactatatatacactggtttcctcttgtcttttcacttgtcgattcttagcaactacaactcttcattcttctcttgtcctttctctgagaaataaaaccattccgagatcatggatgcatcaggttcaggttcaggttcaaacaagcggcggtgtgtggatgacggtcccaacaagtggccgtctgtggatgacagccccaccctaaagctgtatgaacaggagaagcgtttcaaatccgtcatctcttacatcaggagcaacataagggagacggcggaagcacacttgctcgatatcaaactgcatgagaagatatcatttctattccacattttgaccttaatgtaatttttcgagccttttcgtgatctttgttatattacggggcgaaaattatatgttcggacattgttttcgaatattttgcatgtatcaaagctcttctaaacaagatagggtattcctacatagctggtgggacccatggcaaatagatcataaagtcttcaaaaaagaatagatacgattgcattgtatgtactaacggatgcgatcataccagcactaatgcaccagatcccataaaactccgttgttaagcgtgcttgggcgagagtagtattaggatgggtgacctcccggaaagtcctcgtgttgcatccctcttttttcggtttttctctattttgttttgttaaaaatgtatgactctataacttttcgaccatgaggccaaacttggcatgtgataccttttcggaaagcccaaagagagctctctgatgaatgaggacggaaaatggaattcttctattggtttttttctactccaaattttgacctaaatgtactttttcgggccttttcgtgatctttgctatattacggggtgaaaatgatatgttcggacattggtttccaatattttgcatgtatcaaggctcttacaaaaagatagggtattcctacatagctggtgggacccacgccaaatggatcataaagtcttcaaaaaagaatagatacgattgcattgcatgtagtaacagatgcgatcataccagcactaatgcaccatatcccatcagaactccgcagttaagcgtgtttgggcaagagtagtactaggatgggtgacctcccggaaagtcctcgtgttgcatccctctttttttccgtttttctctattttgttttgttaaaaatgtatgactctataacttttagaccgtgaggccaaacttggcatgtgataacttttcggaaagcccaaagagagctctccgatgactgaggaaggaaaatggaatttttctattgtttttttttctactctaaattttgaactaaatgtactttttcgggcctttttgtgatctttgctatattacgggggaaaacttatatgttcggacattgttttccaatattttgcatgtatcaaagctcttataaagaagatagggtattcctacatagctggtgggacccacggcaaatggatcataaagtctttaaaagagaatagatacgattacattgcatgtagtaacacatgcgatcataccagcactaatgcaccggatcccatcagaactccgaagttaagggtgcttgggcgagagtagtactaggatgggtgacttcctggaaagtcctcgtgttgcatccctcgtttttttcggtttttctctattttgttttgttaaaaatggatgactctataacttttagaccgtgaggttaaacatggcatgcgataccttttccgaaagcccaaagagagctatccgatgaatgaagaaggaaaatggaattcttctttttgttttttttcaactccaaattttgacctaaatgtacttttctgggctttttcgtgatctttgctatattacgggggaaaaattatatgttcggacattgttttccaatattttgcatgtatcaaagctcttataaagaagatagggtattcctacatagctggtgggacccacggcaaatggatcataaaagcttaaaaaaaaatagatacgattacattgcatgtagtaacagatgcgattataccagcactaatgcaccggatcccatcagaactccgcaattaagggtgcttgggcgagagagtactaggatgggtgacctcccggaaagtcctcgtgttgcatccctcttttttctgtttttctctattttgttttgttaaaaatgtatgactctataacttttagaccgtgaggccaaacttggcatgtgataccttttcggaaagcccaaagagagctctccgatgaatgacgaaggaaaatggaattcttatactggttttttttctactccaaattttgaactaaatgtactttttcgggccttttcgtgatctttgctatattatgggggaaaaattatatgttcggacattgttttccaatattttgcatgtatcaaagctcttataaagaagatagggtattcctacatagctggtgggacccacggcaaatggatcataaagtctttaaaaggaatagatacgattacattgcatgtagtaacagatgcgatcataccagcactaatgcaccggatcccatcagaactccgcagttaagggtgcttgggcgagagtagtactaggatgggtgacctcccggaaagtcctcgtgttgcatccctcgttttttttggtttttctctattttgttttgttaaaaatgtatgactctataacttttagaccgtgaggccaaacttggcatgtgataccttttcggaaagtccaaagagagctctcccatgaatgaggaaggaaaatggaattcttatactggttttttttctactccaaattttgaactaaatgtacttttttgggccttttcgtgatctttgttatattatgggggaaaaattatatgttcggacattgttttccaatattttgcatgtatcaaagctcttatatagaagatagggtattcctacatagctggtgggacccacggcaaatggatcataaagtctttaaaaaagaatagatacgattacattgcatgtaacacatgcgatcataccagcactaatgcaacggatcccatcagaactccgcagttaagggtgcttgggcgagagtagtactaggatgggtgacctcccggaaagtccacgtgttgcatccctctttttccgtttttctcttttttgttttgttaaaaatgtatgactctataacttttagaccgtgaggccaaacttggcatgtgataccttttcggaaagcccaaagagagttctccgatgaatgaggacggaaattggaaattttttattgtttttttttctactccaagttttgaactaaatgtacttttttgagccttttcgtgatctttgctatattacggggggaaaattatatgttcggacattgttttccaatattttgcatgtatcaaaactcttataaagaagataggttattcctacgtagctggtgggacccacggcaaatggatcataaagtctttaaaaggaatagatacgattacattgcatgtagtaacacatgcgatcataccagcactaatgcaccggatcccatcagaactccgcagttaagggtgcttgggcgagagtagtactaggatgggtgacttcccggaaagtcctcgtgttgcatccctcgttttttttggttttctctattttgttttgttaaaaatgtatgactctataacttttagaccgtgaggctaaacatggcatgtgataccttttcggaaagcccaaagagagctctccgatgaatgaggaaggaaaatggaattcttctttttgttttttttcaactccaaattttgacctaaatgtacttttttgggctttttcgtgatcttaactatattacgaggggaaaattatatgttcggacattgttttccaatattttgcatgtatcaaagctcttataaagaagatagggtattcctacatagctggtgggacccacggcaaatggatcataaagtctttaaaaaagaatagatacgattacattgcatgtagtaacagatgcgatcataccagcactaatgcaccggatcccatcagaactccgcagttaagggtccttgtgcgagagtagtactaggatgggtgacctcccggaaagtccacgtgttgcatccctctttttccgtttttctctattttgttttgttaaaaatgtatgactctataacttttagaccgtgaggccaaacttagcatgtgataccttttcggaaagcccaaagagagcgctccgatgaatgaggaaggaaatttgaaattttctattgtttttttttctactccaaattttgaactaaatgtacttttttgagccttttcgtgatctttgctatattacggggggaaaattatatgttcggacattgttttccaatattttgcatgtatcaaaactcttataaagaagataggttattcctacatagctggtgggacccaccgtaaatgaatcataaaatcttcaaaaaagaatagatacgattgcattgcatgtagtaacagatgcgatcataccagcactaatgcaccagatcccatcagaacttcgtagttacgcgtgcttgggcgagagtagtactaggatgggtgacctccaggaaagtcctcgtgtttcatcactcttttttttggtttttctcttctttttttttgtgaaaaatgtatgactctataacttttagaccgtgaggccaaacttggcatgtgataccttttcggaaagctcaaacagagctgtccaatgaatgaggaagggtttttttctactccaaattttgaccaaaatgtattttttctggccttttcgtgatctttgctatattacgggacaaaaattatatgttcgg

SEQ ID NO: 23616 - DNA, 329 bp, Arabidopsis thaliana columbia
atatctaaggacccaaccactaaagcctctgctattgggtcgctctcatcctcgtcgtacttctccttttccatctccttctcattctcctacgccttctcattctccttctttaatccgctgatctatgtagtgcctatgctactcgttgcatgagaactgccatgtatatgtggcttccttaaactttgccgtatcgccacagagtttattacagttcttcagcctcatattgcttttccatgctagaactttatcactatatgccattgcatcagacttaccatcaatactcgtctcaaagccttattgctcatcttggacatgaa

SEQ ID NO: 23617 - DNA, 503 bp, Arabidopsis thaliana columbia
acttaactcatattgctgtttaaacattacattgcctctgaaaaaaaaatgtctgtagaaatcgtttattgagaaggtaattgcggaaaacccgggattgccctgtttctgcattggccactcaacaggacgagccatcatcttaaaggttacaagatttttaaacatgtgcatatcattgctcttgaaacaatatgttgactatataaactatttttgcaggctatgctagctgcgaagacagttgctcgagtttcagggattgtgctaacttcacccgcagttggagtccaaccaacttatcctatcttcggcgtaagaaacctgaaaaacctcaagaatctgaacaattttcacaaacattttgtggcttttgtcttgaaaattagagctttttcaacaggtaattgcaccattcctctcgttcctcataccgagatatcagttaagtgctgcgaacacgaaaataatgccggtttctcgtgacccggaagctctattgg

SEQ ID NO: 23618 - DNA, 606 bp, Arabidopsis thaliana columbia
  unsure (1)..(606): unsure at all n locations
nnnnnnnnnnnnnnnnnnnnnctaaagatctcgcgcgcagatttcagttccgccagcatctctttcacaccgtccaaagtatccacgaaagtcgcagctgtcgtctcaaagggcagatagtcaatcgggggcgatacggtatagacggagcttgggtactttcacacggatctcgtctcgtacggattacgagaccgtgagcgcgtcaattgaaggtgtcagcgactgctccaacggctctatagcatgcggtttcgtcttcagcagaggtctgaaaggcgacgtatccgtaggatcgacttgatgttcaaattggagctgaggcttagggatttttgacgggccatagtcgtagattgtcgggaaattctgcgccctcctcatattcgaagccgcagcacccctcgcctctgcatccttatcctgcgacggactcaatttcttgataacgcctgtgaattcatccaaacacgcgtccgctttttctaaaagcgcatctatcacatccacaatgcccctccaattgtcctcaatcgaatcctcgtccgagagtaccggcgcggaaatatcggtgccagcagtagctgcctttagaagcgacgatgt

SEQ ID NO: 23619 - DNA, 601 bp, Arabidopsis thaliana columbia
  unsure (1)..(601): unsure at all n locations
nnnnnnnnnnnnnnnnnnnnnctaaagggacttagaatatctgcgtgatttctggatgaggccactacgttctgccagcaactcccccattcccgagcacagacgggagaagttcatacggactgtatttggcaactgcttagatgttctcaaagtcaatggcgcactctctgaggctctcaatgcaaggcaaaaggaaagtcatattgtgaagacggtcggtgacatcttcttgcaacatgtgccgcgtttcgatccgttcattaaatatggcgcaaatcagctctacggcagatacgaatttgagaaggagaagtcttcgaatccagctttcgcaaagtttgtggaagagactgaacggctgaaagagtcccggaaactggagctgaacggttacctgactaaaccaactacacgtctggctcggtatcctctactgctagaacaggtcggcaaaaacactgcggaggggagtgcggataaagaagatatcccgcatgcgatcaggattatcaaggatttcttgtcccgtgtcaatgccgagagtggaagggccgagaacacttcaacctggtgtctctcaattcctcgttgaaatttg

SEQ ID NO: 23620 - DNA, 568 bp, Arabidopsis thaliana columbia
gctattgatagacatttgaaagatgacacaacaattcattggtcagctcacaacgttcaagtaataggaaaaggagagaaaggtaaagataaagacaccgtggaaagcgaagtgtatcatttagaaaagagagaagcttcttcagagagagacacagagcatgactttgctgaagaagaagtcgactcgaaagcagaaggtagtgagaactttgatcagttaagtaatggtttgtctttagcagaacaaacagaagatgtggtctcaaaggaccaacaacagaaaaagaagaagcctttgcttcggaagtttggaaatttactgaaaaagaagagcagtagccagaaatagaggtagatgtgatgttttactacaatctctgttgcaactgaacattccaaattcaatgaaaggtctttgatctaactgactgatttttatatataacaaacaaagagatagccattgttaaagcttacaaagcataacatagaaacaacctaaaagaagtaataacaccaagagtcctgacatgatagagatagagagcaccatgcagagaaagaga

SEQ ID NO: 23621 - DNA, 585 bp, Arabidopsis thaliana columbia
ttattgagactctctctttattttgcttagttagtagagaaattgtctgttaaagctcctgatggtccaacaaagatcaaaattttgacggagattgctacgcagcataatgtaacttgggaagcagagtctttggttgaatcagatccaaaggaaaccatgtcggcggttagtaatacattttcagctaaatattactttcactcgtctctttctctagtatacgtttcctcattagcagtttcaatttctttgagcagagtggagcaagttcatctgtgtctcagccagcaactggaataaagtcggagtcttcaagaatccagaacaatcaacctccagtatttcaagctgcagctactgtcaatgtgtcgcagaattcatatgcaactgatgggagatcttcaagccgcatgacatctactgatttcaacgttgggaagaccctgatcactatcatcaagaccaaaaccttctggttagtttttctataagaagcgttttccgttggatgtttgttggtgttgagtgttagaaaaaactaatcgtcttttttaatacaggagatagagttgacggtagaga

SEQ ID NO: 23622 - DNA, 571 bp, Arabidopsis thaliana columbia
atcccctaaatcccctttttcgcgtactaatgatcatgaatacaggctcggcctcttatggctcgcgcgctagaagatggaaactttaatgagctcgcagatgcgaggcttgaaggcaactacaacccgcaagaaatggctcgaatggtgacttgtgccgctgctagcattcgtcattcggggcgtaaacgtccaaagatgagccaggtgaatcaaaattataactaaaagtctatttttgtcagagaataacaaacaaatgttgtggttttcagatagtaagagcgttagaaggagaagtgtccttagatgctttaaacgaaggtgtgaagccaggacacagtaacgtttacgggtcattgggagcaagctcggattatagtcagacatcttacaatgcagacatgaagaaattcagacagatagctttgtcgagccaagaattcccagtcagtgactgtgaaggaacatctagtaatgattctagagatatgggaactaagagccctactcctccaaaatgagatcgaatcaatgattctgtaaagaagagattttggggctctgagag

SEQ ID NO: 23623 - DNA, 459 bp, Arabidopsis thaliana
tttcttcaccctccaaggcgttgagttgaaaatgtcaagtgcttaccatcctcaaagtgatggccaaacggaggtggttaatcgttgtttggagaactacttacgctgtatgtgtcacgctaggccggagcagtggagtaaatggctagcgcttgctgagtattggtacaataccaattaccacacctctagcaaaatgacaccttttgaggtggtctatggccaaccaccaccagttcacttaccttacttgccaggggaatctaaggttgctgtggttgcacgttctttgcaggagcgtgagaatatggtcttgttccttaaatttcacctcatgcgtgctcaacatcgtatgaagcaaatggctgatcaacacaggactgagagggagtttgatgtgggtgactatgtgtttgtgaagctgcagctctacaggcagaattctatggtgttgcgtag

SEQ ID NO: 23624 - DNA, 515 bp, Arabidopsis thaliana columbia
ttttaagttgagtaagattgaaaaacggagagggcagagctgtattagccagagcgaagaaagcttctacactgtctctcctccccaacggaaccggccaccatggacctcccgactatataaaacatagacttttaattgataacattttcgattagtttaataaaagatacgtcatgtatgtatatttatataccaaaagcactgatatttgagaggcgatggtgagaatatctgcacaagagactcttcctgggcaagctctctcaagggctactttcattctatctatgacattaaaccctcgagccgaatttgcgttcggagcagcatctttctcagtccggaatgatgtggaattgtcaagcaagatcgatgcatcacaaccctacaaaaaccatatattttacattaaaaaaaaaaaaggcttttagcaaattctatatgtaaatggtatataaagtagttttgtccattgaacacgttctgaattttttactaataaaagataagtt

SEQ ID NO: 23625 - DNA, 526 bp, Arabidopsis thaliana columbia
tggttttgtcgatgatggatggtctccaatgagtagtgatggaggagaggatattacgatcatgattaactcttcctctgctaaatttgctggctcccaatacggtagctcatttcttccaagttttggaagtggtgtcctctgtgccaaagcttctatgctgttgcaggtgcctatatcatgttttgacacttgtgaatagacaaaagaaccggtttcttcaatttctgacatcattctcttttttatctgctcttgaagaatgttccaccccttgtattgattcggttcctgagagaacaccgagctgaatgggcagactatggtgtcgatgcctattctgctgcatctctcagagcaactccatatgctgttccatgcgtcagaaccggtgggttcccgagtaaccaagtcattcttcctctcgcacagacactcgaacatgaagaggtacaaagaatctcaagaacattttccttgttgtctattcttttgccatgcctataatcctattttgcttacttgt

SEQ ID NO: 23626 - DNA, 544 bp, Arabidopsis thaliana columbia
gtatgtgatttaacaatggaacatagactgttaccatagagagtctcaatgcttggaacacagactgttaacagatgaataatggggctcttaaatttatatttcggattgcagaactctaatttgaagaaactttgcaagagattttagaattgatgaagaaaaaaagccaaaaatcagatttactaaacaataatcgtaaaatcaaaattcactgaaacaaggtttgtgtcagaacaatagaggagtctttctcaaagcaaacacaaaaataacgtaaataagcttttggtgaacaaaagatcacttgatcttcttctttggcctcaactgcaaaaataaacagaaaatcacacttaacaactaacaaatcaaacaaattctgtggaattttaaaatctaaagagacaaaaaaccaaacctggttgctatggccacacttcttcttcctgcagttcacagctcttgggtggagacgagcataacacgtaaaccaacaaggttacaactcaaacatgagacacagttttacacaaccatagtg

SEQ ID NO: 23627 - DNA, 1028 bp, Arabidopsis thaliana
tttttttatatatgaattgtagatattttgaatatatatagcagaaagcaatacaagaataaaagttcatgggtttgattgggaaaagctttacaaagctgtacactttgtcaaaagcgttacaaacagtttactctcaacttttttgtacagttttctcctacaactttttcatagagctttgcactatttcggtaaaacttacagcaccagctaacagataaaaaacttgtacatcttttttgaataaaacgttattgcctctactgaaatgttttggtaccttcaagttccaagacttttgcctttttagtctttaatttaatctaattactctcactctctccaatatcaatcataggcacaacaaaaattttctttaaaaaaaaaaagcaaagacatgtgttgacttcaaacgtttcatccacaatttgattttgaacattcaaatgcaaaacccaaatcaacttagttaaatagttttctagactcaaatcttgaccacttaatcactaatcattagtctaatcatgactcaaatcaactttgtagctttgactcaaattttgaccacttagtcttctttaatttaactaaaattctgaccattaacatatcacaacaaagaagtatagagatacatacccgagcagagacgcattcagctaaagccgtaggaacagtatacataagactagtagtctgaatcaaaattccagtggcagccacaacaagcttaggattctccaagtatccacccatcacaatcacaatctcataccaccaccactccaaacatatccccaaacaactccaacatagatgacaattgagccaccaccgtagtagtcccaccatcaccatcaccactcactctcttccgcaacatcccactcatccaaacataaccaaccaaaagcacaaccatgatcaaattcgtcacaacagatgcaatagccacaccaagaacaccccaatgcttcaccatcacaagccaataattcaacggcacatggaacaccatagct

SEQ ID NO: 23628 - DNA, 440 bp, Arabidopsis thaliana columbia
gtccttcgtttgaggagaagaacgacggattcagatgagcgaaagaaccacttggaatcggaccgattagctgattatacgaaacgttgaaggttgtgatcgtcttagagcttccgaaatcggaagggattgttccggttaagagattatgagaaagatctacgtcggcgattgacggaagagttgaaatctcccatggaatgattccgttgagatgattttggctgagattcaaacagagaagcttctcgcaatgtccgatgtcccatggaatcgttccgttgagtgagtttccttgtagttcaatcctgtagaagcttttgcatccaacgtaatttgggatttcaccgatcaaattgctgaaactcgctgagaagatctgaagatcgggcgttccatatgttttcgggtagtttcctgtggaaagaaatggttgagag

SEQ ID NO: 23629 - DNA, 333 bp, Arabidopsis thaliana columbia
tatggtaggagcgagatgctgctctggctcaaggcaaagttcctccacctctaagtggaagttctgatctccgagctttaaacgtggaggatttcagagacgcacataagtgggtaagattcgcttatgctgtttgtcttttcttctcttcttgtttcatatcgttttgggcttagtaaactgtaaccattgtcattggtgttgaatcaggtgtctgcgagcgtctcatcagagtctgcgactatgacagcgcttcaacaatggaacaaactccacggggaaggtggatccggatagcagcaatcattcagcttctacacgtaggagtaggat

SEQ ID NO: 23630 - DNA, 744 bp, Arabidopsis thaliana
cgacacggcttttcaggctttgcagccaagctcactgagtcccaagcacagcaaatttctggtacttttagcgttgaactctgtttcttgatttgacctaaaccaagaagttgttttttttaaaaacaaatcaatgccctttcttgaaaacagaactgcctgaagtagtacaagtcataccaaatacattatacgaaatgacaacaacaagaacttgggattacttaggtgtatctccgggaaattcagatagtctcctacaaaaggccaatatggggtacaatgtaatcgttggagtcatcgactcaggtatgtgcatatcgaaaatatgtttgattctctttaagacatgattactaatagaaaacataaaatgtggttacaggagtgtggccagagtctgaaatgtttaatgacaaaggctttggacctataccaagtcgttggaaaggcggctgtgaatctggagaactcttcaacgcctcgattcattgcaacagaaagctgataggagcaaaatactttgttgatggtcttgttgccgaatttggagtcgtgaacagaactcagaaccctgagtatctttccccagagactttgccggtcatggacacatgtcgctcgaccattggtggttctttctgcctaatgtaactacgtagcctcggacgagaactcaagaggcggtctccggtgtcatatactgttataagcatctggagtggtatgtttggactgatgtat

SEQ ID NO: 23631 - DNA, 744 bp, Arabidopsis thaliana
tcaaatgatcaatcacatgcgattcttgatttcatcgaagccatatgggcagaacttgtagcagacatcgccacttaagatctgttaccctgctatggaaggtgaagaatggcgaattataaccggaagtgatccaaagaatacgtaatttctctctcccacatgatctttgaatagatgtcttaaagttttcactattgtatttccaccatcccaattatcactttaagcatcttgattatgttgcagtccttggtcttatcacaatggaggtgcatggccaactctgctatggcaggttagttcagatttctctctttccctttttggttctccggtttttttccttgtttctgagatttacatctgaactagaactgaaattttgacatattggattgcacaacgagataatcggtttggttttatcaatgagaattgcaaagctgcatttgtgctaatttaaaatctgagtcccatgttgttttttcagctgacagttgcaagcatcaaaatgggtagaccagagattgcagaaaaggcggttgagttagccgagagacggatttccttagacaaatggcccgagtactacgataccaaaagagcaagattcatcggtaaacaggcacggctataccagacttggtccatcgcaggttacctagtggccaagctcctcttagcaaatccagctgcagcataagtcctcactagtgaagaggattcggatttgagaaacgc

SEQ ID NO: 23632 - DNA, 577 bp, Arabidopsis thaliana columbia
atagtcttaaaggagggctaggagaattcatttgggaattatggattggtttaggatcttggtttgtgcattggtcgagagtcaagagacttttctcctgaactatcagataacttaaggttactcacataacatgctttgtattcttttcacaggatgagtcgcaggattacatcaagaggcagcagttgcgagagtaagcgttgctgaattcaaacttgagagaaaacagcccaggaccaagcggtagtgtctcacctttcaattcaaatgctatgagacgcccgaagacagggcgttaagagcttgagagatcgtagataaacattatgtgcatatgtgtataactggcctaatggtgttggttgagtctgctcttggttctgctgcttaccctctgatccacacactgatgcttatacacaaagcactaagagaacagtttcctccttgaccggggtttgatgcattgtaatcatcaaagatattagataatttggatttattcatgtgttgaagtagttgtattcttgacattggaatggagatctagttacatgtatatgtggacagatag

SEQ ID NO: 23633 - DNA, 1329 bp, Arabidopsis thaliana
cttcattagctgacagatgtatattagtctcttcaacgagatttactcatttagctacaagttcttattctgtgttattttattttttttaattattctttgtggttatttctatgtagaaagaatcggacatggaagaagcagttgtaacgaggtattggtgtcatatgtgttctcaaactgtgaatccagtcatggaagctgagatcaaatgtccctttgtgtcaaagtgggtttgttgaagaaatggaagatgacgacgatcatgattcttctgatccggctgatgttagagcaaacaactctctttgggcgcctatcttgatggaacttatgaatgatcctgtgcgtcgtaggagaaaccagagtgttgagtctgttgaagataatcaaaacgaggtacagaccgagaacaatgaagacgatggagaaaatgatttggattggcagcttcaagagattctcaggagaaggagaagacattccgctgctgttttgcagttgcttcaggggatacgagcagggttgtctgtagaatctgagagtactggtaatggaggtaataatccgggacgggtgatcttgatcaatacctccaatcagactatcacggttcaaaactctgctgatatggattctgtacctgctggttctttaggtgactatttcattggtcctggatttgaaatgttgcttcaacgtctagctgagaatgatccaacagatatggacacctcctgctaaaaaagaagctgtcgaggctttggctactgtgaaaatcgaagagactctgcaatgttcggtttgtttagatgattttgagattggaactgaggcaaagctgatgccctgtacgcacaagtttcatagtgactgcttgttaccatggcttgagcttcacagttcatgcccggtttgcagatatcagttacctgcagatgaagccaagactgattcagtaacaacaacgagcgataacaatggaagcagtagtgcttctgctacaaccagccatggagctgagaacagcgatggaaaccggcgccaagaagaagaagaagaagaagaagaggaggaggaggaggagaacgagaacaatgacggaagcggattctcgatcccgtggccgtttagcaccttgttctcctcgtcgcaagatagcaatgcaccaacggattctagttaagacatgttccctgagcaacataagctttttggtgtgatcatgaaatctcggttctacctaaatctgatcttttgtctgtacataagtttctcagatttggttgaatgctacatctttggaaaacaaatatctttcagtttgtg

SEQ ID NO: 23634 - DNA, 590 bp, Arabidopsis thaliana columbia
ggtaaggattgtaataatgtctgatccataatacttctctctgaacactgtcagtacagagaaacctggaaggatctctacaaatttaatttcggaagctgtatccaaccgctgatggcttgagatgccatagtggaaacagacactcaaaagacagagtactagacatgatgcaagagcattagctagatcaaacagcttccacaatcacaaagaatttttttttgaaaaatgttaactagcatagaaatgtatctagtaaaggtcacggattcagatacctgtgtctatgactgtcgcgtctcctgtctctgtctctttctctttctctttcaggactcttacggcgctgatcctgtaaaagaggaggaagatggtatcatcttagagctgctagatagaaacagaaaacagatcacataaaaactattgcagaatgaaagcactgaccatctcatcttcagatccatcagcaatcccttcattctcctccttttcttcctcttcttcaaagtcgtcttccaaaacacttttccttggctctaataaccattctgttcaagcgtccactatcatcagagtgaaaaatt

SEQ ID NO: 23635 - DNA, 176 bp, Arabidopsis thaliana columbia
gattacttctgactgtctttgtctcaggtgtgtgctcttctttctggaggaggttatgcagagaaagtttctgttcctgctggacaaattttcccaattcccgctggtatctctctaaaggatgcagcggctttccctgaagtggcatgcactgtttggtctactgtcttcatgat

SEQ ID NO: 23636 - DNA, 590 bp, Arabidopsis thaliana columbia
caactataaataagcaatcaaagcagcaaatgggaaaaccagcgttatgttttggtatgagaatcatgtcagcaacaaccaaacggtgtatatattaataactatcgagagaacacaaccagagttaggtaggccttgttagattttcacaccaaaccctggcactatatatagacccatctagtatccaaagcataatagagatacaaagaaacaagaaaacgaaaagaaaatatacagaaatgggtggtttgaagtttcatgtacttatgtatccatggttcgcaacaggccatatgaccccgttcctttttcttgccaacaaattggctgagaaaggtcatacggtcactttcttgcttcccaagaaatctctgaaacagttggaacatttcaatctgtttccacacaacattgtctttcgctctgtcaccgtccctcatgtggatggtctccccgttggcacagagacagcctctgagatccctgtgacatcaactgatctcttgatgtctgctatggatctcacacgtgatcaagttgaagctgtggtccgagccgttgaaccggacctgatcttctttgacttt

SEQ ID NO: 23637 - DNA, 452 bp, Arabidopsis thaliana columbia
cggcccaaaagcggcccgtggcatgtgtaaagtctcggttagaatcaaaggaggaaccggaatgcttccttctatcgctcagccggttcggatcattaacccgccgcgaaagaaaccctttcaaatgtgcgtttgcaccatgacccgaaacgcagccgcggttttgagagagtgggtgatgtatcacgccggaattggcgttcaacggtggttcatctatgacaacaacagcgacgacgatatcatcgccgagatcgagaatctcgaaagacgtggttacaacatctctagacatttctggccgtggattaaaactcaggaagccggattctctaattgcgcgatccgtgcaaagagcgattgcgattggattgagtttatcgacgtcgacgagttcttctacatcccatccggtgaaactctaacttccgtcatcagaaattacacaacca

SEQ ID NO: 23638 - DNA, 873 bp, Arabidopsis thaliana
ggtgcaagtaagctaagcatttcgctgtaccaaggataatgttgaaccgatcattccaagaaagcgaactattacctcctggtgcttcgtgcaactgtttgtataaactcccaccagagagaaactcatagatcagaagctggagagaagttgtccagtaatatccttcgagtttaaccagattcgaatgcctgagttttccaagtttcttcacctctctttcgaattcgtcctgagacttgacaagactcgagacagtgagcttcttgatagctacaggatacccatctctgataactgttctgtacaccgctccaaatccacctcgaccaagctcacagtctttgttaagcagagcatgtgttccagtgctgaaatcaggttcaccagagaacatcaccagcttccctgagttgctatcagtagtgggagatcgactgaagtcatctccgcctgagaacgtgagcggtactgctgatcttgaaaccgttgatgcgcgcactctcagattaagtaccgtgatggctattacaccaaccacaatggctgcagcagcactaatggctatcaaagaagatatactaagcagtatccttttgtgaccagcacctggaggcactatttcaccattgtaaggatcgaaagttgcattaggattcaacacaatcggtttaggggagatggcaggacaagacttattgacaacagcaccgcgaattcccgggtttcctgatactgaacttggggataaccagttgaagattccactgcaggtagtccccaaagagatggttatgagatatgttgaatgtgtgaagatagctgagattagccaactgtttaggaagtgttcggcctagtcattaaatgata

SEQ ID NO: 23639 - DNA, 613 bp, Arabidopsis thaliana
gtgatcgaccatgtgactcgttcacagtcacataacccgaaaactgtgagaatcctacttgcggttgccctggaagtgccttgatcatgtcctcctcttgctctcttaatgatgatgatgatgatgatgtcgatgaaatcactagtagtataatgattaagtggattcttgccatttctctgtctttcactatagtctctgctttttcttcaatgggttggaatggaggaggatgtgttggtaccactaataaatttacttttatatatatgcatgtaagaaagatatcggtttcttttacacaatgtggaccctctcttttgacaattgatcgcatgataacttttaaaactttgttagtcgtatgttctctcttaattttacggtcaaagctaccattagatgcttcgggtagaccaattgtagctttgacagtaaaattaattgtcagaagccatcatagaccacatttagggatttgctgattgaaatgaaagattatgaaaaaaaaaaatattggcctaaagaagtcctaaagaaccctaaagaaatcaaggactctgttttccctttttgtaagggttttgaattttgtttcttaaaaaagaggatc

SEQ ID NO: 23640 - DNA, 531 bp, Arabidopsis thaliana
ctgcttcagcgacttttccatgttaaagaatcattctttagtcgtaaactcagagtaagcatgattgagtctttctttaagatttaacttcaacttcaaataatttggcctgatcctctattttactcatacgtgtgtatgactcgatagttatctgaacattagtctggggttcttacacttctcctgacaatcaaaacacaaaagacttacaaatgaaatttataaattatcaatactgacacattaggactactaatctcatataaaagcagagatcctgattctccagagaagctataggacatagaacaaacaagagttgactcatttccaacaaccggtttcacagtcgtggctttgtccaagacttgctcttccatggccaatctttttggtagttttagcttcatttttttggtatatatatatatatagactagtttcggtttcgaattttacagttggatttaggtgaactatattggttggaactcctcttaaattgatatataggattacatgttttca

SEQ ID NO: 23641 - DNA, 740 bp, Arabidopsis thaliana
taatgatagagctctcagtatacatcaaactagacccaaaaaaacatttaatatacttatatacatgtatcattttcatgatgaaacaaatttgaatgtatgctgaaaaatgttatcaagtaaggatgtaatcttttgccaaaaatagtaaggatataaaatgtatcactgaaatgaatcaaaacgatattggcacaatggtttaagaaaaataaaagtcttattaaagtagacgagctcttagtgggccgattagaattggaaaaaggcccaatcattgtctcgagtagaagtgattgtgaatctgaaatttgctttcttctcacagagaaccctaaaaccatttccgcggcggcgtttctcggaatcaatggcgagtctccgaagagtcctgctcaacgtaacttcctattgccaacgttctctcactcaatcgtcgtattctacgtcggggatgttatcccgatcggtggtcaagcatgcgaacaatctcggtcaaattcaagctagacatttcacgacaacgcttatgaaatcgggaccaaagcatagtggtacagagcaaggcgtgaagcgaaacagtgcagatcacagacgtagattgctcgcggctagatttgaactgagaagaaagctatacaaagcgttttgcaaagatccagatcttcccagcgaaatgcgagacaagaatcgttataagctctcgaaattgccgagaaacagtgcctttgcgagaatca

SEQ ID NO: 23642 - DNA, 581 bp, Arabidopsis thaliana
gcttcaaggtggccataacctccaccaatccatgcaccggtccagagacagcaacagttgctgaaactttataaagactacaaggttttactctgtttgtgatgtcttgctccaagccttgccaagtttctttcctgttcttgacaactacatagctaccacactttgacgggtctaaaacaccgtgagagacattagactcagcggtgacaacaaaggcctcacagcaattcggatgccacgaatgcatcccggaagagaagtcatgattcacaattacattggtgcgatcagaaccaattatagatgctacattgttgttgttctgtttttcaggctgttcaagaaatgattaaacagagaaaggtaagactaaaagattcaaaagtttaacttagaaatgaagaaagtgtctgaaaagatgaacaagacttggcaacgaagaaaggaacatatccaaaccctaacctcttcattgtcttttcttgaaacctccatgctttctcttgatttctacataacatacccaaaaggagaatcagcccagatcaaacaagagaaattggctaatgggtacagag

SEQ ID NO: 23643 - DNA, 523 bp, Arabidopsis thaliana
cacaagtatcaacaagaaaataatctcgaggaaatagagttccaagtttttttcaacgattcttcaaacaacgatttcaacactctcttcaagacacttcctccagctagaaaatattttgcaactggagttccagcctctttctttggacgtgttcttcctaggagcagtctccatgtcggagtttcttcttactcactccatttcttatccaagattcccaagaaaattaaagactgcgattctcatgcgtggaacaaggacatacactgcaccggattctcaaaagaagttgtgagagcatatcttgatcaatacaagatcgacatggagagtttcttgactgctagagctcaagagctcgtctccggtggattgctctttcttcttggatcatgtctaccaaatggagttcaaatgtcagaaacattgaatggaatgatgatagattgcattggatcttctcttaatgacatagctaaacaggtaaaataataaacaacttccatatgatattatgagt

SEQ ID NO: 23644 - DNA, 578 bp, Arabidopsis thaliana
gttagattctgggttcgtttatgttttcttccttcttttgaggcgttgcgtatcatcttgttttccgattgtaatttgaaaatttcaaggtaattctataggttacttgacttgtagggttcataaacgaagtttgggatgatttttctcttataaagaatcaaagatgccatttttaagtttatatcatcagttcaagtgttgtaatttaggaagctgaagtctcttctatctcttgttttgcgttgtgacagaggtgaaaaaggtacggtggtgttatctttaataagtagcattgtaaaaggagatgaatttgggagcttggggtcagagattcatccaagcagcagcttcttctgaatcggaggattctgctttggatttggagagaaatcatcactgcaatcacttgagtcttccatcatcttcaagtccatctcctcttcagccattcacactcaacatccaacatgctgagagcaatgcccttacttctcctggcctacgctcagcaggcttaacgacactgttgaagaccgagctaactactttggtaatcccagaaaggggttttacag

SEQ ID NO: 23645 - DNA, 486 bp, Arabidopsis thaliana
ttttcttgagaaaatctcaaggactatctgttcttagctcgagttcgagtagtacccacttttcgaattctcagttacatggactctgcgcgaatgggaagctggaggaagctatgaagcttctcaattctatgcaggagttgcgggttgcggtagacgaagatgtgtttgtggctttggttaggctgtgcgagtggaagagagcacaggaggaaggttctaaggtttattctattgctctcagttccatgagcagtcttggtgttgaactcggtaacgcgtttctcgctatgtttgtgaggtttggtaatttggttgatgcctggtatgttttggtaaaatgtctgagagaaagttgttttcttggaatgtgttggttggtggctatgcaaagcaaggctatttcgatgaggctatgtgtttgtatcatagaatgttgtgggttggtggtgtgaacctgatgtctatacgttcccctgtgtgttg

SEQ ID NO: 23646 - DNA, 2939 bp, Arabidopsis thaliana
tggatagtttcaaatacttaaaaacacatgtagtgatccgggtacgctgactctcattattagagcagttaacccatacccaaacctgaactttctttcaagccctatatcacttgtgagagtttgtgaggtcttatttcgattgagtttggtagaaagtgttaggttcgtaacgacagagatagtgtctcatgtagttctagttcgcgttcttcggactggataggactaggtgggcgcttatatcatgggttgggatgtgtttaaaagaaaagagggaattcattgttgatgaggaaagggaaagaattctaggggaagtaagctaaagaagttagaaaaaaaatctagtaaaggttttgggaatgttaaagaaaagaatgaggttcttgttagctaaagaagaagggttaaaagcctttggttttaaaaaaaaaaaaaaaaacaggaaccttagttgttaaagaaatccaaacccgctagatgtatcagagcgttgagaaagcttctcctagagttaagagaaaagaaaagaatgatatgaaaaagagtttgaaagattcatgagtgcaaagggtagagttaagttgggacaggagttgggattaccattagagcttcattgttatactctgggtagatgggatcttatctctgtatgcataacttgggacttacctttagcattctactaaagctcaatcattcttgagggatcccctgttacttaagcctattctgtaagggaccatctttgtctcttgaccttcaccttagccaaatgagttcattgatgatgcattgcttgattcacgttccagaactaatgaatgttaaagggattggtagatttgaaaacatgtgtaggtcgagtataagagacggatttattgataacaaggcatggctaacgtttttgagtggaattcaatcatatcgcatcttagaactaccaacttggacattgattttatttgctctatcatatgctttggttctgagtccccgccttcactcctctccttcaactatgtcttcttatttgcttgagggcaagcaaagactaagtttgggggagttgatatgtctataatttgcatgttttcagtgtctattcatcatcactttgagtctagtttcgtatcattcatcactgttttatatcatttctcatcattcttgcacactttgcatgattaggatagctttgcatacatattgcatttctgagttgttttcaggtgatttggagctgtttgcgagcaaattggaagaaacgagccagaaccagaagacatactcgacccccaggccgagtgactttggagccattcttcccacatactcgacccccaggtcgagtgactttggagccattcttcccgtccactcgaccaccaggtcgagtaacctcagctcaggccactcgacgacattactcgacccccggtcgagtaccgcttcgccacaccacctgaccacactcgaccattcactctaccacgttactcgaccccctggtcgagtatcatcactcaccaccatcaccatcactcgaccggacactcgatcacgtcttcacagtctactcaaatccgcactcaaccagacaagctgagcacaaggaagaaaagaggagaagacaaagtgtttggaagcggcctggacctccatcggatcacgaagcccatctcggcccattatcactctatgggccgggcgattaggttattggcccgtctactatcattttatttcgtttggtataaatagatgttttagggttctgtcctaaaacatctagtcgacattgcgtttttgcttcagttttattttcagttttactctgctacgccgcttttgcttctgcaacctgtagttcgcgatttttccaagttattgagattccgcgtttgatttcattagtcatcttgtttctctactctttatctctttacttatgcaatattatcgtttacctgcgtttatgtctttgagcatgctgtctgagtagtgacttagaattcttagggatgggatagagtagttgtggaatccgtagtctgtagaatggttaagttttagaattgattgaatccctttaggactagttgcgtttactgcttatttctttctgatcaactggaattcgatcccaagcattcccgcacccagaaggtgttcgatggaatgcttgatccactagttcctgagatattcgtctctatcccaagggattggccgtttagagcgtttattgactttattagtctgttcttattgcctgaatagttagattccgttaatgggaatcagtctgggctagctttgcttgaggatttctatcacgagagtgaattgatctgttgttgaacttgttgtctagggatagcttgattgcgcttgttaaccattcgaataggctaggataccactttattcgattaccccatccttaggaatttctcgtttatctgatttctctgttttatcgttatcgcttaatcgttctcattgcctgtttcttcgtttttgcaattactcgaccaacttacttgaccacacatagtgtctgggaacagactgtgcagtcgagtacagttgtctcatttcctgtctgttactcgaccagtatactcgaccacacccagtgtctggcaacagactgtgcagtcgagtatatctgtttcatatcatgtctgttactcgacctgttactcgaccacatcccacttatggcatcagcctgttgtggtcgagtgattttagtaattctgttattgtttccgttttctgcatgttcgcttatgactgttagaaaccccaaaactgttatttcttggcttgacttagtgacttcttatcacatctcatctgtttgcatcacacccatttggattgacaccctaactactacaacgacatgatagtgctttagg

SEQ ID NO: 23647 - DNA, 659 bp, Arabidopsis thaliana
tagtaacgtccgccagtgtgctctaaagaaattttgcatatactttagagttggctccatctttagccgttttcttggctacgatattggcccatttacgtcccattaggaatctccttttttcacattttaatctttcttattataacacaagtttttttgattttcactagaggaaatggattttattagcaaatcaagctaggatagcactttacctgctaagatggtcttgcctttctatctttatcaacagacactcatccacattcaaaaaacaaactagaccattatctgcaaatagaaagtttcagccaagtttgacaaagtcagctcaaattactgtttgaagtttgtagatataagcgacaaaaacaatcatactgcaccttttgttgacagtctactccagacatatcatagttcaagtaaatactttgaaattcaacagttcttataggcgctattgtattctaagaaatcaatagaagagtttctaagcaaacctctaatactcaataaaaatcaaagagcaaactagaaagctagccgcagggttgctcaaaacactgttttgaggttgcggatagggctgacatggtttgaagagatttctaagagtataatttacgtgttcgtaagatggagaagttagctag

SEQ ID NO: 23648 - DNA, 3428 bp, Arabidopsis thaliana
ccaaatgcggggtaacactatcccgaggaaaaagattacttcaagatggtctgaagagatagattatccaccagaagagaaagaagcctatttcgaggaaagaagaattgagtattctgcaactcatctctcaagagaggatgctgaatatgatgatgagattagagaggactatgcagaccctctctatcacccattttcttcttaatgagtgtgaggagtcaagctagagactttaaacaagctcacttgggaggaattcccaagactgtttctgtaaataaaacttttattttctcgttatttttgatctgtttttggttgtgtttgtgattctcaggaacagagaaacagcgtggaggtagagtaaaaatttaaaatttttactctacagagcaacaggagatcgagtatttcagaaattcaagaatttgaaaaaacctctgttgcactcagaggccatgagttcgagtagtttggtcgagtattagtaatgattttaaaaactcaaaattttgaaatcatatttatactcgaccaacagaagctacaaagacttacagagagcttatcaaatttacagaggattacagaaggctctgagacattcctagacaacaataaacaatgcttcaggacaaacagacagagcgtggcccaccacctctcacttttgttccccaagcgtttctaaggataagaaaatcccagcactccatctcatccactcgatctaaccctatctctccccaccgacactatctctcttcctcacaaccctcactcgacctcatcctcacacgcacgaccaaacctcaccatatctcttcctcttcagtcactcgaccgcaccatcacactcgacctcaccgttcactcgatctcgcccctccggctttgtctccctccttcactctacctcgaaacaaccgtcgccgttcgcgccacctccttcactctctccttcactcgacgacggtactcgatttcgccatttcttccttctcaccgtcgcctccttaccactcgaccgcaactcgacctctccgtgcttcatcttcatcttcatttactcgacttcgccggagcttctcgccgttccagcttcgcatactctctcaccgtctctcgtttcactcgaccacttcacacttcgcctcaacatcttcgccggagtttctcgccattgtccgtgcttccgtcatctccgttcactcgaccaccggaccggcttcaccatctctcaactatccaccattcactcgacctcgccattcactgcgcctccattcgtctctttactcgactgctcctcaaaccgccaccgtcttctctaaattcgccgtttactcgaccgtttcactcgaccgcgtacttgactggtttagtgtgtgtgtttatttgaactaacatattgatatttggttttgagttacattctttttcagggaatcaatatgagtaactacagtggcgaatcctccatggatgcggattacaacgtcgatgaagctgaatcttggtcaactagaccagagagagagcaacaggcttatgagagcttcagagccgagacccaacgctcagtagctcgacgcaatgaaaggagagctgagattgctagaggaaagagagcgatgaccagcagatatgagttgatcgacgaagatattgacgtcgagtatgagcctgagtcatggcacagagaaacaaaactgttgaacaagcctgatgaagttacagtggaggagtacatcagacttttcgagctgaacgacttctggggaacgaggtacccctgttatgagactctagcccagcttgggctactggaggacgtacagcacttattcgagaagtgccatcttgagacgctgatgtcttacccgtacgtcgcttacaagaaggaaacaatagagtttctctccactctgcaagtggagttgtatcagggacttactgcagatgaactggagagtgaagggttggggttcttgactttttcagttaacgagcagcgttaccagctatctatcaagagcttggaaggattatttggttttcccagtggaaagggaactaaacccaagttcgaaagggaagagttgaaggatttgtggttaaccattgggaacgatttggcgctcaactctgcaaggtctaagagcaaccagattcgaagccctgtgatccgctactatcagcgctcagtagcgaatgttctgtaccccagggaatctacaggcaccgtgtctaacacagacatggagatgattgattctgcactcaagggtattctccggagaacaaaggggaagaaggtcctaaagggcgaccttaatgatacaccaccggtcatgcttctgttgatccatatgtgtggatacaggaagtgggcgcacaccaacgggaggaagaaggtgcgaggagccctttgtgtgggtggcgttgtgacaccgattctgattgcatgtggtgtacctctcacatctccagggtttgatccgaggatgatggatttagatcactagcgtcgttgtgagtttctggaatacgacatggttggcgatttttatcgctacaaattcgagaactccctgacccgaacagccaacattttgcttccctgcatcgaggccacaaccatacttcagggtgagaacattgacttcagacctgcgcgtgattatctctactttgagagcgctccaccgactgatgacaatgtccctatgacggaagctacagaggatgatattgctgagacggatgaggatagggaggaggagtatgatacgagcatgtatcatttcagtgagcacgtacctccagcgcgggagagcaagagcttgagtgaagctcatagaaacaacagtaagttgcagaggtggtgcaagaaacaagataggctacttatcaagtgcttcaaagccatcacgtttctgacggacaagataagctgcttctcttctactacagctattccgcagggagagcgtcctcaggacatgccttcgaggagatatgacgcgccagggccaagtcatcacaggcctgagccaagtcaccacaggcctgagcctagtgaccgagtagtcccaccagtccctgcgaggcattcatcattcgagcctctggagctcgggagaaagaagaaggctgcactcactcggtctggcagcaggagtacacgacttctccagtcccgtagttacgcgaccgcggtgctggccgcagcagaagaagagaggtcgagtatcatcacagcggtgctggccgcgacgaaggagcagaggtcgagtacccccagggggaagctgggacacaacagggagattcttcgatggcctgggagcaatcacagacagctattgatgaccaactccgctccttcttccactgaggtatcacctcactccaccattgat

SEQ ID NO: 23649 - DNA, 6777 bp, Arabidopsis thaliana
atttgtttaaattaaaagttactaatatgatgcactaaatatacatccacgtcacccacccacttacattgatggttattctcctctttaaaactcatgacaaacacacttagttgaatacacgaatccgtctaaacctcctcgtttgaaaaacaatgcctttcctacctccgctaacccttccaaccgagttgtacctaggaatccaattgccaaaccccataagcatacttgtcaactacctccccgtcagccagactacagttgtgacatcaacacccttgcaatcgatgaattcatgacgtggccgtcgttactccaaccggggtctcccttccggccatacttcgaggtgcttgtagaacgtggatccatcccggcggtttaccttgaaggtgttcgccaagcgagcaacttcgtgacagtagctcagggcctttcagtcatgacaacggtcgctttatctgatccctttgattgcttcgcaaccggtttgttccttacgtgtaccggtaatcacttggatttcctccctatcagcgaaaagttctgggaaatgacacccacccttgaagctggccacgtggttgcagagatggtgatgtatcacatcagccagcttcacactgaaaatgctcgccgctgggaaaggtcttggaggtttgtccacccgccgagttgcgtagggcaatgcacgttccatcatggctgcagggtttgttttttctactagtacgccagggagatggctatattctactagaagcaaagctgctaaggtctaagctactctactcggctctactctcgagtcttttggtatgacggatgcacacatattttgcaacacatgtgtatgcttcgtttaaaaaattatgttttttgaatcgttccagtttatttatcttatcttatgaatttccctttatataaactgcctgtccttttttatgtttctggcttttgaatgaattaccactttaagtattactagatgtcttcgtgtacgtacactatatagtacattaaacttcgtttatcgtacattgggaaattgcgtacacaacataagtataaatctaacagtttttgatgttgaaggcaccaaaactaatatacgtacacgatagcgtacaccagaaactatacgtacattgcgagaggatttgaacaataaaacaaggcacgtacataaaacaacaaattagattaaaatttaaacggaaacaagaaacaacaacgactgaaatgtaatttggttcttatggaaacaacaacaacaactgggaaagaaaacttaattgaaatgtagtcttatattatattaaaacggagaataatggttcattccctctagctaaaaaaccaccatcgagatatccgcaacttctgctctgtccggattggcaaccacctttgaaatagcaccatggctctcaagcttcgggttagacagttcggttagacgccaaaagctgagtgcgacaacaaaatttcctttacccaaactctaaaagtaaccatccaagtactccgcatgttgattgcgggcttcgcactccaagacttcattgctacgttagaaataaggactgttagcgtttagagtgacattgtaaataaaacaaatgaaaagaacacttactatctatcttttaacttgaaactcagtttgagaccgtaatagtctgtagtcaatgcgccaacatcaaccaacgctccaatgacatctagatgatggagaaacaaagataataaacaaacattttcaaaaatgtaataaatgaagcgtcagagttattcctcctcaccgactaaaacgttcttgtaagcagatttatccaaaatgtagtcgaagggagtgaaatcgaaatctggaactggtggtgatctcggtggggcatgaacgacgacgatctgatccataaacagtatgccgtattcatgctttgttgctctgactaagtcagttgacttacagaccaagaaagaggtgatcgtcttccactcattttcaacgaatcggtcttcgtaaaacggagcaaggcgacgatcaacggtggcctcaatacggttattctttacatacagaacatgatagtagagagtttaatatataagttaagcgaatgaacgagaaaaacacataatgatttaacggaaataacctcgtaatctgccaggataaggccgagttcgaagacgttgggcgatataaccttcttgaagaccctcacgacaaagacataaattcgccacccagtgatcagaggacacaattctgagaccgtatgaaacccctccatctcacggatagcaagaacaagcgattcgaaagactaaatttttttttgtgaatgatataactgccggcacaagaaatgggtttagaatgaggattgtggataaaattaaggaagggaggagacttaaatagaggaaatctggaacggctacagttattaatgcggctacaactacacttgattcaaatttttggtaatagcctggtaaccgtcatatagggtaatcataacgttgatttgacaataaacagcaacagttacgtcctttccattaaataccaacacaaccacaatatacccaaccatgtctccaactccgttcatttaagagggggaataagttagattttcaaaaaacttatttcaaattactcaaaatattgagcaaccacctctgtgtacccttattacatgaactttaacacgtacacagacaaaaacgttcatagttatacgaacgtagagtttaaacgtacgtacacaacgtacatagttacaggtggattatatataaacttacgtacaccgagaaaacacagaagcgtacactatattggccggctcagaaacttgtcaccggaactagattggatttttgcacgtcttcttgttatgacctgcttgtcgacagcgtgagcactgatttggtaaaagtcttttctgtctctttttctgaagtgacaaagacacaaagttacaaatctccgcatggtaatactcaaaatacaagtagatgaatgaacgatgttagtacatacccggttttcacctctagatgggatccttttggacagtggtcttcctggtggccgtctactgtatggaggaatgagtatcaaatccactatatgttgtgggatgacaacatctttcggatccgcgataggtagaattggttcttggaaagaatcagaaaacgtttgaaggccataccaccatccgacacaagacttcggatcaattccatgctcgattgcagctgctagagcgtgttcacatgggattcttaacttggtgtacctaagacacgtacacgtacactggtccagaacgacatgaaaatgctccccggatttacttgtcacttgatagctccacggtccagacatcttcacagcgtatttacctgacgcaggcaactcttgtagaaatctctcatcaacctcaggtgtcacagaagatttgcacctagcaactttcttcctcctcgatgcgaaccatcgcattaggacatcccgaatgaactcgatcatgtaaacaatcggataagtttttgcttttgttaacacatgattcatggactcagagttgttgctagacatgatattgtagcgttctcctctacagtgagctcttgtccaatgctcaaatcctatgtcctctaggtattttgcgcatttaccactcttttcccttaacagttcaaaatatttctcgaaatccctgaccctataagctttggcagcgctgaaaaataaagcagacacaccaaacttaccatagtaggtggagaggtttcgctcaaggtgaacagcacatgctccatgatgcgctctcgggtaaacaacacttaggcctttgtataaagatgaatgtctgtccgagacaatcattaaatcgtcactgtctggaacaatctcagctaacttttcaaaaaaccatgcccaagaagcatcggtctcaccatcaacaacaccaaaagctattgggaatatttggaagttcccatcttgggcacatgcaataagaagacatcctttgtaaggtccgactagctgcgttccatctaccacaactaccttcctcatatatatcagacctttgatagaagcgccaagagagacaaagacatacttgaagcgctgcttaccatcatcttctggggtatagtgtaggtgtgttattgtacccggattagctaattggagaagatacagataggtcggcaaaaacctgtaatttgctatctcatccccccgtacattttccactgcaacctcttttgctctccaagcggtagaatatgaaatacgcacattcagatcatttaggagcagctgtggtaagtcgacagctcgcggcccaccctgcgtagaactgtatatgctcctcacaacttctccgaggagcttataattagcatgtttattgtagttcttccgagagtcgatgttacacgtatgtgtcgtagcatacgaagtgattttgaaactttctgaatccttcacgacgcgagcagtcaattgccatggacaagtctcatcaacgcacaccatcttcaatgttttaggacatgacttaggttgcttgaagcaaaagcattgctttatcgcttgaagagacattgtttgttgcaggacttttctattcttaaaaacacttccaacaaacaaagtttcgcctgtggtgctgatttcaacctgtgtctcatcagctcaaaaattgagtaagtcatcgaacacaggagcagcatcgttaccgagattcgccaactcgccaccatgtaacttaggaaattcattatacacttggtaagcctcagctgcggtaactaccccattatcattttgtgtcccagttgaggaagctccaataccttcgatcacttcatccctggtgacttcgtctatacaaataagattggaatccctttgcccttcgcagcgtgtaccgtaacccaatggagagattgtttcttcgccaggtacactaagaccagtgtacgtacacgtttccaagagacgactgaattcccctgtatctccgctaggtacactaacacccgtgtacgtacacgtttccaataaacgactgaatttccctggatgttgagcagtctgttgagtgagactgacgtcttcctcaagatttccttgtacatattcttctactattacatcgttccacttgttgtaatcgtatttttcgccaataccttcactaccgtctgtggtaggatacagggtacttcccccaatagatccatccacaccaagataatcatcacacccatcatcatcttcgttgccctcctccacttcatcctcttctgttgtatcgtcttcaacatcggcttgctcctctgcatcctcattattttcatcaacatttgtagcactatcaaacacacggtcactttcagaaacttcaccatgagacctagagacagtattcccgaacgccttcactgtattattgaaagagacgaacaagttgagagaaagatacccaccacgaaccaaaaaaaaacgtttcgagacccatctgactgtcaatgtatacaggagggtgtttagtatctatcagcactgacatttctcccagcatccagtagctaattatgggattgatctcggtggacttcaaactgaaagcctctcggagtgtacgacaaagtccgtgtacgtcatggtttcctgaacgcgtacacaacgaccaaagatgccttccttaggttcaaatttccattctccttctttgcatttccactcaccgaccatagtaaatacgggaatatccataacccacctgcatcataaattcaggagacacacattaaatgcaactgaaaaatactatacatataaaaaacaaatggaatgtcgatactacacatttataaacctaaataccaattatcatttgactattttaaacaaacaaatatagattttgcaaattttctgataaaaaaatggagttcgaacacaatcaagatcctaatatgacataacaaaaaacttcttaaaagaactttattacttacacgagcaatgcttgttttggctccaaacttggtacaaaaacaagatcaacacttcttcaacagcaatgtacgttctcaataattctttgttcttgggttcatcttctttatctcaacaatttttttattaattattatcaataattgttttaatattatttgatgtaatgatgattttgcattaattgtgacaatagtcacatctaaacttttttggggcattaaatgttgatgtcacttcggaataatgaaaataatctcacttgtaacggaaccgaatcgcgtcaacgtgaaacaaaaaatcttcaactgaatcggaacagtgtacgtaactaaacctgctaaactaaaccgtacatttcaacagttactaagagagaagcgcaagggcagaaacgtcattttgcaggcgaaaagacaaatggtgaaaaccacatttgactttaacaatccatggaaataaaacatggtcaacgggtgtggcctgcaatttacccttatataaacactaatatatatatctaggctagtacagtttttcctctacgacatttacaaatctttttttttctttttcttaaaactctcattaaaaaaacaatgataaatcaaacatgcttcgttccggcttaattactgctcttccccatctcaagcgcattcccatactcccatcctctacaaaccttgaccaataccagtgtg

SEQ ID NO: 23650 - DNA, 781 bp, Arabidopsis thaliana
taaataacccgactttgattactgggtaattttaaaaccgccattgttgttctctttactacttttgggaattagggtttatgatttctgggtattagattagataaatttgtttcctttttttgttaatcaatttaaaaatctcttatttctgttaaagacttgtaattttggagtttttaatgcatggacggaagagaagcaatggcatttccaggctcgcattctcagtactatcttcaaagaggagcctttactaatctcgcaccttcccaagtcgcgagtgggcttcacgcgccgccgccacatacgggattgaggccaatgtctaaccctaacattcatcaccctcaggctaacaatccaggacctcctttctcggattttggacacaccattcacatgggagtggtctcctctgcttctgatgctgatgtgcaaccgccaccgccaccgccaccaccagaggaaccgatggttaagaggaaacgtggacggccaagaaagtatggagaaccgatggttagtaataagtctagggactcttctccaatgtctgatcctaatgaacctaaacgggccagaggtcgacctcctggaactggaaggaagcaacgcttggctaatcttggtgagatctcgagttttctattctgtgtactttgtcaagttaagtttttgctttagctctgttagctagtcttgaaggacatgagcttgaatcttatggatgctagaagctttgaatgattctatagttaagttaggttttgttactttg

SEQ ID NO: 23651 - DNA, 4324 bp, Arabidopsis thaliana
ccttttggacagtggtcttcctggtggccgtctactgtatggaggaatgagtatcaaatccactatatgttgtggatgacaacatctttcggatccgcgataggtagaattggttcttggaaagaatcagaaaacgtttgaaggccataccaccatccgacacaagacttcggatcaattctatgctcgattgcagctgctagagcgtgttcacatgggattcttagcttggtgtacctaagacacgtacacgtacactggtccagaacgacatgaaaatgctcaccggatttacttgtcacttgatagctccacggtccagacatcttcacagcgtatttacctgacgcaggcaactcttgtagaaatctctcatcaacctcaggtgtcacagaagatttgcacctagcaactttcttcctcctcgatgcgaaccatcgcattaggacatcccgaatgaactcgatcatgtaaacaatcggataagtttttgcttttgttaacacatgattcatggactcagagttgttgctagacatgatattgtagcgttctcctctacagtgagctcttgtccaatgctcaaatcctatgtcctctaggtattttgcgcatttagcactcttttcccttaacagttcaaaatatttctcgaaatccctgaccctataagctttggcagcgctgaaaaataaagcagacacaccaaacttaccataataggtggagaggtttcgctcaaggtgaacagcacatgctccatgatgcactctcgggtaaacaacacttaggcctttgtatatagatgaatgtctgtccgagacaatcattaaatcgtcactgtctggaacaatctcagctaacttttcaaaaaaccatgcccaagaagcatcggtctcaccatcaacaacaccaaaagctattgggaatatttggaagttcccatcttgggcacatgcaataaggagacatcctttgtaaggtccgactagctgcgttccatctaccacaactaccttcctcatatatatcagacctttgatagaagcgccaagagagacaaagacatacttgaagcgctgcttaccatcatcttctggtgtatagtgtaggtgtgttattgtacccggattagctaattggagaagatacagataggtcggcaaaaacctgtaatttgctatctcatccccccgtacattttccactgcaacctcttttgctctccaagcggtagaatatgaaatacgcacattcagatcatttaggagcagctgtggtaagtcgacagctcgcggcccaccctgcgtagaactgtatctgctcctcacaacttctccgaggagcttataattagcatgtttattgtagttcttccgagagtcgatgttacacgtatgtgtcgtagcatacgaagtgattttgaaactttctgaatccttcacgacgcgagcagtcaattgccatggacaagtctcatcaacgcacaccattttcaatgttttaggacatgacttaggttgcttgaagcaaaagcattgctttatcgcttgaagagacattgtttgttgcaggacttttctattcttaaaaacacttccaacaaacaaagtttcgcctgtggtgctgatttcaacctgtgtctcatcagctcgaaaattgagtaagtcatcgaacacaggagcagcatcgttaccgagattcgccaactcgccaccatgtaacttaggaaattcattatacacttggtaagcctcagctgcggtaactaccccattatcattttgtgtcccagttgaggaagctccaataccttcgatcacttcatccccggtgacttcgtctatacaaataagattggaatccctttgcccttcgcagcgtgtaccgtaacccaattgagagattgtttcttcgccaggtacactaagaccagtgtacgtacacgtttctaagagacgactgaattcccctgtatctccgccaggtacactaacacccgtgtacgtacacgtttccaataaacgactgaatttccctggatgttgagcagtctgttgagtgagactgacgtcttcctcaagatttccttgtacatattcttctactattacatcgttccacttgttgtaatcgtattcttcgccaataccttcactaccgtctgtggtaggatacagggtacttcccccaatagatccatccacaccaagataatcatcacacccatcatcatcttcgttgccctcctccaattcatcctcttctgttgtatcgtcttcaacatcggcttgctcctctgcatcctcattattttcatcaacatttgtagcactatcaaacacacggtcactttcagaaacttcaccatgagacctagagacagtattcccgaacgccttcactgtattattgaaagagacgaacaagttgagagaaagatacccaccacgaaccaaaaaaaacgtctcgagacccatctgactgtcaatgtatacaggagggcgtttagtatctatcagcactgacatttcacccggcatccagtagctaattatgggattgatctcggtggacttcaaactgaaagcctctcggagtgtacggacaaagtccgtgtacgtcatggtttcctgaacgcgtacacaacgaccaaagatgccttcctcaggttcaaatttccattctccttctttgcatttccactcaccgaccatggtaaatacgggaatatccataacccacctgcatcataaattcaggagacacacattaaatgcaactgaaaaatactatacatataaaaaacaaatggaatgtcgatactacacatttataaacctaaataccaattatcatttgactattttaaacaaacaaatatagattttgcaaatattctgataaaaaaatggagttcgaacacaatcaagatcctaatatgacataaaaaaaacttcttaaaagaacttcattacttacacgagcaatgctccaaacttggtacaaaaacaagatcaacacttcttcagcagcaatgtacgttcgcaataattctttgttcctgggttcatcttctttatctcaacaaatttttttttaattattattaataatttttttaatattatttgatgtaatgatgattttgcattaattgtgacaatagtcacatctaaactttttgggggcattaaatgttgatgtcacttcggaataatctcacttgtaacggaaccgaatcgcgtcaacgtgaacaaaaaatcttcaactgaaccggaacagtgtacgtaactaaacctgctaaactaaaccgtacatttcaacagttgctaagagagaagcgcaagggcagaagcgtcattttgcaggcgaaaagacaaatggtaaaacccccattggactttggcatcctagggaataaaacctgggccaagggtgtggcctgcaatttcccctgattatattgcctttgtggttgaaccatacgaaaaaataacattgcaatacattaacaaagtaatattttcatttattcatctgaagcggcgtatcctttgtttccagaatacatcttccgtgatatctaacataatgaattaaaggatcattgagcaacactaggatcgcccaaaaataaattaacaaaccctttgaaaaatgttgtatttttcatatattaaaaatatttcaaaaaggacttcataagatgtcgatcataagttatttttagaaactctaaacgctctcaagctctaatatcgaggaacctaacctaaccttgctttccgacgccggtgaagcttcggctcgttggcgtcgggatttgtcctttcttactcacgtctttagcattctgttttcagttttactctttttcgggcccatgtgtctttcttttcaaaattgtgttctcccagcaagcttccaaaatgacttaaccgatagtgacaaaggacgaaggagagggtcggcgactcctttcttttccctccctctatccacacccattccgacgaagcaaatacaaccatatctgccacaattcttccgatctggatcaaactagaactatgtaagagcttacctcctctggatttcgttgatggcaagagattctactcttggactgtcatatgcaccacgttcaggggagtcggcgatggtgcacggcgcaaccttcttatgggttgaaagcttctacatgtttaaatttgagacccttctttttatcctctttgctcttgtttctgaggatcttataaccatgaagctgatttcctttccggcgacgatgagcccatctccgacatctttcgttgca

SEQ ID NO: 23652 - DNA, 4544 bp, Arabidopsis thaliana
tgttctagtgttctcacttggtgtactattatagtgtacccatttggtgtactattctagtctacttctagaatgtcaaagtatcaatccaaattataatacaatatatttcaattcaagtgttatgaagcataataataatctagggttatgattttgaattaggaatttatgtatgggtatatgcactagatgaccatgaaatcaataataatatagaaactaactatgagtctatagtgtatgtcggagacgtatttgaaattacccgcaaccccgtataactgtgttcttggttaggggacatataggtgtataggcgtatgattgcagaaattagaattttgaaaaccttggtaagagcaatgttgtatgtggacgcaaacgatatagattttaatttcgagaaaatgatttattatcaattttttggaaatatcagcagctgcaaaaaaaaaactagcgccgcttcatttgctggttttccgagagaaaacgtcttccgttctctacccatagattctgcaaactctccgaatatctatttcaaatctatattgtttcgcatacatatcgtttctttagattcaatctcgcagttaggcgatcaattccatccggctacaggtaattttgaaaatatatgcggtttaagctattcaacgttctcgatcggtatcaacttctttatttctccaatttgtattccgattaactgaaatctgcaatctcatactgtttctgattataaacttctattttgtgcagaaaagggttcgacttgtagatgacgaacaactctttaccccgtcggttgtctaggtctggatccgagcccaacagtgagagagtgcagtcctacagtgaactgtctttgatagatgacatcgctaacgcgttagatgcggaggacatgaaaattctccgggaatctcagtttggtaaattatttgatttctccgaaagcgccgcgtattctgcgaagcttatttactttttgctaacgaggcagcttgttgttaggaagaaacaagaaatttgggtaattttctctggatcccctgttcggttttccatttctgagtttcaaaatgttaccggtttgaactgcgacaaaccgcctcgtatgaaagagaggaaagggaaacgaaaattggcgcctggcaagtattggtacagcctatttgaccgcagtgatgtatctgttgagtgggttgttggcaggctgaagaagcgagtggttcaagatcaaggaattcgtttacgttacgctgtgctggccttgattgatggcgttttatgcccaacctcgggtagaagtaaaatctctccggtccatgcggacatggcagaaaatttagacatgtttctaaattttccttgggggactatgtcattcctaatgacgttgaagagtgttactgcaaggggagctgataaacttatgcggaaatctatcaccgttcaaggtttcccacacgcactccaacttttgctactgcaaagtgttcctcgaatcagagaattgcaattccctgaagccgttgaagatagtgactcagaaatggaggaaacagatacggaaattgagcgcttatggagtttgaagttggatcttgtttggaaagtcgaccggcagtctcaggtgagcaatgcatctctgctctcgtaaattaattttcatatgctcgtttttatcatgaaaacctcttcttttcctatcaaaaacatacaattatagattcatatcattctgtgtaaacgtgtagcatgtggcttaggtttttaatatgtgttgatttactatttgttatttatatcatgatttctgtataaattgtatggttttaaatctgatcacagtttctttagaataatcataacatggctgtaaatgtgtagcatgtggttaagtttttttttaatatgtgctgatttactatttattatttatatcatgatttatgcaaaaactgcatggttttaaatatgatcacagttctttttaataaccataccctgttaccttagtaagtcacgtatggcggtatgcattacaacatctggttatatgatgaaataacatgttgtttttaaggagcacatgggtacataatctatatttcactgttagtaacagtataaatacttttagtacatgtaataaaacataatatcatgtggctaaagtctaactctttgtttttcagattaaagtcgtttctatttggagtggaacaccgactggtgacgctttcaagtcaggttgggtcgaggacgaagaagatctatctgttgactacatgttgcaactaataaaagaggagcacatattcaaggggtccatgttttcaggtggtgttgtccctgattcgctacccgatgaaaggaatgacaacagtgatgtatgtagcacttatgattgtgttgatgaggataccatacaacctgatgcttccttgcctggctcttctaaaccccgtaaaactaaagggcaggttcacataccagattcgattaaaaattacattgacatgaaagacaagcgtatggagtcgcgtatgttgaaggctatagctgattcagaggctagattgagcagcttgttgagggaaagccatggcaggaagaataagcgtcacagtggtcctaagtcaagagatgtgggtgagggattaggtgggaagaagggatcctcccttgttgttttggataatggcagggtagcccagtcgaaggagaacagtggttctggatttattgatcaagtcttaggtgaagtgatgcatgatattaacgacgcagaacctacacagactacaacttccataggtcgcttatccccaccgactaggcctggattgcgtagttctctggtatacgtttaacagttttgtaaatattctgtattttatgagagttcttcctaattcaagtattgttttcataacaaacagaaacggaagagaggcaacaatggcccaacagcagccaccatcctgacgccagcagtagacaacagttcagctgaaaagtctgtttctgctgataaacatgtatcccctgaagctgtcaatatcaacaaagttggaggggtggtgactgataccactgaggatgagtcagctagagatgggattcatgacattggctcttccactctgccggctaaagaattagacgatatgtttgcggaaaagtctgtttctggtgataaaactgtatcccatcaagataatatcttggttgatgcccccggtgatgggataggtggagagggccttgatgatatccaaactagccctgataaacctattccagctgcagcgagtcatactcagtgtttgcttcctcctcccacagacgtcaatgagttctttgaatctgagcccagcctccctgatccatatgtggtgcttgttgacatggatggtgttgcatacaatgtaggtcagccagagttgcagtacaccatcccatgcatagtgagttcaaaccttctcatatagtttttatgtttttttttttccgtgtattggctctaacgtctgttgtttgccttgcagatagagtctgatttgactgcccaatgtaagtcaacccccgggccaatggttgatgacggtgcttcagataaagatggagaaggacttgctgacccacctgctacagccgataatgttagatcatataattcattattttttactctcgttaccactaacaaactaattacatgcaactgtttcttattttaggccaatttaagccaaatgccgatgatatctgaaccgtccctgccagccccaacaaatgatattgtggaccctgatggcaaggttgcataaatgcgtttagctagtgttaaatatggatttcatagttttgtgttaggtctagtttgggtgcatgaatggttaagatattgttaaatatggatttcgtagttttgtggtaggtcaagtttacttattcatggtttttaaaaacaaaacactggtttaatatgcacacggttatattttgcgatacatcatgtattttcagcatggttcagggttttacctaatataacaaaaaaatatttaaaaagttttgtcatattgtaagtgttttgcccgtacaaacatcaaggttttagaacaaattacatgccattaagtttaacacagaatgtttaggattatgcaaactctaatttcctgattattaagataacatctgattttctaatcacgtttacgttgctcacagctccaacatgaatccgtaatagcctcttccacaagcggtaggtctgttacttttgggcatgatgttagccgtaagaacaagataaatcgcttatatggcatgtctgggtattaattccaaccttatgctattttattttgtttgactcatattacttaaaacttatgcatatggctgttattagggacattgattttggggcttgtcgaacactttccgccattgagttgcgtgagattgttgagttcaagaccgttgtacccataaatggtatgataaatatcatgtgg

SEQ ID NO: 23653 - DNA, 6981 bp, Arabidopsis thaliana
cccccaggaccccgctcaatacccctcttaaatgaacggagttggagacatggttgggtatattgtggttgtgttggtatttaatggaaaggacgtaactgttgctgtttattgtcaaatcaacgttatgattaccctatatgacggttaccaggctattaccaaaaatttgaatcaagtgtagttgtaaccgcattaataactgtagccgttccagatttcctctatttaagtctcctcccttccttaattttatccacaatcctcattctaaacccatttcttgtgccggcagttatatcattcacaaaaaaaaatttagtctttcgaatcgcttgttcttgctatccgtgagatggagggtttcatacggtttcagaattgtgtcctctgatcactaggtggcgaatttatgtctttgtcgtgagagtcttcaagaaggttatatcgcccaacgtcttcgaactcggccttatcctggcagattacgaggttatttccgttaaatcattatgtgtttttctcgttcattcgcttaacttatatattaaactctctactatcatgttctgtatgtaaagaataaccgtattgaggccaccgttgatcgtcgccttgctccattttacgaagaccgattcgttgaaaatgagtggaagacgatcacctctttcttggtccgtaagtcaactgacttagtcagagcaacaaagcatgaatacggcatactgtttatggatcggaccgtcgtcgttcatgccccaccgagatcaccaccagttccagatttcgatttcactcccttcgactacattttggataaatctgcttacaagaacgttttagtcggtgaggaggaataactctgacgcttcatttattacatttttgaaaatgtttgtttattatctttgtttctccatcatctagatgtcattggagcgttggttgatgttggcgcattgactacagactattacggtctcaaactgagtttcaagttaaaagatagatagtaagtgttcttttcatttgttttatttacaatgtcactctaaacgctaacagtccttatttctaacgtagcaatgaagtcttgaagtgcgaagcccgcaatcaacaggcggagtacttgaatggttacttttagagtttgggtaagggaaattttgttgtcgcacttagcttttggcgtctaaccgaactgtctaacccgaagcttgagagccatggtgctatttcaaaggtggttgccaatccggacagagaagaagttgcggatatctcgatggtggttttttagctagagggaatgaaccattattctccgttttaatataatataagactacatttcaattaagttttctttcccagttgttgttgttgttgtttccataagaaccaaactacatttcaatcgttgttgttttttgtttccgtttaaattttaatctaatttgttgttttatgtacgtgccttgttttattgttcaaatcctctcgcaatgtacgtatagtttctggtgtacgctatcgtgtacgtatattagttttggtgccttcaacatcaaaaactgttagatttatacttatgttgtgtacgcaatttcccaatgtacgataaacgaagtgcacagtaccggcctcccgcttgccgtgctcgtagatgtcaacggagtatttctgacggtagaagaccatatctgcttctcgaatggttgccagatccgaaaaagggtgtccaaacgcaagcaactccaggaacttcatcgtgtatggcccgcaatctcctgtagttgggttttgagcaacggtaggacaacgcacatactcaaaaggttcaactgagtacggagaaatcaatacatcctggcacatcgctctgactaagtacggcatcatttcgcaaataggagtcattctcgccttcacagccgactcccgcgtgtgcgatattaaagcgtcatacacagttattagccgttcattaaggttgattcccaaagcaacccaatgttcactcttccagttcatcggagcatacacaacatcgacatccttcatccacttcatattgggttcacggtttatgtgaactccattagcaatgtcggacagtaatttaccccatttgaacccgttcttattaatacacttcttgaagtcgcccacccgcttggtaagaagatgcgtcagcatcatgtccaatacaatacatctgtttgctatcatctgttccccgttcttgtgccacatcaacattgccatcatttctaaatgctgaaatgttcaaaaaatatatcagtgtacgtacacttccacgaaaaatttaatcatctatgtacaatttataacaaggaatgtacgtatataaatgcaacgtaccgtactttcgacccattcaccaggtgttagaaggttcgcaaaaaagtcgttgggcacttttcgaaacccgaaaagagtgtgaatcctgtaaaatccagaaaaatatttgataacaaccttaaaaatgatgattgaggtattaaataatccattttactataatgtacttacacagagggtcctttaatgatattgcttaattcctctatttttgaagggtcaaccacgtccagggggttgtatgagacatttccagccctgataacaacctctatctgttgagctggtacatcgggcaccaatactgtttttgccttaaaaccatgaggatgggcatcatcctgttcatagacaagttgtttcttcactttctttggggacgattttttttcttcttttgcttcgacagcagcagcattgtctgattcatcctgttaacaaatatgattgtcaacaacagtttcatacgtttttctatgtttaaaataggtacatacattatttttaggaatatcggtcttgtctgcttcatctgaccctgggttaggatcctcagtttctacagacccctcgacaatacacggctcttccatgactacctgtgcaagttaacgtacacaagtatatataatgtacacatataatcctatgtatgctattccgaaaataggaattgaaacacacaaattgttacctccaaatcagtggctgcagccaaatcaccaacggctttggtatccaactcccgtatgacctgcataatataaattttatacatttgaacagtaaatagtacattttatttgttgcaagagttagcttacattgttaactacttgaaatggtgacatcactgtgggtcttctcaggtatttcaacttccatcactgtcactaatttcgattctcctgccgcctcaacctgtagaatttagcatcggaaagaaactttttagtaatgtatgaaacaatatatatgtacacagaacatagtgacaaaaatgtacgtacacttgtgtcaggtacgtgagctgtgtctccatcagaaggctcataagtttcttctgactcgctgccattagcttcagtcgatgcactggcatctcttgcttcttcatgaaacaaaaataatttgcaaagtcttatgggcgtacacatatggaaaaaagaagaagtgactaacacatacctgtgcagatgtttaaggtaaacctgatggattgtctaccatctctatgtcagcatcagctatttcatcggcccctgtatgggtaccaactaagccaggttcagcaacatcctttggtccattatcctgaaaaataggctaccatagagttaagcgttagataagtgaagaaattaatgtaatatatatgcatatagtcatggaaatctgtatataacgattaccagaagatctacctctgaaactcttgcagacacattagatggaacttcttccatctgggtgtcaacagtagcttcttccacaggcctctcttcctgtgttacaaagacagtcccagacattgaacctaagaagacagtcttaccaacaacaacatttcctctatcctgaaacatagtttaactaacttcttaagcgaatatgtacgtacaccatttaaacagattgttaagagtattagtagacgacataccagatgggattgtgtggatccagcataaggaactattaaaaatccagtgtctaatatctcttcttcagcggcagaagaattcaatccatcatttgtagtaaaatcactttcattattagcgccatcctgtatcgaaccagacagtacagttatacatatgtgttataaaatatttagcaatatacgtacatgacttacctattcatcaatgaatccttgcatatcttccttattggaatcaggttcctcaatagtgttaacagcaaaagaaacatttttcttcggctttgaaggttttcttcttccgccgaaagcagtggtatgtactccagggacatccaaatcttcctctttggaattacagccaacagaaagtgcaggagtgtccacatcatgagaaacacgagtcagccttgaagactttctcgttccagtgcttccttttgtagacatccttctcgatggcttcttcgcagtaaccggtgccttatccatagaagtaggtggttcccgcgaatcatgggaaggtatggtttgttctggccttttgccttttggatcaagggcagcacgtatctggtcacggacaaagtctttcatatcttcatgcatttgatacatttggtcttccagctccttcaaagacctcctcatttcaacaataaacctctcaggcacaggctctccaaaacaatcctcagcagtctcttctttatcatagtccatttcagatttctggtttttcatagcaggttctttagggctcgggcccggtgcatttcgtttcctcttaacatctacaatagaccagttgctgctattaattggttttcttctaggtgcaataccaaaaaaattagtaaaaacatttatacttatacttacctgtctcttctagttgtggtgggcgcgactgctttggtactctagcatagcctccaacccattcatcctcctgccactggtgcccatctatcaacagtgcctcaatgtaatcaacccttggatcatcaacttcatcatcccatgaaagagatggaggacaaacattatcagctggtttcacaatatagttgacctcaacctacacaaataagtatgttaaccatagataatgtacatttacttattatgtacgtacatacacaatttaacacacctcatcagcagcctcacactccaaaatgcgagatgtccggattgctcgcagagaggcaagacgatggatagacctctcagcaaatgtcctgttaggtacatcatcaggtcctagcttagcaattgatgggattgtttcgaaagctaaaagctggagagctaatgggaaaccatggagtgcataagaccctacaagtataccccttattagtttctgagcatcgtaaggagtttggaaatttgctatcctccccaaagtacgggtaaaggacacccttccccatgggtatttgcagaaaaactccaggttcttagtagtctcgacagtcttcgaagtaggcctgttggggttactgtgggccgctaccacaccgtcaaccaaaataataagagatagtgccagttgcttccacccctccatgctttcctcctcctgcagccagctcaccaaatcagcaattgttggaaccgtgtccccaaacctctcatgaaacagagtcttccaaacactctcacactcaggtttcacactgataacatcatcaacgtctttcttcttgggatacttcccacattccagcccagttaagatactaaattctcttaatccaaatctgattggatgaccgccgaatacaatccacatctcattcaccttctttgtcactaactgacggcatattagtccaaggacaagcttagcattgaaagatgccttgtttttgggtattttaaaaagtttcccaaatggagaatcgagaagaaactgcatctctggtttcccctttagtacttttgctatgtcagaaatgtactccggtttagagtacgcgttcatcttcgtctcggaagggtaccggtctagagcaaagagtcttggtggtaactcttcaactgtaagatcttcagtcggagcaacacttggactacctgcaattaaaagtcatatactgttgagcaaacagaagtagtgtacgtacacagacattttccagattataactcaaaatcatatttttggcggaaacagagatttccaattctacttctcaatttttcatcctaaagatatgctaaattccgacaaattctaacactttaatcaaacaagctttacaattctgatacacccaaagacaacaaacggtaaattagagattctaacccagttcctccgttgcctttgtcgcagagcgttttctccgcggggaaactcttaatacacgcttctccttccctggaccatgctgcttcctcgggacttcgtcgttagctttattcccagccatagctaaagatgcgatctcgccggaggttcaaatttcgccggaaaaaacagtaactttctcttggcttcgccgggaaaaacagtaactttctcttggtttcgccgggaaaaacagtaactttctgcttggcttcgccgggaaaaacagtaactttcacttcaccggatgtgggagttcagtggcacaattcaactacccaacaattcgaagttatgtcgaattttgaagcaatggatactgaatttcgtttcgctttctgattctctctcaatctctccgttattctctttttcgttttctcggtttcttcgtttcagtttttttttaagagtgtctttcaaaactgaaccgcatcaactaaaccgaaaccaactgctgtagggttgttttggcaccataacatataacatactaataattgttttgattacttagagtgacaacatgaagaatgaaggaaagacttatacaaaacacacaaat

SEQ ID NO: 23654 - DNA, 1292 bp, Arabidopsis thaliana
gcagctcgaaacagcctaactgtctccagcacatctgcctcaacctcccatcctttgctccctaaggctaacaccgggacctctgctgcagaagttctagcagacaacaatcaagtcgctcaggtctctgggccgtctgaagctgctcgtgctgacggcggctgaactgatcgtgattgatcaggagttgtcccttcaaaagaagagagggtggaacctacggctgctaacccagagggcactgtgtccgtagacaggcgatcgtctggtaggtcccaaagcggaggccgaggattaagaggtgggggtaggtcttcctttcaaagtctaaaccagtctcaagaggtaaggcagacgtccaattcaggtggagggtctacgggaaacatgcccttccattggtcttacactcacgaccgtgatcacccaatcatcgaggacgaagctgggttggcgaatctgctccgtcatatcaaagggaggaactgtcaggttcctggtgtgaagaacatggccgaggcggcagcctatgctgacatgatggcgaaagagggccaggtaataatcgataactgcctctttctaattcaatctttgtgccacgacggacctttggcctacacacatccgaacttttttttgaaaattgcgtacacgtacaccacttaatcattgttgtataatagataacacatgttttaatatttaacatatggtttttatttcttttccccaaaaacacttttatactgattggaagaaaatgaaatatataacttacggcgacaacaacatcacgggtggctaaagcaagaatatcagcacaagagactttgtttttgcaacttgggatagcgtcaagagctttcttggctttgatcacaacgtcaaatccatctccggccaaagaaatattgtctggatgatccttctcggctttgttggtaggcgttgattgaatcatgaccgacgcatcacatccctatttatacataccaaccaaaatttttaagaaatcattgcataaaaggtttctaatacaaaaatcaacaaaagtttgagcattacattgacgaagcaatcgtggaagaagaggcggagagtagctgggatggtgacgaaggtctgtttgattttttcttggacgacttttttcacgatttgttcaacattcggacatgagtttccgtagaaattggttttgagttgagcagtggttgtgtcagggaacatagagatggcaagactaagagtcacgactacaaccagactgaaccgcgccatttcgttgg

SEQ ID NO: 23655 - DNA, 524 bp, Arabidopsis thaliana columbia
ctcccatttagagagattatcctagtgaggtccctaatgtgaatctccttttacatttttttgtctctatcgcagaattatgacgcggttgtgggagatacgactatattggcaaataggtcctcttatgtcgacttcacattccatttactaaatctggtgtgggattgattgtccccgtagaagaccaagtggcaagagacagtatcagtttcttgaagcccttaacatggaaactttggatgacttcctttttcttcttcttcctcattggttttactgtttgggttattgaacataggattaatccggactttcgcggaccagctaagtaccaagttagtacaatcttctggtttgccttttctaccatggtttttgctccaagtaaattccctttccatatctcaacatatagtgagtgttaaaaaaatacctctttccttaatgcttactctattaatatgcaacttgcaggagaaagagtgttcagctttggagctaggcctctggttatcacatgg

SEQ ID NO: 23656 - DNA, 636 bp, Arabidopsis thaliana columbia
gaagatagaaaaactatccacaatattccatatcatttgaggaaatattgcgttaaaaactaaaattaagtgaccaagtgaaaatttggtgattctcacttccgtcactgcacagtgcatagtgcctccagaaccagaagcttccttcttcagataacaaacaagttcactcacatacaattgcgacggtcacacgccttcaattacctcgtcgaaaatggcttcagtgagtctcccttctcaatccgaacacgttctctttgtgcctggattcgcggaaatatgagtttcgatttcactctactgaaaacgttgggatttatcttcatctctgtttcttagtgttctgattccattcagcattgtagttgatcctttatagtatgaatatttagaaagagatttaacctgttggggtttgcttatatattaattagttctttgtagtctaaaattcaattttcagtttcagatgtttcgtctctccccattgactcttccctgcctctctgccactttttttattcgttagggaaaaaacaaaagatgtatatgaatatgctacgtagaattcccattcttatttatagaaacaaaatagaccaaaagcacagtttatagataaagatcaagaaa

SEQ ID NO: 23657 - DNA, 524 bp, Arabidopsis thaliana columbia
cccctccttttctattccttaattctccgccgtccgattacttcaaacattgcctctcctccgccgtgcgatctcttctccggcagatgggttttcaatccagaaactccgaaaccgttgtacgacgagacttgtcctttccacagaaacgcttggaattgcttacggaacaagcgagataatatggatgttatcaattcatggagatgggagcccaatggatgtggattgagtcgaattgacccgacccggtttctagggatgatgaggaacaagaatgttgggtttgttggggattctctgaatgagaatttcttggtttcgttcttgtgtatacttagagtggctgatccaagtgctattaagtggaagaagaaaaaagcttggcgtggagcttacttccctaagttcaatgtcactgttgcttatcacagagctgttcttctcgctaaatatcagtaagattgcttacttccatagtttaaaatcttgtaattagctcttcaaggatcaaacttttgatg

SEQ ID NO: 23658 - DNA, 529 bp, Arabidopsis thaliana columbia
atcacctggaaaaatatatttcctcatatagtgttggcactatctccctttttgttttgttttgttttcacacataaaatttgtatataaatagttgtatagatgtgtcttaggttctccatctctctcaaatatctctcttgcatcgtcaatactataaaacacaaaatctaatgatcatgccattttcagaaccccaagaatgtgcggtttgtaagagagtcttcttatcatcacaccagctgatctcacactacaacgccgctcactccaatcgccagtattccagcttctcttcctcccacgccgccgccgccgctgctgcagccaccaccttccgccactacactaacgtaaacggccggaaccctaatcctgattttcaggcgaggaatcagtttgacgtgaattattgacgtagaggttacttagatgatcaagggaggttcataaaggatctctcatgcgccggcgatgagtccgacagaaaatataagtttttgatgccaaagatgccgccgacgacgat

SEQ ID NO: 23659 - DNA, 530 bp, Arabidopsis thaliana
tcctccaacaccaaaaatccttccattttgaagtgctataacctgtagaaaaatcaaagaccaaataaacaactttagtttctaaacaacttcagtttttttaagtgataaacaactttagaacatataaacaacttcggtttctaaagtttctgataaaaacatggtttgtcgtttaagaaaatcgatttacgggttgaaacagtcgccacgatgttggttcacaaagctgcatggttcactacttgaatatgggtttaagcagtcaagagctgattattctttatttcatttacgaagaggaaaatcagaaatatatatactagtatatgttgacgatttgatcattggaggtaatgattcagaagaaatcagaaaattcaagaaatacttgggggagtgtttcacatgaaagacttgggatctctgaagtattttttaggcatcgaagtagcaagaaacaaagaagggattttcttgtgtcaaagaaagtatactcttgagataattcaagacgtaggaatgttggg

SEQ ID NO: 23660 - DNA, 500 bp, Arabidopsis thaliana columbia
cgagtaattcactgtgagggattgtagtagtgctcctcccaattggacgaatctagagtcgtggtttgaaatcctttaaccggtgaaaccaggtggatcagaaccggcgattatagccaaaaaggccgtagctttgatgtcgggtactactaccaaaaagacaagagatcctggatcaagagctacaaactcttgtgctattatcgtggtaccaaatattttgaaatcatcgattttaactctgattcatggaggattcttgatgatattatcgctccacgggggagtattggatactcggaacttagcgtgtctctgaaaggaaatacttactggttcgctaaaggtgtaacagaagagcggccccgcaccatatcattgctcaaatttgattttaatacagagaaatgtgtacctgtgcttcttccctatcagagtcgtcgtcttttccaagctagtagcctttctgttgttagagaagataactttctgtgttattg

SEQ ID NO: 23661 - DNA, 495 bp, Arabidopsis thaliana
tgtttcgagttggtttttaacactgcttttattagatcaaacattttgatgcttaaccgtgatgaagtcgacacattatggcatataaaagaattcccaaaggggttcagagttgaggtatgtactcatggagctcatattctctttacatggtacatatagctactccattgtaacttagtactcacaaagagtactttctgtgtgaagcttctcttctcagatatggatgctgcctcttctgttgacttgatgaatttttcttccttggaagagaaagatggtcttccaatagaagttttttccaaagttcatgagttcttcaatcaagttgattgggttgatcagacagatgccacacgcaatatgtttcagcagttagccattgcaaatgctgtccaagaaggactagatggtaattcaagcccaagactacaagggttaagcctaaaagtaccatgatattatgaagcatgcagcaattgaaaatagtgc

SEQ ID NO: 23662 - DNA, 559 bp, Arabidopsis thaliana columbia
cccaaactggcacggctaatgcatttgatcaaaattttcacaagaactcaaataagagagagttcagaagaatcacttactcggaagctatgatctgttcaaagagaactttgaccatgtcaagaccacgcttaaccctcaaaaggtttctcgtatgactaccagctttccttacacaatctgcctcaatatctttgtccatcattaccactaatgtcgatatcgaactcgacgccctcacaagatcatcaacctatagtcacattcacaagttttaacatttcattttccaaaacattcatcctccagataaacaaacacaacatccatttccatcaaattagcaaaattcagtctgagtactacagaaactaaatcaattccaacatctcacaatatactcaatagtacatgaaagtgaacacaactagaaaaagattcggactttgattcaaatctactacataaacaaaccttggcaacatagtccatttccgcaaacttaaaagctattccaaggcaaccaaagagaggcgagaccagagagcaagcgtgagag

SEQ ID NO: 23663 - DNA, 502 bp, Arabidopsis thaliana columbia
ccattctgtcaataccttataggggattgatggaaccttctgcctcaaaacagcctctgacacagcttcaatcgtgtacatgttgagtttaacttccccgcgaatcaaacgccatgcattgagaacaattctacctccaacatgaacaccactagcatgtgtgcggccccactcgtcctcaattaccacttcttctacttgagcaggattagctaccaacggatctggcagcagattattaccaagttttctcttattatctgaattgtttgttgtggtcggagatggcgtcctagatatattattgagaaatcttataccaagctgtgcagctctttcagctagaaaaccaatggatccgccctgtatatcccagcccagaagaacatctggatcccatttacataaagtctcaataaaatatgtgaatagttgcctctcttcaaggaatacagacaacttgcatccagataggccatcaacatttctgtagtgagacaac

SEQ ID NO: 23664 - DNA, 584 bp, Arabidopsis thaliana columbia
  unsure (1)..(584): unsure at all n locations
nnnnnnnnnnnnnnnnnnnnnnctaaagggtagaatgaccgagtccacagccacctgcatttcaaggggcatggccgtagcgtctacttcctcatgcctactcggtctccggtctgtgacgcccagcttaggaagataacggttcagataggccagaattcctagccgccggctagggcgtagtaattgaggcaaggaaaaagcattgccagaaatattggccgcttgaattcgtctccgcccctggccgttgtgtatccattcgactagctatttcacgaagggtattgagcaaacgaagtgtagagtcaaaatcgtcgctcgtttcctcttccagtccgggcaatagcgataagatgatcgccttcaacgcgggtcggattgcccatggttccaggtcgcaaacgtatgtttctaccaaagacaaaaataatgggcgaacagtaagagaggcgaatgtcagtgtcggtgcaataccagggtagtacaaaggaaggtcatgcgaaagacctctcggtttgattaggttgaagatgtaagtatagacttcgagcgccttctggtgaacccctgatggcaaggaa

SEQ ID NO: 23665 - DNA, 572 bp, Arabidopsis thaliana columbia
tttgctaatttctaatcaattcaatagatagcatcctgtgtcatataaaatcagatagctgaattttggtcgagatcttgtattccaaagttatttcagttttttgtttgtcttttcacaatcttgcatagctcccctggttgattttgtcatttgtatccatcaagaattcttgagctcttacttaaataatgatctggtacccaatctttttattctgaataggattgtgtactgaaacaaatgttattatttcaacagggaaatctttcaggatgtccaagagaaccgtggcatgacttacacagtaagattgatggcccggctgcatatgatgttctgaccaacttcgaagagagatggttgaaggctgcaaagcatagcgggatcaagaagtttaagacttcctatgacgatgcgttgttaaggattgataggattccagatatattaggagtttctgatactcctactgttagtgagaacgatcctgaggcttggcatgttcaggtatgaacatcaaactgttactgaatgacaggagaggttgagtattttatgaagcgatgatt

SEQ ID NO: 23666 - DNA, 545 bp, Arabidopsis thaliana
agaggatcttgtttgccttgcagatgaatacgaaaagacgtttcgaatgggtctcggtcctagacttggcgggtttcgaaccgaggcatccagggaaactgcactcgtggcaatgtgtcctactggcattgttgaaatgctcatgcaagaggtaaattaatcaatcaaattatatgatcataattaatccttttatatagtatactataacatatattaggtcaggtgtgtaattaatgacctgtatttgcagaatctgtggtcaacaatgtttgccggaattgttggtagagccaggactcatgaacagataatggctgatgctgctggaaacttcaatggaaatctccaaatagtaagtcttctacactaatatagagttatacaaagaaaaaaaacaatacttgtttgatatataaaagtttaaccaattaatattgttcttattcatagatgagtgctgagtaccaagtgctttccccgctagtcacaacccgcgaaactacttcgtccgctactgtaagcaacgaagagagggtttgtgg

SEQ ID NO: 23667 - DNA, 510 bp, Arabidopsis thaliana
ctccaataatgacagaggtagatcttcatgttcgacgtgttttgttttttctttgtttgctttgattgtatagttagcgttatctcattgttcttcctttgggttttactcagtactgggagaaagcagaatttccattccatatcactccaaagcttggggctatgggtgttgctggtggctcgatcaaggtaatttgcaatgcctgtctctgggtttttgtttgtttgattatgtggatagaagcttcagtattgatttggtttgacttcttagggttatggatgtcctggtctctccatcaccgccaatgcaattgccacagcagaaatagctagagttgatgcaagttgttcgactttcattttggtgcattcttctttgggcatgctcactattggtaagagcacctaatatttatttctaagcttgtttaatatttagttgtcctagtaaagatcattctaggatttgcataagtctatttcctttgattttgtcaagaatagc

SEQ ID NO: 23668 - DNA, 513 bp, Arabidopsis thaliana
gcagattaactgtttgctgatccatcccaagctggcaaatatcagcctgcagaggttaaggaaaagtttcaacaccaatcatagaaaagttaaaaggtcgatggacttgatatagacagattggagcgccactacaaaatttcaaggatccaaagatgattaacgagagcaggggaacacttatacacgggagaaattatgacaaaatacatattaaagtacctcgaggaagaaagtatcggcacattgcatacacacatacagaatgtgagctgcactcagctcctcattttcactcaagcccataataggcatacacctgataagaccagaaacatactcatgaatgtttatcatcaccattcacatgactgcaaataaatgaaacttgggcataccgttttatttgggcgagactatttctgcaggcaatgtccatcacaagaggccagtattcatctcccttagcatttatttcatcggatgaccatagaaactctacattctcactat

SEQ ID NO: 23669 - DNA, 760 bp, Arabidopsis thaliana
cgacattcttacaaagccattgtttccctctcaattcaagcagttactttgcaagatggacattctctttatatttatgctccattttgaagggggcaattagattattgttaaataatgattcggttgtatatggttaactggggtgttctggattcgtaggttaaatgagaaaagggtttatgaatccttgtacacctctttcaatgattaacagaaacatttttctaattttggctccatattcttcctttcatgaatctctcttgatcttcattttaggaaaagtttgagctatagtttttctgttgtcttccgcctccaataagccttcctccactgtgatatattagaaaaaacgtttatatgcatcaacctctcggatttgtggaccgcaccaaaccggatcatggttgagtactctttaaacgattactttacgtcctcaagcaagctccctgagcatggaatacacattttgccgcatatgcccaacatcttggtcttaagcaaagtacttctgatcactctttgttagtttgcttgcactttgtactaggacagatttgccgtacctccttctacacgttggtgacattctgctcaccacatcttcaatggaaaggagatccgcccctgagttcaaccatcctcttccaacgaattattactagtctcagctcggagtttgaaatggcggatcaaggtcctcttcatcattttctcgggattactgtcaacaaagacgcttcgggattgt

SEQ ID NO: 23670 - DNA, 570 bp, Arabidopsis thaliana columbia
gatctagaaaataatcaagagagtatttggtgttgtaagaaagtcagtataatgtgttttctgattagattagtttcgattatggcataagctataaaaccatgactagtacttcaacttttgtatgtagatcttgatttttgtttgctcaattgttcaatctaacttgaagttcttctatgagaccacaaaatcagagaattatccgaaccaaaaaaccttctagattggataataaaccggtcaagatggtctccaacagagatgattacaggatgaataacaacatcaaagctctaaacaaatttgcttacagatgttccaaaatgaatactctacagtacttcactggtcttccaagatcaatacttgtcaaaaggttaaatgtttaactaggccagaaaaatcgacgttttgatcactctgcttttttcctccagctaccatgaaactttctctttccctctagaatgaacaagcgagacttgattagccagattttccatggcaactgagttacttctcttcatttttcttgaaaaatctttgcttgagtttctctcaatgaga

SEQ ID NO: 23671 - DNA, 586 bp, Arabidopsis thaliana columbia
tgcctaaatgttaatgcaggttctgtgcatgcttgcttgctggatcgagaatcctaatggagatcactttaagaaacatctcgctagaattccggacttcatgtgggttgctgaagacggactgaaaatgcaggttctagtatatatagatgaattatttatgtagacgctagttgaaaaattttcttaagcatttcaagtttttgcagagctttggaagtcaactctgggacacagtttttgcgattcaagctttacttgcttgtgacctttctgacgaaactgatgatgtactcaggaaaggacacagtttcatcaaaaaatcccaggtttaattgtagtcttgtatcttgaaatgccttatggaacaattgcatgtgttcttttccctaaattaaagcactttgtaggttagagaaaacccttcaggtgactttaagagcatgtatcgccatatttccaaaggagcctggactctgtccgatcgagatcatggatggcaagtctcagattgtacagctgaagctttgaaggtaatcaaattagttgtggaagcagaattagttaagagttccacaagagttat

SEQ ID NO: 23672 - DNA, 536 bp, Arabidopsis thaliana columbia
gcatttgatatgtcaatttcagatagtcattgattcttgctgtgccactgttgctgaagttcaaaagagagggaaagatttctgggcggagtttgagttgtatgttgctgatcttttagttggaactgtggttaacattgctctggtcggtatgttggcgccttatgttcgttttggacaaccttccgcatcacctggcttcttaggacgcatggtttttgcatataatgcgcttcctagcaggtaaatttcctcaagaagattactcaattctcatatagtacttacatctctcattttgtgtaacttggttaataaactttgagatgttgatcttatacagtgtttttgaagctgaaaggccaggatgtagatttccgctcaacagagacttgctacatacttctacaaggtaattgaatttcacagtctctgtgtctcaatttctctataacttttgctgttgctgaacaatctttgttacatcttttcagggtataatgtatggtgcagttggatttggatgtggcattgta

SEQ ID NO: 23673 - DNA, 1250 bp, Arabidopsis thaliana
ctctcaacaacctaacatcaaaacaggtacatattacatatatatagatgaatcatgaatccatcatgttttctagtagaattttttttcataacaatatttttggttgttttaattttctttagacgtattcaacaatttgaaaatctacgtctatgacttaccttcaaagttcaacaaagactggttagccaatgatagatgcaccaaccacctctttgccgcggaagtggctctccataaggcgtttctcagcctcgaaggagatgtaaggacggaagatccgtatgaagccgatttcttctttgtccctgtctatgtctcttgcaacttcagcaccattaatggctttccagcgattggccatgcacgatcactcatcaatgacgcgataaagctcgtctcgactcaataccctttttggaaccgaaccagtggctctgatcatgtcttcacggccacacacgactttggctcttgcttccacaccatggttagtttaaaaatgatttgccaaatatatatgtttatttatactcaaaatttatatttctttttggttgtgaaggaggatagagctattgctgatggagtaccaatttttttgagaaactctataattttgcaaacatttggtgttacttttaaccatccatgccaagaggtagagaacgtggtgataccaccgtacatctcaccggaaagtttacacaagactcaaaagaatattccggtaactaaagaacgagacatttgggtttttttccgtggcaagatggaacttcatcccaaaaacatcagtggacgcttctatagcaagtaacaaaactcttatagcaatctctatacctagttttttttcttctataaaatgcataaaactttaaatattgaactactttttttaacctatcaggcgtgtaaggacgaatatatggcggagttacggtggtgaccggaggttttatctccaacggcaaagatttgccggttaccagtcagaaatagctcgttctgttttctgtttatgtcctctcgggtgggcaccgtggagcccaagacttgttgaatcggtggctcttggctgtgttccggtgattatagccgacgggattcgtttgccgttcccttccaccgtacgttggccggatatttcgctcacggtggcggagagagacgttggaaagctaggggatattttggaacacgtggcggctactaatttgtcagtcatacagagaaacttggag

SEQ ID NO: 23674 - DNA, 509 bp, Arabidopsis thaliana columbia
ctccttatcggtaatgtcgcacttccaccacttttgactcctccgttcatcggcggcgatctgaatcaccgtcaatctgatttcgtttctgtgaaggtatacgcatttgatttctactactgagagctgatttgagtacttttttaggaatcatcagctaagttagtttcagagctcttcttcgaacatctggaagcgagctcagtttcggtcgatccattttgtcaatggtatagagcttcgttcatttgtgacaacgaccaagctttttctattgtgatgtgatggtataatgatatgcatagaattctacgtgaaccaggaatggatcaatatgcgattcccgttgagagtaaagagatgaagcatactgggagagatgttatatggtctgttggaatggataagtgtttgattgcagctttggctgtccaggcctaaaacgggaacaaagttcgcaaatgtgttatcgataaggcttacactgctgcttgtgttgcggttaatac

SEQ ID NO: 23675 - DNA, 345 bp, Arabidopsis thaliana columbia
tcagcttcggatttgcccatttcaatttgctttcatgacctataaaaaagacgcgattttcatcatcgacaacattgttaatggcttcttcgccattgatattattctcaccttcttcgtcgcttatctcgatagccactcctatcttctagttgacagtcctaagaacatagcaataaggtgagaaaccttttctcttaacttgaaaccttttataagtgaatgagaacctccaagtatgttttgacattgtcacattttcaggtacctctcgacgtggttcgctttcgatgtttgtctcacagcaccatttcagccactaagcctcttgtttaactacaacgg

SEQ ID NO: 23676 - DNA, 457 bp, Arabidopsis thaliana columbia
ctaacaaatgcccagaatatattttacacaggctacacgtaagggtacaaaaaaagttctgtcattctactcaatgcatgaatacgaagaatggaaagaaagtctgaagggtaatgcaaccgggtgggatatcaaatactacaaggtttgctctctgctacaactattgacgaagaacttattgaaagtgctcatgttctctgcaagtttgcattaccaattgtccttataatctccaggggttaggtacaagtacggctgaggaaggcaaagagtactttagtaatcttggtcttcacaaaaaggatttcgtatgggaggatgaacaagatggagaagccagtgaactggctttcagtaagaagaagatcgaagcccggaaaaattggcttccgagctatgtggtatggaggattgagttatctttagaaacgtgtgtttattgcttactacatct

SEQ ID NO: 23677 - DNA, 543 bp, Arabidopsis thaliana columbia
tgactttgtggtggttttaggtattgactggtttgattacaagaagcagttgaagaagcagacaatggaacgttgaagtctactgatcaaaaagcctttgacatttctgtagcaaagtatagctgaacaaaactgtaattttcgcttctgaatttctgtattttgaagataagttttttagatatgttatactaaaaaaagagttctttaatcattatcatttacttcttcccattattttgctttaagttaaatgacacattgatatttatccatctaaaaaaaatgtcattttctttaactaattgataaggaaaaaaacaaatggttaatgaattgccttcagttgacagcaatctgtattttatggtagctaaccaatcctttaacaatatccaatcttattcttttatgcatctatttaaacaaagtaatggtttcttaggacacttgaatacttgagtcgttagttgatttagggttggactactagttcatgaaggctataatgtaccgtcaactccaagccatagaatatcatga

SEQ ID NO: 23678 - DNA, 544 bp, Arabidopsis thaliana columbia
  unsure (1)..(544): unsure at all n locations
nnnnnnnnnnnnnnnnnnnnctaaaggtgaagaaggctgagaataactgatatgactcaaatacacgaaatcattcgcgttgcatcgaggcggcaactgagtgaactcccatgagcatagataactatgtgaatgggatgagcgaaggcagtcaacgaagaggcagcgtgaaggataaagtgtataagcgtcccgtttcgatcttagtggtcatctacgcacaagatacgaaacgggtgctgatgttgcagcggcgtgacgatcccgatttctggcagtcggtaaccggcagcgtggaagagggtgaaacgcgccgcaagctgccatgcgcgaagtaaaggaagaggtcaccattgatgttgtcgctgaacaactgaccttaattgactgtcagcgcacggtagagtttgaaattttttcacatttacgtcatcgctatgcgccgggcgtgacgcgtaatacggaatcatggttctgtcttgcgcttccgcacgagcggcagatcgttttcactgaacatctggcttacaagtggcttgatgcg

SEQ ID NO: 23679 - DNA, 799 bp, Arabidopsis thaliana
cgggtgatgtatcacgcggcgatcggaatacagagattcataatatacgataacggtagcgacgatgagttaaacgacgtcgttaaagggcttaatagtgaaaaatatgacgtcatcaaagttttatggatctggcccaagacccaagaggctgggttctcccacgcggcggtgtatggaaacgatacgtgcacctggatgatgtatcttgacgtagacgagtttctcttctctccggcttgggataaacaatcacaaccgtcggatcagatgattaggtctcttctaccgtcggatcagagcatgattggacaagtgtcgtttaaatcacacgagtttggaccgtctaatcagacaaagcatccacgtggaggtgtgacacaaggttacacgtgtcgacgagaagaagatcaacggcacaagtcgatcgtgcggctaagcgcggtagagcactcgctttacacggccatccaccacttcggtttgaagagagagtacgagtggcgcgtggcggacacggaggagggagtggtgaaccattacaagtaccaagcgtggcaagagttcaaggccaagtttaaacggcgtgtgtcggcttacgtggtggattggactagagtctctaatcctaagtcgagagatcgaactcctgggttgggctttaggccgttgaaccggaaggatgggctcataagttttgtgaagtcgaggatttgagattgaagatattaaccagaaaatggtttgggtaccagttaaaaacggttataggatggcatggcagagatgattttttttt

SEQ ID NO: 23680 - DNA, 480 bp, Arabidopsis thaliana
cattatcccatcaaaagtgattagtaacgtataataaaaaagaattaggattaaggatatgtagttacgggattaagggtgctatgatccttgaagctttcctcaagaagagcagattgttgtttcgtaagcctaagtttttttctagcactaataccttcttcatcatcatggtaatcacttataactctctccgtcatctcttcctcctccggcgactcttcgccaccgtctctctctcttttcaccacctcccgcttgagaaagaagagactccgctgtgagatgacgtctgacggcatagctggtcagctccggtcaccacggtaaccgagggatcgcccgagaggcatagagtcaacgacggctcgagcttgtaaacggaggattgtctgatggtactattgtaattatctggaattggtgagggacctaatccaagaacaagacctgtgttgcatgtatcacgaaaccatctga

SEQ ID NO: 23681 - DNA, 964 bp, Arabidopsis thaliana
tgatgcagttgcaagtctttcttcaattggacgaccccaacatcatcacttttctcaaccattatattaccaacagaatggtcctgtagattcttttgagcttcactttctgagttcacctctccaattccttcagacctagacccatcgtggactgaatgatcatcgctctggcttagattgacttgcgatgagcctccttcaatatcagaacttggacacttctctgtggaagccatatctctagatataggttgatgcactacggccacaccaccactactttcaactttgctttcttgagatgtaggaattctctcataaagctcaagtatttggcctcggatatctgaaaacgcaaatgataaattaaccacatcaacaaggtctacagtcatcaaagtcaataatttttaagaaaagaaaaaagctaacacataccttctaattgacaaggtgtgatatcaaactcttgacacaagacctctctgtaagattgtaagtccactgttggcagctcagcagcaaggagaatagcacctgccgctatgtgatgaggctgatactgcaggcagagtgtcgttcgcagactgcaatagacttgtgattgtatgaagaaggaaaacacaaggcgtatagagaaccatcataattcaaaaagctttcaagtaacataatcaagcataccaatcgttgacaaaattccatgcaaattgggcaagttgggtcttagcatcttcaaccatatatttcttaattgcttctacaagaggtttataagggtggctaatacagagatcaaagttcaatgtagaaagaacaagctcctctccgattaatacaagctctttctgttggtcatatacttcctgcaaaagtgaaataacattaatatgcaaaagaaagtaaacaatagatcttttcaagacctactaaactagtcaacaaagaaatggacaaggag

SEQ ID NO: 23682 - DNA, 573 bp, Arabidopsis thaliana
cttgtcagggtttagagagttgatgccggagtatcttccagctatctttccggtgtgcgctaatctcacctccctgaacttcagttatgctaacatttctcctgacatgttcaagcccatcatactcaattgccacaaactccaggtgttctgggtatgtatccttcttgatctatgtcttcatggctttattaagttatatgtgacttaactctagtgaccgtattgtttgtgttagatggatagaatgaataaacttgatattagttgtgtaaggaacttgagtaaaatgcatgacttgaactttacaatgcaggcccttgattcaatatgtgatgaaggactacaggcagttgcagccacttgcaaggaactccgtgaactcaggatcttcccttttgatcctcgggaagacagtgaaggtcctgtctctgaattaggcctccaagcaatctccgagggttgtaggaaactagaatctattctctacttttgccagcgcatgactaatgccgctgtgatagccatgtcagagaactgtccagagcttactgtgtttaggctgtgataatg

SEQ ID NO: 23683 - DNA, 670 bp, Arabidopsis thaliana
ggtatgtatctttattgatctcattgtatagtatagtgtaatatcctttaaccgaggactttgagttacatgcgtatcttgaaacttttataatgcaggctcttgactcgatacgtgatgaaggactacaggcagtggctgccacatgcaaggagctccgtgagcttcggattttcccttttgatcctcgtgaagacagtgaaggtcctgtctcgggagtaggcctccaagcaatttcagagggctgtaggaaactggaatctatcctgtacttttgccagaatatgaccaatggagctgtgacagccatgtcggagaactgcccgcagcttactgtgtttagactttgcataatgggtcgccataggcctgaccacgtgacaggaaagccaatggacgatggatttggtgccattgttaaaaactgcaagaagctaacccgacttgcagtatcagggttactaacagatgaagcttttagctatataggagaatatgggaaattgatccgtacgctatctgtagcgtttgctgggaacagtgacaaggctctgagatacgttcttgagggttgtcctaactacaaaagcttgagatcagggacagtccctttggagatgttggattgcgctctggtatgcatcggtattcaatatgaggtttgtttggt

SEQ ID NO: 23684 - DNA, 104 bp, Arabidopsis thaliana
ttccgtaaagatacggtcattcgtacagccctcgcagccatgcagtgtcggctccatcgagccggaagggatcacatactgccgtccgataaagttctggaaaa

SEQ ID NO: 23685 - DNA, 539 bp, Arabidopsis thaliana
gcccgaaaaagtcagcaaccaatgcaacggaggttagaagtttcttaggattcgccggatactatcaaaagtttgtgaaaggattctcttccatcaccaaacccttgacgcgcctcacgagtaaaagcgtgccattcgcttggagtacggaagccgaggaagcatttaggaaactgaaagaggctttaactaccacaccaatcttaaccttacctcccggtaagccttacaccatatacacagatgcctttagagtcgggttaggctttgtattaatgtaagatgggaaagtgatcgcctatgcgtctcgacaacttcgaaagcacgaagagaactatccgactcatgacctagagatggcagccgtagtgttcgctctacgaatctgcaggtcatatttatatggcgagacggtccaagtgtttactgaccatcagagtctcaagtacttgttccccaacctgacctaaacctgcgacaacgaagatggatggagttcattgccgattatgatcttcaaatccaatatcaccctggga

SEQ ID NO: 23686 - DNA, 362 bp, Arabidopsis thaliana
tatcggaaatgatgaatgcggtaataacatcagccaccatcaactgcaactctctgtcgccgtcatggacatgcggagacaattcgccgtcaaagcttctgttgggggaaatatctgctgcgttatcacgacggaggaccgtgcaggtgtcatgcggcatgagcagctcagatgattaccactcaatgctcgaatcacgcgattctcgtggtcggttacccagagagtccctcggccaggttctctcacgatctactcgtagaccacatagcctaaaatcctcagctttgcgtgagacaaatggtcgaacatccattacgtagagaatggtttgaattgtctgtcacagcattacatgttga

SEQ ID NO: 23687 - DNA, 2301 bp, Arabidopsis thaliana
tactgaagatattctggagggcaccaacgtacactgctgcgagtagcggtgtcataccaagcttggcaaccaatggtgcgaatgggccaccaaacagtatcagagagaagaaggcaacaccggtcaatagcagaacggttggtgtgatctttgcagctactccccaaccatacttcttaaacacgtattggcttagaagcatcattgtgaatgttgcaatacctgtgcaggttgagaagtcgcccataaatgctgagtattcgttcgggctagggaactgcattcaaagaaaggatttttaggttcttagatgaaaagtgtagtagtaggagtagtaagtagtaattttcaatgggggttttgttaacctgagctttaagctttgatttccatgtgacttcaacaaggttgatactaattccatatgcaaccaccaaagtagcaagatccctaatgtatggtgatgacaccaagaacttcaagctctccattgttcccatctgtggtttcacctgtaacaaatcagaagaaccctcataagctgcatgtttaattacataaaaccattagtatttcatatgttcagccagtttattaccttcttcttcttgctacgggttgggaggggcacatatctattcacccaccagtagaggaaacagatggcgagacccatccccacgacaatactcatcatagcttttaatgaaacagcccagccatcaactccaggaccaagattctttctcatattagagaaatatttcacagttcttcctgagaagataagtgcaacattggccccaagtccaaacagaggatagaactttttggcttcgtcaacagttgtaatctgccaccaaaagattgcatgcaagtttaattcacaaatagcaaagatactgactcaaaagggttccaaatcttcaaggctatcaaacttaacatgagtctatgactagcagtagcagaaaacgaagagtgtaatcacaattacctggttggcaaatccccagaagagaactgaaacgacaacactaccccaaagctcagccatgacatagaacaaacagaaactccaaatcctcatgattgcgagaggacccatgaatctggggccgagtgttgcaagaagcttatcagcaagagcttcaggatgaatcaaattgctgagagggtacatcacgaaacccaaggctccaaagtagacaatgaaaggaacaataacagtgtaaaagagagcctttttggagagaacattggaaagtttggtgtatagcaacataaacccaatagccatcggaagattcacccatgtcttcaaaaagggtataatctcagcagaacttcctttcgccgtcaccaccaaaacatcctttgtatccctcagaattgtgtaattgaaaagaatacaaaagaacatcaatcctaaagggataatctttttcaaggttgcaacctccacaccgaaaatcttcggcgaggctacaacagctgcggaatcgccttcgccgaagacagctccgtcgccagcagccgcggcctccgccttgcatatgaactcggtgcttctctctttgtgggaaatcgaaatcccatgcagggttggctcaaaggtttgaaatttcttgtgcccgttaaaggatagagacaacccatgtagatttcttggcttcgcggcgaaaagtctctgctttaagccatgggaaggctgaagttggcttctcactccgatgggtttggtgggtaaagagagaagccctctggtttgaatcacagcttccatctctctatttcactctctcccgcagatacacagaagaaaaaatgggagagaaatggaggaggatgatgagatggagagatgataaaggagactggttggttagtgcaatgaaagaatatagtatcgccaattgaatattaacaaatgtggtgatgtgtatatatccggtaaaaggaaaggatttttttgaaattttcttttgcacttgtaaatgaaatgtggtaacgctcactgttttaacttgtgcttaatgcaaggaaaggctaatctttcgcatttatcaaattggtatcggggtagatcaatttacggtggtgttgttgactgttgaggcatgtgagctttttcatggtagccaacacagaaatagtctcgagggtacccttcaaatgactgtaatgaccttttggtattacttcttcttcttctttttttttttttgttgttgtgaggttttgtagttggtggctacaacttttttctttgagttggtggctaaattggctattacttta

SEQ ID NO: 23688 - DNA, 463 bp, Arabidopsis thaliana
ggtcgtacatacattagagatcttgctactttagtggtggcatacggtattagtatcaatcttgtggaagtcacatggaaatcaaagcttaaagctcaggtaaatatatacagctcctcatgcatctgtcgatttattctcgatgtttccattttctaagttccttcttatgctctgcagttccctagcccgaatgagtactcagcatttatgggagacttctcaacctgcacgggtgttgcaacattcacaatgatgcttctcagccaatacgtattcaataagtatggttggggagtagctgcaaagatcaccccaactgttctgctattgactggtgttgcgttcttctctctaatattgtttggcggcccattcgcaccacttgttgccaagcttggtatgacaccgctacttgcagctgtgtatgtcggtgccttcagaatacttcagcaagagtgca

SEQ ID NO: 23689 - DNA, 361 bp, Arabidopsis thaliana columbia
ggaactacgagacgaattcatgacgacgataggtttgattttaattatgcctgattctataagtcatataggtttagatgagatatattggttcaaatatcccaagaagccaatcctctatgttaacacatgcagcaccttagcggatgcatatatctacagcgattaggacagcttcaccggtgtctcggcaagtctcacaccaagagaacggcaaaagctgatgagtaagaccacaactgtttcgtcacgtttgcatatcctttatcgtatacaattgatcagtacaatactataacacgcaatgacgtaaaagccagacaatgtagaattatagcctactgctatatagcgaggtggt

SEQ ID NO: 23690 - DNA, 1087 bp, Arabidopsis thaliana
tgccgttgcaacctcggcagaaaaaatgggtagcatcttgttctggtgacctgaacttcagccagaataaagggaaacaacaccacttgtcattggtttcccacacgaattcttcatccacgtgtaatataccattttccaatcttacggctacttgaggacataaggaaataagtttcttccactttggatccatagagatgacgagggagactattttacggatgagtgatataagctctggctctggctcaagacttaatgttttaccaaagagtggcaagacctccaaatcctgctccaacaagggatcaacatagtagtcgagatctgcttttttagcgataaatgatatgagcttccttagcggctccggctgggaatccaaatccatagagttgtagaaagatatggtttgagtaataagtgacatgagctccgactccggcttctgctgcgttagtaacatagcatactcgcagaatgtgttacctacgtagcttagctcaataacgcgtgcaatgatctccgtattcgcatccccattatccacttcccaagggtcgtcgatagagattagttgagaaatggctgatatgacctccccctcaaaatccatagtgttgtacagagagtagtatgagtaagaaaaaaatatgagagatattgagtatgatctatgtgagtttttttaaatttttttcttatggttagctagggctagataattgagaggttataagaagatggataaagtttggagttcgtagttgagtggtggttgctaggacacgagtgcttgtgttagttgtgaataaatttaatgttagcaccagcctattcagatacaaccctacaaattcaatgcattgtatctaacaatgttttactttttcccaactaattgttcctttgttaaacttcacaggtatccaatcatgcatgttctcttcaccactgatcttattttaagtttggaaagtccaaatgcgtagaaaaagactttaagagagataaagaacatgagtcagagcaacaaaaaaaacaaaaacctgaaacaaaaattcgaagaccagtaagtaattta

SEQ ID NO: 23691 - DNA, 961 bp, Arabidopsis thaliana
ctggtcgaccgcgctctgcaagccccggagtacggcgagcacgcgacaggcccggcgcaggatgaagagttcgtgctgcacatgccgacaacgtcgaagccgcaggctttgtctcacacctcaaactcccccactacgtcgatttccaggccgaactggagctactcaaacgtctgcaacaggagcagaaccatggctaatctgagcggctacaactttgcctacctcgacgagcagaccaaacgcatgatccgccgcgccatcttaaaagcggtggcgatccccggttatcaggtgccgtttggcgggcgcgagatgccgatgccgtacggctggggaaccggcggcattcgagcttaccgccagcgtgattggcgaaagcgacgtgctgaaggtgattgaccagggcgcggatgacaccaccaacgccgtgtcgattcgcaacttcttcaagcgcgtgaccggggtaaacaccacggaacgtacggacgatgcgacggttatccagacgcgtcaccgcatccccgaaacgccgctgaccgaagatcagataattatcttccaggtgccaatccccgagccgctgcgctttatcgagccgcgcgaaacggaaacccgcaccatgcacgcgctggaagagtacggcgtgatgcaggtgaaactgtatgaagatatcgcccgcttcggtcatatcgccaccacctacgcctatccggtgaaggtaaatgggcgctacgtgatggacccgtcgccgatcccgaaattcgataacccaaaaatggacatgatgcccgccctgcaactgttcggcgcggggcggagaagcgagtctatgcggtgccgccgtttacccgcgtggaaagtctcgatttcgacgatcacccgttcaccgttcagcagtgggatgagccatcgccatctgcggatcgaccacagctatcttgatgaagtggtgctggat

SEQ ID NO: 23692 - DNA, 528 bp, Arabidopsis thaliana columbia
gtctcttctgcaatgcgcggccagtgggattggaacaagggagattagtggaggatggtggtgaaagggaaataagcttgttggagagagtgaagagctcttacttgttggaaactggtgagggaagcagacaacaacatcccacgttccaagatgtatggaattcgtcttcttattctaattccttccaaacttatgattctattcttcatggaaggtgaaaaaactagcctgggagtattttttaatcgaatttctatactattagtttatacatgctgtgtgattcttttgtatataagattgtatgtatttgatgactaaattgcatgaatcattttgggatgatggtaggggcctgtgactgttatttattattattactatcaattataatgatattaaaattgaattatgttgtaacatagtgacaaaacaaatatcatattaataataaaaaattaaaatataaatatcttaaataaatgactagataaatattctcaacaaacaaaatgcatatgtata

SEQ ID NO: 23693 - DNA, 532 bp, Arabidopsis thaliana columbia
cagaacaacttgttcttgatgatgaagctggatcatgcaaaggaaaaatgagctcagtggtgcagatgcgagggtcaattccactcttttggtcacaagaggcctccagatttagtcctaagcctgatatcttctgtgagaaactaacctagcatgcgtctgttatctatattacaccatttaatgtgtatgtattttttgatctacttgcttcttataaatgactcctgattctttaattccgttgttttggcctcagtacagaggtatgaccctacatatgagtcaaccaaaatgcattttgaagacctggtgaatcgatatgggaatccgatcattgtgctcaacttaattaaggttactctttctatttattaatgtccttttttatctagagatggttatgccttttgtacttatagacaaatatccatggaaatattcagacagttgagaaaaggccaagggaaatggtgctaagacgtgagtttgcgaatgctgtgggttactaaattcaatttttcgtgaagaa

SEQ ID NO: 23694 - DNA, 801 bp, Arabidopsis thaliana
gatccccgaaacacttgtaagtctttattatatatttctctaatatttcaggcattatacggaatatatatataattataagaaattcttcaggcattatatgcaaattgggaaccaagacacactctacgttgtcatagatttccatgtcaacaatatgttaaagttggagctgttcttcgtcaatttggttacactgttgttgctcttcacggttgcttacaaactgagattcaagtaaggttattgattacactataatgtcatgttttataatcaacttaaaatcattttctatatttgtttatcttttgtttttcaagactccaagatccgttcgcgcgctttttaaagatccttgtgtaagattagccggagaagtatgcaaagctttgacggaactcgcagatagcatctcaaaccaccgtcattgttcaccggagattctatccgatcatctccacgtggcacttcaagatcttaattccgctatcaagtctcagcctaaactcttccttggctctaacctccatcgtcacaataataaacaccaaaacggtagcatttccaataacaaacaccatcagcgcaacagtagtaacagtggaaaagatctaaacggcgacgtttctcttcaaaataccgaaaccggtacacgtaaaattacagaaaccggttcacgtcaaggccaaaacggagccgtttcactttcaagctttaggactgacacgtcagctttaatggagtaccggagatcgatcgaagacagtaagtcagagatgtcggaggagggagagagga

SEQ ID NO: 23695 - DNA, 571 bp, Arabidopsis thaliana columbia
ctcactggatttagaaggagagtgaagaatatcaaagagatgcttgaagatgtcaaagccaacgagtttcacaccagaatattgttcctgaagcttcgaagcagacaagttaagaccacctataattcataaaacatgtctttctttttcgtggaatctcgcttcttgaaacagcctattgaatacagagaagtttggtgcacaaaaaaaaaaaagaatacagagaagtcacaacgagcttcagtccaactccatacactttattaaacagaggaatcattcaaaagttcacaagatacagagaatcaaaacagaggaaataaaaaagaagagaaacgaatcaaagtttttgaaaacagaggaggataatgttcgttttaaatcatataaatatgatcaggagttggagatggggagcacgtggatcccaagtttatgaagcatgttacttgattttccatggaaaccaacgatcttgtgaccttccttgtggagcacgaagattgggtcatcatcgagtccataacatggagaagttcgcttgttagtggtgacttgagcatgattatac

SEQ ID NO: 23696 - DNA, 568 bp, Arabidopsis thaliana columbia
tttgagtgactcttcgccgctagctaaatctaaaggcaaaaccttgacatcttctggtgcaaatttacctagaagaagaatacagagtcagttacatcacgtgtcaacaaaaagctcacaattgtaaactggagagctttctttgattcattgtgtaagaaagtacctttaagctcactcttaacccgatccagttcagctttattcctagcagagagaataagcttggcatctaaacttgcaaactgtttagcaagaatttcacctgaatccaatcataaacatgaagagtaagcagccacaataaaagttatctcttcacagatatataatcctaagaaaacattcgttaccaattccacggctagcccctgtgatccagacgacctgagcaaaaccaagaaatctgaattaatgctcagagattgaaataatcgaaaactcaaatcaatcccactaaattccattttttcctctatcaatccagtaccttgccttgtatggcctcacgcttcacatgcttcttcgaaatcaaggtaaaatctcctacacaaaagcaaagatcaat

SEQ ID NO: 23697 - DNA, 642 bp, Arabidopsis thaliana columbia
tatatatatatatatggtgggcgaccaaaagtttaaccatgtccaaattaatcacaatttttcttttagccatttcataaaaaagtgcagtgggtttggttcatttgcatattcaaatccataatacaataaattcatttatttacctatacattatgtacctgtaacttaagaagattacctgtagatgggatttaacatgagccaatgtgagatcttgcacatccatcagctcaagtactgattttggggttgctcctggatattaatcataattactaagtcaataaaaatagaatttttgatcaagcctattcattattctttttgttaaaaatgaaaaagagatataaattcaattaaataaaaaggggtaatagtgaaaaaggacaatactttcatgaccacccaataattgaacagcgtgtacaaaatgggcgtggagggtcgtcgtccaccgcatccttggagcccttactcctcttttggcggtgaatcttggcggctgcggttgagcttgacgccgatgacggttgtggagattaaactacaattagggtttgtgattaagcgcgactagcatgttgaccgttgactcactgaagaagaaaggattgggagaggtagatgagtagtagtagt

SEQ ID NO: 23698 - DNA, 554 bp, Arabidopsis thaliana columbia
ccctaaacatgtataaggtcgctgcgggacaaaaaacatgccattccctgacccaagttctttgatatccaatgatggtttggtaagtcttccacatacagtgggccagatatctctaaggactctaaatactgaagtctttccactaccatttggacctgaaaatgttgctactgttagcttggggctcatgcaataaattcaatgacagagattaattcaccaacctgtgacgagcaggcttttccctgaaactatttcacacgacaacttgctagccatcaatttctgagcaggggtaatgatatccacctccgaaaaggaaagtagatcttgagaatccaaacgacttgtttgattttctgaggtaacacctaaaatagttggacataacgaatatgatcaactcaagtacagacattaggtaatgatggaaagagttcatgaaaagatcacaatctgaataatgacttcatatatgttacataaagcagcaagattttgcatcgcgtagccaaagtgtgaacctatatatgctgtagtactgactgaga

SEQ ID NO: 23699 - DNA, 971 bp, Arabidopsis thaliana
tttcttctattggctgaaaaggcaacctgggttcaagcatgatgggcatacgtataccactatggtaggtaatcttggtcgtgcaaagcaattcggtgagataaacaagcttcttgatgagatggttagggatgggtgtaagccaaatactgtcacatatcaccgactcatccatagctacgggcctgcaaatcacctcaaagaagctatgaatgtgttcaatcaaatgcaagaggctggatgcaaacctgaccgtgtaacttactgtacccttatagacattcatgctaaagctggatttcttgacattgccatggatatgtaccagagaatgcatgcaggaggtctttctcggatactttcacttacagtgtcataataaactgtcttggaaaagctggacatttacccgctgcacacaagctcttttgtgagatggttgatcaaggttgtacccctaacttggtcacatacaacatcatgatggacttgcatgccaaagcgagaaactatcagaatgcgttgaagctttaccgtgacatgcaaaacgctgggtttgagcctgacaaagtgacatacagcattgtgatggaggtgcttggacactgtggatatctcgaggaagcagaggctgttttcaccgagatgcaacagaaaaattggattcctgatgagccagtttatggtcttttggtggatttgtggggaaaagcaggtaatgtggaaaaggcgtggcaatggtatcaagcaatgcttcatgctggtctgcgacctaatgttcctacatgcaactcccttcttagtaccttccttagggttaacaagatagctgaagcttatgagttattacaaaacatgctggcgcttggtctacgcccctctttgcagacatacacgttactcttgagctgttgcacggatggtcggtcaaaacttgatatgggtttctgtggccagttgatggcaagcac

SEQ ID NO: 23700 - DNA, 462 bp, Arabidopsis thaliana columbia
gccagagtgcactaaaggtcataccgaagttaacggcaccaagaatgatctgggtgacgtaactgtagtagagaccggtggaggtgaaaatggagttaccgaagtagaagatgaagtttgcgccagagagcagcagcagggactgcagagcaataccaagaagagtacgatagagcatacgggggccagtcacaacctcgtgccagggagcaacaccagcagcgcgcacctcctcgagcttatccttcatgaccttcatttcttggacgacaacgcggtggataaccacaacaccatagagcatggccatgacctagcgggcctcgtcaatacggccaagacggtaagcgtaacggggggactcgggcaggaaaagagcatccgagacctaagatcagtggccaagcgaaaccgaatgccatggtgattctccacgaggcagtggattggatcgacacggta

SEQ ID NO: 23701 - DNA, 867 bp, Arabidopsis thaliana
taaaacatctatttaaggcgattgatgtggcaaataagtttgtttcagaggtggttaaattatatggattcccaaagtctagtgtttcagaccgtgatagaatctttctgggggcagtgtggaaggacatgtttaaactgtcgtgtactcagctgaagcatagtacatcgtatcgtcctcaaactgacggtcagacggaggtcctgaatcgttgtttggagacatacttgcgctgctttacttctagtcatccacgggcttggcataaatatttggcgtgggtagagttttcttttaatacggcttaccactctgctttgaagacatcgccttttaaggttgtgtatggtagagatcctccttctttggtgaggtttgaacttggttccacggataattgggacttggaggtgcagttaaaggagcgtgatctgatgttggaacatattcgagctaatcttcaaagggctcaagagatcatgaaacgtaatgctgatatgaagagaagagatgtggtgtttgcagtgggtgattgggtgcatttgaagttacaaccataccgacagcggactgtggttcgccgtccttgttacaagttggctgccaagttttttggtccttttgagatagtggaacgcattgggaatgtggcatatcgcattaaccttcctgcttcatcaaaaattcacaatgtgtttaatgtttcccagctaaaaaaagtgtttggcgagcaacaggtggtgcaggcaactaatcctccaaagttggtggaagatgaatttctgtttccggagaagattgtggatattagttttacggacaaagggaacaaagagttcttggttaagtggcaggatcgtggtgtca

SEQ ID NO: 23702 - DNA, 604 bp, Arabidopsis thaliana columbia
  unsure (1)..(604): unsure at all n locations
nnnnnnnnnnnnnnnnnnnnnnctaaagattgtgaaggagaaatgggcgaaagttggcatcgggatgaatatgcgtatgggcctccgttgccgcctagtcttctgaatgttagacggggaggccgatgttttagatagcgagaatattgttctggacggtagacgcttgtcatcgggaaaaaaacaaagttctctatgatcgatttaagtcttttattcataacttaatacagggcagccaacataggaaaatatgatgaggtcaatgctacacggatattgctagcatggctagactagaggttacaagattgtcggtatatgatggggggaaactgtttagaagtggatggccttggagtaggtggccatggcagcctccttgaaggcttcggcgagggtagggtgggcgtggcatgtccgggcgatatcttcgcaggaagcgccgtactcaacggcgagggtggcctcagcaatcatctcaccggcgttggggccaatgatgtgcacaccgaggatgcggtcagtctcggcatcggcgatgaatttgacctgacctcagtctcgaggttggtcttagcgcgggagttggcgctgaagggga

SEQ ID NO: 23703 - DNA, 575 bp, Arabidopsis thaliana
gggacacttatctcaactgtcacagctatccggatttgattccacacaaaatttggataaatatattcctgacgtggacaaaaatgacaaggatgctgtattggtgtttgtttcggaggctagatgggaagcttttagggagtgggatatgaagcacgagtaagtccattgtttttctcttaaattattagaattttatgctttgtcaatcaattaaattatcatgctttcacattttcaaagacttaaaatttggtccaagtgttatcaataaagcattactcggtcgactcttgccttctagcaaatggcttggcaacgaggtgcgttttaccaattgtcattaactttgcagtacatactaagtattataaagaatttgtggtgcactgattactcaccgatttaatatttttcaggatatggatgctacaatgcatttatttcgagagaaatcatctatagggcgactgaatttagctcgtgttggtttattggactgcatttttggcgtgcgactcaatgttgaatacaaaaagtttgtgaacaataaacgaagccaccaatggagtaga

SEQ ID NO: 23704 - DNA, 748 bp, Arabidopsis thaliana
agaagtgatgaaactatgcattgtagggataagacttgttaaatgtgaaggctgatagagagataggatggtgtttctcattttagaccatctcttgtccctgtcaaagaatcataaatggttatagaaacaaaaacatacatagttttatagagcatgtatgtaccattgtacctggtgaagaagaggcctttcttgtgaagaggagaagctgagattggggaaggaatgcttctgtttggaagatctttgaacttctttatcccaacttctctgcaaagctctgcttctgctattattatcagtggttgcctccccatctgaaatctgtttgttgttaatttaaatggacatgatcacttgtcttcattttgttttttagacacttgttgtgttcatcactcagtcataacaaccataagagatggccatatataccaaactaaaccaaaatgattaaacaaaattaaacataatgtgtttataaatcatttaaattaaaataaactgaaaatcaaatgaaataatacaaaaactacattaaattataaatgtttttttccattaggttttcttaattatttatctcttttggttaaattggtttcattattatcaaatgactaaaaatgaaactgaagttataaataaacagaaattcattaaaaagttatattttttaagttatatgtgttaaagagtacttgggtaactattaaagcactatttacatgaagttgttttcctt

SEQ ID NO: 23705 - DNA, 441 bp, Arabidopsis thaliana
atccccctgtatcttcagccttgaaatcactcggctcaatgtaccaaacattctcagccgagactacagctttcttaatagccggttgaagcaattcacgtctcttctgagtctccgcctttgcttgtgctctatcagcttcaattgcagccttttgagcttcgattcttctcttctcttctttttgcctctccctctcagcttcttccttggctaacttctcttgctctcgcagtttctcttctagaagaaaattctcaaagtcaactttatcaatccaacttttaaccgctacacaaaaatcttttgatcattgttgtcatatacactttggccaatggaaaacccgaagtccatcttatacgcttctttggggatatgaaggagacatgacaaccaatcttcatggatccaggtcttttccaatctccttgtgaaaga

SEQ ID NO: 23706 - DNA, 565 bp, Arabidopsis thaliana
ctgtggaatcggttcaagggatattgaacttcacaatggatgtagatatgttggctcattttgatgaatggcaaagaaccggtcaagaagatctctatgaagctcaagatcaatggccggttgagttacgccgtgctcgtgtagttacagcagtagattacagttcaggttttttgtccatttcaacttctcattttggtttataggttggttttgtgatagttatgtccgatttatttatctatctaatttaccggcttaggctcagagagctcgtggtaagttgattcgggaagtggagaagagctttacagtcgatgcgtttattggaaatgtgaccgattgggagaaagtctgtatgggaaacctagtcggtttgccggttctagtgattccgaccggtttcaagaacataacggatccaccaaccaacagttgccggagacggacaacgatcaatgccggaatttatgccctccagaacgtgatcacattgtaagtaaaccaatagaatatatatcttatatgtcgttcagtgaactgaaatttaggaaaattgtgtggt

SEQ ID NO: 23707 - DNA, 373 bp, Arabidopsis thaliana
gtatgactaattgccgagtcaatcccagctccatactctttagatgacccatttatctttacaggctttgtaatagttccagccacggcagaattggaaaagttccccccaccagagatcataggatacagctgaacctcacaggcaagagcacaaacagcagcaagaacgtatgaatcaaatgctgccacaggtccctgtcccttgacattcctacttttacggttagcagtttgattgttagatacaggttgattcgcctcaatatgttcagtagtactagcatattcacttctcggtctcttgctaccactagactgtgcttcatggctaacacatacagtcaacacaacaaaaagtaggcgtgaagcta

SEQ ID NO: 23708 - DNA, 362 bp, Arabidopsis thaliana
aaggccaatgatcaaccacgaatctataatgagtattactgatcaacttatttgtaccaacaacatagatccaagcctgaccaatttcgtcctatgagcacacgacaagcctttgatctatcaatgtagtaactaggctgagagtacgatactagactcggcaagtcaggactttaagacaagacacgcatatacattatgtcaccttcatgagaagaattacagagcacacagagcgtggataattcagcaagtggcttctactgaacattcccgatgcaaggcacacgattcggtggaatcccaagttaccacgtgaaaacctagcatgagtaaatcgaagagctatgcttgggcgatag

SEQ ID NO: 23709 - DNA, 422 bp, Arabidopsis thaliana columbia
aagtgatagtagagcctagaaggagagcagtgtcaaagaagtccgaaacttacacttatttccaaaagtgtaaataagcatagcaataccttaaagagaataatatcgggggtgctttcatacttgtgagatgcacgaacaccttcatctttggttttgtcgcgagttatgatccaatgcttcagcaatagaaacagaaggtagcctatcttgcccatctgccgaataagatgatccctggtcctcttgaatacctgtcatcgcctcccatgcagctctctcagaagcccccagtccggaattctttcttttgcgataaacatcctttgacgtcgtccggttttcagcattacgtggagcccatgagaatgccttcgagcctctctctgaaaattgcttaagctactagtgaaggatgcttt

SEQ ID NO: 23710 - DNA, 952 bp, Arabidopsis thaliana
tttgtattcataattagaacccaaaagatctctgatgttcaagttttatgtatgtgaacccaaaagataaactcatgagcaacctatttgtttttgaaatttttttcactcttatttcaatcatagttgattattgcggatttgccaaacatacatgtttcacggttcccaatattagtttgagttttggtccgtatcttccggttacaaaaagaaaagaaatgataccttgggagccaagccaccactacggaatgtttcacttgcacaatttaagaaatcaaaaagtgactttcttttttttgtttcgggttctaacgtcaatctcgacaacaatgatccgatcgacttgtcattttgccggaactaaagaaaattaacgggactttatttactgatcaaattactatgaaccgagcaaatgaaatagagatttgtcaccaagaaataatggatgatgcattcattgttgaattaaatgagagcatacatcgtatatagttactgtgtagaagaaattcatatataaaattgaattgaatgagtgtttgattaattaattgttttagagcttctacatttaggctgctggagcgctgcatgctttagggctctgagatcccaagattttgggactgacgtttgagcaatggaaagtggctggaccatctgctccattgtacttgatatcaatgtctccaatctccacgttctggcacggataccccttgctgcaaagtagcttcaccgcgtccttgttccctgatgttcctctgatgttcttgaagctaatgttcaccaacttaattgttgatgctttctgcaaatcacaaatcaattaacaattggaaaatcaaaatcaagcgttgagtaagatctgttgaagttggataggaaatacatacttgcttgttgcactggttccaagggcagtactcttggtcgatgagga

SEQ ID NO: 23711 - DNA, 326 bp, Arabidopsis thaliana columbia
tgaccgagttcacgtggggactccatacttgatatgatctggcattgtcatggaacataatgttatctaaagtaatacagagaaagaccaatacccttgtaagttgtaactatactatgttgtatgtaacacaacttgaaaatggcaagaaggtattgaattagtaacctcaagaaaggttgcattttccgggtcatccaacgtctttaacgagctatcatcgacagtgaaaccgttgctccagcttgttacagtgtgcgtaaacactttttgaggctcttcttcaagctcagatgaaacagtttcttcagacattgatcttgatg

SEQ ID NO: 23712 - DNA, 542 bp, Arabidopsis thaliana columbia
atttgatgattttgattatacatcgaaagatatgtgctactattttcttttacttcgcttatacatgtacttggtcaatagattccctccggctatagctacattattatcctcttcaccatggctgcagccatgagaatgagaccaggggatcgtgctgaccgtcggaaaacaacagctgcacttatcaaagcaaggcggttccggtaagatttcacacgtgggagtcttacaaccatcgtgcgaggtggcctcgcatagccgaccccaacattcgaccttgttgaacttggggatgttggaatggaaatacacccaaacaaaagcttcatgtagctcaggataattgtttaacatgttctcatctccatgaacaaaagcttttaacacctataaaataattcaattggtcacatatatataattaaaagaccactaaactgttacaagtcatatggaatatcaaattttatatcctatgatggatcaaaatcctatactgaaatcttaactaatccttaaaagtttgtgtttgctatgaa

SEQ ID NO: 23713 - DNA, 608 bp, Arabidopsis thaliana columbia
ttcttcagaagaggcagatccactacttcatgaaagttttcattgcacttctgccggggatactaattttatggtttataagagaatctgccatgcttctccttatcacatccaagcgctttctctacaagaagtataatcagctgtttgatatggcttatgcagaaaattttatattggtaatcatcgttactgtataccattaacctcgttacttctttgtttagttgccttcttcccacatattcacacttctattgatgagttttaattatcatacagccggttggagatgtcagtgagacaaaatcaatgtataaggaagtggtactaggcggtgatgtctgggatcttcttgatgagctaatgatctacatggggaacccaatgcaatactatgaaaaagatgtggcttttgtcagggtaaattacatcttgacccaaaaactaacatgtggatattggtttattccatttaactgtctaagctaagctcaaactctcctctgtcttcatttttgagtcagggtgtgcttctttctggacctcctggaactggaaaaacactttttgcgcgacacttgcaaaggaaagtgggctacatttgt

SEQ ID NO: 23714 - DNA, 524 bp, Arabidopsis thaliana columbia
cttcgtaaacaatcgtgtggcttttcttgttgaacaattctgtttctgtacttagggctgggattagatcataagaatctgatcaaagctgagatttttaagattttgttggtaacctgagacgattttggtcttgattcactcgagaaactccaaaaaagttttgatttttagtgttagattcagatagtgtgtctagggttgttgattgatgaaatagtgaatagtgtttcagataactttgcagagattctgagtcaggttttatgtttcaggactactaatggatgaaacaacagaacgcccaactgtttcgttttcatattcaaattggatatcaaacatcaaaaaatcaacacgagaagcttacgaagcaaagcccttttcacattggattcttttgttcttcagtggtgcggcaatgctcatagctttcccagcttctagtctactctctcgtctttacttctccaatggtggtaaaagcaaatggatcatttcttgggttgctgttgctggatggc

SEQ ID NO: 23715 - DNA, 615 bp, Arabidopsis thaliana columbia
tgttctcttgctggttcttatctatggaggttgtttcattggcaaattgtatgagaatttgtaactttggacctcagcgagcaaatccatgattatatgtatctataaacattgacagagaaaaaactgtttcattgtgtcaatcactgacaaaatgcatggcttcccctgtaatgagattttgaactattgaggattgtttaagttttgttttgttgatgttctctgaatagactccaatattctcttggtcaatactgttagacatttcaaaaattgataatttctttcaatattgcaggtgcacttatgaccgcgggagtgctcacggctgggttgattagtttcagaagaggcaattctcagttgggtcaggttttgatgagagctagggtggtcgtccagggtgctactgtcgctttaatggttggaaccggttattactacggtgataatccgtggaagaagtgagcccaactacttgttcgtttcacataattgagatgacactcgggaaatctgcgggcaaaggtgtgtgtccctcgctctgagtgtagaaatatgcggtcttgctaggatttagtaagggtcattacatgatttgaataatttgaa

SEQ ID NO: 23716 - DNA, 1011 bp, Arabidopsis thaliana
tcatccgctgaccatcatcagtgtcctcaggatggtgcttagcccctccccataggatgtctttctcagtatgagaccgtagccagagaaggaagtccctttttgagatacacgcgactgccataccgcacacagcatctcccaaagcagctgcccgaggataacccgcatcgcctaaactatctgtgcttgacccgatagaatcagaatggttagcaaccaaccactccacaatgtcattaatctgagaatcagttggagtcacacccaacggataatacttcccttggtaaagaaatgccgcaccattacattttactaaatccatgatactaggcctctgcgtgacaatccccgctggtgagtcacgtagaagcatatcacataatagtgtctgcattctcagaacgcgtttttcagacacctgcaaggctaactgcaactccatgtttagctgtaagcaaaggctgcataagaaactcacaagcgtacctcaaaggaaaaggtatgcaacgagctgatgtgtgatggcaaacaactaaaccccaaagcctcatcgagtttcttcctccagtattaaccccattaccatcttcttcgtttccatttattataactgccatagctaacgacgcaatagagcccatgttagtcatgtattgagcatgacagccatgaggagctcgcaaagtcgaacccaccaagcatataaactgcgtgagctatcgtcttgaaccacacgaaccggtgacgcatagcaatctactatcatcctaacacggttttgcttgaacaagaaccgagatgcctgaggaatatcagtagcgggataatgcagaccaatgtaaggctctaaatcgttccgtttactctcggctacgacttcaccatgttcatcttcatgaaacttgtacaccataacgcggtcgtagccagtaagatctctaacgctttccacaacagtgtcacatagaagcttaatgtcgccgctagagacgattgtaaatgaga

SEQ ID NO: 23717 - DNA, 480 bp, Arabidopsis thaliana columbia
cgaagaaggcccccttccgcttcgtttcagtgatcactgtcgtggttgtccatgtcatttcccacgttttccttccatttctcaaaagtttccctctgttttctcctgaagcagcttctcctctatgggttctttttgtaagtaatcaaattttaaaaagaaagtttcttcctttctcaaatcttcaagtatacccacgattcataataatattccatgtccttttattttcttttctcttgcttgttcctcatgccttctcattttagttattaatcttgcttttcctacttctttaatgatgatttggttttggggtttcgtataatctctgcctctaagtaatttcctgtgacactgaaagctacttgctttgggttttactcaaaggtctctttttgttgttcaatgttaagctcaatgaattgggttctattgagcttcatcattgttcttggtggtgggttgctactttcagag

SEQ ID NO: 23718 - DNA, 550 bp, Arabidopsis thaliana columbia
  unsure (1)..(550): unsure at all n locations
nnnnnnnnnnnnnnnnnnnnnctaaagtatgcaataaatcacgcgcttcgtcgcgttcatgggcgcgctgtcgcaagcgccataagccgcgccactctgttaccacagaacctacgccagcgccgataatcaatgccccagcggcacatccacccagcgccacccagtcctgggtttgccaggcattcattgtccactgtacaccctgcccgacaacgcttgcgccaaacagagccagccctcccatcaccattttgcgccacaggctgcgtttcggacgtaacgctgcgtccattaccgcttcgacttgcccctcttcttcctgcgcttcgtcgagcgtggccggggcaaaattttgcgcctgattttcgtcaaaggtctgctgcgccctgaatttaggattctgatcgacctccagaggaccgtcgaaatcaatacgtggttttaacggttcggtcatcgcaatttatctcctattaaaaattccagcgcacgatcaagacgaatatgcggtagtggtttgtcgacatccatacctgcggacgaaatg

SEQ ID NO: 23719 - DNA, 531 bp, Arabidopsis thaliana columbia
taatttggatatctcccttattctagcacgtctacaacccctccatttctcatacgaattcttttcccaacttttgagtcaaaccattgacagtagaaaagtgtgatctttaagttaacaaatcctggatactcgagcttgattatagtttcaacgatcccataaacatcttcttcatgagatgcttcagaataattttggcctcgaacacataccccataattcattattttattggtacgcccatgatcctgcgtgtgaaacatatacgctcttgtaaaatacatgggccaagacttgactttgttttcaggaccttctactatttcataaacccatggagggaaactttgatgacttcgcgttgcttccacctacataaaaatctgataaatcataaaataaagaagtaaacgtacacttttaatttgtaggatatcagagagatgatcggtagtatttgactacatattggcgaatccatatatgaaaatcttcatctctgttcgacgcaacctcatcatcagagag

SEQ ID NO: 23720 - DNA, 922 bp, Arabidopsis thaliana columbia
aagaagacttctctcatggattttaactatttgcaccgtctctatcattatttagtgttcgctggcggacacgttttgtaaacgtgtttatcatcatcatcttgcttcccgacgagatttgagttcaagaagcaaaaatggcgagtttcatcaaggcatggggtttagtgatcatctcactgtgttacacttttttcattgccaaattggttccaaaaggaatcaaaaggctcatactatttttccctgtcttcctcatattcctcatagtacctttcttgatatattccttacatttactcggcatcacggctttcttcatcgcttgcctagcaaatctcaagctcttattatttgcattagggcgcggtcctctctcttcaaaccataaacccctatctctccctattttcttagctgtctcttgcttgcccatcaagattcagctgagcccaaaacctacaaaaactcactcccatgaaggatccacagagggtcctttgatttataccataaaggcagtttttgtggttctcatcatcaaagcctacgaatacagtaccaaattgcctgagaaagtcgtgctgactctctacgcgatccacatatatttcgcccttgagatcatccttgccgccacagctgctgcggttcgagccatgtcggatcttgagctcgagccacagttcaacaagccgtacctagcgacatcacttcaagatttctgggggagacgatggaacgtgatggtcactggaatcttacggccaaccgtgtacgaaccgtcacttcaactgttctcggttttgggccgaactattccgagattcttgcagctttcgggacgtttgttgtctctgggataatcacgagctcatcttcttctacatgggacggttgaggccagactggaagatgatgt

SEQ ID NO: 23721 - DNA, 878 bp, Arabidopsis thaliana
cccagtattacaaacatgtcaaaaccgtcggctagacaaagcttgagtatcaacttgatccctgtttgaacatcaattctctcttgcaacgtgtagtcacccgtgagctttccataagctctcagcaatatgatccaccacaaacctagccaaattaagaaagattccaatcatattattattaaactaatgtttatagtttcacaactttgaaagtagaatgtgatttagtagctggaatgtcaagggtgtatgtttatctatgataaatagaaaatgttagagcacaaagagttaccagagtcaacagggctaacacgtccaatggctgatccaccaaagtctggatctaaaaactcctcaaatgaaccatcatttccctcaagtggcgcagatttcactttaaaactcgctggcattagccccgggccagggctgtgacagtccactgttttctcccagctctaacaaccaagcaacaaaaagctcgattaataaactccggcctagatcagtatatcaaatgccttacaattgcatacacaagaattgaagtcaacggaagcaaagggaaaacacttttctaagaaccatatataacttcgagcttcattaaagctatattagttaaacaaaaatcacagattaaaactaattttatcaaataagcatcaaatttatgagatctcagaacaaactataacacttttctaagagttagaaactaacggaactggcaaggagaggcatcctcttataaatgaaacttggtggcctcttcaagagcacagtattcaacaactaaattatgacaagcaataaaacatttcaggtctaaacacaagaagacatacctggaactggaacaggggagatat

SEQ ID NO: 23722 - DNA, 930 bp, Arabidopsis thaliana
gtgaaactgtgaattaaccaaagattaagaagaaaataaattcgtccaccctgttaattttaacagacatgaataaacaaggatgagaatcttacctttaaaaaggtcattgcttagatggaaattacttctgacaaagcctcacaatatactcctccatccttgatgcagagatcagaaagtagattttgccaagcaccagacccaaaacttaagtttttctttcccatcacctctaacacaaagcaagcatggtccaagttaccgcctttaatcagcccagcaaccatacatacaaacgttgcaggtgtgggacagtgtctgcttgcaagcattgcattcaaaacattcaaccctgaatcaaaatcctcgatacgacaaaacccatcaatcatcatacggtatgtagctgcatttggtttacaccctttcatctgcatttccgtcagcactctataagcctcagggactctacactcagtgcaaagatggtttaccagaatgttatagatcacaacatctggttttatccgtcttttcttcatctcgccgagtagaagctttgcctcatcaattctccctctcttcccaagatcactcatcaaaattccgtagttaacgagacccggtttacacccacgatactccatatcgaacatcaacttctttgcttcattgtactctcccttacaacataaacctttcattaacaacccaaatgtcacagcattcggacgtattcttttcttaatcatatcttcaagcaagctcttcgccttacccatatcgtcatttcggcataagaaaccaatcaggctattgtatgtcacaacactcggttgcacctccatctcaagcatttcgtcgaacaccttacatgcagcttcccaatcgcatttatcaagaaatcctttgatcaaaatattgaaa

SEQ ID NO: 23723 - DNA, 456 bp, Arabidopsis thaliana columbia
tgttgaatttcttggtttcagtcgatcgaatcaaatgaattgccgattagatgttttcttaacataatttctaggattttgatcgaattgctggttcgtgatcgagtgatttgtctggattagattttaagttttatgcaaatcttgttgaaaggtgcttaacttttgattcaagttttacttaagagccaaattataggtcaatgtcatgtagattactattaattcttgagtaaactggtttaaatatgtttttgtatatatgttccagattagaagttgatattgatataattcagcaaagagaagaagattctgcggtgttcttggtcactttgtggtttgtataatggcgtctgggacagtgggagggttgtctgaggtatatagtagtgcaaaaaggattctactaagagctcggaatggaatcgagaagttggagaggttcgactctga

SEQ ID NO: 23724 - DNA, 1089 bp, Arabidopsis thaliana columbia
tccatgtgctggtgcagctcaggacgctaactccgccgtgccaggaggttgctgtactcagattaagagattttctcaaaaccctaaatgtctctgcgccattcttctttccgacacggccaaagcctccggtgtcgatcctgaggttgcccttaccatccctaaacggtgcaatttcgctaaccgtcccgtcggttacaagtgtggaggtaagtgactttctgttacatctttatattatgcttttacttaataattttcatgatatatctaatgttctttgtttctttttttccctttggttatagcatacacacttccataaaatgttgacgattagaaggatgaaggagataacattgggccttatgtggaagcttggagtttactactacgtctccatgtaccttataatatatgaataacgataatgtttatatgtgtatcagtgtgattgttgttattgaacctatatcaataaatatataaaaatgattccactctacatttcaaattacagaaacacaagtatccaactttgtgcttgaaaatttgacattgtttaaactagtgtcgttttggcaaacactagtacgacttagtttacaagtcagatctatcaccaatatatactcatctaacacgaagcaataagagatgatgctatagttttcaatttctcaaatatagtcaagccattgtctataatctatatgacgaccgattctgacttggccaacggaaatttaaaagcgaaataaaccaagtctttatttatatatttattgaagttataaaaagtgtgctggggaataaaaccaacaacaccaccaaacaaaaaaacagctgagaaaaaacaaaccacatagatcctattgtctatatgtagttactaccatactttaagttgtgcacacactttctctatttccttggcgatggctttactttactatataaaatctgaaccgccgggaaaatgctcgaggtctggatgcccactcctggccctcttggaggttgtctagacacgattgatatagagaagaatcagaccatttgggatacagattatgattgtggagtgta

SEQ ID NO: 23725 - DNA, 652 bp, Arabidopsis thaliana
atccccggtaccatggatgtaagtgctctctgccttttttcttaacctaaagaagtgtcattcgggtaaacactgagtcaactaatatggtgatatccaacagatgaagaggctctcgtcgctattgaacgaagatccagcaatcatggagagacgcagtgccatctcaaagcggctagaattgtatcgagcagcccaatccgagatcgatgctgttgcttggtccaagtgataccggcatgtcatgtccactgttttgctcggttctggtcggtgtggctcagactcggagcagagatttagggtctgtaatttgtataagatgatcttcccgataccatgcagtatcgttttatataacatccacattgtttgtcctacctctatgttttttgtccatcacccgatatgttacgtatcgttttataacatccacattgtttgtcctgcctctaatgttttttgtccatcaccgagatatgttacgtatcttttataacatccacatagattagattttctctatccctttatttaattactataaatgtattttcgcatatgataattttctgtacaatagtataatattaacatctaccaaaaaagagtataatattaaatatgatacgataagaaaaatctatagtta

SEQ ID NO: 23726 - DNA, 625 bp, Arabidopsis thaliana
cccaaagattatattcaaccaatgatcatgacgttcatggatcatcacatatatcagaagggacaaatgaagaacatcatgctcatgatgaagatgaccttgaagacagtgatgatgatgatgattctgatgaggacaacgatgaaggtattcaatcaaatttctcaaccatcaagtccatctgataattcaaaacacaacgaaattttagttagcttatatttgcagattcagtgaatggtcacagaatccatcatacatccacctacattaacaggagaatgcaactggtttttgatagcctcggcttgcagagatatgtactcttgtgctctaaggtcagtccagaacaaaacatccagtcaagttaacacttaacatttgtataacacaagcacacacacttgtatgcgcagatccctgacggtggattcagagacaagccgaggaaaccccgtgacttctaccacacatgttactgcctgagcggcttgtctgtggctcagcacgcttggttaaaagacgaggacactcctcctttgactcgcgacattatgggtggctactcgaatctccttgaacctgttcaacttcttcacaacattgtcatggatcagtataatga

SEQ ID NO: 23727 - DNA, 1454 bp, Arabidopsis thaliana
cttaaagacgccaacatcttcattggttctctgatcttcgtcgaggaattggcgattaaagttaaggatgcggtggagaaggagagagacaggatggacgcagttcttgtcttcccttcaatgcctgaggtaatgagactgaacaagcttggatcttttagtatgtctcaattgggtcagtcaaagtctccgtttttccaactcttcaagaggaagaaacaaggctctgctggttttgccgatagtatgttgaagcttgttaggactttgcctaaggttttgaagtacttacctagtgacaaggctcaagatgctcgtctctacatcttgagtttacagttttggcttggaggctctcctgataatcttcagaattttgttaagatgatttctggatcttatgttccggctttgaaaggtgtcaaaatcgagtattcggatccggttttgttcttggatactggaatttggcatccacttgctccaaccatgtacgatgatgtgaaggagtactggaactggtatgacactagaagggacaccaatgactcactcaagaggaaagatgcaacggttgtcggtttagtcttgcagaggagtcacattgtgactggtgatgatagtcactatgtggctgttatcatggagcttgaggctagaggtgctaaggtcgttcctatattcgcaggagggttggatttctctggtccagtagagaaatatttcgtagacccggtgtcgaaacagcccatcgtaaactctgctgtctccttgactggttttgctcttgttggtggacctgcaaggcaggatcatcccagggctatcgaagccctgaaaaagctcgatgttccttaccttgtggcagtaccactggtgttccagacgacagaggaatggctaaacagcacacttggtctgcatcccatccaggtggctctgcaggttgccctccctgagcttgatggagcgatggagccaatcgttttcgctggtcgtgaccctagaacaggttagtccacttatgaccatattgcatttttcatgattgtcattacgcaagagtgggaatgttttcttatggaggtggtttaccaattgctgcagggaagtcacatgctctccacaagagagtggagcaactctgcatcagagcgattcgatggggtgagctcaaaagaaaaactaaggtattgtattaccactcatccttagtgaaatcacattccttcatgactttctcaagaatgtaatgtatgttctcatgaatcaactctggctcattgcaggcagagaagaagctggcaatcactgttttcagttcccacctgataaaggtaatgtagggactgcagcttacctcaatgtgtttgcttcatcttctcggtgttaagagactcaagagagatggtacaatgttgaaggctccctgagatgcagagatcttattgaag

SEQ ID NO: 23728 - DNA, 513 bp, Arabidopsis thaliana columbia
tacaaaagtgtatagtgttatttataacacaatagctaatattgtgaaccgcacattatgcgggttataagtatgatcatatagttttgataaaagtttgtattaagattgtttttttttgttagtgaattatataatagtatatatcataaacttatcagttatcataatctttaagaataagatgtgtggaaggtaatgtaaaagtaatgaaaagtggaccctccatgtagatggtgcgtcctcacagctcgaatccggcgtcggcatacgcatcacctccccaatgggagagatcctagagcattcttttcgtctggcattcaaagcatcaaataatgaagccaaatacaaggcactcatagccggtctttgtttccaaaaagccttgatgtttgtaaatttcaggcttactgcgattcacaactcgtcgctagtcagtacaatggcgaatacgacgtcaaaaatgaactgatggacgcctcatataaatcgttcaggggcttgcaagac

SEQ ID NO: 23729 - DNA, 558 bp, Arabidopsis thaliana columbia
ccggatgttgattcaaccctttggttgtttaatcgttgttgatgagaaaaaccttaaagtcattgcctttagtgaaaacactcaagagatgttgggtttgattccacatacagtaccaagtatggagcagcgtgaagctttgactataggaactgatgtgaaatcattgtttctgtctccaggttgttctgctttggagaaagctgttgactttggtgagattagtattttgaatcctatcacgcttcattgtaggtcttcaagtaagcctttttatgcgattctgcatcggattgaggaaggtcttgttatagatttggagcctgtgagtcctgatgaggtgcctgtgactgctgccggggctttaagatcgtataagcttgcggcgaaacgattcgaggttgcaggcattcctagtgggaatatgttgttgttgtgtgatgctttggttaaggaagttagtgaattaactggttatgatagggtgatggtgtataagttccatgaggatgggcatggggaagtgattgctgaatgctgccgggaagatatggaacc

SEQ ID NO: 23730 - DNA, 590 bp, Arabidopsis thaliana columbia
caaaaaaaagactacctaattaattcatactagaagattgtcaactataaaagacaacaatgtaaaagctactagagatatctcgtaccaggattttgagatgggtcactacttaaaacaccttgaaaggccacttcttgttcaaagtagttggaagaacctaatttagtcaatgctcgagcagaacatgacgcaactgtgttgcaccagcctccaccctttcactcaaatatattctcatccccatctaaactcattatatttaaattcaatcaatacaaaagacaagacaaatacctccaaatgaacaagccagctttgggagccagatccagaaccctcatgaaagtggtacccaggcaagcttccatccaaacaaactgcgcaattgaatcaatttcagttaaaaatccaaacttgcaaaagtgtaagacaaaaaaaaaacgagaggattagtaacagttacaagctcctctctctttagctacactcgacaacttcagcttgaccagatcgctaggagatatgattggccgagatcggtcaacggaggggacagagtctgaagtgggatcgaagaagaaagagag

SEQ ID NO: 23731 - DNA, 552 bp, Arabidopsis thaliana columbia
tctattaggaacagttgggcaaagctgtccatcaggaatccacctatatatataagactttggtaaataactaactgttcttgagagcaaaaaagctagttcctttgtacaattgaaatcataccagttgacgccatggtcatgtagaaggaggacacgagtgagctctcgggttgcgttgtaatcggtccagtcgatgcgagctcgactaccggagaagacaacaaagggcttgaaagatgggtaaagagacgctaacgaggcaaaatccggtgggttgtcggagtatttgcttcggggttgctttgtggatccaggttctgagcgagctctcttcttcccactccgcattgaaactactccgacagataaaacttaagccgtcggtgagagagaagacaacggcggtgaactggagtgaaggcatgttaaagcctctgcctgagttagcggctttgatcagaagccggagattatttgcgctcccagcaaagcgactgtcgttcgagcaacaaaattattatttttaattacttttggctcaaatatgat

SEQ ID NO: 23732 - DNA, 532 bp, Arabidopsis thaliana columbia
tgctacaaaaaatattcagcaagagaagaagtgttaacttcattcggtaaaattcaataaaagaaaaaaaagaatagtgaaaactgtccatttattattcacacggcttgagcttccaagaaactactgaaatcctcggtggcttgtagcaaccgtggcgtgattgaatgtgtcggagacgttggataagaaaccggcgacgaggttgagaaccgaacgtgacgtggtgactccattgatcttcttgatttcgaaccagacgttttcaaaacacctttgatctctttgtccaaattaggttccttgtcgaacacgaaagcagctgaaacaggatcgtcttgatcgttccctcccggcccacctttgatcaattcggaaggcaagtcgaagaaatggccaccaagatcggcattgtcatcgtaaatcatagccgaagatgtccaagaaccgcactcgaaccgctctagggaggctcgagccgagagcacggcagtgtctctaatggaagcggttctgccatcgattgagagga

SEQ ID NO: 23733 - DNA, 559 bp, Arabidopsis thaliana
cgggaagcgatgtaatcaaacgaatgacgagagtgatcggtgagctaaagtgagttgcgaatcaaatccgattcgtacaaattggtataagagctccaggttctcgtgttgactgaacgttgttacaaggatgacgaactcgaagatcaagatatcggtgttcgatggaactggtgacttctctctctggaagacacgcatgttctctaatcttcgaatcctaggcttgaaggatactctggtggaacaagcttcgttcccaccactgtcagaagaagatgaagcagatccgacgaagaagaagaagcggatcgaagaagaaactgagaagattgaacgatgtgagaaagctatgaacattatctttcttaatgtcggtgataaggtattgaggaagatcgatcagtgcaagactgcagccaaagcgtggatgttgctggaaagattatatctggtaaagactttaccaaatcatgtgtatttgcaactcaaggtatacaactataggatgcaagaatcgaagtcacttgatgagaacattgatgagttcttaaagatg

SEQ ID NO: 23734 - DNA, 604 bp, Arabidopsis thaliana columbia
gtaccttgaggtacacaaaaacccacgcgacacacagacgattgcataaatgccaaagactcctgcgatgccaatggatttgagcatgactgggagagtgtaagtgacgattatgtcacagatccagaaagtgagggcacatatggtgatgcagagaccgcgcacagaagtagggaatatctctgagcagaggatgtttggaattgccccaaaacccatcacgaaacagcttaggtacaccgtaacacttgctgtcgatatcaacgcgtttattgaacctccaagattcactaagcttcctatcaccagtgttaccagcgacagtattagaatggggatagtcgaaagcatcagagacctgcaatcacgcttctggtattgttactctttcaaattataccattcagctataaaaaaagagaagggaaagcagagaaaactcgccttctgccagttacatccattaacctcatggagacaagaatgcagggaagcatcaagagtgtggttaaggcgcttatgagaagcgatgcagactctgcacttattccaaggtttgtcaaaagacttgacacaccatgtttcttccaatatttgaggtgta

SEQ ID NO: 23735 - DNA, 919 bp, Arabidopsis thaliana
tctattgatgctactaaaccaaccaagtcatgagcatcatcttttgccagtccaaattcacctgacttattcttctctagcaacttataacattgcctcttgaaatgaccttctttcccacagatccaacatatcttcttaccatcttgagatctttattttgaattgttgttctgatttcctttaacgtaatggccttttgctgtagacttagaactggattctgcctgaaactctaatttcttagattttgctgcgcttattacctcttcaagttgtagtccttctcttccatatttggctggaagagaactcagaatcaagatcgtgtgtacctcatcggggacttagatctgcagattacttaggtctgatatcatcttcaagaactcatcaatgttctcatctagtgttttcgattcctgcatcctgtaattgtaaaccttgagctgtagatacacacgattcggtaaagtctttaccatatataatcgttcaagcaacgcccatgcttctgctgcagtcttgcagtgatcaatctttctcagtaccttatcaccgacattgaataagataatgtccatagctttctcacatcattcgattctctcagtttcttcttcgatttgtttcttattcttatccggatctgattcatcttcctctttcagtggtgggaacggagcttgttccaccagagtatccttcaagccaaggattcgaagatgagagaacatgcgtgttttccacagtgagaaatcaccagttccatcgaacaccgatatcttgatcttcgaattcgttatccttgtaacaatgatcagctatcgcgagaacctggagctctgataccaatttgtacgattctgacttgaatcgaagaacaatctagctcacttcactcacgactctcgtttga

SEQ ID NO: 23736 - DNA, 561 bp, Arabidopsis thaliana columbia
tccccaacttgatcattgtctcaatagcatcattggaagcactgccttcacgtagcatgtcattgaatgggaccacagaaagcatactcttcaatgcatccaaaacgtaaattttagactcaggtagatcactggtcagcaaagcagtaagctgactgatagttgcagtatctgatttatgaatcaaatgattcaatgtcttggcggcaatttctttaccatttggactaccattctttagtagccataagagagcagggacagcatccgcactttcaacacaagcacgtatatcttcgctatgattgcacaagttcctaaggatagttgcagagtcttccctggctttggccgacccagtctctagaatttgaacaagtggaggtatactccagcagcagtgatggcccacttgctttcatcattttcgttagacaaaaggcaaagaagtgcaacagcacattcttgctgctgttcggatgaaagcccaaaagagatattagcaattggatccctcacggccctgtagtgcttgcacaggtaccttcatggttaacagca

SEQ ID NO: 23737 - DNA, 546 bp, Arabidopsis thaliana columbia
gaatttagtccaaacagctgagaataacttggctacagagagaaagaaaattgaggtagtctctcaacagattaacgatctgcaatctcaggtggaacggcaagaaacagaaattcaggataagatagaagcactgagcgttgtttcggcacgcgagttagagaaagtaaaaggttatgagacgaagatatccagcttgagagaagagttggaactagcaagagagagtttgaaggaaatgaaagatgaaaaaaggaaaaccgaggaaaagttatcagagacaaaagcagagaaagagacacttaagaagcaacttgtgtctctggacttagtcgttcctcctcaattgataaaagggttcgacattctagagggtttgatagcagaaaagacgcaaaaaacgaattctaggtacttttttttttctttctctacctttatacatggaaatacaagtatttatcccttggttcaacagcatgaagataataattgtatgataactttcttggatcttaggttgaaaacatgcagagtcactgagtg

SEQ ID NO: 23738 - DNA, 1000 bp, Arabidopsis thaliana
tggattctatggaaccccttcctcagagctcgcagatccagcacaagctaaggcacctattcaggctcattttggagagctcgacaattttgtcggtttttctgatgtcacggtatgtgtatatacactacactacatctcaacttttctgaaattgacatgagatcccatcatgaattattacaaacctttgcaggcagcaaagaatctcgaagagaagctgaaagcgtctggagtagcacatgaagttcacatctatccaggtaatggacacgcgttcttgaacaggagtccagaaggagtgagcagaaggaaaagcatgggactttctgatgaagatgaagccgcagtggagcttgcttggtctcgcttcacctcctggatgaaacagtacttggcttaagctttcttccatcaggcagcaatggttgatgtaagtcccaaaacgttgtgtgatgcccaatcatctttaaataaggacattgctcttagaacttttaatctgaaccaaataaagaggtttgtttacttgtgaatcagtattgagtggaaatgttcgaagccttttttgtaaattaggactaatatcgatgtgtctcgtctttttgtaattgtaatgagttcaatcccggaaactaggaaatgatagtgtacatgtagtaaaactgaattactgccaagtctgttatatcagcttataagtactcaattgtgaatacatcaaagacattctcctagcaaggcgtttccgcttaggctgcacacgtcggctctctcaatggtctcccatgcttagcaaactcatgtaatcacaagtttctttgtaatagttatctaaggcttttttaaaaaatttggtcttagaagctccttgccccaagcttttgtaaataaacatgttccttttggtaatataattcacattttatcaaaaaaaaataaaaaaaaatatgaatacatcttaatcaggggggaaatctatttaatttataggacaatg

SEQ ID NO: 23739 - DNA, 550 bp, Arabidopsis thaliana columbia
gaggattcgagacccaagggaagcacaggctgaaaaaagactcgcaactgttacaccattaggcgtcacagattctgaattcatgcgatggaaaagaaacaaagcttcatggatagagccgttttgtgaaaacccggaaattatagaattccaagcaactatatctttctctgactccatttcaaacacatatttagcatctctattctggtaacacttggcgtacatgtgaaccagagcatttgcaacatttgtatcccaaataccaactttgatggagaggccatgaactgatcttcccagttcaagattctcaatcagaccgcaacccgataagacacttgcaatggtaacacaattaggcttgatttcaacccccttcattttctgaaacaagctcagcgcctcattcacacttccgttatgggtatacccacaatcatagctgtccacatgacaagatccacatgagaatgctcattaaacacccgacgtgcattgcttatgtcacacacttaacatacatatcgagaagagatgtcccaaacat

SEQ ID NO: 23740 - DNA, 544 bp, Arabidopsis thaliana
caagtaacagtttcaaaataatgaatgccgactgaatgagctaaacaaagacatacctgacccagctcatcgtgtcttagcgttgcagaatgatgcaacgaagaagagtactgcaggtagaaaaaatgaccagattattaactattgagctactgattaatatgaggtgtaagacaaagtacaaaactaaaacagtctttgagctactaacccgcgaatttcagcaagatcaccggtttgctcataactcaaagaatagtaaaagtagagtcttgatgctatcacatcaatggtccttcggttgacgttcttgagacgagcaatgcttgctgaagaacaagctttagcctaagagatgattaaaagcaactcattaaaattaaaatcacaacagaaaagtaacttatgacaaaacacaaagatacagcagtagttacctcgttgtacttcttctgatcaatcagaaaaagaagaacaatgaagtagcagtagatctcgagctctgcaggtagatgcttagaaggagcagcttgtgtggctgatg

SEQ ID NO: 23741 - DNA, 511 bp, Arabidopsis thaliana
tgatagcctccacgctacagagtaaatctctatcttatgcttcagtttctcttaatctcacattgctaggtttgtttcaaaattgaattcgttgtactgcttttttttttctccagatttgaaggagattgcagctctgattgatactggatcttatacaaaggaagtccgtcgtattgctcgtgctgtgcgtctcaccgttggactacgaaggaagctcacgggttccgtgatctcttctttccttgatttcgctttggttcctggatctgaagctcacactcgtctctcttcttttgtgccgaagtatgtgtagcttcacttgtccactttgattacgagcttatctaggatctgtaattagattcatgtattagtgtttgccttaatttgatggaatttataatattggtacagagtgatgaacatgacatggaagttgatacagcatcatcgaattcccaagctcctcctaagcatctacctgcagagctcgagatttactgctact

SEQ ID NO: 23742 - DNA, 787 bp, Arabidopsis thaliana
ctcattttgcagcaaagaaactgttgggcagtatgaaagccacacagcctttactcttcccggattgtatcgagttgttcacgggattgatgtgtttgatcccaagttcaacattgtctctcctggtgctgatatgagcatctacttcccttacacagaggagaagcgtagattgactaagttccactctgagatcgaggagctcctctacagcgatgttgagaacaaagagcacttgtaagcttttgttcactcttcatgttcatctttaacattttgagtgtcgttctaatgtatctgatgttttgaaacagatgtgtgctcaaggacaagaagaagccgattctcttcacaatggctaggcttgatcgtgtcaagaacttgtcaggtcttgttgagtggtacgggaagaacacccgcttgcgtgagctagctaacttggttgttgttggaggagacaggaggaaagagtcaaaggacaatgaagagaaagcagagatgaagaaaatgtatgatctcattgaggaatacaagctaaacggtcagttcaggtggatctcctctcagatggaccgggtaaggaacggtgagctgtaccggtacatctgtgacaccaagggtgcttttgtccaacctgcattatatgaagcctttgggttaactgttgtggaggctatgacttgtggtttaccgactttcgccacttgcaaaggtggtccagctgagatcattgtgcacggtaaatcggtttccacattgacccttaccatggtgatcaggctgctga

SEQ ID NO: 23743 - DNA, 1334 bp, Arabidopsis thaliana
tattattagtctcagtggactgtcgacaacgtatggataggtgattgattcaccagtagggagcaaataaaactaggcttatgcgaatatcttatgaaagatctgcctttcttttaccatctcccattttttcaccttttttacaaaaaatgtacgtatatattaatctcccatatgttgtcgcttagtgacaaaaatatggtcaaaaacgtttatgcgcgcgaaaacgcaagcaagttttttctcccgaggactctttaacgcaaaattcttgttgatcatctcatgataaaagagaaacgtatcattaccatattattgttggaagattgcgggaatataaacaaccagtctacacaaagagaactcaaagccaacaaaagaaacaagatataaaacatatgcaaagataaaatattaaaaaaaggcaaacacgttgattatacatgagtatacgtatatctatatatacgtatttaatgtttctcaagggtgtggaggcaacggaggccatttcccgaacttggggtggtgaatgtatttaggaggaagaggtggaaactttggaagtggtgggagctgtggaagtggcggacatggcttctttggaatcaccactaccggtggtttgtatactggtaccggcggagggcatggcttcttggggatcacaaccggtggtttgtatattggtaccggcggaggacacggcttcttcacaattggtggtatgtagattggtggatgctctatcttcggcggcggcttgtaaaccggaactggaggtgggtgctctatcttcggcggtggaatgactatctttggcggcggcttgtggactggaaccggcggtggatcaactttcttaggcggacaaggcttcttcgttggtggtttgtggactggcaccggcggtggatcaactttcttaggcggacatggcttcttcggtagcttgtgtaccggaacgggacggtgggtgctctatctttggcgggggcttgtaaaccggaaccggaggtggcttctctatctttggcggtggcttgtaaaccggaaccggaggtgggtgctctatcttcggcggtttaggtggacaaggcttcttaggaataggcggtggaagctccacctttggtggtggcttgtaaactgggacaggtggtggaacctctttcttaggcggtggatcgtaaaccggaaccggcgggggaatctctttctttggcggcggctcgtaaactggtaccgggggtggaacctccacaggaggactgtatttaggtggacatggcttcttgagaaacggtggaagttccaaaggtggagggaca

SEQ ID NO: 23744 - DNA, 529 bp, Arabidopsis thaliana
tttacggtcactgaatttctccaacacccaatccctaagcccaatatcgctcacctcacagaatctctcagcccaatcagttggttcaacgggtcgggtccctaaaccaggtgcccgatctttcgacccgacattctcttcgttttgccaatccgccacataagtcgctactctccttttaaacttctccttaaaaatatcccaaacctgatatttataatggttaattaccatcgtactcttatccacgtcaacaaacgcgaattcttcttttaagtgaaaatgatgaacgacgtttattagcgttgcgtttagcgattccggtctaattatgcttttatgtctctccggtaacgccatacgacatgtgtacgtcgctgtgactccgctgcgcggtggatctctaagtcccgacggtccaaaactgtgacacggcgttcgaatttcaccgatctcgccggacgatgatggtgttgtcgtgtgatttctgattacgttggttagagtttgccagaggggatgtagaaga

SEQ ID NO: 23745 - DNA, 1115 bp, Arabidopsis thaliana
tcgtccaagttctgtctcaacatagccgggatacaccatcctcgaatcgcctcttcgacgccatagctagtcactgtatacccgtgatcattagcgatgacatcgagttaccatatgaggatgtcctcaactacaatgagttctgtctctttgtcagatcatcagacgctttaaagaaagggtttctgatgggtcttgtcagacgtattcgcagagaagagtataataagatgtggcttcaggttgaaggaagtggagaggtatttcgatttgcgttttccggtgaaggatgacgagggagattatgcagttcagatgatttggaaagctgttgccaggaaagctcctttggtgaagatgaaggttcacagatttcagaggtttacaaggcctttttagggtttctaatgatattttgggaatttgatttagatagaaagataatgaatacagtttccaatgcaaccatgtgaatgtttattacagtcagccatgtgaagaaagaggttacttgatctagacgatgcacaatggttacgtgtgatataagttacttctttatttattatataaactacatagatcgtggattacactcttttaagataaaaacacacataacatcatatgatcgattaaacagagttgcgaaaaggatctctgatcatttataactctttccttgaatccgaatctaccttcgactgaatcgtgtccgggactttctcaaggagcttggagagccacttggcagattgtttctcatgccgtcccatattgtgtccatagtctacatagtacagtccagacctcgtcttgtatccatcttcccactctagtccatccataagcgacgacacaaagtaacctttaacattaaccttgtcctcgctgcaaaaaccaaaaaagttttagatatgaagcagaaacagtttttatttttattttttatcactaattccagcaactagagaagaagaaacagagttttttggaaccgtgaaaagtaacttaccagactgctccatgtaatgccatgagatgtctcatatgataatacttcctgttactatcgctgagggcatctggaagtacactttctcttcaagtgtctc

SEQ ID NO: 23746 - DNA, 2605 bp, Arabidopsis thaliana
gaggatcaggatgcccagaaagatggtcaaaaccaaacttaaaaccgtagtaatcgacataacggtcataccattcgccgacgattttttctgccctggagctccagccggcgtagagatatcaccagcggctgatggaccatctcctgaaggacccatcgccgagcctgacggggaatctgacggtgaagaagaagtagagcctcccggagccaacgatggagaaacggtgggtgagtttgaaacaggggatgaagatttaggtgccattgatccaggtggtgaagtcatcggagcagaagacggaggaatagttgaagatgatttaggtgccattggtgccggcggtgaagtcatcggagcagaggatggggaaacaggggacgtggatttaggtggtgccggtggtgaagtcgtcggagaaacaggggagccggatttaggcgccattgatcctggaggagaagtcgccggagagacagctgatgaagatttaggcgagtgagctcctccaggcggagtagtcgatcccggaggagaagtcgtcggagaaacaggggaggaagatttaggcgagtgggctcctcccggcggagtcattgatcccggcgtagagcttcccggtgcagcggcgtgaggagactgagccgttgatggaatcctagcagatatgacaacgacattaagcttttgacccttcttacagttatcttcattgccactgatgaagtaaaacggaccataacgatcaagagagatctcagaatctccatcgtccactcttttgatcggattctttgtattacaagcgtcgtaatcagccttgttcacctctagcaccgagtcagctcccttagcgtagtaaaatctgcaagaatcgaaattgagtttcagacaaaacaaaagtacactctaagttaacgaaatgacacaaacgggtaagagagtgagagagagagatgatatatacagagagtgtcgtgaacaaggaaacggtttttgccagaccaagattcgtagttttcaggtgggtttgtaacccacgcgccactgcctccgacattaaacttccgtgcgttggagatggtgaagagggtcgagagagagaggaggatggtgaagaagaaagaaaggcttttcatttttagaaaggtcatgtttttcaaaagctgcgagagattttcaacaagataagagatgtttatatagaaatgaagcgtttataatgggctaaggaaagtgtgaagcttttttgtcttaatgatagagagaggtcgtttttatgggtaatacgtgttcgaaattgaatctctgtatctactcgttttcctcacattaaaagaagatattgcttcttcgtatctgccgacgtgtttaatttaattctttttgggatttgaagttatatgaatttatccccgggaaaaacgcattagagaacagttggttttgtggaaagaatcggattcaacgaatcatatgcttccattatatatgagaataccgaaaagtctgaaatcttgcatcaggtcttaattgcaaattcattttccatttgatatgagaataccaaaaagcttcaaccatatcgacattagtacatattggtctgatggtctctcctacgtattttcgacgaaagaaacttgcgaactcggaagagcggtacaggtggtagtccgtagtctatagtagatacaacacttgcaacattttgaacatatgggctgggcttataaggttcgggccctttattttctttcttagagttgatgatgataagaagactagagtcacttttttttagcacaagaatctctgaatcagcctttgcttctgttgctctggggacacgtgagaagcacagtgattagccacgtgttcttctcccgacactaactcgatcctcaaagtacttccatcggtgtgtatatagatgagagcgagactagataatgaattgaaaagtgtagaaaatggcggctatgtttttagcaaagagaggagccataaacatacatagagcttcttcattacacatagattacaacaacagttctcgatctgttgttgatggagtcattactatcactaactctcgttacttcgcatcccacgtacgtttttgaaatttgttgaagatagattaattatgcatacaaaaatcgttgagctgttttcacttaatattttcacatattctgcaggggaacaacggagagaagtcagaggaagaggcgatggggacaactacagatggtaaagctccgaatgtgacattgggtcatgcggcggatacagccaaagaaggattgaaacgagccaccgatgcagccatcaagaagagtggagatgtgggcaagccgaagagtgtagagaatgatgaaggagatgatcaggaggatgtagcagtgggtgatgatggaactgtcaaaggccaaaatcagtcagcaggatgagaatatatatagagacttcgttaaaagattatcagctcctaatgaaatggatgctggtttaaaccgtgtagtatgtttttttatttatgtagaaaaccatctgttaccatttataaactcatccttttatttcttacaatgtgtgg

SEQ ID NO: 23747 - DNA, 1001 bp, Arabidopsis thaliana
tgcagtgtgacgtcattaacctacgccaaaccttaatggttattactgatgtgaattcaaaaagaatttcttataaagatctcgaaatttgaattatggagaatattttgagtatagtttatcagattacgttagctaatgttatatactcctaaaaattagtattatcctaaatcaagattaggattgataaacgcatctcagttgtaaactcgtatccttgatcttgcttgaggttatatccagtttaaaaatcggaaatcatttaactgggtgcaaaaacatttgattgaccaatttggtacgtcgtgattttttttgtcccatgtcaaattaaacaaaattgataatataattcatcaaagcgtatttgtttttaatcaaaacgttagatagtcttttaatatcaatgcctttattacaaacgtagtctacatgtactaattttccagtcaacattcatagtcacaaaatacgataacatgaaaactttcatgaattagaagaagacgttgattgataaagagagaagaacaacaacaaattcaaatcacaagattagcagcaacttttaagttccagagacgttcctcaacagcgagcttaaagcaaacatacgactcaatcgacgcctgaagtacctgataatggttaaggttataaacgccccaatcgctcatacaaatcgccggatctaacctcactcctacgcgacccaaacgctccttcacgatctgttcaaacgaacaaaaacacatcctagcccctctcgaatctctcacgaacatccttatgtccagaagcttcccgatctccactcgatgcctacatttctcgagttttttctggtcttggccgttccaaacgccgacgaaagtcgttttgggatcggcaaggaaagtgcggaggacttttgggagaccgtaattgtaacctagttggatgatgagacagcgactaccgacgcacaactggagagtttttggtggtggatctggatc

SEQ ID NO: 23748 - DNA, 499 bp, Arabidopsis thaliana
tgtgctctaaaggcgccaccattgtgttatcgctggtggcgttcagttcgtcgagcgttaaatggcgtttccagatcatgcttatgcccccagcgttgagccgccatcgaccacaatatcctgtagggtaatatggctggcgaggtcagaggcgaggaacaaaatcgtgttggcgatctcttgtggacgggcgattttccccagcggaatgccgagtttaaactgctcgccaaagccgcgaatacgctgttcttcggcgtcatcgctcacccacagcgtgcgttgcatatcggtgtcggtggagccaggcgaaaccacattacagcgcacgccgctacccgccagttccagcccgacgctcaacgccaggcttttcagcgccgctttcgatgcgccataagcactcatgccaatacgcggcgtgtgccggcgtcggacgcacagtgacaatcgcccgcccgctgacggcgaaactggttcatggtttgctggaacaggt

SEQ ID NO: 23749 - DNA, 574 bp, Arabidopsis thaliana columbia
atctttgttgtcttgttacaaatgtatgaatacaaacaatatctgtctccggctttattattggtttttaattctctacatatattcttggagcttgagattgtctttatgctcgtcaaagcattggtctttatcactcttggctgcgatctagagccacagtccaatgaaccatacttagccacttctcttcaagacttctggggtcgtcggtggaacctcatggtcccggcgattctccggccggctgtctacctcccggcgagacgaatggcctgtcggaaagttaactccgatcaggctatgttcttgggagttttcgcagcgtttctcgtctccggtgcggttcatgagatgctcttcttctatcttacccgtgaggttcctacaggggaagtcacttggttctttttgttacatggagtttgcacggtggcggaagtggcggtgaagaagagtacatttgtgcggcgatggtggagagtgagtccgacggtgtcacgtcttctgacggtcggttttgttgttgtgacgagtggttggttctttttccctcttagtaaacccataaata

SEQ ID NO: 23750 - DNA, 793 bp, Arabidopsis thaliana columbia
atctggtgttcttcgattactctctatttttccggtctgtgttttgttagttgttcttcctctgttcttctccttttcaattttcacttccaccacagcgtttttcttatcagctattgccaattcaagactcatcctcttttcctttgatcaaggtcctctttttccactaccttcaaatctattcagatttacctgctttacttgcttcccaatccagcgtcaacaaaaccctaaatctcaagatcatttgtccacgtatgtttttcccgttaaaattgcaatctttgttgtgttgttatatgtgcataacgacatacaaaaccttcctcgtacttttctattgtgtctccatccactgtatgtatatttgttacttgagattctcttaacgctccttagaattctaatgactatcattcttggttgtgacctagagccacattttcacgaaccatacttagccacatctcttcaagacttttggggtcgcaggtggaacctcatagtctcggcaagtcttcgggcaatcgtctacactcctgtgcggcgtgtctgccaacgagtaatgagctctgattatgcaatgttgattggtgtttttgcgacgtttgtaacctctggtgtggctcatgaagtggttttcttttatataacccgtgcgatgcctacaggggaagtcgctttattctttctcttacatggagtttgcacggtggcggaagtggcagcgaagaggacggcgtttgtacggaggtggccggtgagaccagtcgtatcttggatgttcacg

SEQ ID NO: 23751 - DNA, 576 bp, Arabidopsis thaliana columbia
  unsure (1)..(576): unsure at all n locations
aaatcctaaacctcaaaatcaaatgcctaaatggggtttcgcagttaaacttgccttctttggtgtgttgttgcatatgtatgaatacaaacaacatatgtctccgactgttctattggttctctattctctgcatatatacttggagtatgagattctcttagctcccttgaaagttctgcttagtatctctctttggtgcgacctcgagccgcatttcaatgaaccatacttatccacctctcttcaagacttctggggtcgtcgatggaacctcatggtcccggcgattctccggccggctgtctacctcccggtgcgacaaatggccggtcggaccctgagctctgatcaggctttgttcttgggagtttttgcctcgttccttgtttccggtgtggttcacgagcttattttcttctattttacacgtgaatcgccgacaagtgaagtcactttgttctttgtattacatggagtttgcactgccgctgaatgcgctgcgaagaggacgaggttggtgcggcgatggaaggtgagtcagatggttcacgantgctccggtgggatttgttg

SEQ ID NO: 23752 - DNA, 1248 bp, Arabidopsis thaliana
ccctgcaatcataagcttcatacatgacacggtcaataagcctatcacaagaactcacctcagatctgatgatggtgagagtacgaaatgcctcactagcttcggtggtaggaagagggtgcaaagcacttagatagtcctcaagggcatgattcttcaaaaacttaagaagttttttcgcattgtctctatgctctgctcggagtcgtcggctttaggttgaaccactgtatcatcaacggctaggccctcttccatcagacttgagtttaacgccaagatgcatttgctgaggcatctgatcatagccctcacttcatctctagtggtagtctacaaaaacctaaacaaacacacacacatatacaaaatgaactctttcttagtcaaatgtactacttacagttcttttgataaatggtttcacatctcgaattagtttcttggcaaaagcttcagtttcttctgtcaaagtgtccttcaatgtttctacatcagggagaggaggaggagatgttacactttcagcagaaatgtcaggaaaatctgaatcatcagagctcgacatactgcattttgagtttggaactctccaaccctaattttatatatatatacactgtacactactataaccaattgctctattcgtttcatgtgatatgggcctttttacttgtttttgggcttccataaaactttgcttgttccctgtttgtttcatttattctataaccaacatatcttccacacacaaaaaaaaagactttagaatattcgacaatgatcgctagtaaataagacgacaaatctctatagtatttttagaaggatttcttggcgggtggggcaaagtcggtcggatcttctcggagccccatcggtttgtattttttgttcatgaaaattttacttgtgttttcacgcccgacccggaccgcccggtccgaccttgaaccgtgactcgaatactttttcggtttgggtttagtgctaaaacccgacaagttcaaaaccataaaaatccacaaaaactcaccattaactcgtgactcggtgaaccggttgaaccgaccagggatcggttttacaaaattctcttgattttagaataaaatatgagattttagactttattcaatcatttttagaaaaaatttcagttcttaaactcatttgatgaagacttcacaatgccgccttaaaaatgaatcgaatggtgagtgaacatgcgatattagttgtgtg

SEQ ID NO: 23753 - DNA, 542 bp, Arabidopsis thaliana
gtaaacttatgattacaattctgcttttcagaaaaaaaaaaagagaaagttggaaaatatgtttttactaccatcctgcttttctcccattgccataccaagcaccaataggaactaaatccaatgtatcgcccaatccatctacataatctcgcttaacctgagccagaaaagaaaagcattatttaatccatttccatcacattatgttttagtaagataatttacagcaaagagaccttgagccatgaatcagagcgctttgtggggcagtatccagcatttacatctaaagacttgaccatgattccttcacaagatgactgaaatgcttcttcaagaaaagcatttatcctactcaatgtgtcatgattattcagagacgcttcttctgctcccacctataaaaatcaaacaatgatcagttcaatgaaaataccaaaacacttagatacagaagaaggctatagcctataacttctaggtgagaactaccgtagcacttacagttattccttagcatactcaagataactggccta

SEQ ID NO: 23754 - DNA, 526 bp, Arabidopsis thaliana
tcccaactgcgctccattgtccgtaaaacgagctccctggagtctccccatacgccttaaaaatagttgcaaacgagcccgggttaaacccgtaccatccgaaccataacaaaaacgttccaagaacaaccaacgtagcactatgaccacgcaacgtaaccggtttacccccaactccaaaccgaccaatcctaggtccttcaattaaagctccccataaaccagcaataccaccaaccatatgaacaacaccagagccagcgaaatcaatcacacctgattgaaacagaaggttctcagatctagccggagacgcccaaccatcagaagaccaaaaccaatgcgacacaatcgggtaaacaagacccgtcaagaaagaagaatagatcaaatacgcaacgaactgagtcctctccgctatcgaaccactcgtgattccagcggcggcgatacggaaagtccattgatatagaaaataaggataatcaaacgtaggttgaggaaaatcatacattccaaagaaatg

SEQ ID NO: 23755 - DNA, 989 bp, Arabidopsis thaliana
ttgaccggatgctctcagggttaccgggtcttgctgcaccagcgacgtaattaggctccgacgaggtttcccaagtattttgttttgccatatggcgatatcggtgtcagttttcgggtggaagtatgtgggatgaggtatcgcgatgtcgttgacttcccatggattacgttcgatgagaagctttgtagggtttttcatttcttgcatctcaagtaagcttgagccccaagaatacttatcaaccctcctaaaatcccaagagatctttccgagaacaaaaacatgatcttttccggagtttttcctccatgatttcttcgatccgagccatttaacaatctcaatcggcaaaacatctttcacatcgcttgaaacgttcttgaaatgccatctcaaaacatccataccgccatagaaaggcacatagaagagcttcgcttgagtctcgttatgaaccctacatggatgcttcaaaattctagagtgaaatatcggctcaagtgaatactgatgcgttctgaaccagcctttacccatactctccatcagttcaccaaacgcatcgttcttgaagtagttgcaaaaatcagcccatggaaccatatcggagcattccctcaacaaatctttgttgaatttagatggtaaatcgtaaacgtatacaccttttccttcgcaagatcccggctttttgcggttgttcccatcgataaccaagttctctgtatttgaatatactcttccgtagattttagaccggtctcctcgtcttcggtcttcgctttgaaatatcggtatcgttcttcgccagtttctggatcccaatcaatgatgaaatcttgatcaatctcgtttttgggtaaagaatcttgatcaagaacggaatcaagattcttttcatggatgggtttagcacttgattaagaatggaaactctttctccggaggtttctcctgtgaaagttcgttcttattgatggtgaggt

SEQ ID NO: 23756 - DNA, 511 bp, Arabidopsis thaliana
caccctcatgatgcgccaaaaactccaaaaacaaaaccaaaaacccgaagagacacgagaagaatgggtgatctcaattagagacaaaatggagcaagcacttagagaagacgccacaactagttgggacaaactatgtatctatagagttccacaataccttcaagagaacaacaagaagtcctatttccctcagactgtctcacttggtccgttccaccatggcaacaaacatctcctacccatggaccgtcacaagtggcgtgcagtcaatatggtcatggcacgtaccaaacacgacattgaaatgtatattgacgccatgaaagaactcgaagacagggctcgtgcttgctatgaaggtcctatagatttgagcagcaacaagtttagtgaaatgctggttcttgatggttgtttcgttcttgaactctttagaggagctgatgaaggattctccgaactagggtagatatgattaaacttcttgttatctaatataattttagtg

SEQ ID NO: 23757 - DNA, 551 bp, Arabidopsis thaliana
tcccctcgagcagcaacgaatgtaaattgcttccgttggctaagctattgaactcaatggatttagaaggcaaagctgaataacgtctttgacagaaagtcatcaatcttttaactgactgaagatacttgcgagtggtttcatcgttcatgatgtgagcaacactgttggtgtaaatcttctctcgagctgaacgttcgtgaataccaaccatagtcactccaataggccatggcgcgttcccgatagctagtttgatgtagtggtccattgcagcaaggtagtctcgctttatgcagtggttaaccatcaccattaaagcttgacgaatgtcagctggtaaaccctgcaattttaagccataactagaaagatcaagttcacgaaacctcataaaatttcagtgtaagaaagtatacattcttaacacttataagacaaagacagaaagagagaaactttttctgcattcaacattccagcctatttttcttcagctaaatggagataactaacagaggcctcaatggcaaattcaaggtgcatacaga

SEQ ID NO: 23758 - DNA, 887 bp, Arabidopsis thaliana
atggaagctccttgcagataggatagacgaacgtctttctcaaaggaaaactggtgtgccttctatacggttgtaagtcatgtactagctcctccccataacgtctgacttcctctgttcccaacttacaatgtttaccgccaaagacttcgagataatgaacagccatttcttcatctccagcacatatacttagtactccacatgcgaatgtggccagcccgtcatcgggcacgttttgatgtagcaatgctattcctcttttgacgtctctttcttctgccacaaccattaacccttcatagtaaatagctgtattgtcccagaattaaggcatctttcaaagaaatcacggtacctccctttcatttggacgccagttgtttgacaacgaaatgagtagaggtcgcttggatcagtacaaaggctgtagatgtttgcatctttcaaaacatcgctgcggtacacaatatttcttcccctagttccagctttcaaaataggtcctagtaaccaccatcgatcatccgccaccagctttacaatttttgctaaaatatcatctggcaaatcaggcatcatctccatggacatcgtcttcgctctcttttactcaagtttcttttggttttctatgtttcttatgttttcccccaaattacttgtgtaatgtttaaatattgttatgaagtagcctccacagttgtctgtgtggttgacagttggaggtctttaatgattaactaaaagtttcgttatgctttcccactcatttacacatcaggtgtatttactatgtgtacaacatactagatggatgaatagtcatactccatccattattctgtacaaatcatgtttgaggtacatgtttcaacttttgtaca

SEQ ID NO: 23759 - DNA, 1583 bp, Arabidopsis thaliana
taacgcattatatagtatatagtatttctataagagtacaacgcattttcattttttttaaataagagtgaatgtttcaaataaatatctcactctacgaaatatatatattacattaaagacttgtaataaagtctttctattaagagtagtggaagaaaagtccaagaaaacatcgctcgccaaagcattatatatccattacgtttaaagattgtttaagacattttaatgtataagtatgattagatgtcaatcactggttgttgtcattacagatcaaataatattgcgaccaatgacagctttagttcagttgttacatatttgcttttagactttttctatgtcactctcaatctcctaaaaaccttcaacaaacaaaaatggcaactcctagtaaacgacgaccaccacctccaccgccgccgcctcctcgtctattggtgctgccaccacttccaccgccaccaccaccgccgccgccccagctaccatttggaccgaagcttcctttccctcatattatcataagaagaaaagcaagaagaaactatcaactacgaccgatgttgacctggtacttcctcaccttcatgatgcgccaaaaactccaaacccgaaaccaacaacccgaagagacacgggaagaatgggtgatttggatcaaagacaagatggagcaagtaatgagagacgccgccacaactagctgggacaagatctgtatctacagagttccactctcccttaaaaaaagcgacaagaattcttacttccctcaagcagtctcgcttggtccgtaccaccatggggacgaacatctccgacccatggactatcacaaatggcgtgcggtcaatatggtcatgaaacgtaccaagcaaggcatcgaaatgtatattgacgccatgaaagagctcgaagagagggctcgtgcttgctacgaaggtcctattggtttgagcagtaacaagttcacccaaatgctagttcttgatggctgttttgttctcgatctcttcagaggagcctatgaaggattctcgaaacttgggtaagcatgatttagctttatgctaaaccggactgatttcagatccggttgactaaactaaatgttgactttcgtttatttcttttttaacttttttctttttatcttggtgtgtaggtacgaccgaaacgatcccgttttcgcgatgcgaggatctatgcattcgattcgacgtgacatgctaatgctggaaaatcaacttcctttgtttgtcttaaaccggttattagagctacaactcggtacacaataccaaaccggtttagtggcacaattagcggttcggttcttcaatccgttgatgccaacttatatgtcatcaaccaaaatcgagaactcccaagaaaacaacaataaattctttaacccaattgctgacaaggagaaggaagagttgcattgtctggatgttttccgtcgaagtctgctccagcctagtctaaaaccggacccgaggttatcgcggagtagatggtccaggaaaccgctggtggcggacaagcgccaacaacaactactacattgc

SEQ ID NO: 23760 - DNA, 1179 bp, Arabidopsis thaliana
gatttaaaatcataccggattagcaagataacttgacaaaaacaagaaattgaatcacgctaacccgagtttcaagaatccttcattgactccttggaggagctcgagaataaaacagccatcaagaagaagcatttctgtgaactcgttactgctcaaaacaatggaaccttcgtagcaagcacgagccttctcctccagctctatcatggcgtcaagaaacacttcaatgccttggttcgtacgttttaataccatattgacggcacgccatttatggcactccatggactgtgtttgctgtctcccatggtgatatggaccaagtgagacagtctgagggaaatacgacttcttgtcgtttccatgtaggtaatgtggaactttgtatatacagagcttgccccagctagttctgtcatcgtttctgtatgcttgctcgagcttgtcttttattgagatcacccactcaagtcgtttggtcccgctcccttcgaccacctcgtttattccaggtttagaacgagtgtcttgctggttctccaagttttggtcttcatagctgatacttttgggtaaaacgacacgttcggattcttcgttttgtctacggacattttcgacgtattctctcaacttgtcataagattttccttttttgacatcatgtccagtaagccaaggaatcgcccgtggtcgtaatggcaatggttcaggtagtactagtggctgttgctttcgtaatcgtagtagttgttgtcgtggtggtggtaggagtcgtagtcgtagtcgtggtcctaaccgtggtggtggaggtggtggtggtggtggtggtggaggtggtggttgtggtggtggtgctcgttgtcgtcgtaattctagacggggtggtagtggtggtggtggtggaatagtaccaaaagtttccattttgttggttgaagctataccaagaggaaatgagtaatgaattcgagtaaacgaagtaacaaataaagaaagctaaaatatatgtagatatatatagaaagcttcaatcttttaactcttttataaaaagactcaccataaatgttgtcatactttatatttaacgagtgagattgaaaaagtcaaacttcgttaaaaaaaatcctgataaattcttgttatacactagtaaaataatatccctcttat

SEQ ID NO: 23761 - DNA, 664 bp, Arabidopsis thaliana
tgcaaaagtctctatcctatgttgaatcccatttgcatagaaatcgatcagaccctacaaaggttgaataaattactctatcagctacctttgttctggtcatccattgcaagaatgagatcaaattctctgaaatcagatgccttgatcggtctggatagtgatgttatctcaatcccgcgacgtttcgcagcacttctcattcttggatccgccatattccccttttaaaaaaccaacattttcacaaatcagaaacataaattccaaagtctccactgctcctaatttacaaccacattacatccaccaaaatctgaaagcaccattgcctaattgttccaatcaaagcatcaatcaccataaaaatagattactgtttttgctcttccctagtaagaagagcaatttcacatcaaaattgattcagaaacatgaatttcaaagtctctataactctgtattcctaccaaattacatccaccaaaaaaacctaaaaccaaaaccaaacctttctacatacaaaaccatcattcaccaatatttcaaatcaaccatgaatcaagcatctctcataaaccctaaaattagattaattgttttggaactaattatcatacctgcgtgataatcaattgttccagcggaatcaatgttgaatttg

SEQ ID NO: 23762 - DNA, 353 bp, Arabidopsis thaliana
gccagtgtgctctaaagacaacggcacttcaatgaatgcttcgctctctttcaccagcgcgaggatcacgcaatcgagtttgccgctgtccagttgcgccagtaactggtgggtctgtgcttcatgcagatacatttccagctttggaaaggtctggtgcagcatagggataatatgcggtacaggtacggtccaactgtgggaatcaaaccaatgtgcagcggtccggacatcgtctcgccctgctggcttgccatctctttaaggactttcacctcacgcagcacggtacgcgcctgatgcaccagcagcattcccgcctgggtgaacaacactttacggctggtccgctc

SEQ ID NO: 23763 - DNA, 857 bp, Arabidopsis thaliana
tatgcaacaaagttatgttctgttgttctttgggtgcggtataaatatcaagaatcaagcattttatttgtataagtcgatttactaatctcttaataatgtgatttcacttcacaagattactctagctttttatcaaaaaacaaaaaaaaaaaagaagtacagttacaacaacacttctaatttcacctttaatacttacgtgccatgtatgtcccaagagcgttttagcaagttatgttggcgccagggtccaaaccaagctgcccacaatagtctctatagtagccaatccttgcgttcaccccacctaagttcctaccgtcacagtcgaaaccgctgatggctcttatggtggctccaaatccctggttcaatacaggcctcacgctcttcatccaaaaccacagagccgtcctgaaagccacgactgggttactactcaccagctcgggctggcgtaggaggtctaagccgagactctggccgcatgctccatagttgaagttccatgatagtaggagcggaccacggccatggtagctcttggccggtgcacatggatattgcctgttgttctggtcgcacatgacacgtgacgccccgtttatctcttctatgtagcagaagtctacacgtacaaagatgcatattgaaacacactagttaatttacgaacaaacgaacaaatgctagaaaatcaatgttcagtttataattattgtaggacaaaaacagagtaaatgagataacatccaaggttttaaaatttaatctcttacgtcttaaatatgattcttttttcgttctagataatgattgtttcaaacgtatgtatgttatagtattttagtaat

SEQ ID NO: 23764 - DNA, 609 bp, Arabidopsis thaliana
tttaacaaaggaagatttcctttttcttatatgaaaaaatacctaagccgagaaaaacaaggaatcaagacgactcctaatgtcaattcatcatctcaccattatgaactctataaatagacttcttctatcttctcttcttttcaccaaattatcttctgctctctacgtttactctgatcaaatcagcgaaagaaaaacaacacaaaaagtctcttttaactctcttcaaacatgttggtctaccaggatattcttacaggtatattctgattctggttcatgtagtgaattacgatattggttttcatgatttgcgttaacgtttcgttttctaggagtttactcgtgtcttgtaattattcaacctcaatcatcgtcgtcacttaacatactgattttgtatctatctatgatctatcccaaaaagaaaaacatacattgatatgtatgtattgcttgtgtaagaagctaaagtttgtctctcttttttgatcaaacaggcgatgagcttctctctgattcctttccttacaaggaaatcgagaatggcatgttatgggaagttgaaggaaaggtattattcttaaataaagcgtttgagttttt

SEQ ID NO: 23765 - DNA, 1261 bp, Arabidopsis thaliana
ggattaggatttgaggaataaagttttcatttttatcgttctgttactgttgttgaggaataaagttttgatttgaggaataaagttttgatttttatagttctgttatttttgttgaggaatcagatttgcatagagagatcactgaatagagtaatgtttgtgtgtttgttttcagtattgagatttataaacatccgaaagaagagcgaatagcgagaacttggggtacgactgcaccgggtttgccttatgtagaagaggcgataaccaatgctggagactggctcattgggggtgatcttgaggttttggaacctgttaagtacaatgatgggcttgatcgtttcaggctttccccgtttgaactgcgtaaggagctagagaaacgtggtgcggatgggtctttgcgtttcagcttaggaacccagttcataatggacatgctcttcttatgactgatactcgtaggagacttcttgagatgggttataaaaaccctatccttttgcttcatccattgggagggtttacaaaagctgatgatgttcctctaagctggcgaatgaaacagcacgagaaggtattaacggaatcaaagtctttttttgcgtgttgtttgctagttcattataggagatgctgaattggttttcatgacttgattaggtgctagaggatggtgttcttgatccagagactactgtggtttccatattcccatctccaatgctctatgctgtccaaccgaagtccaatggcacgcaaaggctaggatcaatgctggtggaacttctacattgtcggtagggatccggctggaatgggtcatcccgtggagaaacgtgatctgtacgatgctgatcacgggaagaaagttctaagcatggctcctggactcgaacgactcaacattcttcctttcagggtatattcatagaaaccgcataatactcaaacttggtatcttccttcaaagatttaggctttttgagttctgatttctggtttcaattggtgtaggttgctgcgtacgataagacacaaggaaagatggctttctttgatccctcaagggctcaggacttcttgttcatttctggcactaaggtaaataaacacttctcaaaccaattgggacataatgtaactaagctcaagtgtattcaatttctgatcaaagatttgatggttgttttgatagatgagagcattggcaaagaacagagagaacccaccagatggatttatgtgccctgga

SEQ ID NO: 23766 - DNA, 1094 bp, Arabidopsis thaliana
taatacatactgattagtgattactgacattctctaatcataaacaatacaagaatggtaacatatcttcatagcacctatataaagcttgttccaacactcatcaggttgaaaaagaatcgagtgattctccatccataaactgcggattggacccgttctcgagtaagccggggaagaatcaagaaactgtatcgccaacccaacgggaggcttcagtgtagttacgcccgcagaatcaagagagccaaaacaggtaatgccaggaggaaaacagagatgtgtttccggtgttggctacttctcattgggagtatggttgggagagagcactcctcaccgttgaagaacactttgctcgggaagccatctccaccagggacattgattccaggagtcagtttcttagtaaaggacataacagattgttgttttcctggaatccgaggattcttcaatggatttccccgtctctttctgcgacgagataattcaatccaggaaggccctccatgaaaatagtattgttcttcccgttgataccaattgtagatgcattgaatgagtaggctttctcgaaacccggtgcagcatttttcatctgaaccgcgtaaaccaatctacaaagtctgtttctccccagttgaagactgtgacccgggctgtccatccacctcgataatctgtagccaaatgccagttgatgctaactccgcagttatccccacaaggcatcgggtttggcacgggccgttgttttagataagcccaagcgacggtgagttcagttcggttctcaaatggaaccagaagagcttgctgcggtagaagaagagacggagctgtggcactgcaagcgcgggctgctttgttgctggaacacccgcaagcacatgtcttgcatgggacgattgagtcgttgaagtaggcagagaacgatacacaacatctaggactcgcatcttttggttgggtgatgttgcagaccacctgccagcttgcaaaagcagtccggtttgaaggtaatccactgggatcgacgaactggctcgggctcacccgaacaggagggccacacttgtaatccgggttca

SEQ ID NO: 23767 - DNA, 509 bp, Arabidopsis thaliana
caaaagcctcaaaatcacttttctgattaggccctttttcaaaatcacttttctgattaggcccaataacgcacaaaagggctttctgttttgagtaggataatttagtcctttatcagtttatgactttaggtttgaaatttcttcaaaactgaccaagctatagcagacatgatggaatactatcacagattcacgacaatccacgattttagaacgatgcattgatatacgtataaataagaaaacatatgacatagtaataaaatacaatatgcataacaggaacaaatactaacaacttagtaatgtttgtaagaagaaagcaatacatctcaacagtcataacaataccaacacattctgaaataagaacaaaaaaatcacatatattatagggagtagaacaatagatccagagattgctcttgtacgatgtcgtcgttcttagacttctaggccacgcaatctgtccacaaagcatatatatacgagcaaatgacagaaat

SEQ ID NO: 23768 - DNA, 817 bp, Arabidopsis thaliana
tagttaaccatcgcgtaaatggaatcatctacttgtaaagtaagaagctgactgagcataattttaaaatccaaaaaggcccaatatttgtcattgtatttatactggtagatattttctccctttttctatgttttgacattctttgtggttagagtcttttgtagacagaagttttggagggaagaaacctgtttccacctcggtaaacaactctttggttgagctgagtaattacaaccagaaaagagaagagtttgaccctgaatatgacaatgatgctgagcaactcttggcggagatggagttcaaagagaacgatactcctgaagaacatgaactgaagctgcgtgtgttgcgtatctattcaaaaaggtacaacatttaagatcaaaaggggaacaaagtctcttctttttgctgtccattctgacgcaggtgagtatgatgtttgtaggcttgatgagaggaaacgtagaaaagaatgcataatagaaagaaacctgttgtacccaaatccctttgagaaggacctgtctcaggaggagaaagtacaatgccgacgtttggacgtttttatgcgttttcattcattagaggatcacgtcgagctactccgtaatgttgtaagcgagtaccgcatggtgatacggctcaaagatctcaaggtaagtacattgctaccctcaaactgtgcgtttggtttcttggattggatgtggctcactgtgttggattggtggagcaggaagctcaagtggcagggtgtcgttcaacggctgaagcatgagaggtagctgggagggaagatggaggg

SEQ ID NO: 23769 - DNA, 711 bp, Arabidopsis thaliana
ggaagaagattacgacatcaaagctagagaaacaaaaaaaaactcaaaagaaaacaaaacattatgtgatgatgaagtttgttgcaacggctaaacagagcatatactgtttagacctttcatcaacaatatgggctttttggcccattaaaaatcgggctttgtggacttgtttcagtctcatatatatatatgagttaaatcagaaattggttgtcatcttcctccatggctctaaacaagctcctcagtttgactttccaactactcctttttctacttagtgtttcatcggaatctccatggatcgccgaagatacgtctcaaatccagacgaagctcctcgaattcgcgaagagtccggaggtcttcgattggatggtgaaaatcagaaggaaaatccacgagaatccggagcttggttacgaagaactcgagaccagtaaactcattaggtcggagctggaacttatcggaatcaagtataggtatcctgtagctatcaccggtgttatcggatatatcggcaccggagaaccgccattcgtcgccctgagagctgatatggatgctttgcctattcaggtgtattaccaattcacataattctcatcgattagagacatttaggtattttttgtatgaaacttgatcataggtttaattatacataggccaatacaaatgtctcttaggtaatgacgataatgg

SEQ ID NO: 23770 - DNA, 550 bp, Arabidopsis thaliana
taataatgagtataagtcaccaaaaaaatgctgaatgttatgaaaatattaaacattaattatattatcattatattataaagagtgagatagttctactcgttcgtagtggtaggacgtaacatccaagccggaagcagagagtttggttccgtcaacgacgatgcaccaccgttctctcccccaactctctccacaaagccatctctgcccataaaattaaattaatcagaatcattcatagatatacatgtacaaatttgaattatatatatgcacatggcacaattaatcaacctcttaatctaatttggactagtactgagagagagaaagacgagacctggaggaggttacgcagtattgaggcagaagaactgaagaagagttggagcattggactaattgtccttcttgctgacccgttttcttctccctctccttaatctaaaattattgttttgccattagttagttataatatataccagcataaatctacagttgcaaaaattctataaataaaatatctgagttgtcagaaacaaat

SEQ ID NO: 23771 - DNA, 665 bp, Arabidopsis thaliana
taagattcaaaacatttctgcttaagcaaagacattaagatttgtagaaacaaggttctaaggagtcttattcaaataatttgcagtaatgaacaagcaggtagtcagatcaaaacataaagcacatcagaagaaaggacgcacctcatcaacagcattgtcaagcaattctgcaacagctgcagatagagagaagcaaataagtcttgttaaaacgcttgaataacacatacaaaagaaggaaaattgtttaagcatacctccaaaagcccatttatgtgaggtagcattggagtgaaggaacatagggtgcacatgaagataattttttccatctgcaaaacataagtcaagaaccattaaaaaaaaggcaaaggagacgatgtattctggcggatataactcaaaacagtataacctccaaagagaaaagcaaactcatgcaagcaaagagtaagataaaagtaagtgataatagataagtagcaatatagcatacttggctgctgagactttgaactcaattcatcattatagcttccagctttccaaaattgcctacaaacaggagctggacatatggtggatgaagaagtgacaccagcatcatcagctggcgaccggacctgatcaacgacactagtgctactctgaccagcactttg

SEQ ID NO: 23772 - DNA, 1570 bp, Arabidopsis thaliana
aaaaaccttactaggcttacgactctggacctggagattaacaagctctctggctctctttagaacttggattcgtctttggatcagttcaacgtttctaataacttgttgaacggatccatacctaagagtttgcagaagtttgatcctgattcgtttgtgggaacttctctctgcggcaaaccgcttgttgtctgctctaatgagggaactgtgccaagccagccaatttctgttggcaatattcccggaactgttgaaggaagtgacgagaagaagaaaaggaagaagctttctggtggagctatagctggaatagtgattggatgtgtgcgttggtttgtccctgattgttatgattttgatggatctctttaggaaaaaggggaacgagagaacaagggccattgaccttgcaaccatcaagcaccatgaagttgaaattcctggcgagaaagcggccgtggaagcaccggagaataggagctatgtaaatgagtactctccgtctgcagtgaaagctgtggaagtgaacagttcagggatgaagaagttagtgttttttgggaatgcgacaaaggtcttcgatcttgaggatctgttgagagcttcagcggaggttctggggaaaggaacgttcgggacagcttataaagcggtgcttgacgcggtgacattggtggctgtgaagagactgaaggatgtaacgatggcggacagagagtttaaggagaagattgaggttgttggggcgatggatcatgagaacttggtgcccttgagagcgtactattacagtggagacgagaagctgcttgtctatgacttcatgcctatgggaagcttatcagctctcttacacggtgagaactacccctctctttctttctcagcgaaaaatttgatttttattgttaatagtactctgctgaatcttaagtttggcataattagtaatggattcgttaatatacattactgttaagaacgaaatgacaaagattctatcatgaaatgattagtttggtactgcatcacattgacaaggatcagtgaagagtttttatcattcacatggcttacacaggacgtctatgaattagtggggacagtagataaccttggattccttgactagctgtgataattgatcttttagaattgtattttgaacaaagaaaaatccagacctcctgtgttctactttcagacagtagttttttttgtgtattgagcttaatgtcatgctatgttacaggaaacaaaggtgcaggccggcctccattgaactgggaagtcagatcaggcatcgcccttggagctgctcgtggcttagactatcttcactcacaagacccactgagctctcacggaaacgtcaagtcctccaatatcctcttaacaaactcccatgacgcacgagtgtctgatttcggcctggctcagcttgtaagcgcctcatccacaaccccaaaccgggccactgggtaccgtgcgccagaagtaactgacccgaggcgtgtccacagaaagcggacgtgtacagctttggtgtggtgttgctagagtt

SEQ ID NO: 23773 - DNA, 546 bp, Arabidopsis thaliana
atgatcatctcaaagtttcggttttcctactccaatatgtgacagttcttgatgaaatcatttgagtagttgacgtatttggtccagaatggccgcagatgctcgaaaccaatctccagccatggctttgactgcccattgtagtggatcactgctgctttcttcacattttctatgttggtcttgctctggtagcctaatcctagcatatgccatgacgagtctattatgtgtacgtgacccttgaacgcgataagagcaggaggcaaggttccaagtttccacattgtcagatttgactttagattctgttccaaagcaaaagtaaacagagtagattagagaggtaactttagattctgctaaagaaaaacaaaaaagtgtaagcttattcgatagagttacctctctaagccaagagtgatacgtttctctgatatttgtttcctccaagcttgtagatcgaagatattcataccatatgcccaagcacattcttcaggatctaaatgctttgcgatgagcgggtgagagaaattgaagtag

SEQ ID NO: 23774 - DNA, 635 bp, Arabidopsis thaliana
tgccaatctgtacagttgacatcatctaaagagatttcctatcggtgcttttgtggaaagagaagagatccaccgtctgacccatatctcactccacactcatgcggggaaccatgtgggaaaccgctggagaaagagtttgcacctgctgagacgactgaagaggatctttgtcctcatgtatgtgttttgcagtgtcatcctggtccatgtcctccctgtaaagcctttgctccacctcgtagctgtccttgtgggaaaaagatggttactactagatgctccgagcggagatctgatcttgtttgtgggcagcgttgcgataagcttcttagttgcgggcgtcatcaatgtgaaaggacatgtcatgttggcccttgtgatccttgtcaggtactggtaaatgccacatgtttctgcaagaaaaaagtggagactgtcatttgcggtgatatgaatgtgaagggggaattgaaagcagaagatggtgtctattcatgcagttttaactgtgggaagctcttggatgtggtaacatttctgtccgaggtatccatcctggaccttgcggggactgtgacttactgcccagtagagttaagacatgctattgtgggaatagcgtttagaagggg

SEQ ID NO: 23775 - DNA, 953 bp, Arabidopsis thaliana columbia
actatagcggtccataacaattctcgtgtctctctctattacttagacaactcgtgggaactaatacctaccactcaaaagtgatcaatttatgagattttatgacaataatttccacaagactcaaactcaaatagtcacatccaaagaatcacacattttcaagtgaaatgagaaaagagaagaaattagattactgctggagagcagaaacagcatcttggacttcatcaacagaaggaacagagccaaacagagaatcatcttcttcctcagaaacccactcaaaatcatcataacctccagaattaacaaaggaaaaaggaccgccgccgctccatccggaggttgcagccaccggaagattcaacaacaacccagaagccgcggaatacgtcagattattcgacccagaagaagaagatctctgtttctggacatgcgaaacagaggcgtttccagccggagacgacgtggacgatgatgatgaagaagcaaagggatcttgaataccaccgttggctacaccggtcctcgtcatcgcacgaccggcggcgcgtaacatacctccgccgccacccataggccctcttcctccaccaaacatagagagatcactatcaaattgtttttacttacacgacaggttgcgtatgtttactcggtgagtttgtcttttggtccgatgctatttcgtaggctttttacttgaagcagttttgattgaatcgaggaagtggataaatgcgaaatgtcttttatagaattttcaggaatatatgactttctttactttgctttggtccttcttctccacgacacgcttatccgtttactctgttttctttttttccattaaatgcattaaaatactactccactgttgttataataataattgtttcaatactggattatatatcccaaatttatttggtacgtcagcatatgag

SEQ ID NO: 23776 - DNA, 1113 bp, Arabidopsis thaliana
gacacctttacttacaaggaaacagattctccggcgagatacctgaagttttgttcagtctcagtcacctcgtgaggcttaatctcgcttccaacagcttcaccggagaaatctcttcaggtttcacgaacctcacgaagctaaagactctgtttctagagaataatcaactctctggttcaatccctgacttagatttacctttggttcaattcaacgtttcgaataactcgttgaacggttctatacctaagaatcttcagaggtttgagtctgattcgtttctacagacttcactttgtggcaaaccgcttaaactttgtcctgatgaagaaactgtacctagtcagcctacttctggtggaaacagaacacctacgagtgttgaaggaagtgaagagaagaagaaaaagaacaaactttccggtggagctattgccggaattgtgatcggatgtgtggttggtttcgctttgattgttttgatactaatggtgctctgtcggaaaaagagtaataagagatcaagagctgttgatatctcaacaatcaaacagcaagaacctgaaattcctggagataaagaagcggtggataatggtaatgtctactcggtgtctgctgctgcagctgcggcgatgactggaaacggaaaagccagtgaagggaacggtccagcgacgaagaagcttgtgttctttggtaacgcgactaaggtttttgatcttgaagacttgttgagagcttctgcggaggttcttgggaaaggaacgtttgggacggcgtataaggcagtgcttgacgcggtgacggttgtggcggtgaagaggttgaaggatgtgatgatggctgataaagagtttaaggagaagattgagttggttggtgcgatggatcatgagaacttggtgccattgagagcttactatttcagcagagatgagaaacttcttgtctatgacttcatgcctatgggaagcttatcagctctcttacatggtgagttcatatcgaaacttgtgcttagattgagtttggtttcttttgaggcaagtcaatgcttttagtgcgtatagatagccttgaatacatttagattatggttaagtttag

SEQ ID NO: 23777 - DNA, 1111 bp, Arabidopsis thaliana
ttccaagaacagaacttgccgctgttcttagtatccttgtcttttgagcttgccaacaatgataaacctgctgaatcccgtcgactagccggtattctgctaaagaattctctggacgccaaagattctgccacaaaagatcatctggtgaaacaatggtttgcaattgatgttgctcttaaatcccagatcaaggatcgcttactaagaactcttggttcatctgccctagaggcaaggcatacttcagctcaggttattgctaaggtagcctccattgaaattcctcagaagcagtggcctgaacttgttggatcgctgcttaacaatatgactcagcaaggcagtcccgcacacttgaagcaatcaaccttggaaactctaggctatgtctgtgaagagatatcacaccatgatcttgtgcaagatgaagtgaattctgtcctcacagcagttgtgcagggcatgaaccagtctgaaaatactgctgaagttcgtctcgcagcaacaaaggcactgttaaatgccttggatttctctcagacaaattttgagaatgaaatggagaggaattacatcatgaagatggtatgcgagacagcatgttccaaggaggcagagatcaggcaagctgctttcgagtgccttgtgtccattgcatccacatactatgaggtgctggagcactacatacaaacactctttgagctcacatcgaatgctgtaaagggagatgaagagagcgttgccctccaagcaattgagttctggagttccatctgtgatgaagagatcgaccgtcaagagtatgacagtcctgatagtggtgactcatcccctccccactcctgtttcatagagaaggctcttccccatttagttcaaatgttgctagaaactctgctgaagcaggaagaggatcaggaccatgacgacgatgtctggaacatatctatggctggcgggacatgccttggcctggttgctagaacggttggagatggtgtagtcctcttgtgatgccttttgttgaaaaaacataagttcgcagattggcgacgaggaggagccacttatgcttttggacaattttggagggccaacaattgat

SEQ ID NO: 23778 - DNA, 695 bp, Arabidopsis thaliana
caggcgataactgacgttgtttgtgaaaaacaacaacatgccagattcctgacaaaccagataataaaaaggcaccgattcccccggtgccttttttatttatgccgctttatgtgcatctaccatgatgatatcactggtgaaaaagccatcattctgcaaggcaaaatacgttctcacctctgtcgatgcgctctgttggtaaatgcgaatagcgtctactaacgcttctggcgtacgcattctcgcgacccatgaagaaaattccagcggtaacttatctgtaattaaattatcaactatcagattggcttcattgattaacgtcaaccactcaccgctggcgtagtttcgtacgtgagaggtatcgcgtaatgcttctaccgtctgtaaccagatgtcgcgcactgggtgacccggagacattacgtccatcacaatcagcctaccgccaggtttcaatatcctattcacttctcgcagtgctgcaccaacatcatgccagtgatgggcagaataacggctgataacaatatcaaatgcgttatcggcaaatggcagactttcggcatatacctggcgggtggtgatatttttcagttgccgggcttcggcagcttgtgccacgacatccagcatgtgggcagataagtcatacgccaccaccgcgctctttagagcacactgagagtcga

SEQ ID NO: 23779 - DNA, 667 bp, Arabidopsis thaliana
catttagtggttggtgaccgtgtagctcttgaacctgggattagttgttggagatgcaatctctgcagggaaggacgatacaacctttgtccagaaatgaagttctttgcaactccaccggttcatggctctttagctaaccaagtggtacaccctgcggacctatgcttcaaattgcctgagaatgtgagtttggaggaaggagcaatgtgtgaaccacttagtgttggtgtccatgcttgtcgccgagctgaggttggtcctgaaacaaacgttttggtaatgggagctggacctattggccttgttacaatgttggctgctcgggctttcagtgtgcctagaattgttattgtggatgttgatgagaaccgtttagccgtagcaaaacagctcggcgcagatgagattgtacaagtgacaacaaacttagaggttctttacagtttctttatctttctgaaacattagtgatcggattgtataaagataagaacttttcccatttttcttccacaggatgttggttctgaggttgaacagattcagaaagctatggggtcaaacatcgatgtaacattcgactgtgcgggttttaacaaaaccatgtcgacagcattagcagccactcgttgtggcggtaaagtctgtcttgtcggaatggggg

SEQ ID NO: 23780 - DNA, 1006 bp, Arabidopsis thaliana
gaaacaaaggaaacattttgagtttaaataaccaagacaactaaaaacactcagaactgaatttattctctaagcacttgcaaaaggaagctcaactctaaacagtagtcactaactgacatttttagtagttgtagagctaatggtatatgattaacaatagtttctcatacataaaatctcaaatcccaagtttgtaccaccaaatcatgcgtgaaaatctctgacgatctcattcaatttcaaactctcacgattctccagcaagaactgatgattacaaaagagagattaaatgtatcaaacctgagataaggcttccatagctggatagatcaatttgcagggaccgcaccaagtagcgacgaattcaaccaaaaccggctgggctgattcgagaaccgtactcgaaaactcactctctccaatctctttgattccgccgcatcttatcaccgaactagagctttttctggttcttctagcaccggagcttaacgaaagcaggtggcggttagccgcgacggaggtgacctggactgagctcagaggtttgacggaaacggaggttgccggagaacatgaacgaaccggaggagtgagatatgatcgcataagaatcgtcgaactggagacgatagagtccatggcttcttcttccacgttctcctaatcttctctgtgtttgactcatattcagaagaacacgtttgtgtggcataggaaggaaagctggtgatgacttttctcaaggtccactacttttttattcttttacttttgccccgtactttgagaaaaccattttaagctccttactaattggactaattgggctaggcccatagttgaaaatagtcctcgccggagttgcgtaatttttcacaggtgaacgatgactttttcaaatacgaaagccggtccaatccgatctatcaaacaagctttttcgtgatttggtatgctcttgtggtggatttcgatttttcttaacactaaaacaatt

SEQ ID NO: 23781 - DNA, 541 bp, Arabidopsis thaliana
gtttttggtgggcgggtttattttgggttcatgggctgagcttttttacccaccacaagatctctacccgaagaacaccacgtcgacttctttggagaacgtttgatcgtcacggtcactcatactacctcaaccatccgccgttggattcatagcatccgtttcttcagccgtcttcgctcctcacaccctctcgttgttggactcgacgtccaatggacacccggtggttccgatcctccaccggatattctccaactatgtgttggtaaccgctgtctcatcatccagttgtctcactgtaaacgcattcctgaggtccttcgaagtttcttggaagatgagacaatcacttttgtcggcgtatggaacagccaagacaaggacaagctcgagagattccacatcagttggagatatggagacttctagacataaggcactatctccatccgttgctcttgagtagctagtttgagacgattgtgaaggtgtatttggggcatgaaggagtgacgaaagataaggagttatgtatgag

SEQ ID NO: 23782 - DNA, 567 bp, Arabidopsis thaliana columbia
cgccagtgtgctctaaagtcatcacctccaaaacgtcattgaccgatcgtaatgggccgttaccagcagcgaataccttacgccgatttccggtaggatagaggcaagactgccgaagccgcacaagccagcttcgcatcctatctataaccgagggatcattcgggttccaatcattgttgcgaggtgaccccgaactatcaagtccgcaatcctcgcacatctcctcgtagagctgtctgtagctttgctcttctactgcggtaaagggtactgtgataacaatccttttctgaggtggcagatgtagctcttctcggataaaatttttgctgtgtcttagagtgatagtattaacgatgcgagccagaactggcttgaacgtggcatcacataaccttttccatatgggcccgcagaaaggttcataccgaaggaagagcagtagtccgagcaaatcggtgacatctttccgaagcggcgttcctgtcacagcccatgctatatggcgagggataagtcgagcaactttggctgcattactgatgccactctcgatcatctgag

SEQ ID NO: 23783 - DNA, 952 bp, Arabidopsis thaliana columbia
tataactcgcatatgcttcaatccttgaaaccaaatgagacccatatatcgatttgtaatcagaggaatgatagacattatatatgagatcaatcttgtatccccttatcaagggttgatttacttcaaaatcaagtctagataattaggttaaagtctgagaaatgatccatataacaacagaacatgtataataaacatgtaggagtaatctatgatctaagccaaacagggaatatgaattcaattaacaaagtgatatcaatctactgatagatggtgaagaaacatgaatgagattctggtatttataaaagtctgatgagtagtgaagatatttccccaaagagtatcagttacaaagtaatctacagaagaagggaaatttcactttaagcttcattcaatgagcaactaaaacatcattattgttcagtacgttgctgttaccattaatagattcgagtatagaatttggagaagggttcaatttcaccatcgcagatctcgcagggccaagtttcttcctaccgattcgatacggaccgtagatcttgctcaagagatggggcatctgatccatagttatcgtctgcggcgtcgcggcaataggactctcggaagatgatgaaggcgggtcgactgggtccgagagagaacgagtcagggggaaattggatctagcgttgttgattctagcgttacggatctgagccagagcccctggtttcatgtaacgatggaaaccgtcgtttcttctcaccggcgatctggagattcctttcatggtgtagaagaggattgtgagggacctgagaaaggatgattggggaaacgaaggggggctctttgtaaaggaaggagtgggtgtgatggagaggcgggaaaactggaattgggaattcgagaggcgggaaaactaaaattaaggtcttgtcttgaataagtaaga

SEQ ID NO: 23784 - DNA, 647 bp, Arabidopsis thaliana
caccaactccaagaccacccctcaggtaaaccttcctagccatggaagctaaatagaacagataaagacaatgctaaatccaatatgtagaagatttgaccagatgttatatatacataccagctctgatgtagtaccagtcagggtcatatggagcaagctccttaagtttaccagtcttgacgatgtctgtccacagaggcagctcaatctacatggaaggaacaacattggaatcaaaagcagaaacctatcttcactgaaatgacactagcaaatcactgtttagactttattgagatttgtagttacgattcaaaatgctctagagtaaggccaaattcaagtttcaatcaggcagtgatcattgcagtttcatgaggtaatcgtaatcccaaacatcaatcaaaatactagattagggacaaacgatgcggaccaaaagctaagaatcacgattcgttaccttgccggaacgcttgagatgggcagcgtacgcttgacgaactcgtgtggagagacaccttcactgttttactgtcgccattgttgcgcgcctttgatcttctcacctcctttgtgctgcgggtcggcgatcttgaagcgggatgaggattatgataacgattagggctttgaggagtgtg

SEQ ID NO: 23785 - DNA, 508 bp, Arabidopsis thaliana
caagaactatctactgcactaacattgacaagaaggtgactctcactcgaataaattggtttcctttgccaaactattctgaaacttaatgttgctaactttgcttagtttcacttttcaacagctcactcaaaccgacattaaactcttctttgagtctgtgtgtggcgaggtgtaccgtctgaggctactgggcgattatcatcatccaactcgcatcggcttcgtggagtttgtcatggtaagcaaatacttctgttatctctctttcttccaaccttccatttgtcaactataacgcttatgcattttcattagttaagtatgatcttttcactcttccgcaggctgaaagcgcgataggcatctcaactgcagtggtgtcttcttggttctttaccgataaggtccaagaacaaaccaacacttactctttaacattctctctaaattgatcatcaatctgaacattgatcgtactttggtggttggattttgcagggtgagt

SEQ ID NO: 23786 - DNA, 747 bp, Arabidopsis thaliana columbia
cacttagctcaaactctcaaagaatacgagaaaggttcttaaaggaagtgtaaaagaccaaaattaaactttctaattctatatgcagtaaaatgttccaatatcaaaaactctttgaatttgttggaaagttctcttatacgaggcagagtacgtatcgtttacattctcagtccttattttcataatactattttgatatctagaactcttactttgttttattaataccctatcgtatagttatagtttgtttgatttccaatccccatatttgggttggggaatgccatttttgattttcatatagtttcctatgtttcttgatcatcatgtcagttacattctcatggcggaacctgatcatatcatagttaaaccgataccaaacctagctagaggcaatctcgcggctgcgtttccctttttctacattgaaccaaagaaatatgaatcggttctccgcaaattcttccccaaagagaatggaccaatatcaagaatcgatcccatcgggaattctccagtgatcgtcactaaggtatagtaatcgcagcactagtttaagtccttgcccggacaacatatatggtaatatgactaatacttttcttggttttgtagaatgcattaatgaaaattgctccaacatggatgaatgtttctttggctatgaagaatgcccacaaacagataaagcttttggttgggtcttgaaatgtaacttctctcctctctaatgtgacc

SEQ ID NO: 23787 - DNA, 551 bp, Arabidopsis thaliana columbia
tgtccttttttttctttttcttttgaataatcaaagatagaaaataattaagtgaaataaaaaaactatatataacttaccagtgggttgcctctcattaagcgcttgtttagagtcaatagcttaactttggagcagttcaatcaataggtggatcctgaagatccaatggtctcgccatagaaatttcggtttcaaccaaataatgcttgactctttgtccatttactgaaaatttattgccatttttcccaataagaacgatagttctatatggttgaactgaacgaatctagggacctgaccaacgagaagacaacttgccatgaaatatatttagtcaagaattataaagaagtacctggtcattaggtcgagggatcgagagatgatcttcctgtcattataggccttggtgcatctgcaacaaggtagttaactacgtcagcataccatggataatcgttttcaactactgtggcagcgcagttctttgtgaaaatccagtcgttcgtctgattagtcaggtgtcgatcgaccctttgaatggt

SEQ ID NO: 23788 - DNA, 543 bp, Arabidopsis thaliana
acttccacttgtcgtcaaatgaattaccaatgttattgttattgttatgtgtgcaggttcctccaaataatatactactgacgccagtgcagtgtaagtcactgtggagacagttcaaatctgagaccgagtatactgtaacccaagctatttcggcacaggtgattttgaaaatctacctcagaatttatgtgtgttataagcatcatttagtcaacggtatgttttcatttttatttttcaggaggctcacaagcgaaataacaactggcttccaccggcttgggcgatcgtgttgatgattgtccttggtttcaatgaattcatgatgcttttgaagtaatatcattttccttgcactcttttactattcattcaaagattctccccaagtgtttcagctatttagattcactggcatgtttgatattattggaacaggaatcctttgtaccttttgggtttcttcgtggcgtttttactctccaaagccttatgggtgcagcttgacattccgagggaatttcaacatggcgcagtaag

SEQ ID NO: 23789 - DNA, 1002 bp, Arabidopsis thaliana columbia
cgaccgatattaagtagattaagctcaaaagagtcatttgtgagtaatgttgtttacatacgtgatatgatgcggttttgtacggactttccgtgtcaaattattcgctttaacatttgcactacgagagatcaaagataaagaaaagctagtgaattctcctttgtcgctctgtaattcttccaaatatgctgaaaatacgggtcattcaatagggtaagacaccatcttcaccagctttgaacagtttgttaagaaaaccacatcttgattatcagcgccaatcatgcatttcatagcccaaagaagggcttccacttctgcgtgtagtggcgacaaactccttctttgattggaagctcccatggttggtggctctccatttggtgatgtacaataccatcatgttccagagaatttatcacgttctttccatgaaccatccacatagcatcaatatcttgaataaatgatatcaagtgagagatatctcacttgaggcctagtgtcaaaatttaagtaaccatgattttcagtataaagttcaatttgaggtaactgccacgaatgtgcctctttttccgtcaagcgtactatatgaggggtctttattcacattttttaaaaaaaatttgttccttgctttccaaatataccaaattatccatggttaggaagataagtcaaattcagaaggtattctctagaataagtgatccaaattcgcataagtagatgaatatgtaaaatttccttcaaccgaagtattttctgatagtgcccatatttgccatgtagggtggcaaaggaaaagtgtatgattaattgttttttctactcaccacatctgaaacacctgtgtcatagttaattcctcttttctgcaacttgtttgtcaccggtacacaacccgctaaaatttgccacaagaattgacgtaatttgggaggcaatgtactttccgagtgtcgctttaaacttttagtatctggccaataaact

SEQ ID NO: 23790 - DNA, 774 bp, Arabidopsis thaliana
agtgtattatccaggaggggaagagggaaagcttcttccggatcctgactattcctcgcatatcgattaccgatggggcatggaagggcttaagaacacggtgtggaaactgatgaacactactgctgttggtggtgaggcaagaaacaagggctctccaagtcttattcaagaggatcaggcatctagcaattcccattgcgttgcatatatgatcaaagatcgttccaaggtaaagtttgattttcaacaactgtaccaatcattaatgcagactgcagagtatctaatcagggtttctacaggtgatgagagtagatgacttacgtcagaagttacgactaagaggccttcgttgccatccaatgtattgtcggaattcaacgagaatgcagatcgttcctcttcttgcttctcgatctcaagctctcaggtacgttaactaaaccacattttgctacggaaatgctacaaaacaaaattatatttttgaacatgtttgtttccttattatcgcgatttaattgttgcggtgaaggtacttgttcgtgcggtggaggctaaatgtggcgaacatgtacgtggtggttggagatcgtggcgatacggactatgaggaattgatatccggcacacacaagactgttatcgtcaaggggctcgtcacattgggttctgatgctcttctccggtcaacagacctccgagacgacatcgttccatcagagagtccttttatcggtttctcaaggttgattcccggttaaggagata

SEQ ID NO: 23791 - DNA, 1065 bp, Arabidopsis thaliana
tactactgtactcactctatcaactttgttgccaacgacgatcttaatgcagtcatcggtagtcgaatatagctcaatctctttagcccaaatatctgccaagttcaaaaatgtctctcttttcgtgacatcataaactgcaccatgaccaagaaaatccggagagagtattaatacaagtcttgagaacttattacgacaacagctactgacaattatatgatctcatatatcattaccgagaatgattccttgggagcctctgaaataagaacttgtcaatgttctgaacttttcttgtccagctacacaacaatcacaaacaagaaatcacatggaccatgagttttgtagtaaccaactacacacgttccaaaaactcgaattgctcttattgcttttttacctgtgtcccagattgtaagtttcagccttttccctcttactttcatctgtttgatcttaaagtcaacacctacaatgttatactgatcagactcaagcaggcttcaaattcagataagcatcaagagttatgttttccgagtttattttcaaacagaaaatcataaagaaaacttcaagttctcaaacttcaacttcatttgaattttgaccagacagtcgtctagctcacaaacaataagctagccttcaatgcaaaaaaaaatcatgtcgacaaagagatatttgaagtttgaccagtcaagattctagctctaagactgttaagaacgaacgataaattaccaatggtgggagcaagatcttcgacagagctggaaatgaagctgagaagcaagctgcttttaccaacaccagaatctccaatcaacaagatcttgaaagatagatcatacccactttgcccagaagaagatcccattttcttctacaatctctcactctatctaatactacagtaaagagatcaaatcaaattcaacttagataaacaaacaaacaaaagaagtgatttttatgttatcttgtaaaagaatgaatcgaaaaaagaagagagaaaactttgcctctgcagagaaatctatgattcatacaacaaat

SEQ ID NO: 23792 - DNA, 575 bp, Arabidopsis thaliana
cattattttttgtttgatatgagaagctgagtatatatattccaattccctcatatattcacaaaccttgacgcccttttggcacagagcaaagacaacagccgaagccacctttgtgagatttcctctaaagacaatttccgtggcttcctttggaatattgttgataaccaccgtagctgccatgctgctcccgtccactagtcttatcttcaacttcggatacttttgcacgtacatttctccagacccgtttagttcctccctctcattaattaattgtgtgttgattagttacttttttcttttgccagcgtgtgtaattagttacagtacttatccaatagtgattcatatatatttagggggatttgaagtaaataaacttacattgttcatcaggccaagactcattactttcacacccttttcatctgcttcaaggatagcttcctctatgatagtgttgatggactcatggtggcgctgtgatttatactaccgccgcatgtttatgaggcaaaattattaataaactttagatgcacttacaaaaggtatacgacaagaaaatg

SEQ ID NO: 23793 - DNA, 524 bp, Arabidopsis thaliana
agcactagaggtataataacactatactgagattgattgatttttctgttgtttaatcggaaatctaaacatttttttggtttggtttgtcttcagggagtgagattagagctgaagcatccggacaaacaaggtttactagcggaagtaacgcggacattcagagaaaacggtctgaatgttacaagaacagagatatcaacgagtagcgacatggctacaaacatattctatgtaactgatgcaaatggagacgaaccggacttcaaattgattgaatcggttagggagaaaatcggtttggagtgtttgagagtgaaggagatgccaacaatgtatcataagaaggcagatggagaagaacaacaacaaaccaaagcagtgttggtttcacttggaagtttggtttggagaaatctattcaactttggtcttatcaaatcatgttcttaaatctttcaaatcttgggttgaccgaccaccggttcgatgaaattcatcctttgagacggccgcggattttg

SEQ ID NO: 23794 - DNA, 521 bp, Arabidopsis thaliana
atgagatgtgcgttccaatacctatacgaaccctgagttgagattaacgtatccaccgtgatatccaacgtaggagtgacgacgttgagaggtcgtggagggtgcgatgcaataaaattatcttgactgattcaaacggttttgccatctccgacaatgaatctgcttccttttttaattacatctaaacccgcaagcatagaagtccatccgtaagattgatatctctgccttttagcgtccagaatagagtcttctctaaagtatcttgctttcattattcgggcaaataaagaatttgggttgttaatcatccgccatacttgttttgcaagtaaagcgtcattgaatttagccaaatctctaaaccctaaaccaccttcctttttcgagtattgtaatctcttccaagctatccatggtatttctcattattgttgcattcttttcccaccagacattcattaaaagagcttcaatctccgaaacgatattcaatggtaatttgaagcaagacattg

SEQ ID NO: 23795 - DNA, 818 bp, Arabidopsis thaliana
ctaatacataaatctctaaaactaaaacgtaaataagcagaacatagaaacttattttgtaacttcttttggtccgaatattttacccaattattacaatatgtaacgaacttcacttgtgtgataaaaaagactaattacatttacctattggattaatatgactacataaatcgacataactcctccaataactccaccacttgaaccatagtaggcctttctctagtcgactctttaatacaaagacaagcaatcctaaaatactcttccactcccttctcactaccacaaacacctccaaaatccaacatttcataacaccgattttgctccaccatgatcacagcccattgagccaacccaacttccttctcatccacaacaaccgttaaattcggccgtctccgcgtcgccaattccaacatcaatacaccaaaactataaacatcagctttaaccgtcgccgcggtattcccttcccaatactccggtggcatgtaccccatcgtccccgccacttgcgtcgacacatgcgacctcgacgcatcgatccttcgcgccaatccgaaatccgcaatatgcgccacgaaatccgaatccaacagcacattactcgatttgatatctctatgtataattggtttcggtaaaccatgcagataagctaaacccttggccacatcgcgcgtgatattcacgcgcgttgaccaagtcaatggactgttctcttcgtcagtctcgtgtaaccaatagtcaagactacttttctctaagaactcgtagataagaatccgatctgatcccgagatgcaata

SEQ ID NO: 23796 - DNA, 1351 bp, Arabidopsis thaliana
  unsure (1)..(1351): unsure at all n locations
ttgtagaacgactaaaaggccatctagatgcaattgtttcagactctcaggctgcctttatcccgggaaggttagttaatgataacgttatgatcgcacacgaaatgatgcactctctgaaaacaaggaaacgagtctctcaatcctatatggcggttaagacagatgtgagtaaggcgtatgatagagtggagtggaattttttggagacaacgatgagactatttggtttcagcgagacatggatcaaatggataatgggagcagtgaaatcagtcaactactcagttttagtgaatggcatacctcatggcacaattcaaccacaacgtggaataagacaaggagatcccttatctccatatctcttcattctatgtgctgatatactcaaccatcttattaaaaacagagtagcggaaggggatattcgaggtatccgaattggtaatggtgttcctggtgttctcatctacaatttgcggatgactctctttttttctgccaatctaatgtccgaaactgccaagctttaaaggatgtctttgatgtttatgagtactattcgggccaaaaaattaatatgtccaaatcaatgataacgtttggttcacgagtacatggcaccactcaaaatcgtctcaaaaacattcttggtatacaaagtcatggtggaggtgggaaatatcttgggctcccggagcaatttgggcggaaaaaacgagacatgttcaactatatcattgaaagagtaaagaaacgaacatccagttggagtgcgaaatatttatcaccggcaggaaaagaaattatggtaaaatcactggcgatgtcgatgccggtgtatgcaatgtcttgcttcaaattaccattgaatatcgtttcggagattgaagctctcttaatgaatttctggtgggaaaagaatgcaaaaaaaaaggggaataccatggatagcttggaagagattacaatactcgaaaaaggaaggtggtttagggtttagagatttggctaaattcaatgatgctttacttgcaaaacaagtatggcggatcattaacaacccaaattctttatttgccccaataatgaaagcaagatactttagagaagactctattcttgacgctaaaaggcagagatatcaatcttacggatggacttctatgcttgcgggtttggatgtaattaaaaaaggaagcagattcattgtcggagatggcaaaaccattcgaatcagtcaagataattttgttgcatcgcacctccacagcctctcaacgtcgtcactcctacattggatacacggtggatacgttaacncaactcatggtcgcataggtattgg

SEQ ID NO: 23797 - DNA, 604 bp, Arabidopsis thaliana
caagaaagagttttggtcgtcaaagaagactatcggtactagacggcaatctcttgaagaagttacttggcagagaaggtaacttgcttctaaactttggatgccttagatagtatagcccactggctagtgctattgctttgaacggcattgcgtataggaccaccgacgcagccaagcagaacaaaatgaagaggcttgtagccctggggtctcgccagcttaaaagtgactggattctctctccctgagctgcaatgtctccaacaacagtctggatcctacctgccacgcttctgagccggtcatatctcagacgcaccaactcttgtgaccgagacgttgggaatgtgtcaaactcttcatcgagctcatcaggacctacagcctcggcccatgagagtttcatatccatgtgaggagggtgtctcggcctggacctgaagtccacaatccaatgaagaacatgtagagaaacatggtaggcaaaatcagttcagggtacatgaccaaaatgaagaacaagacattgaccagaactgaagtaaccgggtactccagttgcaacatcttcgagcacttcccgaccagaaatacctgaaag

SEQ ID NO: 23798 - DNA, 653 bp, Arabidopsis thaliana
tgaaccaaaaatgataattaaaatccaaaactatttcaccttaaatattttattttcttttatcaaactctaattattacaaaaacacacacaacacaatctctagatatcctttattcaaataatcaagaccagagttaaagaaacaagagatgattagaacaacaacatcaccaacaacaacaacacaacactaataacaacaataaccataagaactaagaaagaaaaaaagaacatcaaaagaattaaaacctcaagtaaagatgacgagaattggtatttacccaaatagcttcagaattatcagtcttcttcacttgcgtcttcttcactctcgtcttctgcatcctccatttcaacatcaccttcgtctccaagaatccactgttcaagctcatcttcttgtgcttctatgtgttggtgtatgtctgcagagtcccagtcgtcttccccatcatttccaagctcttctccacggcaagagacctgcaaatgtggtcgtctccttgccaaagcatctacgatatctctgtttacacttcctgtgatccctaaccatttaagcctcgggaaaaacggtttctttagccatttgaatgagagttgcgtgatgccaccacagtcgtaaagatccaacaagcacaggctac

SEQ ID NO: 23799 - DNA, 1163 bp, Arabidopsis thaliana
tcgcgccggcgttcttccgcttccttatatccatcgaagaagtcgttaaagtgcctgcgattattaacacgttggattaattcactgctcagctttccaaattttagtgggcttatataaaacgggctcttgattattttaggcccatctatttttcagtgaagtcattgccctataattcgaacttcgacgattgaacctatcgttcagtgaagtcataataatttgttattcagtttagtttgttcctttattctctttttgttattttcgaagcaatgcttcgacaagaatacactctatggacgttacttattactttacttacgtaaagaaattgacctaatacaaactttacttacgtaagaaacttaactgacataaaacatctatccaaccaatctgtcattcaattgcatgcagagacgtgcctagatgaaaaaataacatttgctctcatcttcccctacaccctttaaatatcacaatatattttgggtcccaatttttttttttataatcttcatctggtaaaacatgcttttttagtggtcaatcattttgtgttttacgttcatagctccatttcgtataggaacgggagtataattaaaaagttgaacggacagattcaaacaaaatacaatcataaattttctttttttcatcattctttaatacttgtaaaacgttgaaatttatttacttttcaccaatttgattgtttggactttggagtagtactatgtaaacaaacactattttgtaacgttaattaacatctacacaaacaactttaggtaagtaaataaagtcaaataaatcatagtttgtttttttggaaacatcaagtcaaaaaacaataactactctttggaaatacaattatgtaaaaaatcccacctaaatagtctttgtgaaacaaatgtaagaaaacaaaaaaatggccgtttcatcgtcgcatcatgcggttctcttcccttacatgtcaaaaggccacacgattcctctcctccaattcgcccgtctcctcctccgtcaccgccgtatcgtctccgtagacgacgaagaaccaaccatttccgtcaccgtctgcaccaccccaaaaaaccaaccattcgtctcaaacttcctctctgacgtcgcatcatctatcaaagtaa

SEQ ID NO: 23800 - DNA, 1440 bp, Arabidopsis thaliana
ttgccactatgttaaagtaaacttttatttgataaaaactttttatttctatgcaaaaaataggtctacaaagatgtggaaagagttgtagattaagatggctgaattatttgaggcctgggattaaaagaggcaagttcactcctcaggaagaagaagaaatcatcaaataccatgctcttcttggaaacaggtatataattaatttatttgtgattaaatgcaaccctaaacccatctttgatcaataattattcaatcaataatgtcgtcttatatcattttagtaatatggtccttaaaaaattacatgattacaaggtgggcagcaatagctaagcaaatgccaaacagaacagataatgacataaagaaccattggaactcatgccttaagaaaagacttgctaaaaaaggaatcgatccaatgacccatgagccaacaacaacaacaagcctcaccgtcgatgtcacctcctcatcaactacgtcgtctcctacaccgagccctacttcttcttctttttcctcctgttcctctactggctctgcacgtttccttaacaagctcgctgctggaatctcgtcaagaaaacacggactagagagtatcaagacagtgatattggcagaacaaccaagagaagccgttgatgaagagaagatgatgacaattaacatgaaagagaaggaattgattagttgttacatggagattgatgagacgatgagtattgatgaactaccttgtgatgactcgacgtctggcttcgtggcttttgacgactactcattaatcgacccatacagagacggtgtgtacgtatctgacttctacgatgagactgaacaccttgacctgttccttctttgaatcgcatttcctttgtctaaataaatccgtttctttagtgtgacgagagagagacagtggagagagagacagtggagagagatgtctgaaaaaaacaagtgcggattagtactttgaatgacatgcatggtcaatgttgttttacagctttgagcctttgactgttactttttattttattttaggtacctgttctctcacacatgcctatgagcctacatatatttgagggtttcataccattttggtgaaacaagcctatcggttactatattccttataggttttgtcataatggcgtggttaaaactttatcatatgtgtgtaagggttttatagtacttttttttttattaagatcatttaaattctaatgaaatttcaaatataaaaccaagataggtgaaactacaaaatcaatagtatatatcaactactaaactaaatgttctagtcaagtagatatgtacatgtttattggatttaatttgtatactaaattatactagtatctaataagtaatctaaaatattggacgacgcaaaattctcactgtgacattgta

SEQ ID NO: 23801 - DNA, 2310 bp, Arabidopsis thaliana
actggagcaaatcagctaagttgatgcctcgctcctcatgggaaacatgaacctgcacctgctgattgacttgtgacatatcttttgatggttgcagcctaagcgcatcaagagacgcctgcaactgaccataagatgggtctccaaaccgttgctgagaacgctgttgatcagcaaaaacctgagaatacagctgctgttgctgtcgtaacaattgctgctgctcttcttgtttatgttggtgtttaagcaagagcatcttttccaccaatagacgctgatgttgggcagaaagtggtgtctgagcattcaactgcaacaagagctgttgctgctgcaacagattgagcgattgatgctcttgagagagtccagcagcgagcatcatatcaggagataacatgccacctggattattttccataggttgaccaagtaaacctgacaaaggtaaattctgctctggcagtctctgctgttggaccccaaagggaatttgcgtttggaaagttttagcatggtgcaaatcactttccttttgaatgggttgagaccaagcaggaagaggaccactaacagcaggagaagacctatccgttacaccttggaggatggacaacaaatcagaacttggagaacgggtaggttgttgagcattttctgacacattctctgatcctggcatcaggtttgcagattcccgaccaggccaatatgaatacggactaggtattgatctctgccgctcaagttccaatttcttggccaggagatacatatcagccccaccatcagtaactggtaaagacaacccaccagaactatttactccatatccttgaacacctgcagacacaacaaaaaaacagagaaagtgaggataacaatagatattcttacaacacacacaccaaatggctaacgctaggactaccttgagctgaattggtcagacccccagacatcaatgattcaataaaccggttctccgctacagttcctgcaacatgcttatacctcatatcattttgcaacatatcagtctcacccatcccagaatgaactttccccacaccagggaaggctgatgtaccagctgcatcaacaaattcgttttgcttggcaccagtaaaaccaggtggtggacccgacttagcccgtaaatgtggcattacatcaccaagtaatgaaaaaggagaatcatttggtgcacttgcaagacgaactagcaaatctatgccaaaatacccagcctcaaaccatccaatgatatcagatccagaaaaagggccttgaattagaccctgaggatctttataatagagtgaaagttcttcaggcgaagatgggagaagctttctaacttcctgctccctgtcgaacaccagagatggctgccttctaagtgaaggatcttcactgatttgccatcttgattcacctttcgactgcggcaacatcatattattgccacctaaatgatttattgaatctttaggatgcgaccaaacactgtcagaagatttcagcctgctatcagctgaagggtcattccaatcatgtgagttcctattcgacctttctcccccagaagactgacgccatggagaggcagattgaacatgagcatttccctgcatactgggttctttcagttctctgacaggtgcctcattgcctctcctaaaaggtgcataaccttcatgagaagctgtaaaatgacagaaaccatattgtgagaggcaaatagggacagaaagaactcgcatatcactcagaacaaatcttagcattttcagctttgacaacactgctcaaagatattaactgatatgagttaatttcgttaaccatagaaatggacatgcacttggttccaatatcagctattcctaacagcaccaacatgagtcaacaaagctgcatgaaggccacaatctgtcaacacataccttcaggcctaaacttatcatctggatagttccttgtttctccactttcatctttagactcctcagcaccgaatgtcatatcttctctgcttccagctgcaacaaggtattcacaaaatttaccatttatttcataaacacaaaagactagaagcctggatgtcttttacagaattcttaccaggcctgatccgtctaggttgtgaaaactcgaccggatttcgtccagtagggccatccttggacgtctgaggggcaccactgctcactatttttcctttctcaatcgcatccagaacattctgtgagtaaaagtgggtataaggatcagaactgagataccagaggaaaaagaaaa

SEQ ID NO: 23802 - DNA, 690 bp, Arabidopsis thaliana
cagttacatatgtttatgttgctagttcttgtctgagacagttacatatgtttatgtagctagttcttgtctgaatcgtggatcaatgcccatatctctggaagcttaatgtgattttctttgagaagtgcaacatatatcttcttgtatcttgttgagatcacttcaggttgtgtgattttctcagaaattattgacctctagtcttgttactgcagtttcagtaccttttttgtttgtttgatgtaaaattagcagtttcagttttgagtactttgctcttaattttgtctcttggttgattccttttctctgatgtagaattgagtgggctgatcagtaactaagttcttcttatgcaggtaccatataaggttcaatgctatataacttcaatctatttagccgtcaaaacattttatatctgcttcgttgctttaaacgttatgttttctctatgacctatgacctgcgtttatactgctttataatctttattaaggcttgatggttatcatttctggttgcggattttatgattcatccttcaacttagaatctcctgtgtttttttcaggtaacagataaacacgaatgttttcagaagtagaaatggctcgagacgtggctatatgtgccaaacacttgaatggccaatcgccgcaccaaccgattctatgcagtttatgg

SEQ ID NO: 23803 - DNA, 581 bp, Arabidopsis thaliana
atgtctgaatctggaagaacaattcaagaccgcgtacaaaactaaatccaatccagacaagaaaccgtcgttgttttgtctgatcacataacacatttcagtttatagatctgcagaatttgttttttgtatttttgttctgttttcttttgattttcttcttcatcctgtaaaacctagaattttgtttcttcaaccaaaaatgaacagagaagtctctgagagaattcatattttgttcttccccttcatggctcaaggccacatgattccaattttggacatggccaagcttttctcgaggagaggagccaagtcaacccttctcacaaccccaatcaacgctaagatcttcgagaaacctattgaagcattcaaaaatcaaaaccctgatctcgaaatcggaatcaagatcttcaatttcccttgtgtagagcttggattgcctgaaggatgcgagaacgctgactttatcaactcataccaaaaatctgactcaggtgacttgttcttgaagtttcttttctctaccaagtatatgaaacaacagttggagagttcattgaacaaccaaaccaagt

SEQ ID NO: 23804 - DNA, 599 bp, Arabidopsis thaliana
tgctagactaaacacatacgttttcttccctaggaacttctattgcaaatagctactacacctattcgattgcaaaatccttaacatcatcaagaaaagagagatcaaagagttttaaaaccttcttctctcttcttctactcttcttcatcatcctcttcctttcccacttctacttctactaatactactgttcctaacgcaacattcaaactacaaacatcaagataagaaacaatagagacgagacgaatgaaagatctatagcgttaaaaaaaaggctttcatggtttcagacattgcaagcttacactctgccatggctttcactatcatcaacaaaaaacaacaataacaaaaacaaaaaaaaccattttcttttcttcttaaccgatcaaaattctctcacacacgctcatgagaactccctaccaagcttttgaatagcacaaaacatcttcctcctcgatccaacagcattaatccccatatctttaagatcttccaatgtcaacaatggtaaaacctcttcatcaacctcatgtatctcaaacataggccaatatctccctaaccctaactcttgtagccaaatcttc

SEQ ID NO: 23805 - DNA, 1029 bp, Arabidopsis thaliana
gtagagatcgaacgcttcacggatctctacagcggaggaagatgatcgacaaatggtagcaaactcttcttgattgatgaaaccgtcgcagtcgatgtcgatttcgtctaatacacggtttagctcctcctcagtgtacgacgttcccatggatttgaaaacgtttccgagttctgaaactgagattttcccgtcgccgttggatcgaacttgtcgaagatttctttagctccatatccgttgatggtgttgtggatttgttggtggattcaagatttgtgtttgccattttttgttttgtgatttgagtttctgtttttgacgtttttatagagtttttctgatcatttgcttttgattggtgagatgcttgatgctttttctatggctacccttcatggcttttaattaattaactatttatatttattcctatttttattaaccattaatatttgatattttttgtcctgctaataatatttctgaatgagttatttccttcactaattactcttgttatcaattactattagttttattttgtaataagttttttttattaataggttgatcaatggtagtagagtcatcaactagtaaaattatgaaaaatgttatggagaaaagtatgaagagaaaaacagagaattaacaacaacaaaaaagcaaaatgaaaaaaaaaaaactctctaaacttgctacttaatctttctttgttggttattaaattatagtgtgttttttgtatagtttgtattcatgtagcattatttattattattacataatgcgtatcaaaattaagaatatattgttagagtaagatgtcaatatctacctctatgtgggaatctgaaactataagtgggagagaaaagacattgattctccgtttaagattacgactgtggcatttgaataatatattattgaaaacgattgggaattttaagatatttattgaaccatgtctatctttatgaaatttccggaaataatttaaatagttttattatacaaactgtt

SEQ ID NO: 23806 - DNA, 1322 bp, Arabidopsis thaliana
tgaaagaggttagggaatcagagaccaatagctttggtgtataggttaatagcttctacgagctggaatcagcttatgctgatttttatcgtagttttgtggcgaaaagagcttggcatatcggtccgctttcgctatctaacagagagttaggagagaaagccagaagagggaaaaaggctaacattgatgagcaagaatgcctaaaatggctggactctaagacacctggttcagtagtttacttgtcctttgggagcggaactaatttcaccaacgaccagctgttagagatcgcttttggtcttgaaggttctggacaaagtttcatctgggtggttaggaaaaatgaaaaccaaggtaaattgtttctccccagccattattaaccaacatagtaatgttaatatttgtgtatatattcgtattgccaaatatgctctgataccatggcaagtaatagattggctcatgtattttatttgtgatcatgtagaattttcttaacagttatgacttggtgttggtatggttgggacaggtgacaatgaagagtggttgcctgaagggtttaaagagaggacaacagggaaagggctaataatacctggatgggcgccgcaagtgctgatacttgaccataaagcaattggaggatttgtgactcattgcggatggaactcggctatagagggcattgccgcggggctgcctatggtaacatggccaatgggggcagaacagttctacaatgagaagctattgacaaaagtgttgagaataggagtgaacgttggagctaccgagttggtgaaaaaaggaaagttgattagtagagcacaagtggagaaggcagtaagggaagtgattggtggtgagaaggcagaggaaaggcggctatgggctaagaagctgggcgagatggctaaagccgctgtggaagaaggagggtcctcttataatgatgtgaacaagtttatggaagagctgaatggtagaaagtagaggaagagaatatgtttaatgttctgagatagattattgactttgtgttcctctttggagttgttctttatgtcatcttagcttttgctactgtttagtaagagaaagtccattgtgtgtttctatataataaagaatagacctgaagataggcattttcaagtttctgctttaagataccaaatcttcgttgtgcatactttttacttcttgtgatcttactatgtgatttatatggcatggattatataggtcggattttctttgaattttaagtatataaatttgaagtaacaaagtatgtgtagtaatgatgc

SEQ ID NO: 23807 - DNA, 898 bp, Arabidopsis thaliana columbia
tgtctaacaatataataacaagaagagacacattctcttgagacacgccttcgctgagtagagaagaccaaaacgaaacaacaaagctccgattccgaagatggaccaacaaaaaaagaacaaagattagggttttttatgaatattttattaatgaaattaacgctgctctaagtcttcttcaaaatctgggaactgtgtagtagtagttaaagatatcccacatttggttgttcttcgttttcttcttaccatccttccctagaggaagacctgtcgaaaacccgagatttagaaattagtataacatcgattcaccaaatttggttaaacttaaagatatgatgagcctaaatgcatctattgtaccaactgcataaatctctagacttctaaagagatttagtcatttagatactaatccccgggactaacctgttgctgaagaatccgcgctctttggttccttgaaagtttcttcgctgctcattggctggtctaacccaggcatcgacggcaccacgtgatctgggtctctctgtagattcaaaactcctggtttcatcaattgagccagcccgggaatgtgttctttctgaatatgttccggttctacctgcaccagacccgggcctctcaactggtttctgcctgaacctgactttgtcgtccaattcacgggttagtatttccagatctttctctttcccacgtattatttctggtaaatcattgtgattattattactgccaggttcttgatcagattccttgatctctggagcaacggattccttctcgagttttttccttagctcttcaatctcttctttcaacatcttctcttcttctgtttcaggcctggaaaagttgattttcacaacactcagatcaatag

SEQ ID NO: 23808 - DNA, 1714 bp, Arabidopsis thaliana
tggctcatggccacatgattccactcttagacatggccaagcttttcgctagaagaggagccaaatcaactctcctcacaaccccaataaatgctaagatcttggagaaacccattgaagcattcaaagttcaaaatcctgatctcgaaatcggaatcaagatcctcaatttcccttgtgtagagcttggattgccagaaggatgcgagaaccgtgacttcattaactcataccaaaaatctgactcatttgacttgttcttgaagtttcttttctctaccaagtatatgaaacagcagttggagagtttcattgaaacaaccaaaccgagtgctcttgtagccgatatgttcttcccttgggcaacagaatccgcggagaagatcggtgttccaagacttgtgttccacggcacatcatcctttgccttgtgttgttcgtataacatgaggattcataagccacacaagaaagtcgcttcgagttctactccatttgtaatccctggtctccctggagacatagttattacagaagaccaagccaatgtcaccaacgaagaaactccattcggaaagttttggaaagaagtcagggaatcagagaccagtagctttggtgttttggtgaatagcttctacgagctggaatcatcttatgctgatttttaccgtagttttgtggcgaaaaaagcgtggcatataggtccactttcactatccaacagagggattgcagagaaagccggaagagggaaaaaggcaaacattgatgagcaagaatgcctcaaatggcttgactctaagacacctggctcagtagtttacttgtcctttggtagcggaaccggcttacgcaacgaacagctgttagagattgctttcggccttgaaggctctggacaaaatttcatttgggtggttagcaaaaatgaaaaccaaggtaatttttttcctccttaaccattattaatcaatgtagtctttattagtatatttccaaaaatattaacatttgtgtatacattttcctattgccaaatatgctatgatgccatagcaatgagtagattggtttgtgtactttatatattactttgtaaaacttctaacaattatgacttggtgttggtgtagttgggacaggtgaaaatgaagattggttgcctaaagggtttgaagagaggaataaaggaaaagggctgataatacgcggatgggccccgcaagtgctgatacttgaccacaaagcaatcggaggatttgtgacgcattgcggatggaactcgactttggagggcattgccgcagggctgcctatggtgacttggccgatgggggcagaacagttctacaacgagaagttattgacaaaagtgttgagaataggagtgaacgttggagctaccgagttggtgaaaaaaggaaagttgattagtagagcacaagtggagaaggcagtaagggaagtgattggtggtgagaaggcagaggaaaggcggctaagggctaaggagctgggcgagatgctaaagccgctgtggaagaaggagggtcttcttataatgatgtgaacaagtttatggaagagctgaatggtagaaagtagaaagatagagcatgtttaatgttgtgagatggattgttaacttttcttaatctttgatgttcgtggtgtgttcttatataattaatcaagatctaataagccaata

SEQ ID NO: 23809 - DNA, 553 bp, Arabidopsis thaliana
cacctattgaagcttccggagaaacagagacgcatttaatcgaacggaaagaaggcgcgtaacgcgagcttctaccggagtatccagtaacggtcacagaagaagaagagagataacgagaagcaacagaagggagaagccggcgagagaaagtcagtgcttgcatcgtcgctacgttcatagaggaagacattgtaacggctaagaactcggtggcggccggaatgtttgaagatcggagaagaagattcagaggtgacggctaaatgagtaaatttgattagtgattattctacgagatgtggcatatttataaagaagatgaccatgtgacttatttagcaatttactttaataccccttacctgtattttccaatttccctcattttttcactataagtcatgtgcatgaaccatgaaggcagcgaacccttttcggaaaaactaagcaaacttgtcattcacaaagatattgcatcagtttcataagctaacgatacgaacggtcgtctttctcaaaagtcgaaaaccgttatcttcttactttagtg

SEQ ID NO: 23810 - DNA, 769 bp, Arabidopsis thaliana
gaaagggattgtcaagcctgaagaaagtgagactgatgaagatgatcttgatttaggcattagtcctaatgccacttctgagaagaagaaggagtcttggcgtttagatggtcgaggaaaggtaaaaagagttttgcttaaatacctcttctttgtcgttgagttgagaaagttactctttttcttgtgtgtttcgttagatgagttcgaggaagtatgtggagaaactataccctcggctcgcagaagagattgatatagatccgaaatgtgtaccacttctggattacttaagcacatttggtttgaaagagtcacactttgttcaaatgtacgagagacacatgccatcccttcagattaatgtgttctcagctcaagagagactcgattacttgttgagtgtcggtgttaaacacagagatatcaagagaatgctcttgagacaaccacagatacttcaatacactgttgagaacaatctcaaagctcacatttcctttctaatgggtcttggcattcctaattccaaaataggacagattgttgctgctaccccttctctcttctcttacagtgtagagaattcattgagacctacgataaggtatctgatcgaagaggttgggataaaggacaccgatgttggacaggttgtgcaactctagcctcagattctggttcagcggctcgacataacatggaacactcgctacattttcctctccaaggagttaggagaactagagacagcgtagtgaagatggta

SEQ ID NO: 23811 - DNA, 587 bp, Arabidopsis thaliana
aaagaaaccaactttgaatagtttagatgaagttgatcctcagcttcttgagtatttcgataagttaggtgttcctttaacagagcagaaacgtttggctaatgtcgcggttgatgcggttatcgatagtgtttcgattgctactactcataggaagactttagagaagtctggtgttatcttctgttcgatatctgaagctattagggagtatccggatttgattaagaagtatttaggtagagttgtgcctagtgatgataattactacgctgctttgaactctgcggttttcagcgatgggtctttctgttatataccgaagaacactagatgtccgatgcctatttcgacttatttccggattaacgcgatggagactggtcagttcgagaggactttgattgttgctgaggaagggagttttgttgagtatttagaaggatgtactgctcctgcttatgatacgaatcagcttcatgctgctgtggttgagctctattgtgggaaaggagctgagattaagtactccacggtgcagaattggtatgctggggatgacaaggtaaaggtgggatttataattt

SEQ ID NO: 23812 - DNA, 427 bp, Arabidopsis thaliana
agtgattgtacttcagtttcacttaattcttgtttagctagtaatctgaatgttgcgtggcatgctagattaggccaccctcatgctcgtgcttttatattaatgttgcggaatgtttcctttgataactctacttgtgagtcttgtattcttggaaaacattacaaatctatttttccaaagtcattgactatttatgaaaattgttttgacttagttcactcggatgtttggacgtttccttgcatatctatggataataagaagtaatttgtgacctttattgatgagaaatctaaatatacatggatcacattgttacaatctaaaaatttgtgtgatagatgagtttataaatttctaaaactatgtcactaattactttaatgctaaaattaaggtactaagatccggcaatggtggagag

SEQ ID NO: 23813 - DNA, 904 bp, Arabidopsis thaliana
tgcctattctttctttcagctactccattttgttgtggtgtgtatgggcagcttgtttgatggattattccatgtttgtttagatgttgtttaaaggcatgacttgtgtattcccctccgttatctgaccttaagatttttatcttagcatcataatgattagtcacataagtttgaaagttagtaaaagcttctaggactctatctttagaaggtaataacgtaaaccaagtgaacttcgatttttcatcaatgaaggttacaaaatacttatgattttctctagataagcaaggtgatgtccacacatccgagtgaataagatcaaaacatttctcatagatagtgctagatttgggaaacacggatttgcaatgtttaccaagaatacatgcttcacattcatcatttttaaaagaagtacttggcaacaaaagttttaaagcgcgagagtgaggatgacctagtctagcatgccaactttcactattcgcattaccaagaatggaactaaaatgagaagataagggaacggatggctttgtgtcttcaagaacataaagtccatcctttgtaactccttgaccaagcactctactagtctcaatatcctgaaaatgaacctcattaggaccaaagatagcataacaatttaaatcggttgtagctttcttaacggatagtaagttagaggtgaatgtaggcatatagaaagctttagagcttttatcaaacaaatctagatcacctactcctttaaccggaattctatcaccattagcgattactacatttcctaaagccggttcaatattacttattaacttcgaatcactaatcatatgatgagaagctcccgagtcaataataagaggctttaaagagctaagggcatgataagatt

SEQ ID NO: 23814 - DNA, 641 bp, Arabidopsis thaliana
cggaaaggagatgctaaaggagatctttatgtgtttgagaaaaccccattgagtgattttacttcagtttcgcttaactcatgtttagctagtattcttaatgttgtgtggcatgctagattaggccaccctcatgctcgtgcatttgaattaatgttgccaaatgtttcttttgataactctacttgtgagtcttgtattcttggtaaacattgcaaatctatctttccaaagtctttgactatttatgagaattgttttgacttggttcactcggatgtttggacttctccttgcatgtctagggataataagaagtactttgtgacttttattgatgagaaatcgaaatatacatggatcacattgttaccatctaaagattgtgtgatggatgcctttataaatttccaaaactatgtcactaattacttcaatgctaaaattaaggtacttagatccgacaatggtggagagtatacaagtcacaaattcaaagagtaccttgcaaaacacggcatcattcatcaaacgagttgtccttacacactcaacaaaatggagtggcggagaggaagaatcgcacgtcatggaggtagaaaggcaatgatgttcatcgaatgcaccaagaagtttggggg

SEQ ID NO: 23815 - DNA, 1008 bp, Arabidopsis thaliana
atacaccattttgattgttaatttgttattaattattttaaaaggaaattgcagtgtcaaaaatggtctcaaaatttatcattaattgttattgtaattttttttgaactattctactatagtttttgtgtacttttgctaagctgaaaatcttaacacattctgaagtatcaattggagcatataatattgaaaattcaactatacatttttattagtaaatgttgatgtaaaaaaaaaaagcttgaatctttaactgttttatgcggaactctcactaaatctctctttgttcgatcactcgtgtgtttagacaaagaaagtaaaacagacacaagcaaatgttaacccagttcacgttcagtgatgaacgctacgtctggaccgagattacccggaaatccactagaaagccttggttacacaaacccttagaaacaagactgaataaactttcagctgcctctcttgcacttactctcttaaccctaatgtctcacttatcttctcctttatacaactctactcaccgccacgctcctctctcttcttccgtactctgtttcaaatgcagagacaaagagacaaaatggttgaaccattggcaagaggttaattacgtctctagccttgatgagctgtatgacaaagcacgtgcgcctctcgtgacttcgtttctttcacaagctgagaccttctctttggattagagtctttatgacactttaggcaatacttccacaaaacttcaccttgccttagtgtcaacctttcctttgcttcccttctagtgtaacttgatttccatctcggaccatgatcccttatcaggcacttgtaaccctgagcttcttcaacgcgctcaggaacttgttaaccggtaccacctttgtgaaaatatccgatggattatgaactgtggatatttcagcactttcacttctccatcagtgattgcatctctgatgtaatgaaacctctctggatatgctttgtccttcatgatga

SEQ ID NO: 23816 - DNA, 504 bp, Arabidopsis thaliana
ctataataatacagtattttaaaaataaatcaacgtagctatccgaaattaaatatttgtaatcagcggaggcgaaaaggtctccagctccagctaaactccaagaggagagagagagaaagagattcaattatatgcagagagaaaaagaagccaattggttctctctctctctctctctctctctgattgattgatccagcgattcgtctggctggctcggtttccgcgggaaaaccttcttcttcgttgaccttacacgagttttgttgattcggcagggggatcgacgacggagatggcgattctgtacgccctcgtggctcgtggcacggtggttctttctgagttcaccgccacctctacgaatgcgagcaccatcgccaaacagatcctcgagaaggtccctggagacaacgacagcaacgtctcctactctcaggatcgttacgtcttccacgttaaacgcaccgatggcctcaccgttctctgtatggccgaaga

SEQ ID NO: 23817 - DNA, 1188 bp, Arabidopsis thaliana
ttctaagaggtggtggaggtggaagaacttgtgtaggttcttcatcttcacttgagtcatcttggatttcttgaacatgttcagagtgttcttgtgtgtttggaggatcttcttgcacgtgtgtaagattttcttgatgttgtagggacacctcctcattctcttgatttaagtcttcttgatcttgtgtcatctccggttgatgttgagttgtcgaagttgagtcattgcccaaatgatccaatagaaactttagagtttcaacacgatcggaggtggaatgagtaagatcttttaggttctcccaatccttcttgttgttgtagtcttggttttcaagaaacttgacatctcgggatataaatgtgcggttcttggttggatcaaagcatttatatcctttttgagtagttgagtagccaagaaacatacacttagtgctcttcgcatctagcttgcttctttgttctccgggtatcaaaacaaaacatacacaaccaaacactcgtaagtgatcaatgaacggtttaatattgttaagtacctcgaagggagataagtcacttaagactttagttggtgttcgattgataaggtagcacgcggttaagaccgcatcaccccaaaatctctttggaacacttgtatgaaacatcattgaccgcgccacctccatgagatgtcggttctttctctccgccactccattttgttgtggtgtgtacgggcaacttgtttggtgtattattccacgtttggctagatgatctcgaaacttttggcttgtgtattctcctccattatcggtcctaaacactttaatctttgcattaaattgattagtgacataggtttcaaagttagtgaaagcttcaaacactctatcttttgagggtaatagtgttatccaagtgtactttgatttctcattaataaatgtgacaaaatatttgttgttgtctctagaaacacatggtgaggtccaaacatccgaatgaactagatcaaaacatttctcatagatagtaagagatttaggaaaaaccgatttgcaatgtttaccaagaatacaagcctcacaacttgtatgatcaaaagaaatatttggtaacatgagtttaagagctctagtatgaggatgacctagcctagcatgccacaaagtattaaaagagatgcctaaatgtg

SEQ ID NO: 23818 - DNA, 554 bp, Arabidopsis thaliana
ccaactcgctgaagcagtatcctttatggtgttaatttttgattttgattccctagtagtgttttaactttttgctggcatcttcgcacaaatttttaagttcatcttgtgagaaccttgacttacgtctagagatctgaatcacacgaaccagtacattgtggggcttgctctctgtgctttaggaaatatttgttcagcagaaatggctcgtgatctcgcccctgaagttgaacgattacttcagtttcgtgatccaaatatacgcaagaaagtgagtgttttcttgtactgtcattgtacccgttcagataacaggtgtctttgttgtgagggtcagtggtggaaatgttggaaaaccttagatgctaggttaacgtgcatgtattaaccacgtgaaggctttaatttacgagctatgtatcattttcacgaatttacactttacttctgtcatttttttgtatgcatagactaatacattatagtgaactagttttttttttctttatttaggcagctctttgcgcgataaggatcacagaaaagtccgg

SEQ ID NO: 23819 - DNA, 701 bp, Arabidopsis thaliana
ataaagtcgcaaaacctcatctggattttttccacgagaataaaccacaatcatggaattataaacagaaacacccctctgcggcaattcgtcgaacaccttacgtgcataagagatctcaccgattcgtccacatgaagcgatgagatctcgactaatagagcttccattaagtaaattaccagtactgattacaaaagcgtggatctgagtgatgtgccgcttgagtttagaaatggattgcagaaatttgatgcgtttcggacacaggagagtccgatgtaacatgcagaaatgttttgtctgtaccatgatgttttaattcttagagctaacttcttcaaaaaccaatttgatttggcaaactggaacctaccgtccgggtaaggcacttaaacgagaaccgaaaaattaactagttaagaaacatatcttatttatcttctgcaatcatataaaaacattttgagcatacacaattatattttcactataacttaactctcttctcttgtaactcgtaagcagtaattttattgtttcttaattagataaagtagatttaaaaatcccctatacgtatatgataattaacgtatatatgttacttcaataacattctctaggaggagtttggtacttagagcgatcaggtcaatagtcatagttcatgtacttgctcctcacatgttcataaagtt

SEQ ID NO: 23820 - DNA, 761 bp, Arabidopsis thaliana
cctttttcccgagaaaatttcaatcgatgactgagaaatcaactcgaacccaggaagagctttagcgctaggactgagaaattagaggattttgaaacgacatgattggaggagacaaggtaaaacattaaaccttccaattggttgtagagatttcgtagaaagcaaagcccattgggccctgttaatacaaccaagaagtagtagtatttgatattgaaccaaagtctaattaaaccggtaatggttaagattgatttggttatcgacaaaagagtttgttcgaacacaaaactaaaagtctaaaagtgggaaaatgttatgttctataatctctagagagtaagcgaattcttcttactccagtttgtacaactctcgatgatcttttaaacttgagcaaggggatttctagatttcattcttcgccgattgaaatgaagattcatcgtaggtttggagagtctttttatcttttgaacatcttagaccagatgtagaggacaaagaagacgaggagagcgaaaagaaccacgtgcatgatgtggttgttgccactacggattatgctcatgtttagtttccttatgttgttctcaccccggcttgcgctctgatcaatgtcatttgctgtcacacaaaaacaaaaagctttatgtttcagacaagaacaccatttctcccccattgttatttgcatcctagagtaattctgtataacagcacttaatgcagtctcacgcaacaaaatctagctgatg

SEQ ID NO: 23821 - DNA, 899 bp, Arabidopsis thaliana
ggtataaacatgttaaggatgacttgagttttcaaaaccttttggttgatcaacatagagttccttctgagactcatcacttagaacacctctcttaaccaccatctgatgtatcctggaatttgatgcacacgcgataccaagcagtgtcctgatggagccaaatctaacaaaacgaactgagacttcctccatcagagtatatccttgagcaatcaacctagtcttgtgtctgatagccacaccatcttcagtattctggttacggaagatcgtaccagaatccataacattctacactccgcttagcttgaactgttcaaactccccttgcataacatatgtccaatgaataacagccgatggatcaatagaatcatgcggtttgatgactcttcttccccctgaatctctcccatatcactgttcttggagagattccaacattgttggtgtcggatcctgcaccggagtttgggaccaaccgaagattgccacgtagatggagagtaagcccataaagagtaaggcccatgagattactggtcgaaatgaagattatgggcgaagtgatcacgccgcgaggtgaagacgacgtcgtagtcgaggacagtattcacgagaagggaatgagctgaataatgatgtagatctttttgtttaaacagacaaagatccttctcttgaaacaaaggacgatcaacaggttgaaacagaggagattcatctttcagattctgatgaagaggttgttataaatggacctgaagtgatattgggacctgggaagagacaaacacaacttcctgcaaagtttaaagattatgtgatgaacacaataattcaagtcaaatctgatgaaaagagtttgtatcctttgtcacaatttcttgaacaac

SEQ ID NO: 23822 - DNA, 1021 bp, Arabidopsis thaliana
gtctctcgattatctctttcgcaaactctggatccaccaagaggttagctagctctgcgttcctgtcataagcttgcttgatcctgtctaggaagattgctctgatgatgcagcctcctttccagattctagctaactcacctagcttcaatccccaccccttttctatgctcttggcacggataaggttcatgccttgtgcgtactgcagattttggatgcgtaaagagccttcctcacgtcatcgactagctgtttcttgtcaactttctgatcggtcaagatatctccaaacccacctgccttgaagactttagctgcttgcacacgttcatctttaagcccgctaaggaacctcgcatcaagagaggattcaatggtgggagcaggaacagatagctcagcagcttgctcgacggtccactttcctgtgcctttcatgccggttttgtccaagaccttgtcaaccaaatgcccatctcccttatcgtccttgatcccgaaaatatctgctgtgatctctaccaagaaactctcaagctcacctttgttccagtcagagaagacactgtgaagctcctcattcgataatttaccaacagacttgaggacgtcataagcttctgcaatcagctgcatatcaccgtactcgatcccattgtggaccattttgacaaagtttccagacccgcccttaccgatataagtcacacagggaccactatccctaacctgagcagcaaccttgagaacaatgtcttcgatattcttgtaggcttcataagagcctccaggcatcatagatgggccattacgagcaccttcttcaccaccagaaactcccattccaaggtagaggaaaccgttctccgccacggctttttctctcctctcagtgttctcataccattcattaccaccatcgacaatacagtcacctttctccaaataagcagagagggtcttgatggtctggtcaacgggagaaccagccttaacaagcatgataataacgcgggga

SEQ ID NO: 23823 - DNA, 877 bp, Arabidopsis thaliana
cagtggaatagacggtttttagaaaaattgtcagctttttaccttcgaccaaggctattatttagtgctcggagtagccatggcttaggcctccgtgattcttcagtccagcacctttggaatctgtcaaataacttatccaatgaataagaatgttacttgattctaacgaaacctttaacatagatataaaagaagtaatactgcagaaggcagaagcaaagcagcactactgctatacctttttatcagagtttctgtttggtcccattggtctaattgccaaacatccctctcagtaataggctttctgtagcctaactgcataagcggcgtcatccaactaaagtatattccttacatttttcaataagtaaataagaaatccaaatcagtggaacaaaaagaaatcatggctattgtatattatttgcctaacatgggaaacattttgtttatcaattcaggggctatgtaccagaaaatatgctggcatatcgctcgggacatatgttcactcccccaggcagtgcatcatattcaacattgtctaacgattcattgtttagaatatggtaatctggataaagatccagttcaggaatgtaaacaagtagaaggattccaaaaagagcctgcgacagaaaacaaatgaaaacgtaaaccattataaagtctgaagcttttgttcctagaacaatgaattgcaagcttatacgtatccatgttctgacaaacctggcaacatcttgaactgatacagagatatagggcagttctgctagggcaaatagaggaaaaattaatatggaatttaaagctacagctaccaatgcccaaaacttttcccactttcaaaagattgtaagaaatataa

SEQ ID NO: 23824 - DNA, 1012 bp, Arabidopsis thaliana
tgccaatagactgagcattcgatgaattttgtttattaatacaggggctacctactggaaaatatgctggcatgtcgctcgggacatatgtgctctccccctcgaagtgcatcatattcaacattgtctaacggttcattgtttacaatatggtaacctggataaggatccagttccggtatgtaaataagaagaagaattccgaaaagagcctgcaacagaaaacaaatgaaatacttaagcagtgaggcctgtaagtttgaagcttttggatgcaagttctcagaacaataaattgcaagcttataggtaaggaggacgttgttctaacaaacctgggaacatcttgaactgataaagagatatagggcagttctgcaatagaaatagaggaaactttattatgaacttcacagctaaagctaccaaccaatgcccaaaaaaatttccctagtcaagaatatgttagaactcctgagattcaacgtcaaatcaccccaattgatttcatttatctgaaatatacaataacaaacctattgattgagttcttgagaggcaacacaagatccagcagcacagcatcagcaaccaaaacatataaaacaccaaatctcacgtaccaccggaactctttgacatattgtttggtttcgagtccgatcaaaacaagcatggagaaccaagcgaatgcctcaaccatcaaagatgcaacctgtcaatgaataacaccataatcgtactttacttctgattcttgagctttcattttaacaagaagggcatgtgagtttaatctccagacgaccatatatgattaagaatcagagctactcttccgaaatcacctcaaaaggaggaaaatcagtttcttcatccatgtcaaagagtgaaatcccatgaccaatctcagtacaggctcaacaacacagtaacaagccaataaccctagcacacagttatagtacttcttcctcaaaacatatatctgagctttggtattgtgaaagat

SEQ ID NO: 23825 - DNA, 852 bp, Arabidopsis thaliana
tgaaaccatatgataaaattgaatatatttaatacctcgagagagtgatgagactgaaatttgatggactcgccattgcctgcaaatgtcttcgttctctccatgttcatgatgttaagaaagtcatcgtcatcattatcagtcgctgaagtctgctctcttctcccccaaaaaaaaaaaaaaaatctttaaattcgacaattcatattcaaacaaaactgtatgataacatacctattttctggaataaaattaaaacacttgtcagaaacaaattaatattccctttccgttttttgccaaggaaataatttttttttttacctaaagttaaaagagtgaaaacccaaaagacaatcattccttgcgtgtacagacaagttgtcatgaagatgatcttcttcattgtcttgtcttcttcttcttcttgaagatggtgaagaactctcttctgtcccccaaaaaatatattataaaaacattaattaatttatgaccatgatgaatattctcttcactctttggtaggagtatttttgtttttggcaataaattaaaagaagcacttatttacctataagtctataaccaaattctttttcatttttatttgttaatctctctatccttgttttaataaatactttacattatttgaatatttctgacaatggtgggagtgagatttcaatttatgcattattacagattttatgtgaatggtgggcatatgaagagaaatgtcctaatcttgaaactatgacgtttgagagtgtaattcgttgatgcctcctcatataaacaacaaaatatgtagacctcattacctggtttccaagaagagtgatctgg

SEQ ID NO: 23826 - DNA, 671 bp, Arabidopsis thaliana
ggaaacattcctacccctatacactaccgaaaatcatatcaatctcttattttttataataagaaaagaggaatacttttcttcttcacattggtctcaatatcaggtatgaacaaagaatcaagttatatgaacactagccgtttatatgatataaaaggaagagcagtgatattaacttcgttcttaatggattgtgttggaacaaggatatcctcaaatctgttggtttgccatctgaattttccaatagtcggattgagtccaacctgcagcaataatctaaagaaatatagatcatgattcctaactaaactaaacaaaaaaggtagtaattagtaaataataagaatcaaaacgaaaagcataattagtaaccacctcacccagacttaaacatcactgtccccagttgcattcaaatgcgaacggagcgggaaaatgaattttcaaaaaagaaaaaaaaaatcataccagtgggttgcctcctactaagcgcttgtttagagtctatagcttgaatttgtggagttcaggacttggatggatatgtaaacagatcggctctgtgtagcatcaagtgtcgatcgatactctctccttttcctgcaagatcaatagaaaaaacaagctttcgagaaattcaatgctcgtttaccagtgaagcacac

SEQ ID NO: 23827 - DNA, 592 bp, Arabidopsis thaliana
taacggccgccagtgtgctctaaagggagcagctccagttccagagcctcctcccataccagcagtgatgaagaccatatcggcaccactaatagcttccgtcagtgtttcttcgctttcttcagcggctttacgaccaacctcaggttgacctcctgcacccaaaccacgagtcaatttaggtcccaactgaataacagtctcagcttttgtactactcaatgcttgtacatctgtgtttgctgcgataaattctacgcctgtaacaccttcgtcgaccatacggttgatggcattgccaccacctccaccgacaccaattactttaatcactgccccttgagcagcagctgtatcaaatgaaaatgtcataatttatttttcctctttattcgtcaaacatgcttccgatcaagccacggaaacgatctgctaatttcggtttattttgtgaagcttgttggaaatccgccattggttctgtaggcgccaccggctctacttctggagcaggagctggttgaacaggcgttgattgtcaaactgagctgttttttgcagcatccaccaaaactaattggctgatgactta

SEQ ID NO: 23828 - DNA, 664 bp, Arabidopsis thaliana
cacaggtcggagtgctctaaatcttgcactggcttagaattattcggcttctgcaagattttgtatttatcaagacttgtgatttcataagcaggttgttttgtctggtcctgtgctaaatgaacgggagcttgagggtttgcttggtgatccactgttaaaatctcaaatcttgcccacatttctttgacattcgtagaggaattgaaggatctttgaagaagggtcttctaaaactttgtgatgctgctgatgaagctgttcgtaatgggttcccaagtacttgttctctcagacagatctgataatccggtacataccagtttccaagtgtatgctttcaattgtgatcttaactgtataatatgtagatgtatgattatcaccttttacagtgtcctccttttacatctacgttttggtctactaacaactatgctctaggctctcattctggactaacaacattattgtcttttctcatgcaaagattggaactgttgaggaaaagaaagttaaaatgtgaaaatataattgccataaattgttggtttctttttagtgaactggtggcatagttggtttctttataataaagtgctattgttggcatcgttacaatggtgcactattatgtatctcgctgtaagtatttgtatgcgct

SEQ ID NO: 23829 - DNA, 740 bp, Arabidopsis thaliana
aaatatttggacaataataattaacagaacatccgagtctcaaagctaaatacttggggagactgaagcatataagtcaatcatatacaggaatataattaccaaaaccgcggccacccatccttccagccatacccctcccataacctctacccgggccaaaactatctgcaccttgtctgtaacatgaaagaaaaatacgaatgttatgcaaaatgtatgtcaagatctcatttagcatgctaatgtccatcagttcaagaagattacttactgatgccagtctagtgctggagtgtcaattaatgcctttagcttggtttcttcatcatcagctggtgcagaatcatgacataggttattagaatggactgctggggcatcaggaattgaatacaaatcattcccaaactcatcgaattcatcttcaacctataaggtagattaagttgtaaatcaatatttgtgtagaaggattccatgccgataaaaactgagaaagccaactcacgggagatgcatcagcagtgatagcattggtcatatcagcttgtacgttttctactttatcatcgactctcggcctgcaaaatgtagtcatttacatcatgacacatgggaatctggtataatttcacacaagtaataatgaaatgcgcagcttagagcgaaagaacacaaagattgaacaactcagttgagaaattaggtattaaagttatagagaaattactcttctc

SEQ ID NO: 23830 - DNA, 607 bp, Arabidopsis thaliana
  unsure (1)..(607): unsure at all n locations
tgcaatatatgggtcaattctttttcgtgaacggggatgttacagaatacaaacgacctcataaaatatacgtgatttattttaaatgctttgcaacgagaataacttatttggatatctacttcactttcatactctctctgattcattttgttgaagcctaattcatggaagtaaaagcaaaacaactatgttgaaaccaccaagctatcccagcctcaagctggttaaattagaatataatcagataccttatgagctctgcaaatttcttcattatctaacttgttggcaaacaaagagctatcgtcgcgattcgagatacataggaaagtacaaacaagcatttctctatgaagttatgtttcaacatgctgtgtcccatggttacccaatacagcaagctgtattctccaagagagtacttacaagtaaagcgaatttgcaaacataatacctcgtcgcaagctctcgctagcagctgcaaacttgctctctaaactgctttcacaactgcctctgctgcagctcgaagctgaaggaaatcccaatcaaagtgtcatcggatttcttagaggttntagagaaggtaattgcagagtttggt

SEQ ID NO: 23831 - DNA, 865 bp, Arabidopsis thaliana
tgtgctctaaagcatcatcagaacacccttttaccctgacgccagacgtggtcgatatgaatatgattgtccttgcgatgcgccagaccatggtcggcgcgtttgccctcgccaatcaccccgcgatcctggagattaagcgcctgcgctggatttttagtcaccagcttcaccgcctgcgcagcgtaaagcggttgctctggtcatcggcgacgcgaaatgccgcatcgagcaggctggcggggtagtagtcggaagagaggatatccagcaggccaagctgcgccagttcactgtgcgccacgttgccggagtgcgagccgccgcgcacaatattcggcgcgcccatcagcacgttcatgccatgcttgcgcgaggcttccgccgcttcgaacgtggtgggaaattcggcgatcacgctgccaagctggtgagattcagcaacgtgggcgtgggtggcgtcatcgtggctggcaagcgcaatttttcgcgcgcggcacagggcggcgatggattcgcgattcggctgcgaccagcgtgcgcgagcgccagttgctcttcttcgtactgctgcatctgcgcatcagtgagggagtatttgccctgataatattcgcgatacttctcgcggttggcgaactggcgctggcccggcgagtggtccatcagcgacaccagcgtcaccgggtcgcgctgcaccagtttttcaaacagcggcagcgtggtgtgatgcggcagttcgcagcgcagatgcagacggtgctcgtcgcggttgacgccgcgtttctgcgtctcttcgatggcgttgatcatcttctccagattctccagccgatcgccctttagagcacactggcggccgtta

SEQ ID NO: 23832 - DNA, 477 bp, Arabidopsis thaliana
ggttcatctgtttcaacagcccatctctaggtagttttcaacacttctcagacattacacaaagataattccttctttcattttcctatatcataaatcttgagacatgcagggcccaaaattacggatccagcgatcctaaaaaaacaagccaaagaactggttagtacatggccagaagatctgcaaaacctcatcgatttaacacctgatgaaactatcagcagaactcctctagtagaccggtggctatggcctggcattgctcctccagcatcaaaaggacgagtggttcttgttggagatgcttggcacccaatgactccaaatcttggacaaggtgcttgttgtgccttggaagattcagtagttctggcaaataaacttgccaatgcaataaatggaggaacgaatcaattgaagtagcaatggaatcatacgggagtgagagatggtctcgagcattcccgttgacag

SEQ ID NO: 23833 - DNA, 631 bp, Arabidopsis thaliana
tctgaccctgaacctgattcttcatggaaagagaagaaaccacggaaacaggaggaagacattaccttttggacagtgtgcaaaaacaataagtgcaatacacattgtaaattaggcaaggctggtcagataataaatccctagcgtgtcgcacaagcttaaacgcgccttccgcgccattaaacctgttcttgtctggatgaagcaaaagagccaacttcttgtattgtttcttcactgcttcctcatcagctaaaggatctataccgagaatcccataccaatcagcttctccgttgattttgtttgatgcagagatataaacatcgatcatcatcaccacttgttccaaaccatcgagctttggatacaaagcctgagccttgctgatgaatgttttagctccatcgtaatcattcttcgaaagtttcttctcggcaatatccattgcttttttggcttcttccttattacagtccatgtcgttgaaagagtttcttcctctacataaacaatcaaagaagcaacagacaaaataacagagtttcaaaaaaaaaatccaggaaatattacacaaaatcagaaacagatatgcgacaattcggtgaatatacaatcccataaagaagtg

SEQ ID NO: 23834 - DNA, 517 bp, Arabidopsis thaliana
cttgtccaagatttggagtcattgcggtgccaagcatctccaacaagaacaaccctaccttttgatgctgaaggagcaatgccaggccaaagccaccggtccgcaagaggagttctactgattgcttcatcaggtgttagatcaatgaggttttgcagatcttctggccaggtactaaccagttccttggcttcttttcttaggatagctggatccatcatttgaggccctgcatgtctcaagttttttgatattaggaaatgaaagaaggaattatctttgtggaatttgtgacaagtattgaaatctacctagagaagggctgttgaaagtgatgaaccagtagacttttgttgcagatacaggtacatatccagctcgaagccctctaccgaatatgtagttcaccttttgctgaaatggctgtccatttggaaagaacccaaggccacggaaagcgcaataaccaacatatttcggctcactgaacccatccaagttgcaaccttagaccgga

SEQ ID NO: 23835 - DNA, 745 bp, Arabidopsis thaliana columbia
tcatactttcattctcagtctattcgaaaagtctgagtattcttcagattgtgatccttggatagatttgtttgtttagagtaagactggttttatgtaatgtgtttttcgataccttgtttgctcaggattcttctggacatgatgaatttgtaaaagctgcgtcgttagacaatgaaatccagtttgtagaaacaagcagcattgatgttgctaagcttctcttccctaaccttaaaaccaacaatgtgtttgttggattggttaaaactgaggctgaaaagtatacttcatatggtaagctccttaatgttaataggtttctgttattatcataaactttcccctcttatttacatcctgagaattggttataagtatgaaaaagtggttattttgtcaattttgttttggagtatgcaaaaacctattgtgaacagtaatagaaacctattgtgtggtatactattgtccaaattatgaatcttatgtactggccatgcagatggaccttgccaagccgagaagatagtggaatttctgaacagtaataaattccctttggttacaaaattgactgaatccaacaccgttcgtgtttactccagtccagtcaagcttcaggtgagatggtttatcattttcaccttgtatctgatgtgtttccattctaactctggtggttgttaattgttatgttatcttggctgtcacagttgtggcataatattctcggttaggttat

SEQ ID NO: 23836 - DNA, 1717 bp, Arabidopsis thaliana
agggaagtaccttgcaaagtgcttcaacaaaatggagaaatgtgagaagaagccagagggaccattgaggttcagaggagagggtcgacatcggttccagccattcaggtacagacattttggatcgtttgctccactgggaggggaacagacagcagctgaactgccaggagattgggtctccattggacacagcagccagtggctttggtactctgtctacgccagcaaactggtgagctggcgcacaaggatgctcgtcatctctgattggactcgacgctttgtctttggccgtgactctagcagcatctaagccattcttctccatcatttttttgttctccttttttctacggtttcctttaaatcttcccgctagtttgttgtcttttaaaatcagatgatgatgactatacatgtcattcctatattttctcaatcacatgaacttttgattcttgaacaaggacaagcatatttctaatttaattcataacaaagagttcccttctcatacatgactcttcctctcccctcgatcgctacatcttcgatctcaacttcttcgatcgataagccttaaaaggatttctatggtaaatttaagctcaagtcagagcgattcaccaaaacccctagaagaagcaatttgaaaagtagggttgaaggatttgaccgttggtggaatccaggccattagatttggggactcttggaccttttctcagtcgtaaaacatatggcccattaaacttttaagaagacccaaacattcggcccatcatcgtttagatactccgtcggagtcttcttcttcgtcatcgtcccaaaaccaaccagaacggctctgtgatcggaaccgccgtatacatcaattcaactacgtatgtgccttcgtcccttagcttagccagattcatcactggggatttcatcagcagccgtacaattatgccctctggttgcagtatcagagctctctggatcatcaacaatcaagacactgttgttttctccaggtttcaaatttcttctataaacccaaatctcactcattccaatttctactcttaatttgtatgcaaaatcaggaggtttccggtcgtcgagaagcaatggtgctccgcttacaagacggagaacgaaaacactggattagatcttcctagacttcccactgatcaacaaatctccgattcttttactcgaagaaagagacggtacaacactttctcttgtttagcttaattagattttctggaaatgtaaaattgaatttcgaatccgaattagggaaggctctactcgtggatatggtatacgtgttgctcaatccaccaaaggatcggattcttgggttgatgatcccatcactcgtcatattatcagcctttgcttaaccgaagaagatgatgatgatgatgatgaaaggaacattctctggcctattgctctgcataccaaagcgctttactctatcctcgtcttgcctttggttgagccaaaggagatgaaggattacgtcaagctttgtaggagatctgattgtggaccagctgttggtgaagatttgagtttatcatctctcttgcttaacatttcatccattacagggtacttatagctccttaagggcaatgcttttgatttaagagtgatgtcaactccttgatggatgccttgtcttgcactcatgttgtagggcttttatggt

SEQ ID NO: 23837 - DNA, 939 bp, Arabidopsis thaliana
aacaaagaaggagccatctttatcgcaactcctgaaactgagtctgaccctctacttacttcttttattgctgctctctctcattcttaattccaatctaataagtacggctctgctagtacagatagagagagagagagagtgtagaccaagacacacaacacaacacaacagagaaagagaattacattagttttttttctttcacattcctcttgcttattgctcttcaaaatctacctgtacactcttctcttttattgtcttgtttgtataaatcatctcctacaaaaataattaatataagttgtcccctttctctttgcttctctgtttttcgcaattttctctttttgattctcttccttccttggaatccaccacactccatttgcttcttctgagatctgatctctctcctaggtgatgcgctgcggagatggcgaatcttgtccccggcgttttactcaagcttctccagcacatgaacaccgacgtcaaaatcgccggcgaacacaggtcctctcttttacaagtcatcagtattgttcccgctttagccggaggtgagctattcccgaatcaaggcttttatctcaaagtctctgattcctctcacgccacttatgtctctttacctgatgaacacgatgatttgattcttagcgacaagatccaattaggtcagtatattcatgttgatagagtcgaatcttcttcccctgttcctattcttcgtggtgttagacctgttcctggtagacatccttgtgttggtgatctgaagatattgtagctactcattcactagggtttccagtgatgcaaggttaaaatgatataatggtggtgttagtcgaaactaaagagagagttaggcgtctgttaaagctatgggagtggaagtgatggtgagagaatataggtaatagctgagtg

SEQ ID NO: 23838 - DNA, 918 bp, Arabidopsis thaliana
aactctctctccaggctttgctcagcttcagatacagaggagtcagatgatgtgtcaaagggatggtggtttgtgtgatcagatgaagtgttcatttccatgatcggtttgtttaagtctctgtactcagagagaaggggaacccccatcgagtacatgcttccgttggggccaattacgactctagaacctgggaaatcttcctctgagtctgaatcatcgttcccgtcgctctccaaggaacgttcttgtgcttcccttcggatgaatttctcgaggctctcgatcagtagctgctcaaatgcttggtgggtctcctttcttgcgtctttataaccatacctacaccacatataacacaaagagtgtttatattcgatttgttcagcaacgaaatggaacagaatgaaggagataatatgttcttgtgtgctaaacagtggctctaagacgtacttcttatataatacaaaaagagagaaggaaatatcagatctacagacttgagtaagaatctctacgttaagtctaatcaatcatatatgaaccatgaaaatttgatcactgaaagggaaaaacagaccaacctggcaatgcaacggaataagtgatagcttttggtgcagacacgtctgaagaggaacctctcattctgtggtacaactggaaccgggacatattttatgcagacgaaaatgaccatggaatggattgcaggaagtgtagtcagaaaatggccaaatattgccggtactcccttcactaactcattgtacagcaaaccgataccaggagctcttatcgttcccaggttgcacccaagttctctcattaaatccattgacagcttttgttcgacttctgtttcatacctgagcttacttccatagttccaaatatacattataccgaacatga

SEQ ID NO: 23839 - DNA, 986 bp, Arabidopsis thaliana
tccctttgaatcccattaattccaatgaagattatattaagaaactcaaagaagaagaagagcaaagaaaacaaaaacatgtcttcttgtttcaaatcctctgtttctctgttctcagttttcttgtttatgatcttgaagacagttacttcagatccaacttatctctaccacatatgtccaaacacaacaacgtactcaagaaacagcagttacttaaccaatctccgaactgttctttcatctctctcctctccaaacgcagcttatgcatcgctttttgataacgcagccgctggtgaagagaacgatagcaacagagtctatggtgtttttctctgccgtggagatgtctcagccgaaatctgccgtgactgtgtcgcgtttgcagccaacgaaacgctccaaaggtgtccaagagagaaagtggcagtgatttggtacgatgagtgtatggtaagatactctaatcaaagcatcgtagggcaaatgagaattagacctagtgttttcttgacgaacaagcaaaacatcacagagaatcaagtgagcagattcaacgagtctttgcctgctctgctcatagatgttgcggtgaaagccgctttgagctcgagaaagttcgctacggagaaagccaatttcacggtttttcagacaatctatagccttgtgcagtgactccggatttgactaatcaagattgtgagagctgtttgagacaagtcattaattacttgccgagatgttgtgatcgaagcgttggcgggagagtaatcgctccgagtcgtagcttcagatatgagctttatccattttacaatgaaactatagctgcggctccgatggctcctcctccttcgtcaacggtgactgcaccaccactgaatattccttcagaaaaaggttaaaaatcttgaaactcatagaacataatctagtaaaaaggttgttttgtttcatatgtttttgaaattgtgtttagg

SEQ ID NO: 23840 - DNA, 1270 bp, Arabidopsis thaliana
ggtcagcaaatacctttacctgacttgggagtgaagaatagtcattcgaaaagctttttcgggtatgatcctatcgagaaacagttcaaggttttgtgtataacatcctccaaagagcatcaagttcttacactagggactggaagaaaactttcgtggagaaagattgaatattcgtatccgcattaccctcggaaaaagagcaatgggatatgcatcaacggggttttatattacagaaatactaatgctatgatagttcgcttcgatgttaggtctgaggaatttcgttttgtagaaataaaaatgtacgtcgagattttgagtctaataaactacaagggaaaactaggtgtgctttttcctaacactgatcttgctcagctatgggttctagatgacaccaacaaagtggaatggtccaagcacaacttcgtttttccagatacaacttttgaggctataagggcaactgatacgggtgaaatgttttgtgcgtcaagttgttggcgcgattcactctatgtttcctactatgatttagagaaagagagtgttaagaaagttaaaatcaaaggaattgaagacaagttatcgataggtaagcatcacgctaacgaattcttcatctttccaaatcatgttgaaaatgtgatggttctgtaataacattgaggcggctggtcatatatgggtttgattcttttagtcttcttaactcttactatatttacacttgaattgattattctcaaaactctctcaatgaaattgatcttgttattctactgctactggttttcttatggtttatatagtcttggttcttcataaagattgatttatggaactgagtaatgcaacaaacaactgccatatatatacaatttcatttgtaagaaactacttgatcaagtaatgaacacagtgccaatcacctgcttgcccgtcgttgtctcgaagtgcaaggcactagactcattccgctgaacaatccaatgcctgatttgaaataccctgaccggtttctactacttgatgcaatgcttgatgccatgatctgactgttcaattgagggaattcgattccgttttcttgcgatcctcctacaacatcattgcttgctgcttcttcatgttcttgttccatggtgtctgcgttcaccgaaagcataggcctaactgttcttaaccagtctgcgcaccctcccaatactcctttgcacttcttgattttcactttggttaaccaggacatccgtttgcaaga

SEQ ID NO: 23841 - DNA, 705 bp, Arabidopsis thaliana
gtcgactcatcccctgttgccttatggaatagaaaacaagacccatcaaattggtattttccctgaagaaaaagacaaaagccaattaagacaatgattactactcttaatttttctttttcctggagaaaagacaaaagtgtttttgtatattttacctcaatcaccatacaaaaattgacaaaacatttcgggttaatcttcaaaattaccttcaaacatcggtttccatgtcttctctatgaatgctttactaagctttcaacatcggagcttcgaattgagggctttgactagtgttaacgagtctgaagcgaaagagatgtgagtaagggccgatccaattgcaactcttcacgggattctacacgacatccttgctttatcttctactttcacttgttgttctttcaatttcattcttagagaaaacaatcggcaagctgatgctcttgcaaaagctaccctcttttcctcttgtacggaaacctagtttttcaatataaaagaagttgttccccaattagtttttgatacatgtaatttttccccaattagtttttgatacatgctaacatacatttttttaacatagaaaaatacaaattaaaaacaataatgtctatgattaacaaggttatacttcaattaacagaacaacattttctaaaaaaatgatattttacaaccatttagatatttgaa

SEQ ID NO: 23842 - DNA, 801 bp, Arabidopsis thaliana columbia
atcgctcaatatatgctgcaatgggcaagtatatctagaagctttccatggagcctgtgctgttcacatagagaggaatgtcagactgaagtttccaaagaaagggtatctaacctagtcagaaaggctgcacgagcgttcaatgaaacaaattacggtggtttatacaaagagatagagaggcgtagccctggggtcaaggtaacaaactcataaacagctgaggaataatgtgacaagtctcataaacacagtggtaggaacaaatgtgtatatggaagtagttaaacagcttacgaaaacgaggatagtagacaccaaattataggactataaaccttattggtatgttcagggaacccaaatagaatgtcaaacacaacttttataatggaaattcagtagttgttagtttacggacactaaacccttatgatacagatcagggaacccatgggtaatggagaaaagttgtacaaaagccgatagtcttccctgagtgtaggacaataaaccctaatgatacatatcagggaacccaagcaaagtgatatacacattgtttattaggagacagtaatagttcttaggtaacagacaataaaccctaagtgaagggtcgagggaacctatggaataggcaaagattcaccaacggcccaaacaatgttctgtatgacataactaaagagcaacaacagcagaggaaccgctgggaaagtaaagcaatatatgagcgggagaaatggaggagaacctgataggaggcacgacgctgctccagaggtgatgacatagaga

SEQ ID NO: 23843 - DNA, 798 bp, Arabidopsis thaliana
tcgatagatggaactgaccaatgtctcattggtaccgctgaaattcccgtaggaggaatacacatggattctattcttcttgaatcagcattgcctttgaaatatatagcattctctcattgcttccgtactgaagcgggtgctgctggcgctgccacaaagtaagtttgacgaaaggtttactccttgtagcatctgcatgtttttggcttcttcaatttatacacaggtttactcaacatcctactttctcgatttcgagcagaggtctttaccgagttcatcagttcagcaaagcagagatgttcgtcatatgccaacctgaagatagtgaatccttccaccaagaactcattcagatcgaagaagatttattcacttctctaggattacactttaagtaagaaactaacttttaaacccgatttcctcttaccagagatttttttttttcacttaaactttatctttgcagaacattggatatggccacagccgatttaggcgctccagcatatcgcaagtttgacattgaagcatggatgcccggtttaggacgatttggcgaggtaaaaaacaaactctattcatttgtgtcggaccaccagaatggaatcctagtttctactttgagcttgctgctttaacttctgaattagatatcaagcgcatcaaactgcacagattaccaaagtcgaagactgggaatccgttaccgcccatctgaaccgcctcagacgggtcctaagaaagggaaagcgaatcttccagccactaagtttgtccacactctaaacg

SEQ ID NO: 23844 - DNA, 589 bp, Arabidopsis thaliana columbia
ggttggtggggacagattcgatccagcatctggttcttcaagtaataatagctccagaggtctacggctaatcaaagccatacaagttctcagaagtaagcttctggtgaaaattcaggagataaagaaagatctccccaagaaactgttctttctcttggtgggattctactctgcaactgctttctctacattcataggacaaacaggagactgggatgttctatctgctggattggctgtgcttgtagttgaatgcattggagctttaatgtacagagcttctattccattaatcaacaagatgcggacacgatcaccatgtttaactattggaagactggactcgccctgggactgttcctagactcattcaagtatgaagtttatgaaagaaagtttatcagtttttgtctttacgctcttgtgatggttccagttaatgaaaagtgtgaaaaccttttgactggacacaggttttagcttggacctcggaaaaggcagcgtaacctggctcaagaatggagagtggcagcaaatttttgaaagctgtgtccctttatgcctgaacgatacatgagggttgtga

SEQ ID NO: 23845 - DNA, 344 bp, Arabidopsis thaliana columbia
tgagatttttgggaattgtaaattttgaagaaaattaaacaaagacgtgttttcatttttttttttgtttcctttattgatctctctctatctctctaaatgagctaaatcgttaatggctgccatgtttaatcatccatggcctaatttaaccctaatttacttcttcttcatcgtcgttttacaattccaatcactttctcaatttgattctcctcaaaatatcgaaactttcttccccatctcttcattctcccctgttccacaacggcttcttcaaccttcgtcaaacccatttcggcggtcgaataattcatcatcttcggataaaaaaacaatcacca

SEQ ID NO: 23846 - DNA, 475 bp, Arabidopsis thaliana columbia
gcaatagcaaccactttgctctgtgcttgaaggaacttagaggttgggaaattaaaggccagtgagaagagctgtggtatggttagaagagtgaactgtccagctggaacagcgatctcctctgcttgaccgagtagtctcagaaccggcgtggcaaagatgtaaataggaaggaggaagaaacaagaaacgaacaagataatccaagatctctgcatataaactcctaacatattgacttgaccagctccatatgcttgaccacataatgtttcaagagcacttcccataccaagctgcaaggattcaaaaccaaaaacagaacttataattcctctgtatgttctcttgattcattttcacagtaaatttctcgattcgaaagttacaacagtaaaaaaatgaagctagagagtgaaagagagtaatccaagaaaccgaaggagaaggtaccgatgacggatagagagataga

SEQ ID NO: 23847 - DNA, 1168 bp, Arabidopsis thaliana
tcccctcaaaacacttgaaaagatccattagatccattgccggtaaccgaaacttaagaccagcatcgcggccaaagagctcaagtagatgtgtgccgatgtcggaagttgtaattccggtgagagaactcaagtggtcaaggactgccttgaagggcaaggcacgtgatgttatagtcttgttcgttgtctcaatagccggagatatgttgctggagaccgaagagggtccgatctgttctttctccttgtcgatgagaccaccactatggcaagaatcagagatcatggtaaagcttgttcctttaggaagttgattgaccaattctcggaaatcaacatctgtgatgagattgaaatcacaaggaacaatagcttcgtcttgtttaaaaggatgagcagatttaaccgaaggaatacgagttccatggccactgtagtggaagaacaagatgtctccagatccggcttgagctttatccaccatcctacgtagagcagccttgatgttggcacctgtcggctttacctttgattctggctcgtccgttagcacctcaatgtcgtcttgtttgaatccgaaacgtgacaaaatagtttctttcatggctagaacatcattgatgcaaccgtgaagctcgttccttgtgttagggtagttgcagccgacgagaacggctagtcttttcttgaccatcccttgttgatccattgagtttctggatatgatttcttaaggtttaagaggtaatttaaacaactttctaggcaaaatgttttggggtttcttgtgtacgtgtgtttagttttcatgtgcagtgttgtggttttggagctaatgtgtatttatgattgaggtttcgtgtagtgaagttcaagttacatacgatattagtatttatattttcaagtctagtttgcttttaagctatggaacattttttaatggcttactcttgacttattaatgctttcaagcaagaaactaaaccttaaatcagacttttgagaaagacataattaatcctaagtcatggattcatgattaatttggttaacttggatatatacgtaacttcaaaagggaagtcattttcccaaatatttagacctaatccatctagctatctaagggaagagaggagctaattaactttaaatgctatga

SEQ ID NO: 23848 - DNA, 1114 bp, Arabidopsis thaliana
tcttctgatttattgtctttcaaaaggcgcttaaagaaaccctctgagttaggtattggttcatcaccctcacctttgctgtccctcaagagcctcttgaagaatccttccttttcactctcttcatcatctttgtcagctgactttctaaacattaaagcatctctgactttaggacttgggataagtttcttaaaaatcttattgtcctcagcaggtaactgactaccatcatcctgcacgttggtccctggcgaaggtgagaatgacaaagacttctgggtgggaggagatagctttaaggagaagagcttctgttttgatgacaaaagtctatttaggacctgattcttgctccctggggttgagacctcgttctgtggacgcatgagaggagaccactcacccatcaaagtagctgcaatttgacacttctcttgaatcctgctgatgccttcattatcgtcagcatcctccagctcagccaacaaaaaccaatgcacttgcagtgcgatattcagtgactttgcacagatgtcgataacaaacctatcaagcgataggcttggtgctgtgcaccatcatgtagcaaatctggaagagataactctcaatacctgataagggaagcgtatacatcctattgcataagtaatccctaacaccagcatgagggtgcttgtacagataactaacagcaatccactcacagaagaaagcagaatcgaaaaacctaataagccaaccattagaaccagtatcgccgatgatattactctgtgaggtaatctcacgaggtgactcagccgagtctcctcggaccaaagatagaaagcgtcccatcggcatcctaatcagccaagcataaaaagccctagctcacagacccaaatcatccgtcgagacaacagatccaggagactcttccaacaaaccagattaacggagcctctctcttccccaataactaaaccctaggattacccgtaaaaccttaactcaaaaaacctatctataaccacccaaagctcaaaatctcaatgccaaatcgacgaaatttggctttataatgcttaactttcctaaatcgcgaaaaaaacacagaaaatagaga

SEQ ID NO: 23849 - DNA, 399 bp, Arabidopsis thaliana columbia
catcatagtttcatgtcttcgaagagagattctgcgaatatactataacggctacaatgcttcaacgaagaataacacattcttacctaaatgtgaacctgacgacgcagattgatactcagccgcgaagccagcgcagaggagaggaggagaaggttagatacacgggggagtgatgtcattggtgatggggggaatgaccgtggagaggctaacgaagaacatggcaaggaagctcactgaggctgccactaacggtggtgaagtggacaaagcagaagactactatggtgtcgaaccaagagtatatgtcgatggtgacgagaatggccgagttggaggagaaatgtaggtcgtaggacaatcagcctgcagcgttctcaccagagagcagaacag

SEQ ID NO: 23850 - DNA, 549 bp, Arabidopsis thaliana columbia
  unsure (1)..(549): unsure at all n locations
gtnnnnnnnnnnnnnnnnnnnnnnnntaaaggcgattacggacggtgaaactgaaattcatcggaggattgatcccatacctgcgatacaggctacgataaataccagcacaatttgaagagtggtaatctccattgtacttctcctgtttacgtaagacttaagtgtgaaaactgagtgataatcaacacaatacgttacttatcgattttgctgatcagatccatcattttcagtttcggatcggtggaaaccttacggacttccagctcaataccgcgcgcattcagtttcttgaacgcctcgatatctttttcatcaaccgaaaccgcgttattcacctgggttttaccctgacggaatgccataccaccgacgttaacagaggtgattttcacgccgccttcaacgagacgctctacatctgttgggttggtaaataacagcattacgcgttcgccagcatatttcgggttgttgtnacgcgaatcattttggcaacatcgactacgtgtgctgttcgcccggagtgcaacgtgggtgagcagt

SEQ ID NO: 23851 - DNA, 951 bp, Arabidopsis thaliana
tattactttaaatggggaagttcttgaatctagcctgcataaagtcatatcagcttatgtgatgcaagatgatcttctcttcccgatgctcaccgtggaagagacgttgatgttttctgctgagttcaggcttccaagctcgctttctaagaagaaaaagaaggcacgggttcaagctctgattgatcagctcggcctgaggaacgcagcaaaaaccgtgatcggtgatgagggacacagaggtgtgtctggaggagaaaggagaagggtctcaattggaaccgatataatccatgacccgattattctctttctcgatgagccaacttctggtcttgactctaccagtgcatacatggttgtcaaagtgcttcagagaatcgcacaaagcggcagcatagttatcatgtccatccatcagccgagttacagaatcttgggattactcgataagttaatcttcctatctaggggaaacaccgtttacagcggctccccgacacacctccctcagttcttctcagaattcggtcacccaattcctgaaaacgagaacaagccggagtttgcactcgatcttatccgtgagctggaagattcgccagaaggaacgaaatccttagtcgagtgccacaagcaatggcgagcaaagcaaacctcaagccagagcagaagaaacaccaatgtatctctcaaagatgcaatcagcgcaagtatctcgagaggtaagcttgtctccggagcaacaaacctaagatcatcatttcaaacctttgcaaacccattctggactgaaatgctcgtaattggtaaacgatctatactaaactcaagaagacaaccagagctattcggaatccgctaggagctgtactagtcaccggaatgatcctagccacaatattctggaaactagacaattcccaagaggtatcaagacgcttagggtct

SEQ ID NO: 23852 - DNA, 763 bp, Arabidopsis thaliana
gtgttttactccgtagtatcccatgctattgatgctgtaaaaacccaaaagtcatttaaaactctttactattaataagatcagatactatttctttcgaattcatgtaagagaaagatataaaattgcagcacagttattaatttcaaatgtgataatgcaaattcaacgatatagtaaaaaaaaaaaaagtttgattagaagttaaaatgaaaacgaacctgcacgagagagaccgcaattatagtcagctccaacatgccacgagaagtaaccaagcagaccagtaaacttagcgtatctcactttgtacacaatactctgattatcatcgtaaccaatccacgtggtcccgacgtaacaatagaatccgatcaccgccggatcatggaatgtggctgctccgttatcgacaatatagttccttatcttggcataggttatagaaccgtccgatgatatcgctgctccatcggtggctgcatcatagccgttattctcggcgtcctcgagagtccaagcccaaccacagtatgagaatcctaacactgctttcttcgccggaagtttagcctcaagccacttactcaacccggagtcgccacttcgacctatgtaattcaactttaattagataaattggttttgagtgcaaaatatatatgtaaaagtaaaatgatatttataaagtaaaatgtaaaatatatatgatattaacaaaattcacaacctctgtctaaaataaattttttagaaataagag

SEQ ID NO: 23853 - DNA, 410 bp, Arabidopsis thaliana columbia
  unsure (1)..(410): unsure at all n locations
nnnnnnnnnnnnnnnnnnnnnnnnnnctaaagcattatcggtatggcggtgagtgccatcgggatcttcagttacgtacagttaggcgttgaacccaaaatcatgtgggcgggaccaaacgcggtaattggtggtttactgtttggttttggcatcgtgctggctggcggctgcgaaaccggctggatgtaccgcgcggtagaaggccaggtgcactactggtgggtcggtctgggcaatgtgatcggctcaacgattctggcgtattactgggatgatttcgctccggcgctggccaccgactgggacaaaatcaacctgctgaaaacctttggtccgatgggtggcctgctggtgacatatttgctgttgtctgctgcgctgatgttgattatcggctgggaaaaacg

SEQ ID NO: 23854 - DNA, 826 bp, Arabidopsis thaliana
ccagtcattatcttttagtctagtctttaacaagaacaaaccaaacctaatatgcaattcagttgaagttgggtttgtaataatagcacttcaaaaacctgattgaaatttgattttaaaacccatttggtatacagcgcacattattggaaagatgaaagcaccaaaacaaacagagagacaattccatcaacaaagcgaatgagattttgaatggcacactgaaataaagttgcaatggacgtgttcgctctttaaggtttcatgtatcgatcttaagtagagaattgagtgaagtgctgttgaaccgctgagcaaagccgcgaatgacaagtactataacatcgcggagatggcgcgactgcaccactatgtctacttcattctcactatccacaactatccttagccttctttggtcgttacgaaatgtctccacctggtttgatgcaaaacgatataactttaaaagacagtttgcagattaaagagtccagtgattgtggtcaaagttatacttacgtggaaaggaggaccatagcttccacggacttcagtagttgcgaaagacgtctttgaacctggtttcacaacctttattctcttcctgttcatttctagcattcgtctctcgagatttccctctcccacaatctaaatcattagcagttccttttagaaacccaatttaatgtacacgaatcaaactgtaactccagaaaattatgaagtacatacctttttgggataagggtccttgtcacacaacaccgtgattccaattgattgaggaacagacatttaaaaaagagaataaaggatagtg

SEQ ID NO: 23855 - DNA, 430 bp, Arabidopsis thaliana columbia
cgatgagtcctcgttcatatacaactccgagtctgttcttttcggcaattgtgggaacaacattcataacccaaagcttttgggattcaagagcagcagcaaatccaccaaaccctgcgttcatgtccatgatgttacggtaccttccagtgtcaagtagactgttgattctcttgtaggctttcacatgttttttccactgtctgttatcgtcttcataggcatcaacagtaacaccagagatcgaaccgctagagatcctgggcggcactgcattgagcctatctgggaaagcctgaagctcatcaccagctacttcatctgagctacttgtctccggatacggtgtaatacatgcctccattttcttgtacctagagaagattcattattagagccataccggtgaagtttctagcaaggagaaaag

SEQ ID NO: 23856 - DNA, 1012 bp, Arabidopsis thaliana
ctgtttcctacccaattcgggagattaaaaaaaaattggattgggttaaccttattgcctatgatttctactcttcatccacaaccattggtccacccgccgctctgtttgatccctcaaacccgaaaggtacaaatattagtatgtgtgttcctgtggggtttgaaaaaaaactaatattacatactttggtttcgggtttagaggtttacagacttttgcctaaaaccttttgtacaaatatcactaggtgtgttcttactaggactgaccagatcgatcataggatttatcaattaaaaagtaaaatcaggtgagtaatttattttggttggtcaagggtttaactgtaatataatttggttgataggtccatgtggggactatggtttgaaagagtggattaaggccggacttccggcgaagaaagcagtcttgggatttccatacgttggatggacctggagtctaggaagcggcaatgatgcggccaccagccgagtagctacatcagctgagggttctatcaactacgatcagataaaaaggttaatagtggatcacaaagcaagaccggtttttgactcgacggtggttggagattactgctttgccgggacgagtttgattgggtacgatgatcatcagagcgtcgtggctaaagtaaaatacgctaaacagaaaggtttgcttggttacttctcatggcatgttggagctgatgataattttggcctatctcgtgcaggttcgtctttttgtacttatgaatctttatttttttctttatttacattttcgtaacggagttgctattcttatttcatgaattgcaacaaaaagtatatttagtgtcatatcggataagtaccaagtcttatatatggatttttggaaatttgaagcatcgcaagcatgggatgctaaagagacaaagacaaccagcggagacaaccactaaagaagaagaaataaataatgacgagtaaagaatataacatgttggcttatg

SEQ ID NO: 23857 - DNA, 364 bp, Arabidopsis thaliana columbia
  unsure (1)..(364): unsure at all n locations
nnnnnnnnnnnnnnnnnnnnnnnnnnnctaaagttcccggcgatgcgtccggtataataagcattacgttatgctcacaaccccggcaaatgtcggggtttttttatttaagctgggtaaatgcagataatcgttttctggcttcgcgatttgtcgcctgcatcaccatccacggactgaacgcccacggcgtggcatcaataccgtgcaatacatctgctaaatcacaccattgataatccatcacttcatcatcattgatctgtaacgcactagtggtgcgtgcggcaaataccggacacacttcatttgccacaatgccactcggatcggtggcgcggtagaagaggtcaggagagacaga

SEQ ID NO: 23858 - DNA, 613 bp, Arabidopsis thaliana columbia
cataatgtactgcttgagatttgatatttcttttcgtctctttgcaaggtcgttgggtcaaaaaatttccatgataatagaaaccattttatacataattatcagagactaaagtagtgacatttctacatgatgaactcttttacaacagaagattaacattcagcttttagaccctcttcctctgttctctctccaagctttttgcttcttattccacctttctttagcaatcttgtctgacttccaccgttggttccgaaatcgttctctcccttttagccagtcggagtagtccttaccgggatcacacgctatgaaatctgccaactcgtccacatcggtttttgtcacgttaccttttcctgccatacaccacagaaatctctccccattgcaggtttcctcttcaacaccaactcctgaatctgaaccattctctggacctttagcttcagacaccttcctgcacaaccatggagtaatatgtagttgttggttaaagctctcatggatgcattatgaaagcgaagaagagaaaaaatatgacttttgctggtctatacataccccaagtacaaagttcggtttgtgtgaaacttcataatggaaa

SEQ ID NO: 23859 - DNA, 477 bp, Arabidopsis thaliana
tttgtgacagaggatcaaatataaacaaatcgaaatatagcttatcttccataagcaaagcctgtgagagaataccataaaacctgtcgcacttttgagactaacaatcaaggacttccacactacactaaaataacatttgagaacaaaaaaccttaatttcaccataacatccatcttacttcaaaattttgtattgatttacctttttcgttcttcctcttctcttttaagtttttctccattcctatttttggctgactcaagggttgcggcgggagatctttttgcaggagatggagttgaactcctactcttttgtcttttgtaacgttttggggttggagaacgtctcttaggagtaacagatcgacttcgatggcgcctaggagaaatagaacgactttttcgcctgaacattacccaaaataaagtagtaagcaaaaagatggaactaatgaagtacacgcacgtgaa

SEQ ID NO: 23860 - DNA, 865 bp, Arabidopsis thaliana
cgccagtgtatactgtacacatagttaacctgtaaattctaagatgatcgtgtatttacaagtttcactgcaaattgtttttgagagaaatcatgaaactaaaataattatcgtcattgtaacgcaaacaattgctgctagactcaggtaccgctatcaaaaccctaaaatgtagcgccgtcagatctaaccaaaatcaaacgtcctaagacctaattatgcacatttgcataagttgagatgaatcataaaaagcgtatcaaatccgaaatcttgagatttttgacaaatctacaaatcaatcacaaaccaaatttccacacacaatccaatatccagacgtatccacagaaagaccacaatgaacaaaatcatagatcaaaccctaagaaaacaaaatgtgaccaaaagatcgaacctctttcccggtaagctcagatgtgtaagggaggacaaaattgacggtgagcttcgtcgggatagaagaaggagtggaaggacgaggtttcatgaaagcagaaggagtctgcggtgggtccatattcggtgcgactttcttccatgcctcgacgaaagtggaatcgagcgtcgatggaagttccgttgaaaaggcacgagtcgtcaccgatttggaagatgcggcggcgacagatcgggagaggagacgagaagcttgtttaaacatggcggcgatttggtggtggtggtgattttgagtctctctgagaaattggggaaattatacgtcgcagatgagagagagaatcgaatactcttaaaaatgttgtagctcaagtgtttctcagactctcaagttcacgcgcatcggtggcgagtgaagtgagtgctctattgttagttgggt

SEQ ID NO: 23861 - DNA, 1108 bp, Arabidopsis thaliana
ataaattttagtttaacttccgttttaaaaattggagttgttgttcaaccttttgcatcgtactaaaacaaattaagaaaaacagaaccccaaaaagatttgaaattgaaaacaaagcgggcccaaaaatcaggagtagttcgagcgtccacactaaaagcatgtgtcccaacaacaccagatcctatcctctcaatttatgaaacgtcattaaatcctctcaacggttaaccaaaccccacacctcacatccttttctttccccttctctcaaccttttggtggaaaaaaccagaaaatggggttgcatccaatttccgacgccaatgaacacaatcccttcggctctctcaccgccgacgaattctacgccaaacattccgttagccactcctccgctttcatcaccaaccctcgcggtctcaaactcttcactcaatggtggtcaccactccctccaactaaaccaatcggtatcatcgctgtcgttcatggcttcaccggcgaatccagttggtccttcagctcacatcaatcctcttcgctaaatccggtttcataacctgcgcaattgatcaccaaggccatggattctccgatggactcatcgctcatatccctgacatcaatcccgtcgtcgatgactgtatctctttcttcgatgacttccgtagccgtcaaacaccgtcagatctgccgtgttttctctactctgaatccctaggcggcgcgattgctctctacatctcgcttcgtcagagaggtgtttgggatggacttatcctcaacggagctatgtgtggaatcagcgataaattcaaaccgccgtggccgttggagcatttgctattcgtcgtcgcgaatcttatccctacttggcgcgttatccccactcgcggatctattcccgatgtttcgttcaaggagccgtggaagaggaagcttgccatggctagcccaaggaggacggtggcgaaaccacgggccgctactgcttatgagctgattcgtgtttgtaaggatctgcaggggaggtttgaggaagtggaggtccgcttctgattgtgcacggcggaggtgatgttgtatgcgacgtagcgtgtgttga

SEQ ID NO: 23862 - DNA, 530 bp, Arabidopsis thaliana columbia
tgtagcctggaacctatttaaaaatctcatagtttatgaaactgaacttgattgatgccttttggaagtcaaatatgctctgggtgttttgtttatatgattgatttgtttccaccattttaatgtcagatgctgacttgtattggctggctatattcttcaggtgtaactccagagaaattacaagaaggtcttaacccaagacattgtgcgttatcacttgttggtgagccgattatgtatccggagatcaatgcccttgtagatgagctacatggaaggcgtatttctacgtttttggttacaaatgcacaattccccgaaaagattttgatgatgaagcctatcacccaggtatgtggtgtctgttttgtagctttaaaagttcactaaacggaaccaaatttgcctaattcattttctttgatatctacagttgtacgtaagtgtagatgctgccaccaaagagagcttgaaggccattgatagacctctctttgctgacttttgggacaggttcattgtgagta

SEQ ID NO: 23863 - DNA, 532 bp, Arabidopsis thaliana columbia
tgtaagcttatatcactctctctttacttacaattatgttttggactgcaggatacttatgtggtgtgtgttctgttcaagaaagatggtcctggacctagaaatggagctcaatatggagctccgtttaaggaagaggactggagtgatgaggaagtacgtactgatgttccttctactagtaatcccacaaaccttcttgagcctagcaaagaaaccactctggctttgactgccccagatgactccaataaggattgttttggtggcatgatatcagagtcatgtgtctcggatttcctaccagctacaactaataccaccagcgagcttccacatccaagtgatgcagctaccactcctatgtctactgcacctctggcagagaccgttcagacccccaacaatgatgacttatattcaatgttggatctatttgatgatgacgaagagttcttagggttcaacaataatgaggtagtttttttttgcattcttcttctttggcttagtatagtgatacaagccggtg

SEQ ID NO: 23864 - DNA, 530 bp, Arabidopsis thaliana columbia
  unsure (1)..(530): unsure at all n locations
tatgaattgtgggacaccagggagtttcgattggatgtccttaaacatgttctcaacacgaatcataggaggagcacggcggaattgattaccctcctcaaacacttgaaagggagaagcaatttcctgggacagaatacagaaagaagcagtatctaaattgttgataatcacaaacaagttttcaagaatactaaaaacaaaagaagagaatcctgcttacaattccttttgatcctccaatttttatcagatcatcaacaacttgacgtacattacagcgagcagagaaattgacaacaacccatcgttgaattttggtgggctcaacaaattcctgtacaacaaagggaatcagactctctgaacaggtaaaatacaaagaaaggcagagagaaacagcaccttgttgttgaagttccagcgaccatttctgggaaaggtttcagatccacatcccattttcagctgtcagtcaaagagaacaagagaatattacatgtatgcaaaagctanaaacaattcatcat

SEQ ID NO: 23865 - DNA, 693 bp, Arabidopsis thaliana columbia
caaaggcttgtgattaaatttatgttataatttataatctatagtctatataggtagatgtatttatatgtataaaaacgaaggttcatcgatgatcctgccttgtttttagtcttttaggttaagagttaagatcgtttgttttcgttatgtttatgtaaaattaccgcgaaccatatatatagaaaacttctaataatgttttttacttttggtggcaggttaattttttaaaagatgggttattggaagtcgaaggttgttccaaggatgaagaaattgttcgagaagagtccagcaaaaaaggaagttgttgaggaggagaagccacgagaggtggaagtcgtggaggaggtcgtcgtgaaaaccgaagaaccggccaaggaaggagaaactaaaccggaggaaataattgcaaccggcgagaaagagatagaaatagttgaagagaagaaagaagaggctaaaccggtggaggttccggtcctcgcagctgcggaggagaagaagccagccgtagaagaggagaagaagacggcgccggtggaagagaagaagccagctgtggaagaggagaagaagcctgccgtggaagagaagaaacctgtggaggaggagaaaaaagaagttgttgccgctgttccggtggctgaaactccttcgactaaggctccgaaactccggtggttgaac

SEQ ID NO: 23866 - DNA, 1150 bp, Arabidopsis thaliana
gttttttttttttttccgaattccgtaatctcattggggtttccattgatagcaatggcgacgcgtttcgctcccactaagctcactgccacggttcctctgcatggatcccatgagaatcgtctcttgctcccgatccgattggctcctccttcttctttcctcggatccacccgttccctctcccttcgcagactcaatcactccaacgccacccgtcgatctcccgtcgtctctgtccaggaagttgtcaaggagaagcaatccaccaataataccagcctggtacgcttcctctcctcgtctccttcttttggaattttacaagttgtgagatttgttgtattgatttaagtaatttgaaatagttgataaccaaagaggaaggattggagttgtatgaagatatgatactaggtagatctttcgaagacatgtgtgctcaaatgtattaccgaggcaagatgtttggttttgttcacttgtacaatggccaagaggctgtttctactggctttatcaagctccttaccaagtctgactctgtcgttagtacctaccgtgaccatgtccatgccctcagcaaaggtgtctctgctcgtgctgttatgagcgagctcttcggcaaggttactggatgctgcagaggccaaggtggatccatgcacatgttctccaaagaacacaacatgcttggtggctttgcttttattggtgaaggcattcctgtcgccactggtgctgcctttagctccaagtacaggagggaagtcttgaaacaggattgtgatgatgtcactgtcgcctttttcggagatggaacttgtaacaacggacagttcttcgagtgtctcaacatggctgctctctataaactgcatattatctttgttgtcgagaataacttgtgggccattgggatgtctcacttgagagccacttctgaccccgagatttggaagaaaggtcctgcatttgggatgcctggtgttcatgttgacggtatggatgtcttgaaggtcagggaagtcgctaaagaagctgtcactagagctagaagaggagaaggtccaaccttggttgaatgtgagacttatagattcagaggacactccttggctgatcgcgatgagctccgtgatgctggtaa

SEQ ID NO: 23867 - DNA, 213 bp, Arabidopsis thaliana
  unsure (1)..(213): unsure at all n locations
gttctgtgtggtgccctagccattgngctgtgataatgaaatgctgatgctcgaaaatgcagttttctatgttgccaggtaaaatttccccaatgtagattacgatgatatgatatttctataggttgaatttatcccatctgttgttttgcttttcacagtccagatgcctgtgcagcgctcttgtgaatgacttccaagtcggctcctgag

SEQ ID NO: 23868 - DNA, 1038 bp, Arabidopsis thaliana
taccctcaaaacaggtaaatatttgctcgcttctcaacagttgattccacattccagaatgtccgggccagtgactcggctagtgaagggatcaatcctaacccacaacaacgagaagatagaagccaagagaacagaccagaccacaacaatggtaggagtccggttctgtcgacccatcaaacccttgaggaaagggtacaagtgaacaatcacccagaaggcaaagaacaacttaccaaagagtggtccccatgattggtatccactgttgatagcataagagactcctgcaacaactcccactaagtttacaatgagcagcgtcgttggcggaatcagaagtgttgtccatttgaacaagtagagctcagcaaagtctccgtcttcatctgaagcttttgaggtaactgtgaagtttgtgtcaataccggcaaggactttgaggataccttgaaacacagcgaataaatgagcggatactccaccaatgacccaaaactgctcgtttctccaccattcgtctatgcctacgccactccacctcatttctagtatacccgtggcgaaaatggagagaaagagagacagaaaccatatacttgcaatgttactaatctgcaaaagaggaacaatagaaccagctgatcaggatttggaaccgtaaatagatgacaaacacaacatggtttcagttaaacagaacgtaattaaggtttgttctagagatagagatagagatagagatagatagacagagagaggtgtcaaacctgaggaataataaactggttggtgaagagacaaacggctggcaatgtacaatacatgagaagaggaatggaggtgatagggtagatggtggtgttcacatacgcaaacctctcaagagattttagcctcccattgtaaccataccatataggacaatgccgactgaagagaatctcaactgaacctaaagcccacctcagcacttgggtcagacgatctgaaagattgataggagcagacccttgaaagctggaacttaggcat

SEQ ID NO: 23869 - DNA, 517 bp, Arabidopsis thaliana
  unsure (1)..(517): unsure at all n locations
gttcatttcaggttgataaaatcttctcagagaacgcgtttgatgctgttatgcattttgctgcagtagcatatgttggagagagcactctagatcctctaaagtacaatctccacccactgttctgttcataacacctctgcaagattggagttctttgtggttaatcaatctcatgttgatttttgttctgtaggtattaccacnagcattacatccaacacattagtagttcttgaagctgtggctagacataaagtgaagaagttgatatattcaagcacatgtgccacttatggagaacctgacaagatgcctattgttgaagttactccacaggtactattctaaacagtttcagaaaacactctctttcgtagtatgatcatgtctcctcaaattcggaaattatcgattttcaggtccccattaacccttatggaaaagctaagaagatggctgaagatatgatcctggatttctctaaaaactctgacatggcagtcatgatcctaag

SEQ ID NO: 23870 - DNA, 450 bp, Arabidopsis thaliana
gatgttttgaaattatagtctggaacccatgtttaaagcaaacaaagtggattgaacgacacatacataaagtacgtactactaatactcctggatatgcttttgggtgcgataaaaaatacggtgatcgtcgatacaagatcttgttgtttccagcagccagctggcattcctgtaaattctgtttgaaatatttagaggttgaaatatatgactttacgtctaactcttggagagttcttaacgttgaaattgattttcttcttgaatttcctactcgttgggtatccttgaatgggaattcttattggattggtgcagatgaaaatacgcatgaaggtgtcattgtgacatttgatttttcagctgagatgtttggacgtctttctttgccttttttggcatatccttgtgaagatcatctttctatgttcgttaaaaatgatagaa

SEQ ID NO: 23871 - DNA, 1397 bp, Arabidopsis thaliana
ttttgagggttaaaaaaaacacagaatttaaattatttttcattgttttatttgttcacttttttacttttgttgtgtgtatctgtctgttcgttcttctgtcttggtgtcataaatttatgtgtagaatatatcttactctagttactttggaaagttataattaaagtgaaagcgaatatttttttgtttctgtagttaaagcagtggttatgatttttcaattttcattagtgaaagcagttacgtttgatcataagcactaaactacgatgcaaagagaaattatttttaactgggattcaaaagtaataagatagaagtagaattgatcaaagaaacttttggtcggaatgaggaatcattcagagacattggaagtagcctctgaggatgttctgttttgctgtaactgctgagactgatccaatctcctcacatcttcaatcatcctcgcgacctcttccatctttggcctcgattctggattccttgcaacacaggccaacgctagctgaagcatctgaaccatctcctcttcaatgttctgaaacttcaagagctccacatcgaaaacctctgcagtccactcttctctcacaacagaccgaacccatctcggaagatcaatgacgacacgctcatcctcgagaccaggctgagttaaaggtgtcttcccggttagcatttcgagaatcaccacaccaaagctataaacgtctgatctttgactgactctcctcgtctcaataacttcaggagcattgtagccaatggttcgcggtgtgtgagttggaaggttgaagagagtgactaaagatgtgtcggacagacatggctcaaggtcttcagtgagaagtatgtttgatgatttgatgtctccgtgaacgaattttaaggagtgaaggtaagagattgcttttgaagtccctgtcgcgatcttcatccgcgtttcccagtcgactcctctgtctcctctgtttcctgtccaaaaaatccaaaaaggaacaatttttcgtgacccacacacaagctttacattaccaaaaaagttagggtttggtctctttatgactcaccgtgcatgatcccgaacaagcttcctttcgtcatgtacttgtagaccaatagcttctcgtctttcgaatagtaataagcgaggagtggtacgaaattagaatgctggttaatcttcccaactatctccatttgctgttcaaactctttcttgctcgccacgacttctcttaaacgtttcaccaccactgcggttgtgtcctcaagcacggccttgtaggccgttccgaaactccctttaccaagaacttcagcagaagctttcaagagatcctcaagatcgaaattatgattgcatctttcgaagaagaagagcttgt

SEQ ID NO: 23872 - DNA, 577 bp, Arabidopsis thaliana
ctaatgatttaaaatgacatgcagaatggtacgtacctaagaaacggtcctggtctatggaacattggagaccacgatttccggcatctcttcgacggctactccacactcgtcaagcttcaattcgatggcggtcgtatattcgccgcccaccgtctccttgaatccgacgcttacaaagccgccaagaaacacaataggctttgttaccgtgaattctccgagactccaaaatcggtgatcataaacaaaaaccctttctccgggatcggagaaatcgtcaggcttttctccggagagtctttaacggacaacgccaacaccggagtgatcaaactcggtgacgggcgggtcatgtgtctgacggagactcaaaaaggatcgattttagtcgaccatgagacgctagagacgatcgggaaatttgagtacgacgacgtattgtccgatcatatgatccaatcagcgcatccgatagtgacggagacggagatgtggacgttgataccggatttggttaaacagggttatcgggtcgtgaggatggaagctgggtcgaataaaagagaggttgtgg

SEQ ID NO: 23873 - DNA, 478 bp, Arabidopsis thaliana columbia
cataccaaccacatttgatgaaacattagcaaacattgatgccattttttttaaccctttgatccaaacttgagggtttaaatgtttatcgccgaaaaacccgtttccatcattgtcactacaacaccaaccaggttggcttatgtgattgtctaagataaccattactctatgcttttcaagacaatacactacttcctgttttaagagaaagaacaacaaatttctcatctttcttgatcctgaaaccctaattaatagattacaaactagacaagaattcaagaatcctaagaagaagatagaatagtcaaaacctttccagggaaattctgaaaaaggtaaacattttatcgagttttgttcctggaaagctttgattagaggaagatcaagaatcgttggattgtgagtttgtaaaccagaatcagcttcaaagagacgaaacttgcggagtgattgtctcactgtcataaaa

SEQ ID NO: 23874 - DNA, 513 bp, Arabidopsis thaliana columbia
  unsure (1)..(513): unsure at all n locations
nnnnnnnnnnnnctaaagcaataacgcccaaactcccaaatcctctctcccccgccacttctatacctatatcttccggcgccggaacatcgtcgccttcaccatcgccatcaacgcccacaccagccacgtcctcaaaccacacccacacatccaccctctctacgacaaccctcataccatcccccgccgtaaaccccaccacgacatacccgaaccctcatcttccggtaacgggtctcgaaacgcttgaaacggacaagttccgattgacgtgttttcaaacgctcactgggacgaagttcctactattcacagacccgcttatggataatgtggatatggtcatgaaggggatatatgagctctatgcggactatgtgatgaagaatccattttatcagattgagatgccgattaggtgtgagaggtttgatagggggctggggggatcctcagggtacgggggtgattgcgtttgttgccatggaagcgtgcgaggtcctagttgta

SEQ ID NO: 23875 - DNA, 513 bp, Arabidopsis thaliana columbia
  unsure (1)..(513): unsure at all n locations
ggatctnnnnnnnnnnnnnnnnnnnnnnnctaaaggttgttaccacaccacttcttcgccatcagaagcaagcattgtggttcatgacggagaaagaggcccctcggaaattcgggcccaaagaggaggacaacaactccctctggagggaagagtatagcgccaatggaactaagaagtaccgtgaagtcattagcggcatcgttcttgaccaggagccaccgcaaagtctgggcgggctgttggccgatatgatgggtctgggaaagactctaagcattctgtctctggtgatctcctcgctcgcgcaggcccaggaatgggcgcgcatgattccacaaccgggactggtgaagagccggcctgggattcgaaacactaagaccactcttcgtgtggcacccctcagcaccgtgaacaattgggtttcgcaagtcaaagaacatctgcgagatggcgcacttacgtcgtatgtttccatggttcatctcgaactacgagcgtggatgaatt

SEQ ID NO: 23876 - DNA, 571 bp, Arabidopsis thaliana columbia
  unsure (1)..(571): unsure at all n locations
nnnnnnnnnnnnnnnnnnnnnnctaaagccatgccttatctttcttccttccagatatagagcaagttgtaaggctttgatcaggtattatcctccaatatagaccagtttcatcgcaattaaagatatccttaggcaaatactggtttatagcctggcaaatagaatacatctctatatccacatctatagagatactgctagcttcaccatgacgactgtttaaagaaatatttcgacggctttggaagcaacagagccagccattgctgaattgaggcatctcctttcctggatagatagatggccagaattggcgtgccttttcatgtataaggtcttgagatactgtgattcgagtctctgcccgctgaatctattcataaagtgcttactcaagctctggccagctctctgtgcggtgcctcttggtatctaactggtgatctcttgcagtatccagccagtcaaagtttgaagagagaatccgtgatacagtggatatagagattttgtgattatacacctcttcaaaccaattagatagctgtacgccggtcaaaataggcct

SEQ ID NO: 23877 - DNA, 528 bp, Arabidopsis thaliana columbia
caaacggcgagagagtggcgtattaacgtagcctgtagctaaaccatcttttgtggggatttctttaaagattccttggtgtacaagaaacctcattatacggcggagatgcgagggagaggcggagacggcggaggagagttcggctagtgttacgggctgtgaagaaggatggttttcaatggcttctggtattttaagatcaatggcacactttgcagctgctatatctgcaaacccaaagacatacttccatatgtctagagaagctttcgcttcttcatctaatacttttcttttattgtcttccattttgtttctatcaaggaatttgcttagttgatctgaagacatggtgaattagagttgaggaattaggttttttttatagcgatcggaaaatgggggcacaatagtaatttggttttataaagacacagtagtaaatttctgaaccggactgaacccaacatgttcaatgaatttagtgtttcaataaaaaaatattggtccgacatcaatatatat

SEQ ID NO: 23878 - DNA, 329 bp, Arabidopsis thaliana columbia
agtgtgctctaaagatctacagttcaaatccattagccaagacctggaaggagaaggctgcgcgtacctagtaaagagcaagcgcccacaccaaaaccggtcacgaaacgacccatcatgaattggtaccacttagggtgtggcgacgagatctgaatgatgaggccaacatgaagaataatgcaccaaaatgcaatggaccatttgcggccaagccggtcagccagtgggacagccatcagggctcccagaagcgtaccgatggacaactaccgtggctcgaatcaatttacagatgtagttttgaggatatcgttacttaccatgga

SEQ ID NO: 23879 - DNA, 1266 bp, Arabidopsis thaliana
tagtgattgttaacttgctctcagttgattcgctcgctactttaatatgtcatatctaaactattcatgtttaatgttttaatggaagagggtagaaaataaatactgaagtcaacatccaaatattttcaattccttttgtctgtacaaaatttttaaaaagtcggattttagaaacagtaattaagctcgacaattattgacaaaaacaaaaatgtttttacggcaacaaatcaacttaattagaattaagaaaaaaaagttagtttataacattaattcatttttttcttgtcttttatgtgaaatttgattttgaacacgaattaaagttgtaagaaagaataaaactagatttttagtgatatttttttaatcttttcatttatgtaaaatttgttttgaacactaaatggaagttgtaagaagaagaaaaaaagtaatcatagtgaatattattattaatcaaaagaaaataagagtatggaaatgaatttaaccttgatgaaaatggcgtcgcttgccggaatagaatcaaacatatcgccctcaacattctcaacaccgtccaagacttgagcaacttcaataacatgaggaaggtcaaagttaaatcctttgatccaaggaaactcctttacaagtattcccatcgtctctccggtacctcctcctacgtcaaccaccgtagccacgccgtcaaacaagccttgacaagctccagctacacgtggcaccacgcgccttgcatcacaagccatggcctcgttgatcagctggctgtggcacagattatcctgtgcgaacgcccacaagtccttaccatgcactgcatcaaacggcggtggagttgaaacattgaccggcgaagaaacgactgagctcagcttcaaccatggagcaagcatctcgggacttgtttccaagagaagcaaaggagcttccgactttcacgttttgtgatcatcatacggcgagagagtggcgtgttagtgtagccagtggctaaaccatcttttgtggggacttctttgaagagtccttggtgcacaagaaaccgcattatacggcggagatgtgaaggagaagcagagacggcagaggagagttcggatagtgtcacgggctgtgacgaaggatggttttcaatggcttctggtattttgagatcaatggcacactttgcagctgcaatatctgcaaacccaaaaacatatctccatatgtctaaatgaagtttcgcttcttcatctaataaattccttt

SEQ ID NO: 23880 - DNA, 532 bp, Arabidopsis thaliana columbia
tcgcgacgtcgcgggcgctccacacgagtagcaaaactcatgcccgcatctgcggaaaacacagagagttttgacatttatatgcgtaagaatcgcaaaagaaacacttgctctagaatactagatttaaacgtaggcgagaaaaaaaaaaccttagaatcatatggttattacgataccgtgattctgcagttaaagggtcaagactaactatattttattggaagtcaaaaacctaactttggtggttcaaatatgtatagatacggaaaacaatgtgtagccatagatatatatgtgtgtcttaccggcaagtcatgtggttgcagccttgagcaagctcgatcattatacggcattgctgacaccgcctccacctcttataccttgccaagcgatgcaatgtaatatcatctgggtatctttcatcaactggaagaatctgaaactcttcacagctcatagaagcatgccaaggaacaccacagtccacacacacaaacctctcacagactggacactccacacagca

SEQ ID NO: 23881 - DNA, 652 bp, Arabidopsis thaliana
tggttagagcacactcactatacataacttcttttcttctatacataacttgccattgcataaatcaagaacctaaatatttattctttttcgatcctataaattccacaaaagaggttctatagaaatcgttaaaaatatttatggatattttatgtaataccaaaacataaagtatcaaactaaagaatatggccaatctacacaactagttgtacttattatggccgttttatcctaaccaaattgatttatcaaataacatgttatttcctaagatattaaaccgcatgactgataatttgtatattcattttgtgtccgatggttaacaaagaagataccttgtcggatttaacagctcggacagtgaaggaagagactcttttggtcggagaaacaccgaaaggagcaccggagatgcccttcgggacggcgagacgctgagaaagagaagcggaggagaagctgctccttagctggctcgccattggagatgcactcgctgccattgttctttttgtcttggttgttctcttatgaaaattaaaataaaatcgagtttgaagtgtgtgatgaagaaataagcaatctacgaaacttgagattgcgtttgctgatgtggcaagacagaggatctgtttcttaagat

SEQ ID NO: 23882 - DNA, 742 bp, Arabidopsis thaliana
ttctctccatgaaaacaaactgattttgtgcattgtcagaggactccaagagtagatcattgtaatccggtgtccgggtcctaactctcgcgagtttggcatgtaggtaacgcgccctctcaactataagatttgtgtcttcaaagacacttgggacatatgaaggctccaagtctctcatggtatgaccttggtttgcaaacggtagcaaagctttgagtcctggaatgagggttgctggatcaaccgtctgaagggtgtatgtgtcactcatgtccttatctttgttgtctccttgatcatcgttatcatcctcgtcactcaagtctattgggtctgcatcatcaaaggtaaggagggtgcattccttagacatcatgtttcaaggaaccacatttggaacaatagtttctcagacgttcaaaatgatacttgatgacattgttttcatcagcagcaaattggaaattcctctggaagcaaagcggatcatctagattccaattaagccgcactcttagaaatccagcgtgattcacattctcatcaaagtctacaacaacaacatagcctaacctattttcaacgcatcttgccattgcattggtaaggaagagaagagagatacccattagttgtaccaaaacgggatgatcttcatctcggcttcactgatattcgggtaccaacgatgaattgagagcatccgtcattgaacgctatggtcacgacggagaacaag

SEQ ID NO: 23883 - DNA, 117 bp, Arabidopsis thaliana
aggactctttatcaactaactccaacaatttaccattgcaagctaattgcttagcccatgaaatcaagttagccctctcaaactccgacatcggcgaacagtcacctgcaatggccg

SEQ ID NO: 23884 - DNA, 609 bp, Arabidopsis thaliana columbia
cggcgaaatcggcggcggaacactattcctcaacaatccaacatcatcaccaccaccgcattcaatatccacaacatccggcgacttcaccaacacacgcttcttctcatcatccttaatccctctcaaaatctccacaatctcatccatcgccggtctaacatctctctcttgttgcaaacatcgaaacgctaattccgccaccgccatcatcttcctcctaacttcaggatcattatcgtatcctaaactcgaatccacaagctcgtgtaatgcattgttctgaatcttagatacagccatgttcgctagattgatatcgtgacggtgtcgagtaatgtctactgcttcttttgatgagattagttccgttagtacgactccgaagctgtagacatcgctcttctcgtttaattggtaacattggtaatactctggatccacgtagcctggtgtgccttgtggtgcggttgatatgtgtgtttgatccattggaaacaaccgtgaaagtccgaaatcggcgactttgacttggtagttatcgtctaagagtatgttagtagtcttgatgtctctgtgtatgattcttgtataacagaggaatgagat

SEQ ID NO: 23885 - DNA, 508 bp, Arabidopsis thaliana columbia
tcctagaggtgattctcaggctcttcctggctccatcagcatctaccttcagatcattgaccctcgtggaaccagttcatctctgtgggactgtttcgctagctaccaactctctatcatcaaccatgtcgatgattctctcacaatccgtaagaattcttggcatagattctctaataagaagagatctcatggatggtgcgatttcactttaaactctagtgttttggatcctaagatggggtttttgtttaacaatgattccttgcttatcacggctgatattatgattctcaatgagtctgtgagctttagtattgataataacaatgagtccgtagttggatcaatgactgatgtgttgagtggaactttcacttggacggttgaaaattttagcatgtttaaggaaatgataaagacacagaagataacgagtcctgttttcgtagctggggagtgttttttgaggattggtgttaccagagtgtggttaatgcgcaagagt

SEQ ID NO: 23886 - DNA, 364 bp, Arabidopsis thaliana columbia
cgattgcttcgtcttggtcagaaaatcatccctctctactcttttaacttcctcatttgtgaggttttataattgttctctccgagatgataactttatcaagtatttttgaggctctaattctagcatacttcttgaacgttattcgaaatttgcgtgtacgagagtgagactgtcttattgcgtctatgtgatgttcagttgcgggatttattgtgggtataaggttgtgatgcgtctgtgctcttggacacacatggagatatgttgagtgtgaaacaagcagctccatatctgaactctttacgtggatttgtagtaatcgagtacattaagtacctcctcgaagaagcttgtcctctaa

SEQ ID NO: 23887 - DNA, 509 bp, Arabidopsis thaliana columbia
agtggtgctctaaagaaccagtgcgctgtcgtttacgacttcaacctgcgcgtagcaaattcacgttcgttagaggcttcaacgtgaccgcccaactgcattgccatggtctgcatgccatagcaaacgccgaataccggtacgcctgcttcaaagacatactgcggcgcacgcggacgtgttttcttcagtagtactttccgggccgccggaaagaataatgccgcttggattgaagtcacgaatttgtgcttctgtcacatcccacgcccacagttcgcagtaaacacccagctcacgcacgcggcgcgcaacccagttgagtgtactgagaaccgaagtccagaatgaggatgcgatgcttatgaatgttttccgtcattgacgcttattccgaggcaagtgaaacagataatataaatctgccgacatgaagtcgggcgaagagaatcaggagcccagacggtagttcggggactctttagtaatggtcacgtcgtgaacgtggc

SEQ ID NO: 23888 - DNA, 610 bp, Arabidopsis thaliana
tgacttataataaaaaaggaaattgatcatgattacaacggtcttatttttctaactgcaaaaggttaagtgttggaatttttttatacaacggtctatccttcacgcgcctacgcgcgcatcatcctcgccgtatcttcttctcccgagaattctctccggtcagtcatgcctccaattcaccttttctcgaagcttcccttccaagttcagcttcttccgccgccagttccactttgatgaagaattcgcctttggtaagttccaaattcctctttctatctgatcaaatctatcacgaatcaagaatatatagcttgttagggactaattggtgaattcaacttgagttttacaatcagtctctctttgaagtttttattatgcatttcaagtcattaacaacaatcaatgtttgattacatgaaaaaaacttcctctacacatacgcgtttctgaatgagatcacaaaatgcagatattcttaatacaatggagattgattactgtattaataagcttctttttcttctgctgcaggagcttttgcatttacacgaaaaagcacactaaaatgaagcttagaagtagagcattcccagaagagacc

SEQ ID NO: 23889 - DNA, 538 bp, Arabidopsis thaliana
tatgataaaaaccttgagtttattatgtcatacacaatagtacgtatgacacaagttttgatctaggtagtaaactaattattatgatatactttcattgttgtgagttatttttttttttttgttattttgttgtctatatttcaaaagatggatgggagaagagatgcgtaaaatccgactggaggaaagataacaacactgctggggaatggaaacacagctggaaattggtctggtgatgctaacgatagaggtatgtttccatgactagtgatgatgttgattcattgatacatatgatattctcatgtcagttatcactctcttgcaggtatccaaactagcaaggactacagattctacgctatatcagcggaattccctgagttcagcaacaaggataagacccttgtcttccaattctcagtcaagcatgagcagaagcttgacggtgggggtgctacatgaagttgcttagtggtgatattgccataaacaattcggaggagatacccttacaggtgtattattggtg

SEQ ID NO: 23890 - DNA, 526 bp, Arabidopsis thaliana columbia
tgggcatataaccaaactcaaaacctttatataagagatagtaaatttaaccttcccattttgcttttttctcaaaaagcttgaagctttgagtcaaagtaaccgattttcaaatttttgtattttgatcctctaacttcgtatttattccaattttgccccgttcatttgttcacaacctaaaatctctaaagtttggttcttgagaaactgtgaggccaaaaagtttggttcttgagaaatgatggcggctcgtactcattgtatcaaccttatccccaaagtatgtcttccacaatccttcagaactggagaatcagtgactaatctcagatttgattgcgtctctaagtcatcgaagctttctctcaagacatcatgtggaagatcaagaacgcatcaccggaggcaaaatctcagcatccggtccgtgtttactggaatcgtggaggaaatgggtgaagtcaaggacttgggaatggccgatcacggaggattcgacctcaaaatcggagcgagagtggtg

SEQ ID NO: 23891 - DNA, 681 bp, Arabidopsis thaliana
caaaggtagtccaccagtgagatcagctgaagggacaggaggacatatctgatgcaagattcttcaggtctcaactatgtatctgtgttcaagcctatggatgaagaaccaatggctgtgaacaatcctcagcagcttcctgtgtcatcagacggtcagggattgaagagaggaactagagtaggagaaggggcaacaagagaagttgcagcttacttgttagatcatccaaagagcggactaagatctgtgtctaaagaagttatgggttttgccggtgtgccaccaactgctatggtcagaagctcacacaaagtgtataactacccaaatgggttcagcagctgtgctacaaaagatgccaaagttggttctttgcaaatgttcatgaagaacaatggaagctgcgaagacatcggccctggagcgtttcctgttgaggaagtgcacaaaatctgtgtctttgacataagaatggcaaatgcagatcgacatgctggaaacatattgaccgggaaaagcgaagaaggaaaaactcttcttattcccatcgatcatggttattgtttcccgagaatgtaagttcgctcacaattctttcaacatttactgaccctccaataaatatagaagtgaacttatttattgaagtgggtttcagtttgaagatgcacattgagt

SEQ ID NO: 23892 - DNA, 541 bp, Arabidopsis thaliana columbia
catcaggttcccgggtcggatccacattggatttccacaaaacatctggaagtggcactgaaataggaatgcggattggttcatcaggtgcacgaggcggaaacaagatgggaaacaaaggttgaagtcatcattccaacacagaatcagagagttgagggaaaaagtgcgatacctttgttatccagctgagtattaggcgtgatggtttcttcgctcctagatgtgtttttgtcatcttaagcaaataaatgagaaagagggtcagggaaagatgacaaagatgatgatctcctgttatagtaattaaaaatgtgaaaatacctagagctttatctgtactactaagacggggttgaggttttataaaaatatgtggaataactctattgctccctacaatatatatatagtgttaatataagtatttggtaatgttatggcaaatggaaaagggaagaaaaggattcaacattccccgtacatgttttaattgctgcaataaggttattgaagatgggggaaatggaacccaagggag

SEQ ID NO: 23893 - DNA, 600 bp, Arabidopsis thaliana columbia
tgctgtgttttggatcttgacgagcagcatatgtttggctcagtttttcctttatgtagctgagctaaatacagaaaacaaacagagggcgttggtgaaatgggttttaacgcgaagaatcacaaacaatgatctcgaagcagctgatctcgatgaagatggagttgttgggtaagaaagacatcagacatattctatcttctgtttccttcttcctcttcttattcttttttttttgtctattgtgtgttgcagagctgcagagtttattgtgtataaactgaaagaaatgggtaagattgatgagaaagatatttctgggataatggatgagttcgagcaacttgattacgatgaatcaggaactctcacgacttctgacatcgttttagctcagaccacgtctcagattcaaaggtaagcctcatcatcatcatcatcttgcgaagacgaatcagaatctttgtttagttataccttcacacaacaaaaagccgaagagagtgaacagtttttcgaaattttgtttgtttttcctgtttgtgtttgtaatgtaatgcacactctaactctttgatcgtttcttgatgctgagtgtat

SEQ ID NO: 23894 - DNA, 536 bp, Arabidopsis thaliana columbia
taagaaggtgaagttgggctgtaagaaggagaggttgggctgtatgctggtgaagttgggctgtaagcaggtgaagtcgggctgtaagcaggcgaagtcgggctgtaacttggggaagtaggactgtagctcggagatgtcgggctgtagcttggcgacgttgggctatagcttggagacgttgggctgtagctcggagaggtaggagaataggaaggacttgtaggagaataagcagggcttgttgggctatagccaggagaactgggactgtaggtaggcgaagttggactgtaaccgggagaagtcgggctatatccaggcgaagttggactgtaaccgcgagaagtaggacagaaaccaggcgatgatggactatatcctggagaagaagaaggcgaaaaggccattccacgcaacatatggagaaaactgtgcatctgacattggggataaacgcatatttggacttaacaggtagtttggagacatcatgccttcatggtaaggagtgcctgcactggtgaacgagcagg

SEQ ID NO: 23895 - DNA, 539 bp, Arabidopsis thaliana columbia
caactttcataaactcgtttcaaggaaacgtaactcataagtctttgtcatcttcatcaatcttatttgatatgatactcgtcatctccaaagtcctcaccaagctttggagggccacatcaacatcttggctcttcattagctcctccacgacttgaccctggtgtcacagcttgtccatcaatcaaacgcttgatgtccgggtagagacggtgtggggcatcattgtcatgagagatgcccaagtagttagaagccaacgttttgaaatcctcaaaacagcaatgtcccatgtaaattttcatttccatacgacatagcaatgtttggtcaaacctctccttgttgtttgtcgtgaatatcacgacgcgtgccttgccattcgaccaaggccaagttagggaacttaacagttgcgataatgccactttcgagccctgttaatcataccaaagaaaacaaaacaaaaggtaattagtttgaaaatatatactaataaaattaatcatcaacctgtgtgtaatttggcccattgactt

SEQ ID NO: 23896 - DNA, 496 bp, Arabidopsis thaliana
caaactacaagaaaaagtgactggaacatattaataccacagcatcaccaaaccacgaaaagtgtagaactagcaatactatactcgtcaccttttcgacgtatgagcgaaccatggattcgatatcctcaacaatagtttctggctgtccttctgaatacaaattgacaatgttaacaagtaacgaaccaaaggagacccaaacgaagttagagtcaagcaacacataccaacagcaactttagtcaaaccaggtaaatcaatgagagtaagattcacaactgattccaaaagaaataaaaactaatgttagtttggataaaagacttataaacaagagaatcctagaaacgattaatagcttaccattgggagagaaaatactgaggtgaataggaattgaagaaatctgtttgttcttcccagtgattctatcagtctcatcctcaatctcctttctaaccaaagctgggacacaaattccatttcaatatga

SEQ ID NO: 23897 - DNA, 522 bp, Arabidopsis thaliana
gatgttgctttgaaattgttatgccattccacaacactggggaggcttccatatcttttcaaaatatagcgagtataaactaaggctgctgatccagaaatttttccattactagacataagtgatgcagcacggttcatcaaagctgtcatggcctcaggaacaagatcagctgaaagtagaatgttttcatacctgaaagaaattaatgatacaaaccgattaaatttctagaaatacaatcaaaaatatatatgaatagtgtttacttattgaaggaagtaaaaaccaccttctcagtgatgatactagaatcgcctcgcctatttcacacatgttgttttcaacattccttggtacagttacaaggtttcttccaccctgtacggcaaaacttggggtactgttggccttcgcgaataaccaaagaagaaatttaaccgctgaaaccaagtcaagagagatatcaagagaaataatatggagtatagctcgtctgccccaagcttccacctaattgtg

SEQ ID NO: 23898 - DNA, 462 bp, Arabidopsis thaliana columbia
ggttgcagaactgtaaatgctgcaaatttgcaaggagagcttggtgacaacttagctaagttcacttctatcaggggaatgtacgcattggacacaaaatgtgacatttttgacaagtcaaattggatatttcttctaaccttttgtattttctttacatatctccagagatttcagcaacaatcgcattggaggaagcataccttctactttgccggttacattgcagcatttgtatgtatacacctaacactgtatatttttttggatcgggtttgttgctttgaacagtttgtatgataatggtttttaccttttggcagttttctttcagctaatcagttcaccggaagcatcccggaatctctaggaacattgagttttctgaatgacatgtaagttcagataactcccaaattcttttttttccattgctttgtgctgatgactggtgagaattat

SEQ ID NO: 23899 - DNA, 524 bp, Arabidopsis thaliana columbia
tttactcgcgtctctaataaacaaccatacagatatgtatgtaggtgaatgtcaagattatgaaaacttcgatcaagatcgtgtctcagggaaacttttgatatgtagctactctgctcggtttgaactcggtcatccgactagtaccctccgctccaccgagtgcctggacctatctgctaccggagcgacaatctagatagacccgtatgttcttggttttgagatcaatccaacaccgatggatatgcccgggatcataattccatctgtagaagattccaaggtgagaaaactaaagcatttgtttaaaggtttatacaaagtttctaatgatctaacgatatggttttcttgcagactttactcaagtactataactcttctattcaaagagatgtaaccactaaagaaattgttagttttggagcggttgcagccatagaaggcggtttaaatgctaactttagtaacagagctcctaaggtaatgtattactcagcaagaggacctgatcctgaaga

SEQ ID NO: 23900 - DNA, 501 bp, Arabidopsis thaliana columbia
gtggatctccaacgctgtgttgaagccattcgtcttgtttccaaagtggtgacgtctaaccgttactaaaacaacacgcaggtagacaagcaaaacgtacacaaaaagcttagcttaagcatcaaggcaaacatcaatctaaggccaaagcaactgaacgataccaaatcaatggctcagttctgcaaagacactgttgtcacaatctggcactaccatggtggatgtcttgtgggtaccgttgtgagccctaaccgcaaagttcttggtgtcgacaggctcacagttattgatggttcaccgtttgacgagtctccaggaaccaacccgcaagctactatgatgatgatgggaaggtaaatcaaaatcattaccaacataatgccttggcggttttctttttagttcaatatgtaccccgaggctttgtcaatctttgcagatacatgggagtccagattcttcgggagagacttggcaccaaagctggtgtttagtttg

SEQ ID NO: 23901 - DNA, 160 bp, Arabidopsis thaliana columbia
ccccgtgtttcacacacattggataatccttcaactgtggaatatgtgccacaccactgcgcataatccactttcttaaagccggtgcggtcaggcatcggctttttactatcttgccgaagagttttaaacgcagtttgcgggtggcgcgccagtaagc

SEQ ID NO: 23902 - DNA, 580 bp, Arabidopsis thaliana columbia
cagaagaacattactacaacgcaaagcacactaagctgatggaacttggacttgagcctcactatctatctgactcacttcttgattcgttgctcaactttgctgttcagtttaaagatcgtgtggacacgaaacaaatcatgcctagtgtttcctggaagaagattggcgtcaagactaagtccatgaccacataaagtgcagaccaatattacacataaggagagattatgaaagagatgatgtgttgtttggtatcttcaaacttcatttctgcaaaagacttgctaggcttaagaggttttgtccatattacattgtgcaggttctttaatgttagatcttaatttcgatgaaaatgttataatgttgccttaaatgttatgtaatgagaaaaactatattatatgaaaaataagaaaatgttaaataagtaacagaaaaccatcttttacttcagttaagagaatctgacgaatatcgatcaatggttgcagaaaaatttcttcgagatcttagacgaataaaactgtaattaaatttcttcaataaaatctggtttaaaatttatataagttac

SEQ ID NO: 23903 - DNA, 561 bp, Arabidopsis thaliana columbia
catagcaatgactcttcctcgacgttcaggtaaaaacaccactgcaatgttcatactatgtcccttttttggccttatgcagatgtatgtgagtgtatgtttaagcagaggcagagtcggaacaatggtgcatagcggatgaacaaacgccagacgatgagttgcaagcagccttagactgggcttgcggaaaaggtggagcagactgcagcaaaatgcagcaggaaaaccagccttgcttcttgcctaacacaatcagagatcatgcctcctttgctttcaacagttactaccaaacttataaaaacaaaggtggttcttgttacttcaaaggagctgccatgatcactgagcttgaccccagtaagctttctcctctctctctttctcccttgaatcttagtagatagtgaaccatctgtttctgatccagctatgattgtgacaggccatggttcttgccagtatgagtatacccctgattaaacgacacagcaaagacaagatacagcaagatgaaaagctatgattttgcatttatacgttttctctatgtaatgt

SEQ ID NO: 23904 - DNA, 617 bp, Arabidopsis thaliana columbia
  unsure (1)..(617): unsure at all n locations
nnnnnnnnnnnnnnnnnnnnnnctaaagtcgccatgaacgcgaaggccagaaccacggagtaaccagcgaaaatcaaccatacggtctgccagtcggtaatgccgttttgggtgtacatctcaacaactttaccgctcacgatgccgccgaggatacagccgaagccgttagtcatcatcaggaacatcccttgtgcactggcgcgaattgccgggctaacttctttttcgacaaacaccgaaccagagatgttgaagaagtcgaatgcgcaaccgtaaacgatcatcgacagtaccagcagtacagtaccgaacggagtcgggtcgccgtaagcaaacagcgcaaaacgcaggatccacgccacaatactgatcatcattacgttcttaataccgtagcggcttaagaagaacgggatggtcagaatgaacagggtttcagagatctgcgaaatcgacatgatgattgacgcatgctgcacaataaagctgctggcaaacatcggatctttgtcgaagctgtgcaggaaggtattacgaacatgttggtaatctcagtccgcgcccacactgatgaatccctaatgatttttatcaaatcattaagttaaggtaga

SEQ ID NO: 23905 - DNA, 553 bp, Arabidopsis thaliana columbia
aacgagagaataatgtgtactgcatccactgacctcttcttcttcttcttgttcttcttcattttcttcttctccagattcgctattttgtggaggaggtggaggaggtggtggttggttttgttgttcaggtggagtctcatctagtgatgaacgaggaagaatgaccagctcaacctattgaaaaaatggaccacatttgctaatcaataactagaggatatcataaatactccatccaaatcattatagagcgtcattctacattgctaatcaaaaatttctattaagatgttcaattatagacaaagacaatacaaggaaagtgaaagtaaacgtaggatgactaattctataagtttatgacttgcttgatcgttctgggaaagaaaacaaaaatgaatgagctagagaagagtacttacggcctttctgaggtcatcgattgtgactttttctcgtccttcaattgcagctaaacacttcgccacacgagcgtgcatacaattcggcgcggtgtcctgtatcataaatttgttatttgggaaaggag

SEQ ID NO: 23906 - DNA, 741 bp, Arabidopsis thaliana
tttctctacacaccaacagttattctaaatcatgcaaacctcgtaaacgttttaaaaaaatctaacatattaataaactgtaaagagagatagaatttctcttttgattttaagaactcaataatcaaatgtgataaaatagaactaaaagtcatcatatagcttaagccccccatacatcatatcctcacaatgcctaacaaaaggaagaatcttccccgagttagttccccagtcagcttcacatccatgcgaaggaggagtatggtaacatggctccatcgacttggatcgaacacacggtggattaggagtggtgaaatttactggctgataaagtaaccatggctttaatcctccaagactgtatgaaacatatccaaatgtagaccatccgcttgtgacaatgttatcggttaaactcaaaagatacatctcagcaagcgccttttggtcgtgacttttcttgtctgtttgctgcactctttctgcacttggctgataaacttcgataatctctcctgtagaacttggcctcgctaaaaacatgttagttaagttgacagagtactctggatagagagatgcgacaagaactactttaagctttggtggtttagatatattgacttttgattcttcttcaaattcaggcaacagtttctctctttgtgtacatgctacgacttggtccatgacatgtttgaaatatccagaaggttttccgaggggatcctctag

SEQ ID NO: 23907 - DNA, 662 bp, Arabidopsis thaliana
tgaaataagcagcaatctcaaaacccaaaaggattaaagaaagccatagaaacacctttaagcaagagtagaaaagtttcgatttcttcgtatggttttgcttctgtaatgaacccactcccgaggaggagatttcaatgtctgtacggccggcggcgatacggcggcgcacggcggtgccgagagcgaataatgcagaaccgagagaagtgagacaacctgcggcacgatgagctttgagaagtagaacccaagtgagctgtcttgcgttcttgttacgagatttctcatgagttcttacgaggaaatcgtcatgagaaggtgatcaagttccccattgaccagttattagggttttccattttgacaacgactggtgttcctttacgagtgttgttgttgtttcctttagcccaccattcaaactttggtgccattttttttttcttcaaaaaagaaaaaacagagaagaaagaagctaaagaatggatctcattgccagctagaagattgatggagacgcgtgttactgtaataacaaaaagagaagagaagatgtaatcatgtaatgaagagacctgagaaaaaaaatctgttcccgagataattagagagtatgaaaattgaagaaatttaaagaccaagagagagagacaaagtgg

SEQ ID NO: 23908 - DNA, 493 bp, Arabidopsis thaliana
gtcgactcatccccctgtctgaaggatggtcatcaagagtgttgccgtgtgaggaaagttagacctttgcgtcgtgctcttaagggtcttaaagcttggattacaggacagaggaaagaccaatctccgggtacgagatctgagatccctattgttcaggttgatccagtgtttgaagggttagatggcggtgttggaagtcttgtgaagtggaatcctttggctaatgttgaaggagctgatgtgtggaactttctgagaactatggatgttccggtgaatgcattgcacgcacaagggtatgtgtcaatcgggtgtgagccgtgtactaggccggtgcttccaggccaacatgagagagaaggaaggtggtggtgggaagatgctaaagctaaagaatgtggtctacacaaagggaacatcaaggaggaagatggtgctgcagactcaaagcctgctgctgtgatagagatatttggaagcaacaatgtgg

SEQ ID NO: 23909 - DNA, 1321 bp, Arabidopsis thaliana
catcagcaaatatgcacaacaaatacaagatgtggtaaagaagtgaagatatcaacctttgtctggaagttgaatgttggatttccctgctgagaacccaccagatgtttgaaacgcagagaaagagagggtgctaccagtaaacagttggtcctcagagccattacctctctggaagctcagagtaaagccgctttccatctgtgtaggctttgtctcataagtggtaccccatgtatacttttcttcagatctcgtgttaagggacaacccattccacaacatacttgtatgctgtcttcgatctgtaaaagcaaaaaattcgttgttggtgtgtgtgatagagaaagagagaattgacagatggaaagatcctgaagagacattgctaatatcaacttgtgtagtgtaggttcttaccgaacaccctctctgaattcagtggaaatactccttgtggcttgcgacgccttgcattatgatgagaaagccgtttgcggcacgttcgtttcttttcatcaaattctgagacagcatggaacgtgaacattagaaaagaaatcaattctctaccataacattagggcatgttaaagttattgctggacgactaaacagaactagcattttgcagtaaagagaatgcagtcagaacaataatcatggtttacctgctacactgttggcagaaacgacgttccaggccactcacaacaacttttgggcactttgaatgcgtttcgcagactctatgcttgcgatgataatccttagaagatgagagatccagctcacagccatcaatttggcaacgcggaacttgcatgctctgaccacacgatttggttttcttccgagcaacaacagatggagtcaacaaattcatagaaaccgctgaaaggtcattattgttcctaccccaaaattcttcagagtatgtccgctttcctagtttcaaacaaagatctgattcagctgaggcaataggtacctcgagagctgtggatggtttcacctggagaaaatctatgttgctggaagaatctccaggggaactttgtgatgcaagattgcatcgtttgtcctcgggagatgatgagttgatagaggtcgactgcgagctttttgatacggcagtgtgccagaaactagtagcagaccactactgactttctcaaagcctaagaaatctggaactatagattcaattccttcacctttttcaaattcccactcagtagattgctgttttttttcattttcagtcttcgactgattggacatgatcaaattctcccagcccacgggaacgaagatacca

SEQ ID NO: 23910 - DNA, 698 bp, Arabidopsis thaliana
gaagcctgttttccatctttcaggtatcaagagaagaagctcaagatacagttaatctctggtataatgacagacaagaagtccggaaatggcaagaactacgcaagaaagaagctatacaaaaagggtatgtactcactttgttgggaagggctcgtaaattccctgaataccgttcacgtgcccaaaagaaccatatcgagcgagcagcaatcaacactcctgttcaggtttgtttgcactatcatcagatcttaaccatcttgaactctatcgactttaaacctcaatcaccactattaatacagggaagtgcggctgatgttgctatgtgcgctatgctggagatatcaaataatcaacggctaaaagagcttggttggaaattgcttctacaagtaatacttctcacagattctttacataactacaggttagatgattgtttatctaaatgatttcttttgggctacctacaggttcatgatgaagtaatcttggaaggaccaagtgagtcagcggagaacgctaaagacatagttgtgaactgcatgtctgaacccttcaacggcaagaatattctctcagtcgacttatctgttgatgctaagtgtgctcagaactggtatgctggcaaataagaggaaaatagaaaaagatcttgctagtgaaagctaacaatgaggcagtgcttgagg

SEQ ID NO: 23911 - DNA, 494 bp, Arabidopsis thaliana columbia
gtttgttctctcctgttattcctctttttcttttgaaagtctgtctactgatatcctacatataccccctaattccgaggtttgcagtactactttaggactggagggtgcaaatatggagagtcttgtagattcagccacatgaaagaacataattctccggcctcactcaccagagcttaacttccttggccttcctatcacaccggtattccattaattggtttagacagttctagcattctgtttacaacagccttatggaacagctataatagtataagctattgacagggagagacagaatgcccgttctacatgcgcaatggctcctgcaagtttggatcagactgcaaatttaatcatcctgatcctacagctatcggaggagttgattctcccttgtaccgtggtaataacggtggatccttttccccaaaggccccatcccaagcaagttcaacttcttggtcttcaacgagacacatgaatgg

SEQ ID NO: 23912 - DNA, 560 bp, Arabidopsis thaliana
atagaggtagaacctcatgtttgccgtgtgaggaaagttagacctttgcgtcgtgctcttaagggtcttaaagcttggattacaggacagaggaaagaccaatctccgggtacgagatctgacatccctatggggacgcttaactattttggtccaggaagcagaataatcatgacctctagaaatagacgtgttttcgtactatgtaaaatcgatcatgtctatgaggttaagccattagatattcctaagtctctactacttcttgatcgtgggacatgtcaaattgttttgtcacctgaggtttacaagacattgtcacttgagctggtcaaattttcaaatggaaatcccaggttcttcagttcttgagcagtattgacagagaatggaataagttatcacaagaagttaagacaacatctcccatttacatcccaggtatatttgaaaagagctgttgtgggcttgatgacacgagaggggtatatttttggacattgcatgtttctttaataggattgataaagacaatggcgcaatgttgctggatggttgtg

SEQ ID NO: 23913 - DNA, 496 bp, Arabidopsis thaliana columbia
cgctgtggctcgattttgggacgtctatatcgatgaacacgtaagtcatgcatccacggagaaactttcttttatatatgtttatatttttcatgtttaatttgttttagcacacccgtttttaacaatgattttaagatggaatgataagagctttcattcaaaaaaaaaaaatgaaaatgaaaactttaacatgtaatttattaatgtctttccaactgtttagtagaattttgtaccttccatgaatcataaattaattatttatatctttcttgatctttcatatagtgtttcacatcaatcaatggagtggcagtagcaaaaggtgaggagaacataaatgcggcgatactaagctagagcagtgtatggctctattggaagaaacgtttcaagaatgcagcaaaggaagaggcttctttggaggagaaaacatcgggttcatcgacattggtttcggctcgatgttgggtcccttacggttcttgagaaa

SEQ ID NO: 23914 - DNA, 532 bp, Arabidopsis thaliana columbia
ggagaaaatcagcaatcaaaatcaggagtagcaaaaatacagatttgttttctttacttttaattcacacaagtaacaacaaaatcttgaaaatgttcagagagattgaaacaaatagacatgatacataatcagaaaacaaacacaattcccaaattgtctcctctgctaatatgctattgtttttctcaggtatcttccacctgcgagtggaacacaaagctcggaaatggtagttgtatatccctgcacacaatatcagagatcggtgttaataataacacagaaaaaaatgggaagttgcattgcctaaacctgggataagtcttggtttaggaactcacttaagatactggagagtcatattctttagaagggaaggatgcctgagaacaagggttctccactcttccttatcgatcctcccgtcatgttttgtatcagcttcctcaaatgtctgtgaaagaagaaacttagaaaccactctttactttattctcaactgctatcatgagttgggctatacacagtg

SEQ ID NO: 23915 - DNA, 568 bp, Arabidopsis thaliana columbia
gagctggtacttactcacccttaagatccgcgaaaaactcgaaacacaaaaccaagaatccgtattggttaatcaagatcaaaacctccccggtttacccgaaatcaccagatccgatcaagatcaaaacattcataacaaccagcaaactcaatccgatcccgctatctacgtaatcaaagagagtccaaaagattcacgagacgattgggtgatctcgatcacagacaagctcgaacaagcacatagagatgatgacacaacactctggggtaagctctgtatctacagagttccatattaccttcaagaaaacgacaacaaatcgtatttccctcagacagtctcgcttggtccgtaccatcatggtaagaaacggctccggtctatggaccgtcacaaatggcgtgctgtcaatagagtcttgaaacgtacgaaccaaggcattaaaatgtatatcgacgccatgagagagctagaggaaaaggctcgagcttgttacgaaggtcccttaagtttgagtagtacgaatttatcgaaatgctagttcttgatggttgttttgtgc

SEQ ID NO: 23916 - DNA, 437 bp, Arabidopsis thaliana columbia
ttgcttctgtcgatgtatattcagtgtctattcttctgtgtcctgacgctttgaagtcctttcgtggctatgctcgtacgatgatccagttgggtgatcagcttcggataaacaagttttataagaaagatgcgatcaaagcaacatggggactgttagttatgcaaactccaggaccgtggacatcactatgaggctatagtgagagcttgaagacagaacttgatacgtacatagatcttggcataaagaagatgcatgcggctgttactgcatccgatacaggtactttggctaatcggatggcagccctaaagagagatccttctcttaatctagtgaagacctttagggtaaaactggatgacaataccaatagagaacttttggtggtagagtctagctagcgtattgactatggagagtgcacgtaagtt

SEQ ID NO: 23917 - DNA, 588 bp, Arabidopsis thaliana
aaatcataaatagggttccacttttaaggtcttgttagtgtgatagtttcttgtcactcaagaaactatctaaactgaaataattgatctcttgtgaatagtacaaatttacaatcaatctatgtattaaccataatataacgattctaacttggacctttttcaattttgctcaccttcaggattctcaattcaattcagcaatatctcggcggacgcagatttggtcccatacctaaacacgacaaggacgtatctaggaaggccatggaagctatattcgagaacggttttcattaggaacaatatgagcgacgttgtgagacccgaaggatggcttgagtggaacgctgattttgcgttggacacactcttctacggagagttcatgaactacgggcctggttcaggactcagcagccgagtcaaatggcctggttaccacgtctttaacaactcggatcaggctaacaacttcaccgtttctcagttcattaaaggaaatctttggctgccttctacgggagtaacgtttagtgatggcttgtatactaaactggctcagtgtttctattgtgaatgtcctgt

SEQ ID NO: 23918 - DNA, 470 bp, Arabidopsis thaliana
cccgtcaccatcccccaccaaattccctgatcaaaataggtttccaaaacatcaaaaaccccggtctttcgtctttccttgataaaggttttacttttagataaaaggatgtgaatttcattaccattactccatattcaagcttaaatcccaataatagaccaaatgggactccgaacaagtagtagcatgctatgttcacatacgctacaactgcttgccatcccgctcccacagccactcctgcgttatcaaatttatcataatctcatatacattcggtttacgttatgtacaaccatattatattggactattggagtccactaaacaaatattaccagacaatacaggttgaacattgttgatgacaatgcaaaaggcaagcattggcgtgagttctctaaccacatttctaacttcttcatcttccacaaacaaaaccgggtactcattgcggaagaagagta

SEQ ID NO: 23919 - DNA, 584 bp, Arabidopsis thaliana
ccacggttcagcaattttattttaacttatttgtgttcttttaaattggcttgaaatttggcgttataggaggttggttatacgcttatctaggggaagaaaagaccatctatcttttgttctggagatcacagatgaaaagtgtaccgggtctacttgggacgtcaaattcaacttcaaaatcggcatagtccctcagactggaccagattattgcttcggtatgtttctgtatgtatataaacataaaaaaaaataaaaaaaattcatacatgtattattgggtgtagattttgataatattgaaatatatatgttgtgttatcagttttggtggggcatcaaaacgaaaaaaaacgtagtcaagggttagccaacttcatatcacacacggatttgaaggagaggtttcttgtgaacgacaaagcggggttctatgccgagataagcgatgtccaaccaaacttccccgttacccgtatccctcgaacaatggggacagcagaacgctttaaactgatagagttttcccgaaaaactcagattccctggaagatccgcagttttccccttcgatggtgaag

SEQ ID NO: 23920 - DNA, 445 bp, Arabidopsis thaliana columbia
tccgtcttcttcttcacctcccgatggctccaccaccgccaaacacttaactggtccggtatgaccggttaacacagagacacacgtgtgtaccttcccttccctcctccacacgcatatcttcttatccgccgcaccgctaaacaacaattttccggctgccgcgatacagaggacagcaagcctatgcttcttgaaaacttcacaatgcttcaagagtttcttgtctcccatctcccaaaaattcacagctccgtcgcttgaaccactatacactgccatgtggctcgtgaccaaagccgtgaccgctgattcttgctttagcaaagtttggaacaaagagtgcgccgtacgcttccctctgatctcacgtttccaaaccttaaccgttccatccgccgatcccgtgaacacaaggctctcggcggtcgttacagaattcaca

SEQ ID NO: 23921 - DNA, 535 bp, Arabidopsis thaliana columbia
ttaaaacagaatcatcaaagagtaaccacatgtgttctcttgatccatttttattcttgactaatctctaaactacaaatgacgatgatgttggcactcaagaggagtaacaggaaacctagtagcatcaaaacaataatcataaatcatatgattagctcgaacccaaataagctgatgattctgatgaaggctaagctcagagacagttggttcatcccaccaaaacttctggtctccattacacttgcttagatcagtagttgttggaatctcacatgcatcgatttggaattctttgtaagaagcaacgaaaggagcgtgactccaatcagttttaacaagacctccttgtgtagcccaatcatctgcattccaaatggagctgtaaacacccattgcttgatctttagcaaatgggatacctttctcttcaagattcttctgaactcgaatcggtgtttcgtctaccatgaatctgtatttgcaatgaagacatcattaaaatgggtccttaatatcaaataaaggaaga

SEQ ID NO: 23922 - DNA, 454 bp, Arabidopsis thaliana columbia
cggttcttcttgaagtgagcttacttgggagtcctctggttcaaaagagggcagtgaaacttttgcaatggttcaaggatgagagaaatgtacggatgggtcctcattcgggtccacaaacgggttgggtgagtcctgggatgggatctccaatgagcccgaggtcaggggaagaaggtaggaagatgatgaagaatctggtgaaacagagtttatacaagaacatggagatgataactcgacgagggaatttggatatggagagtgaaagttgtaggcttaagtctttgatcatcagcacaagctctaaaagtttgacttattgatctttgttttgtgttatgacattgccatataaagtgattagtgagtgtcttgctctgaacacagaaatacttcgaagtgcaattgccaaaacatgaaactttttaagagttcgctactttaatatgga

SEQ ID NO: 23923 - DNA, 578 bp, Arabidopsis thaliana columbia
tataaaacaacacaagcccatcagatactgactgaccttgagaagccctgcaactttttttggcaggagttctaggagactgtactggagactcgccgggactcaggcgtggagagccatcaacagtgactgtccctttaacaaaatacatgattaacccatcgagggtcttcaaatacggcttattgaaaactttcctaagtgtttccagagccaattcctcagaaatcgaagaaagttttcgccttgtctccacacttatcggaagacgatgattgtgtttctcgtagattttctccaacattgtttcaacactacccagaagagcgatctctgaccgcggagagacttcatcgcagccattgttcatcattttttctcccaaaatcggagtcagtgtctataatctagggttcataatatatagccctagtgggaagagagaaacttgtttaactctggaattgcttttgctgccattttctcaaagtttcgtcctttaggttcaaaaaaagaaaaaacagaagttttgtgtaaatctgtttgatactttgattttgctacacggagatttatat

SEQ ID NO: 23924 - DNA, 343 bp, Arabidopsis thaliana columbia
tttccatttacacatgttgctgattttattttagcatgttttgtgttgtcaataggtagattagttcaggatttggtctgtggacaatggacaatgaattttgcactctcatgttttatgagcaacacaagctgaacacacaacatacaaaagatacaagtatgaacataggataccggagataggtgataatctgtatctcaggttagtgctgatctcagaagcagctcatagatgacttcttgggtatctttcctgcggcttgaaacctagcagcagcttcttccgcatcaaggatctcttgagcccgtctggtttgaacatctgccttcttcttttgtgc

SEQ ID NO: 23925 - DNA, 557 bp, Arabidopsis thaliana columbia
tcagcgagaactcgggttgatggaaaagagttctttcgacaagtcaggagccgattatcttacgagcaatttggtgcatttcttggaaatgtgaaggatcttaacgcccacaagcaaacaagagaagtaaggagaatcctctctcaatcatctttaccctctttcgattcaaaacttggattctgattcgacctgcaatgtcttttcttctttgttttctaggaaacacttaggaaagctgaagagatatttggaggcgataacagagatctctacgtcatattcgagggcttgatcacacgcaacgctcactaagagtttggcttcttcagttacacaaagaacttatatactcggaaactcaggattcatcagtctgcaacattcaatttcttttgtttccttggctgtcaagtaagaccaagtaaaactgacaatttgattgtatcatttgtgctctctcgtgtatctatctatctctctcttcttgaataaattacatttcatcatcttcaaaactaaccaatcaacatccaaaatactgtctcttgtattgt

SEQ ID NO: 23926 - DNA, 479 bp, Arabidopsis thaliana columbia
gttataatttgttgttgagaaaccacttattttgtaggataattggccgtctgttatgtttgcaatggcgggcggtatcgtgcttagcctcgggaatctatcaactcaatatgcatgggctttagtaggcttatcagttacagaagtcatcacatcaagcatcactgtagtcataggttagatcatgaagttatatactttggtttgaaagtggttagtttacaattcttgttttctaactttcaggctcaaccttgaactatttcttggatgataagatcaacaaagccgagatccttttccccggtgtggcctgtttcttgatcgcggtttgtcttggttcagcagttcatagatccaatgcagacgataacaaggccaagctaagagactttgaaacggctaagcaagagtaatcaagattcagtctctcactttattttcctaaacaatctgttttcttactaatatcccaatct

SEQ ID NO: 23927 - DNA, 474 bp, Arabidopsis thaliana columbia
gggtttattgggggaagaagttagataaagagatggaagatgcggcggttgttgacggtggtggatctaacggtgttgttgtgatctttgtttggagctcgattaacgagaaccagcttatgaatttcgttgatctttattcttctcttggttggaattctcttgtttgccgcgctgattttctcaccgcgtaagttcgttctcttgttctctctatctctctgagtatattttccggcgaactagctaatttctgagaattttccgatgatcaatggttttgtgtagcttagtatttgtaaatgagcatttagcagaaaaaatcttttggttccttgtgattttttctgtaaatgtcgtttttgtgaattcttatcaatcaaaattgtaaagaaatctaaaagattccgtttagatattctttgagaatctctaaaagtagttttgattatttgtctatgtttttcagggttt

SEQ ID NO: 23928 - DNA, 388 bp, Arabidopsis thaliana columbia
agcatgcgcttgagctgcttctgggctcttatttcactattgcgctgcttacaaattttgtgctcaatgtgtatattcttctggtactttctctcaaggtaagagtaaccttttactattgggatgcaatataagcaatgttttttctaatatttagctttcgtagacatcgtaggctccctccaaatcaatgaaattgaacttccaaacttcactagattcatactttaagcgattaatacctttatgaaattccttctatccttagactgagcttgtttgcctcctaatctacattagtcactggtagagaggtgtctcattatttgttactcttattcttaattgtttcacttgttcttgggacatcttttttaggctcttaaag

SEQ ID NO: 23929 - DNA, 1786 bp, Arabidopsis thaliana
  unsure (1)..(1786): unsure at all n locations
gtgtgctgtaaagaggaggctgctcttctcttcccttttagacagatgggaagtacttgttgagattgaaaggtagagagtagaattcttcacttcttgtgtcacctttgaaagatctaaacttgtcccaccaatgcttccctctgtctttccttatcgaagagtctttcttgtgcagtgtgttgtccaagaagatggcgacgctttcaggtacaaaaaggcgtttgaagatgaacgggacatttaccatatcgttgaactgtcaaatatgtaagagaataagattgtttcattaggtcaggccatgctaaactcgaatctttgctatggagttttagggaccttaatagatcattctaccataaacctatttcaatggaaagagaagcaagaataacagtgacttggttctacatacccaacgagccccagtgtggaccggaccatatcctttgattgcggtgtactcattgaagtattgagggatggacaagcccaggaagacagagaaacctaagatgaacttggtcctgaagctgtttaagttgcagaattgaaggaaactcaaacctccagctcccacgtatgcgaagaagagacagtataaagcagcaatgatgggcgcaggaattgaagcaaacacagctccaaattttcctgcattaacaggatggatctcatcagtacagataaaatttcaaacaaaagtaattccttttatttgttaaaaacagaatagaacaaaactaaccgagaatagagaagaatatcatgaagcctgcagctatctggacaacccttcgactaccaactcgtgtcaaggccaatagtccggcattttctctgcacaaaagagagaaaaatcaactttcataccaaaatatccagagaaagtaatcaaatcagaacatgtaaatctcagagatgcttacacagagacagaggaaccagcaccagtaccaaacaatcctgatatcagaatcgcaactccctgattcacaaaacaaaacataatcacctcagaattctttcaatatcgattcagcaacattataacttcaagtatagctgagttacctgccagccaataccgcggctgagaatagaaggtggcaacaatcgttgcacttgcgtatcttgacaccgcgacaaaagcaccggttgactttaaagatcagccagacacagaataaacaagaaaccaaaatgaataaacagaacaacagagcataatcattatattttgaaagattaaaatgtgaagaagataaccacagacctcaactagagcaacaaaagaagccatcatcattgcaaaagcttctccagcatcaaacgatggggcaccccactggaaaggccatggaactcttatcctaagtacaaagaaactaatgttaacaacgaatccaatgagatcacatttatcttctgatactctattcgttcatgttcttttgttctgtttaaactggaaatttttagtggaaatggtattttgggagctacatattttgagctttgttgtaaccacttaccatggggcagcacctatgattccagcacgatctgtccggcaacttgtttgagtagttggtgcagcaccattgtaggccccacaactgtaagaagatgagcatagatcacacaatcaccaccgcgaatatcacagcaaatcggtcaaacacatttttccatgatttgatccatgaggcaggtactggtacaggaaacatgacacatgaatcaggtaagttnaaacaaaaaaagattttgggagttagca

SEQ ID NO: 23930 - DNA, 1337 bp, Arabidopsis thaliana columbia
gtctctggtggcatacaacatccattctgtaacaacatcaaatgtaaagataaaaatgtttgtaaaatcttatacaaatgttttacaaaacgtatatttgagtgatcttttcatcggtatattgttcgaatgtactaattgtacactttaaaagtcggtcttgagatcaaagaatatatatctatgatgatcaaaccttgattggtggcatttttcttctattgtaaggtttttcatttggagatccgtaaatgaggtcgttgcaagctcctttatcatagacacacgatttgatattgttccaggtcacatgatcgtccatgattttgagcttgaaccacatccttgtcgccggaaaccgccggctttgcatctcatttactccggcatacgccaaaccgatgaaaagcattaacaacaagaccaccaccatcaccacaagtgcaggcatcggaaacttccgccgcaaaaacagagctgcgttgctgacaacaaacaccgcgagaagaccgacactagctagcgtctggacacgtggcagaccgagaatatcttcgcagtcgtagctacgcatgtaaagaagccacactgcgtagccgaggagtgtaagtgagaggacgaaagtgaagatcggaaggacaccagcggctaaaatgttcacaagtgccatcaatgttcccatcggtggcttattatcactttgtgactccatttggtctgaactcttggcttctggctcagtcgttgcggttgctgtagctgtggctgtggcggttgcggctggttcctcgacgggtactacttgagcattatcagccatgtgaaagtgaaagaaagctctctctctctatggaggtgttgagttgatatggggaaatgtatatatagaaacagagagatcataaatataggtgtctgagtgagtgagtgtgtggtgggttttacagagtcaaatttgtaagttagagataaataagtacacattaattaagtacaacgagatcttgtccgaatatcaattatccaaaagtgttttttttttttgttttgtttaaagtataaattcattacagtttttaattgtttgtcttgttttatttatggataaatgaagttaaaacccttatagaggaattataaaccacacagactaaatattgcacatcaagattaatggatatatgtagtgaactaagtcaaacataaaatcccggaaaataatacattaaattttctaaaatctaatctaaataataggagaacagtaattattatgttactgtttttagacaaaagaaccagtcgttcttacacattactttgagaaaataaaaaaa

SEQ ID NO: 23931 - DNA, 610 bp, Arabidopsis thaliana columbia
tgcctcaggaggttggtaatgatgatgatgttggtgatggtgggcatgagagggataatcatgatgttggtgatgatagagtagtgggaagtgaaaatggtgcgcacttcagaagagtacattgggtgggcaatggcaaggtaaagatgcgtcctttatgcgttctaatgatcatggtaacagagaagttggtagaaattgggatactagtggtcttgaaggcacagctcttaagatggttgagggtgatcgcaactctaagaactggtggagaaaggtatcacttttggactgttattttagtttcctcttacttgttttcctttgaagctggggaataatgaaacattacctcaattttgaaatgtgtttatgtgttcaagcttgaaatggtacgcgaggttatagttgggagtgttgagagggaggaacgattgaaggcgctcatatactctgcaatttatttgaaggtttctcttgtctttctatagcctaacctaagttatcttttctcatatatctgggattcccttgcttactctttttgtttgtttgtctggcttcttatgcagtggataacacaggtcagattcgttgttttgaagatgga

SEQ ID NO: 23932 - DNA, 560 bp, Arabidopsis thaliana
ccagttactttttacagccgtccatgacatatcatttgtgtctcttactttatatttggcccggagaacttgtgtccaaagactagtgcgatccttcagaattctccacccaaccttagccaacaaagctttattcattagagctgcaggcctcatacctagaccaccttcccgcttaggcagacaaattcttttccacgctatcaagtgttgcttcttcttctcacttgtacttccccaaatgaaagagcgagtaatcttatccaacctatttaacgtggacgtagggagagaaatagtactcatcgagtgaactggaatagaagagaggaccgatttggacaaggtgacccttcctgctaaactcaacatacaccccttccagccggataatctagaagagactctctcaacaacttcaccaaaagtatccttattaattctcttgtgcaagataggcattccaagatactttcccaaatcacaagttgctttaataccgctttcgtcgctaatctccttacccaaatcacaggcaacattacccgaaaagaagatcg

SEQ ID NO: 23933 - DNA, 532 bp, Arabidopsis thaliana columbia
gtgctctaaagaaatttcgtgcgaattaccgctaaaatcgcgttttcctgcagacgcacacgtttgcgtatcatatcagaaaaaagggccggatgattccagccctgtatttttacttgctaaacgcagcctggaagacagctaccagcgcgtcgttctgactctgagtcagagtatgacctttcggatcgatgaactgtaggctgctgcggttatctaaatcgccaacctgcagtttatagtcaccggatgccaggcctggatcgctcgcgcccagttcctgccagtcgctgtcagacagcggcttataagttacggccatgttgccctgcgaacgggtgctgtcggtcactttcatgcccactttttccagcgccgctggcagacgttgccaaaccacattgaacggcccgcgtacgaccagcattggtaaaccggtgtcatcagctgcactttgtacgtccatagtggtggaggacgattttgcgcacgttcgcggcgtcagtggcagatttatccagacggcggaaat

SEQ ID NO: 23934 - DNA, 658 bp, Arabidopsis thaliana
cgaaaacaatgcttgaacaagtacacgtgaaacaatattgtagattaaaatagtagtgtataatggtggcttagtgagtttggttaatatcatttttcacatacccgtagtgagtttttccttgtcgtggttaagtcaggcggcttagccgagtgctaaggttaccatcagtgaggcgatattcatgcatgatccaatctgtttttatccctttaggaggctttccaccgtaaaaaacaagcgctttcttgacaccaaccttgtgactattgcacgtaaatatcggtttatcggttcccgttgctttccaataaccggaagttgctgcccggtttggcctaaccccatttggatacttccgatcccgaggactaaagaagtaccactcgtgctctccaaaactcgccttgcctaaaccattcaaaatattattatccacaagatagttactatatataccaaatttaaatagtggctagattacagtggtcatagtaaaattaaatcgtacattttaatcatatcattaaagcataaattaggaaatataaatacttggaagctcccaaggatcaaacttgtaaagatcaatctctgcgatgattgagactggaagtggaacagaatctgctttcttcttgaggtaatgaactactag

SEQ ID NO: 23935 - DNA, 812 bp, Arabidopsis thaliana
ggtgggaggatcgcatacttggaatcgtgtttcttccagaatttagatttgatgaaacttccagaaggaaggagacaacagttgtttctgcttgaaccgttactcattctcccatttgaaaccgccaagtcataagatatttcgtccagagcaagttctaatccgtgaactcgtgtttccagaccacgcgttccgtgttgcgagcttccgacaaatctctaatgaaaatcacaaagagtaagtttcagggactgcggaaatgagagcaatctgaaagcttgtaatgtgagaaagattatcatcatgttttagaacaaacctgaagaagatccattagattggcttgctgttgttcaatctgaacaagctgattacggatcaaagatatatcttcaagccctttgcagttattactatttgggttttcagacaagacgtgatgccctgttaccattgtagcaccggatggtgggatattgccattaagagaactggaaacacctcctaacttctgcaccgtattgtgactagaatgactcgtttccttcgcattctcgtcatgatcacaatgttgttcgtcttcaagagacacaccagtgggaatactagctcctccagctttccattccaatcttctcctcacgtttggttttgtaagtgatgctgttagactggttttcttctgatcaatgctttttctattagcctgcttcctagccgtggtggctagtgaactccccggtggagtcgatctgttaaccagatgagttcttgatttagcaggtgttgaacaactctagaccctgaaggat

SEQ ID NO: 23936 - DNA, 594 bp, Arabidopsis thaliana columbia
actctagactagaggatccccaaaacaagatttagttccaaaattatttaccaaaataaacaaattgttaggcttagaaacttagattctatagtattataacataaaatatcgatttttttagaacaaatctttataacattaattagaagtagtgaagaaatttggtagttacaggtgttcgtcctcggtccacggaactcctttcttcctctccttttccggcatcggagacctaaaacaatcagtcatcgccggcgaactcctctttcctccaacgacgtaatcataaccgtagctggagttttctagaccaaagaaatagtcactgtttgcagcggaggaggcgtcgccgccgtatcccggaatggggataagtccggcttcgatgtcgctgacatcatcctctagctccttgtatcgtttaatgacgtcagctactgttttgccgggaatcaaatctgcgatcttggaccagctctcaagattgtctttgtcgtccagataagcgagactttctcgaaccgtttgttctcctccgccgccacgtggcttctctgacttcttgaaaaatccagtttgtgtttgccggtg

SEQ ID NO: 23937 - DNA, 527 bp, Arabidopsis thaliana columbia
tatttcaattcaaattggttcgttcagttcaaatacgcatactacatataatgcatgaatcgtatgagttgtgatcataagccctctttctttacaagcaagaatttgtttataagctgtcttggttacttcttacacaagaaacctagttagcatacaaaatatacgcttattccaaatcatgatgtattacggtatttgttgatcattagggctgtaacatcggctggttcttccgagctaattgcagtctcatcgctctttacatatgacatctaccgaacatacataaaccctagagcaaccggtagacaaatcttgaaaatctcaagatgcgctgttcttggatttggttgtttcatggggattcttgcagtggtcttgaacaaagctggtgtttcacttggatggatgtatctcgcaatgggagtactcattggttctgcggtcattcccattgctttcatgctcttgtggagtaaagccaatgcctttggtgcaattcttggagcgacctcgggttgtgt

SEQ ID NO: 23938 - DNA, 1025 bp, Arabidopsis thaliana
tgctccaacattatcgcaatatatcactggaggtgcagatagcgtaatgcctagctcacttagaagagtgcatatccaactgatttccgacgatgcattggcaacagctctatactccgcttctgtagaagatcgacctactcctctctgtttcttagccgaccatgagattgggtggctaccgagatatactatatatgcattcgcagagacgtagtcctctgtatcgccggcacagtccgcatcagagaatgtatggagagtgagagtattcttagcagcaaagaaaataccgtgtgttgtggttcctgcgagataccggagtactctttttgctgcttgggagtgatcttctgttggtctatgcataaattgaggcaaacgattcaccgcataggagatatctagtcttgtaaatgctaggtattgtaagcttccaacaagctgtcgatatgtagtcggatcggagagtgttgtcctgagttggtggtcagttttggtgaggacccatgggtgtggaaaccggttttgcattgatcatgtcgtggcgatgaagaagatccaaaatgtattttcgttgggatagatgaagtccttgtggtgtgcggtgttcttcaaggcctagaaaataatgtagttcttcgggatctttgacagagaatctatctgccaacaattgtaagactcgtttgatgccattgtcactgttaccggtgataataatgtcattaacgtagactaggagataaacaaattgcgtaccacattggagaacaaacaaggatgtatcagcgagtgagttccgaaatccaagactgaggagatagtttttcagctccatgtaccaagctcgaggggcttgtttcagtccatagatggctttgcggagacggcagacgtgtgatggattgtcagcatccacaaatcccggtggctgctccatgtaaacttcttcattcaatgtcccttgtaagaaagcgttattgacgtccaattgttgaagtggccaagaacgagtgacagcg

SEQ ID NO: 23939 - DNA, 916 bp, Arabidopsis thaliana
cacctaattcatccatcaaatcctcaattaatggtataggaaacctgtccttcacagtcattccattgagctctctgtaatctacacaaagcctccacgtgccatccttcttcttaaccaagaccaccggagaagcatatggacttgaactcgcttgtatcgtcccactcgccaacatatcgtccacaattttatcgatttcattcttctgatgaacaacataacggtatggtctttgattcaccggattagagtcctccaataattctatcttgtgatcatgtggtgctctaaaaggaggtaaatctgtaggctctacaaaaatatcaggaaattctgtcacaacttctctacaaatgactcctctcccatatcttttgttaaggcattaatagaacccaaaacctgatgttctgtatcatcatcttcttcagattcaaccacttccttacatataacatagccaactgaacctcttcttcttgaagtttatgtagtttttgtgccttgacctctctcacagacccttccttaataccatgcagccacactttctgattaccatatctgaacttcatatccaactgcttaaagtcccaagaaattcttcccaaagtttccaaccactgaactcccaaaaccatatccactccttgtaatggaatcagcaaaatatctgagtgaaactgtgtagtctgtaacttccaagagaaatccactatcttcccatccactttcaacttcctaccatcagccactgagacccgagccaaccctgcatcctgaatctgacaacccaacttagccgccaccgtcgaatcaatgaagttatgagtagaactgaatcaccaatataaacaaggtctttttccataagctccttttaccgcatagtcttgtatctgagatcctgaaa

SEQ ID NO: 23940 - DNA, 499 bp, Arabidopsis thaliana columbia
gattaagtattgtagcaaccagactcacctcaaatctatattctctacggttaataaaagagtgagaaacattaatgcaataagataattttttctgaacatcgttactcttcgttatagcttcttccaacttatcccatctccggcattctatagcaatgcccatggcttttatgtactttccatcactaatacatctgtcaaataggtaaccattttttttttttttttttggttcaacattaactttcatttaccaaatgattacatccaattgaaggtacataacatttccctctatcaaattggacccaaatgcaatggtttgatctagtatcatcctgaaacattatcggatccagcgctacctgatcgaggaaccattgcatttttaaaccacaatgagatagataatactccacaaatgagaatattatcatctcttagaccacctacacagactctaagcgacacgagaacaagtactaaaacgaaagag

SEQ ID NO: 23941 - DNA, 796 bp, Arabidopsis thaliana
tgaatcaaccaatataaacaaggtctttttcccataagctccttttacccgcatagtcttgtatcctgagatacctgaaaccgcattcactgaaatctgaggcatattcttctcttcttcaccagtcaattcctctaacgcatcttcaaactcttcatccacttccatacaaaagagttgttgctttttgtgcaccaaataatgttcaggactgaacttctcatcacagaaataacataagcccttcgttctcctctcactcatttcctgttgagacagcttcctagcattatttggtttaaactcaggtttagtgtattgattctccttgttgtaatatttgtcaggtgtattagaagcctctctaggtgacttcaaagtaccagctgctccacttgtcttaggttgccaaggtgttgaagaaagacgcttaggatgtgccttctcatacagccttcccaaacgaaaacagtgacgcaccgtttgtggttgaaacatcctgacatgcatctgagtgtccattcgcaaacctgccaaataaacactcaccaaatattcttcagaaaggttaacccgaatcttaatcaactcaaacttcttatgataatcaacaatgccatctgtttcctttagcttcttcaactcagccatgggatcatcacagtcatcatcaaaccgctctctcaactactgaacataaccaggccaatcatacaacacctccaaacctacacccgactgcataaaagagtgatgccatgttgcagcatgaccatcgaaatggatagcagccatc

SEQ ID NO: 23942 - DNA, 463 bp, Arabidopsis thaliana columbia
tttgtttctcaaaccatggatctcaagactgcgagaaaagagagaacctgaacagatgggtcggtctgaaacacatgaaaggcgtcatagagtctgtccagcataaaaggctgtagaaggctagtattgcaaagctgcaacgaaggctcaatccaatccacaaactctgactctgaaagttggtctcctgatgcttcgtcatcatcatcattgaacatcctaaacgataacgataacttctttcaatacaaaaaccttactcaaattctcactaaaaaccgactttggaaaactcacaattgaagtgcagagaaagcatcatcaacttcgtcaagttccggagctttatccgtaacaagatcaatctctttatctacagccagccattcaaactcttcctcgttgaatccataactcatcatcgcggatgtgaatgacgaagaaactgacggagacatatgcg

SEQ ID NO: 23943 - DNA, 594 bp, Arabidopsis thaliana columbia
aaataataaaatagattcatataaaacttgtattacacaaaagaaaatatcttggcgcaagataataaaataattacaaagtgatttaaattcattttgattgccgtcaaaaacaaaaattcattttgataagttattacacccaaaaaaacaaaaacaaaaacttattggcatgcggggtacaaacaccgaggaagatatcgaaacacgtgtttaaaaatgaagagacgatttattaagcatcaatgagagaacttcagagctgggtttgagttctgtccaataatacataaccacgttatcatttttgtcctttactatctcattacactcttctgttattcgcccaattcttacagtcattgtccacgtcatcctttttccctctgaagccgccaaatatcagaaaacacaaaacctttacccgaagcaaagtagctgcacacttgccatttataaggcatgtttcttcatctaaagcaaagtattttcgagttcctgagcccaaaaggtcagacaatggctaaagaagctgagatgtcgatcgccgtgtcggctttgttccccggttttagagtctctcctactgatgtt

SEQ ID NO: 23944 - DNA, 895 bp, Arabidopsis thaliana
tctagagtaaaagcctaagtagtgtttcctagggacatatatatcttttgttgcatttgtgcgactcaaactttttatcaaagttggtttgattgtgtccttcgaaatgtccttagtatattgacacataattatgtctagagagatctatgctatattcaagttattttatctgatttagctcacgtttaaacaaggtttgatctgcagataaagagaagcaagtagcgaacacaaaaatgaggaacagagatagtgccaagcattatttttgtctgaatcttttttatatttgagcttgttcgtttcattaccgctggcggttgcggcacggcagcgcatgcggcaaacactaccgcctttatatatatatattagtctttcgtctgattttgagatcactttagttcatataacactattttgagctaaagaacttccaactatatatacacttaaaagcaaactcttttcattggtgaaaacttcattactctcgcgaatttcactaaaaatttggaattttaagaacttaatccaaaagtccggttttctcctctgcatcaacgagtgagttagcagaggcagtacgaggcccgcttgtggagaagctaagcgatctgctcagctcgttttgccaaaaatggttcctcaaggctttaagcttcgggttaaccgttgagaagctcggatccgacagcaactcttgcatcgctgtcttcccctctatgagactcaccacctgcgacattgtaggccttagagtcggtgatgcgttagtgcacatcaatgccacgttcagcatcaacatggcttcctcttctgagtaatctgaggctaacgttggatcaaccagctctagtaagcttcctctctcttgcaaaacgtaagccta

SEQ ID NO: 23945 - DNA, 563 bp, Arabidopsis thaliana
catcatcataaattgaggtaatgcaatgtgtggaatcagtcagcttctcagttctagtgaatggttctcctagaggaatgataaagccagagcgaggaatccgccaaggtgatccgttatcaccatacctctttatactgtgtgcagaagttctgagtaacctactcaccaaggcagaagatttgaatagattgaaagggatgaaaataagtactacaggacctgtcattaatcatttgctgttcgcagatgatgctctattcttttgtcatgcacaccaaaagtcatgcaatactattatgagtattcttcacgagtacgagcaggtctcaggtcaagcggtgaatctgaacaaatcggcaatcacttttgaatcgagagtaaagcaacatgtgaaaacaagattgcgtcgcatacttaatatccataatgatggtggaggtgggaagtatctcggattgcctgaacaaattggaagcaggaaaaaggagatcttcagttatgtcgtggacaaagtcaagcagagaacacaaaattggtcacacaagtttctttcagaaggt

SEQ ID NO: 23946 - DNA, 482 bp, Arabidopsis thaliana
acacaaaatgagtaaacattatatattaaccaaagtatatatgtaaaatgaagcctacattgactagctgcagatgatcctcttgtgctatatcaggtgcatgaacgatggggacagcgttgagcagagcacccttcataacgttgatggcattggaaacagtggttctctctgtgatggcgtaaacggaatcattaacagctccgagatcagagatggagcgtgagagaacagttttgaggtcatcaaagtgatggtctttaaggaaacgcaagagatccatctgagtaagcatcttgtaagcagaggcagactcaatcaactcaactcctgcaatagtgttattgctctctatgctgctctccactggcactaaagctcgatggatccctttgctaaacacttccatgcactctaacacgctggtattaggattcagtgtccagagactgagtcattcgaggcaatgacagatgatggat

SEQ ID NO: 23947 - DNA, 1243 bp, Arabidopsis thaliana
acgcctccggtcttctttcaaaaccctgcagatctgagaaagtatcttgcaaaatcgataattgggatcaatataggaagcaatgactatatcaacaactaccttatgcctgagagatactccaccagccaaacctacagtggagaagattatgcagatctcttgatcaagactctctcagctcaaatatccgtaagtcaatgatcttttatgactctcccatcatctcttagtacaaaattgacaatagtgatgcagatattcatctcatactcagaaagtgaaaactgtgttcttttacaaacattttgcagagactatacaacttaggtgcaagaaaaatggtgttagctgggtcaggaccattaggttgcatacctagtcagctatctatggtaactggcaacaacaccagcgggtgtgtgacaaaaatcaacaatatggtttcaatgttcaatagccgtctgaaagatctagcaaatactctcaacacaactctgccaggatctttctttgtctatcaaaacgtctttgatctatttcatgatatggttgtgaatccttctagatatggtaaaatgacctcaatccctatttataagggtttactcttatttctatatatcagtactgagttttagttcttctttttgcaggtcttgtagtatcaaacgaagcgtgctgcggtaacgggagatatggaggagccttaacatgccttccattgcagcaaccttgcttggataggaatcaatatgtcttttgggatgcatttcatccaacagaaactgccaacaaaataatagctcacaataccttcagcaagtctgcaaactactcctaccctatcagtgtctatgaattagctaaattgtagagaaatgtatctcaaagctagattacctccccatttcaagagtctcctcggttttctagtttctagttagaagacattaagtatgggatttgtatgtaccaattgcccaaatgtttaagatcacatctatattccaatgttataacttaaaactttctcattctcataagtgttagccaacaagatattcttgaactagcagtcactatttgcaaagagaagcttaaatttacgatatagaaaaggaaaattcagcacaggaaactaaaattaagtgtatatatatttcacgcggacgagacaggggatattgagaaagttttcatatcgagtgaatgctaatttacagaaagctagaaacaagtt

SEQ ID NO: 23948 - DNA, 572 bp, Arabidopsis thaliana columbia
cttgaatggtcagaagcttaatggatcgatctcggtattgggggaacatgacttcgctcgttgaggtttctcttcaaggaaatcagttctcaggtccaattcctgatctctctggtttggtatctctacgtgtgtttaatgttagagagaatcagctcactggtgttgttccacagtctttggttagtttgagttcgcttactactgtgaatttaactaataattatcttcaaggaccgactccgttgtttggcaaatccgttggtgttgatatagtcaacaacatgaatagcttttgtactaatgtagctggtgaggcttgtgatcctcgtgtggatactttggtatctgtagctgaatcatttggatatccagtgaagcttgcggaaagttggaaaggaaacaatccttgtgttaactgggttgggattacttgttctggaggtaacattacggttgttaatatgaggaaacaggatctctcgggtacgatttctccgagtttagctaagcttacttcattggagactatcaatcttgctgataataactctccgggcatatacatgatg

SEQ ID NO: 23949 - DNA, 296 bp, Arabidopsis thaliana columbia
tggcggtagaatcagtttgatcagagatagttgtgttggtagcggctagaccgtccagcattctgattatctccgcagtatcgtctaaatagtatttagctttgcttggcttttgtccaacggtgcaagcgaatatctcagccacaggagacaaagctggaccatctttagcactcattatcacctcaaacatatcctcatcagaccgatcatcaccgacgcagagaatgaaatccaaaagtttccctttttcttgcatcgttgttagaagcctctctgccacaagacctttgttc

SEQ ID NO: 23950 - DNA, 513 bp, Arabidopsis thaliana
gtgtattagttagttacttcaaacaaaataggtggatatgggacatttgaagagttgttggaagtcatcacctggtctcagcttgggattcacactaaaccggtaattaattaaattcgttggtgaaccccaaaaaaaaaaatatcgtttagatatgacttatgagtacacatacgttgagactcgagtcagtaaaaatacggttatctcggcaaaccattaaaaaaaataaaaaatagagatgttgtcatatactatgtattttatggagaaatagagattttcctgatgaacttacacaaataagaagaagcaaatttctttgttggctatatatgtgggcatgtggcatgggttgaagtctatattcacatggaataatgtcttaactcttacctcttgacaacaacaacaacaaaaaaatgtcttaactcttacctaagattttgtccaaaaaaaaacactcctacctaagatcaaaaaaataaagagaatcatagttaaggttgtgaa

SEQ ID NO: 23951 - DNA, 527 bp, Arabidopsis thaliana columbia
gaggcgtgcttttcgagctttatcggccttgtccatgtaatcttggtgagattgatgctttgaccctaaaagaaaccaaagaacttcaaccaattagcccaaacagagtcaacactataggatgtaaccaaaagcagatgtaagagatatacagattcaggtcctatgggaatgttagaatgaaacaatgtgatccatttccatatatactgagaaaccatttactcactatgtcatgtttctcattttgcaagaaaaccaaaatcagaatctaattgcaatcaaaatcctccaatttcatcttctaccaattaccctttcaatccccaagaagggatttggttatacaattattaaacgatgagagagagatcggaccttgagtcatcaaataccaaggaactccgaagatgatggtgacgattccgatcccgaccaagacgtgcttcttttcaccactgtaaacgtaatgttccattttagctctgaatcctccgcctccgcgcatacttgcaggaccaccgttg

SEQ ID NO: 23952 - DNA, 512 bp, Arabidopsis thaliana columbia
  unsure (1)..(512): unsure at all n locations
nnnnnnnnnnnnnnnnnnnnnnctaaagccagttccggccaaatatcggcagaaagcacatagcgacctacggccatgatgtctgagtccagcgtctgcggctgatccggtttttcgataaattcaacaatgcggctgactttaccctcacggtccagcggctctttagtctggatgacggagtattcagagaggtcacccggcatacgttttgccagcacctggctgcggcccgtttcgttgaaacgtgcaatcatggcagcaaggttgtaacgtagcgggtcggcgctggcatcgtcgatcacaacgtctggcagtaccacgacaaatgggttgtcaccaatggcaggtcgcgcacacaaaatggagtggcctaaacctaaaggttcgccctgacgcacgttcataatggtcacgcccggcggacagatggactgtacttccgccagcagttgacgcttcacgcgctgctcaaggagtgattctaactcataagaggtgtcgaagtggtt

SEQ ID NO: 23953 - DNA, 586 bp, Arabidopsis thaliana columbia
acttacatacgatatcgacgattgttcttccgttagtgaatcgaccagtaggtgatccaaaatcgatcccattaggaacataattagcctttgacaatgtggctaagtagttgttgtttccggcatccaccaatgaatctccgaacacaaaatttgctggaatttttttaccggcaaggcacacctcggagaagaacaagaccgataatactataatttggcaaagaaatacaagcaacgacattactggtatttttcagtttgaaattgattttttagacaaatatcaactatagaaaaacgggaatctttttgtgaagaaccaaacatgatattattatgttctaagaaaggaacaatgaaaaatagagagatttgtatgagaataaaagatagaggaaggttaaagaaggaacggtttatataagggtttttgttttggtgtttcagaaccactcttagtttgattcagaataataaaaaacaaaagatattggaaatgaccaataacgaattgtatagtgtttgtatatagccactgtttttcagaaaaggtcagagactgaaaaagttggccggtttagta

SEQ ID NO: 23954 - DNA, 502 bp, Arabidopsis thaliana columbia
acatacactagcaatcagattatacatgtgtttattcttggactacaaattcgtttgggccgtaaatttttgggccctaaagttttctattgaattttatttctttttaagagaaggaaaaaacgtacaaacaaaacattataactaaagcccactacttttgggttttagagtaaacccaacaacacagtacatgataagaatagaagcaaacagaacaaaataataaaacagagcagataaacacacgaacacaagaaacacaagttacgagcagagaagacctaaaagccacaaagaagttttacaattcaaagcatacaatctgcttttgaaggtaatttcctgaagaagttacttggagcagaaggcatcttgcttctgaacttaggatgcctcatccagaacatcccacccgcaagagctatgatcttgaaaggcgtcacggtacaaatcatcgcagctacaagacaaaaaatcacaaacaagcaagtcgcacgcg

SEQ ID NO: 23955 - DNA, 557 bp, Arabidopsis thaliana columbia
  unsure (1)..(557): unsure at all n locations
gatctcgatctcgtcttgtatactttgcactgattgaagccttctctgagctctaggactgaagttgttgttgttggcattacttgaccgagctggtaattgtggacgtattgtgcaaagtggaggaggtgaagaggtagctgatctaacggacgaaattttactttagagattgcataaactgtacagaaattgggtgctccttttatcactgcgtttgtaacatctaccgcttttaaccgcctatcgcaacaccacatacacacacatttacttaatataagacatgtttttatattgacaaagaagagtaataacatgaagaaatcttcttactttaaaagagttatcttagatgcaccgagtactagaatatcgattgcattctcttgtacatactctatgattccttctgcagcatcaacgttctccaatactacctcttcacaatttatctgtcaacaatactctcaatctttaacatttttgaccanaacacctcctttctaattactaattaacgaataaattgacctaatgatatgaaganaaatgtg

SEQ ID NO: 23956 - DNA, 598 bp, Arabidopsis thaliana columbia
cattctcgcaggaaacatccatgtgagattattgaatctaccatctaacaaaatcatcaaaacagaaccatacttaattagcatttggaatcaaagaaacaaccataaagaaaaggatagttttgatgcatacccgacatttctcagcttttgttggtgggaggaaccgaggagaagtgtagaacggagtttctggatcatagaattcaaactttggtcgctgcagaaccagatcaagaacaaaaggttgagaaatgtatccaagatgtcataataaggtggagttgatgtacctcctcaacaagagctaaattagcctcataaaatgtctttatagttccaatatcctcccagtaatctctgaatatgtatccctagccaaaaacaatacgaaactgttagatcattcgttgtgttcaactggtaaaagaaagacaagccgtgagttttatagaatcttacttgaacatcgtgatctcttatggctgcaggaataacttcagatccaaagtcattggaactcggatactgtcttgttagaaggttcagcaaagcttcggttttgaacaataacttcgcattgatgcaatgtatggag

SEQ ID NO: 23957 - DNA, 372 bp, Arabidopsis thaliana columbia
ccgaaaaccacaagcgagctttcagttcaggcaattcccagtagtggagagatttgctcttattatagcgcttatcatcgtgtgggcttacgcgcatgtcttgaccgccagtggggcttacaaacaccgaccacaccagacacaattaaactgcagaacggatatgtctaacctcatttcatctgctccttggttagttagttcatattctctagatataataaaataacattcaatagttgatagtgttttcatatatttatgcttctcttgacttattttaggatcaagattccttatccacttcaatggggagcacctagctttgatgctggtcatgcttttgctatgatggccgctgttttagtctca

SEQ ID NO: 23958 - DNA, 656 bp, Arabidopsis thaliana
tgaaccacactatcagggtgatgcatacctctgctcgttttttcctggtggcaacatgtaacgctgtgttacaagacttgtccggttgcataacaatagcaggatctgcatcaagaagcaatttcactacttcagaactctggcctttaacagccatgtgaagtgcagtttgtcctttcttgtcaatccgtctcgctagctgaggatccttggagagaagagcttttatgacctccacatgtccttgccttgcagctagatgcaaggcatttttattgttagaccgagaaatttctagcaaattcccagctttggataagagctggttcacaacttctgtatggcctctcatagctgcagacacaagcggagttgcattcgatgggccaaatgtctggctaagcgtcgcatcatgatctagcaagacctcaacaatagctgccagaaagaaaaaaacattcttattcacatactgtagttcatttgatcaaaagcctatcgacgagttaaggagcattaccatgatgaccctgtatggcagcaatatgaagtggatcatatccagaacgattcttcttagcaatactctctctactcgaatacttcaacagctctttgacaacatcaagatgtcctttatccgcagcagtgaagag

SEQ ID NO: 23959 - DNA, 596 bp, Arabidopsis thaliana columbia
atctgcttcaatcttctcaacacgcgccacgtaaggagctttaccagcatctgatggacgcattaacacacaatctcccactgtaaaaaaacccacctcaactatcacatttccaagtaaaatttctcttcctaactccaaaaaaacgtaaaatctaccaaagatcacatttaccaaagtgtacttattaagcaatgacataactcaacttcattgaatcaacatcaagcataagtttttataaaagaagagattttttttcgtttcagattgaaatgagtctatagaaatctaattgcagcttaataactcaaaagaagcaatcaaaaaagtgattagttatatacaaaatgcacatagaacttgcatctaacaattttgatatctttcttgcccagcttaatctttgaagaaaaagcgacaccaggtcgagttttcgccattaaaataaggtttttttttccaccgagtgacgagcttgattaagctgggttttgtttggtttcactcgttttttgtttttactcgaaatgtgtaagattaaaattctagaagacggaagctggagacaatgggaagaagagagaagaagaaga

SEQ ID NO: 23960 - DNA, 569 bp, Arabidopsis thaliana columbia
  unsure (1)..(569): unsure at all n locations
cacacacatgcactcaaacactcaaacatgtgttttatcccttgagaagcattttctgatatctgtgattagcgtattctttgattgagtatgtgtctcctacagtatgtctagttactaacttcaaccaaatgaccatggattttccttgctgactctttctttttaggctgctctggctgccaagagggctagggagttggtaagatcaaaaagcgttttgaagtcatcctcacttcctgggaaacttgcagattgctcatctacagatcctgcagaatctggtatgcattaaccaatatgaaagtgccttgtaagctgtgaaagttagtcagtttattgacatctatctcctatgctaccagagattttcattgtcgaaggagattcggctggtggcagcgcgaaacagggtcgtgacaggcgtttccaggtaaaaaacatcattctgctcagcgtgtcactaacaggctctgcttctattttgttagtctgtaacactgtatttcgatctatgcaggcaattcttcctttgagaggcacnattttgaatattgagagaaaggatg

SEQ ID NO: 23961 - DNA, 572 bp, Arabidopsis thaliana columbia
tttctctactatcttctatttttcagataaagctcaatcaaattaaagctgtgtaacaaggtggtaatcctgtaaatttcgaattttttgcaaaagttttacaaatagagtgaaatatatcatttacagtagacaagaagaccatgttggtgtttcaactataaagatcgaggcaagttgttcgaagtttgttctacagtattccagaggtgttgagtttcttacgatgtaactccataaggaagcaatgcagcagctacgatcctgccttcctcattcagtatgttgtaagttgatgcagcatttctgtggatagatcagagcgttaatcaataagcacagacaaatactccaaaccaacagaacaaatacttgaatagaacaaaggacatacagaatcaacagtttctagcttcatgccgattgactttacgaactgacggacttggggattcagtgggtggttgtatcttccacaccgacaatcaagagctctagagattgttgtgaaaaaaaacacagaaaaaggagagtcaaaaccactgatgataccttcaatatgtgcaaaggtt

SEQ ID NO: 23962 - DNA, 613 bp, Arabidopsis thaliana columbia
  unsure (1)..(613): unsure at all n locations
catcaacacataggaattgaaactaaacgtaaccaaatcaagaagattactattaacccatatctaagcaagtaacgatttttaccgctataagcaaggccgtagcaggagacaacgcaagtctgaataacagtgttctcttgcttagtaaagggtttagataaaaaccctaatttagacaagaacccagtccacgacttgatgaagaagaagccgagaagaccagcagctacattaagcgaaggaatgattccgattgttagattgagcttatgggtaatgatacagaacaaaatccctaacaaggcgctagagatcaagcctcgaatcgtgatctgttccttccactcgggtacatattcaccgtgatctagattcgtttctggtaacaacaatgtctctgatatctccgttgacctaggaatctccgtctccataactccaaaaagctacttcttttaaaaaaattgagaatttcctgcagatttcgtcagaataagtacataactttttgggaaatggtcagtattattttttcagtgattcctntcactctcagagaagaactccattggagaaggaaatggtagttgatgacgaattgcggttatag

SEQ ID NO: 23963 - DNA, 727 bp, Arabidopsis thaliana
ggatcccctgtttctatttaagcgttttcatatcttttttctcctctttcattaggcgattaattggtacctttggcgtaattggcattgtagggttgtgatgcatctgtcatgatccaatcaacgcctaagaacaaggcagagaaggatcatccagataacatttcgctagctggagatggatttgatgtggtgatccaagctaagaaagcccttgactctaaccctagttgccggaacaaggtctcatgtgccgatattcttactttggccacccgagatgttgttgttgcggtgagtatttgtactagccttactataaccagataattaatcctaaacaaaatttcacattaatattagtatatcacattgcttgtttagaaatgttttatataacaaggttttacgcatgtataggctggaggaccgtcctatgaagttgaacttggtaggttcgatggtttggtatcaaccgcgtcaagtgtcgaagggaacttaccaggaccttcggacaatgtagacaaacttaatgctcttttcacgaaaaacaaacttacccaagaagatatgattgctctttcaggtaaaccaaatttaaatcaaaacatcttatatagttatatgtatttatatcaccaagatgcatcgatgtctaaaccgataaattcataatgtagcggctctccccttggattcgcacattgtgggaaggtctttaaaagaa

SEQ ID NO: 23964 - DNA, 341 bp, Arabidopsis thaliana columbia
gctcggattatgtgtatgtatgtattatcaaatagcctacagcagagaagctcttgtccaatgttgtagttcaaggagtgggttggtgtagatacgaagtgtccgtactgtgaaagtcttggctatacagtttgcgatgtctgcgaaggcagctaagacttatgatgatggttcatatcgaatttaatgcgtaaacgcgtgagttagttttcgaaatcgcataatatggttgtgctaagagagatatgctatatcaatttagtgagcacgtacgtagtgagtcagtttgtcaaatcacacgaatgggaatcggcttagtaggattattacgcataggtgct

SEQ ID NO: 23965 - DNA, 1126 bp, Arabidopsis thaliana
tataatacaaaacgtaacatctaagttaagattcctaattcaaagactcggttaagtctaaccggaacatgaaacacaatttagcaacttccaagaagagagaatataaatgggaaaaaatgaaatttcattcactcatgagacatgagcagatttcgtttttttacagggaaaatgtaaagtaaactaacagaagacacaacacactagtaccttgaatcaagaacatgtttctcccgaaacagaacatgaacttgacaaaggagaacacattcagaggaaccaaactctattggaacctacaaaacataaaaaaaaaaaaaaacattgttcctaaatagaagaaagatcttcgtaaatggtcttaataccaggtctctcagaaactgatcttatacacctcaaagcaatcccaagaacttctttcatgcctttttctgttaccggatcacttcccatctcctgagtcaataccgaatcaaagcattctgcaccacgcccttctgcaacacgtaacctaacccaatcggttagatcaacaccttcttgctcacctgtgattacatctcctgcacatcttccggttaggatctcaagaagtatcacaccaaacgcatatacatctgatttgaaagaaggtaatggttttcttgaagctgctagctcgggagctcggtaaccgaggattcctgcgtctagaatctgttcgactgtgcctgcttgtgtcatgagacggtggaggcagtaatctgccacacgcgcgtttagctctgctccatctaagagaatgtttgttgccttgaggttaccgtgtggaacagctctgtcgaaatggaggtagtttagaccacgtgccacatcaactgcgattttcaaccgttgggtccaggctaagggagggcctttcctgcccggtcgatctgtcatcaaacaagaaccgtaagcttgatgaaaaatactgcacatacatataatacttagagaagtttattgaaaggagcattaccgtaaaggaagctggcaaggcttccaggcgatatataatctgaaagaataagcttctcgtgttgcgttggacccaatagtacctcggagagcacaacattaggatgtctaatgttagaaa

SEQ ID NO: 23966 - DNA, 1294 bp, Arabidopsis thaliana
aatcaaagagaattatgatcaagaaaagtggagaccttgagaagaaaaacatttagatcaacaggaaccactgatgttgtagccatcgttgtgaaattaggaggatccctgcattatcattttgagaatttaagtataagtgacagtagtaacatgaactacacttgattagtttgttaagtaatcgaacctcatccatcgcgtgctgaaatcgcatcctgattcagcagccgtggctatatctcgatggaaccgttgtttctctaacatagtcgagaaccctgaagcagattcttcatcctgtggtaacacatgaagagaaagagtcaacattttttctcgcaataaaattagaaaacatgtttgtaaatagacaagaaacatacgaaaacagaggattcaggccttggcttgttccacatagcataataacggctcaaaacgtgatcataaccattagcgtctcgaataaccactttatgttttcctacaaagaagaaaacataacaatattcaatctaagaattaaaccaaactagtgttactaaactatctaactaaataactaacctgagttccaaaactcgtactctttgagaagcagagggattgctttcctcacaagttcttcatcttttgtcacattataaatttcatagaccatggagctcaacaaaggtggttggcttgtaacaataaaaacattataaatctcataaacattttattttctccgttattgacaaatctcaaatagagacaaagagttgtagttaccttctgttagtataataagctctagcaccgttcaaagcgtaaccataagtctccacaagtgacatcagattcgtcactaaacctttggcggtagtgaacatttgactcgtcataagtcctctgcatgtgcaaaagcacgtgttacaagacggtgacatactgacacgttagcttgtgttacgtagtcaacacgaaaggagaggaaatcaatttaataacaaaaaacaaaaaacatttgatttgtgatttaaaagttggaaacaatgacttacttgatgacccaataagaatcccagtaatagacttctctgaatctcgaaccgggaatgataaccggttccggcaacggtagaagcgtgtgccggtcgcagactctcttactgagtcagagctctgcagctcagatttcccagagaccgtgtacctcacgcgcccattctctgacttcttcgttctccacgttggagaggaagccggagggatctgagacgacatctactggttcgtggtgcagcag

SEQ ID NO: 23967 - DNA, 942 bp, Arabidopsis thaliana
ccaacatataaatacggatacaagttcgattcaaaaattaaacactttttattaggttaacaaggttattttaatctatatttaataaactaaatccatatctaaaccggaaaaaaatagaattagaattagaatttatttggaaactaactacatatatttgaataattgttaagtacttaagttgatctctcatttttttttgttgattcaagttgatctatcgtatattcaatttcactttatgtactgttttttatcaaccgaaaaaactatagaaaacgccaactaaaactttataatatgccttttgaaaaaaataaaaatagcaaaatggaaatcatggcaatttgccataccatattcattattacctaaatatcgaataaaccacaaatgataatactagccatgtataaaatatgcagtatacgataatgatgtatgtatttggtgactcaaatatcatgtctactaaaaaaatcgttttaattagttgacaatttttttagattaaccatggtaaagctacttcaaattaatacttagttgattagaataagtgtatctgtaccttgcgagccaccaagcatttgaagagcttggacaaatctccggtgcaagtccggcgaccagcaacgtcgtgcctttctattactttgactcgttgtagaagaaactccattgctgttcgaattgttattattattattattatagttattatcattgttgatcatgctctcatcattaccgtcttggccattagtatgttcgttggtcggagagaccctcttgacctccgtggatagagctaattcaggcaaagattgttccttagagaagggaagaaaagcaccgctgccatttctttgtattgcacaaaatgtccgagtttcggatactattaatctcgctttgggaagagattgacagtagttg

SEQ ID NO: 23968 - DNA, 1007 bp, Arabidopsis thaliana columbia
  unsure (1)..(1007): unsure at all n locations
caggtcgactcccgtgtgtagtacacttactcactagtgctactcttttggatctttctggggtttttcttttggttataaaaccagaagaagaagataactgtttgttattttaatacttaccattatcatcatctttgtagagagagagatatgcatcattttgtccctgacttcgataccgatgatgattatgtcaacaaccataattcttctttgaatcatcttcctagaaaatccattactactatgtaagttcttttattcaaacttatattaaaaaaaaaaaaaagtttgattagttcaagatctgagtatttatagtattgaaaactttaggggtgaagatgatgatcttatggagcttttatggcagaacggtcaagttgttgttcaaaaccagagacttcacaccaagaaaccttcttcttctccaccgaagcttcttccttctatggatcctcagcagcaaccttcttcagatcagaatctttttattcaagaagatgaaatgacttcttggcttcattatcctctccgtgacgatgatttctgctcagatcttctcttctccgccgcacctactgcgacggctaccgcgacggtgagtcaagtcaccgccgcgagaccgccagtatcttcgacgaatgagtcgaggccgccggtgaggaacttcatgaatttctcgaggctgagaggggattttaataacggtagaggtggtgaatctggaccgttgctttcgaaggcggttgtgagagaatctacgcaggtaagtcctagcgcaacaccgtcggcggcggcgagtgaatccggtttaacacggcggacggatggtactgacagttccgccgtagctggaggcggcgcgtataatcggaagggaaaagcagtggctatgacggcgccggcgatcgagataaccggtacatcgtcatctgtagtgtcaaagagcgaaatcgaaccggagaagacgaacgtcgatgataggaaacgnaagagagaga

SEQ ID NO: 23969 - DNA, 486 bp, Arabidopsis thaliana columbia
catatttttctctcattcttaaagtatcttcagtgaatatacagttcatatttactatttttacatgtataaacataaaacacaggctctttcctatcagatacacctaaaataatttacctcctactttttgattctttcacactttttttcttaacatataataagccactaatcctgcaaatcaaacctcttctttctttatacactctctctctctttctctcttttcacaaagccatcttgaggcaaactcatcacctcagttaaatcctatgcatgcattgaaacaacagttttaataagaaaaacaaaatggcaacaacccggaaactggtagtagaagtagtagacgcaaaggatcttacaccaaaagacggtcatggaacgtcaagtccgtacgttgtcctcgactattacggccaaagaagacggacacgaaccatagtacgtgacttaaaccctgtttggaacgagacactcgag

SEQ ID NO: 23970 - DNA, 464 bp, Arabidopsis thaliana columbia
tcctgcttccaacttcaactgtctctctctgcaagagaattcaatccaccctcactcgcttctggtgggattccaacaatcagaaaaagatgtgttggatctcctgggacaagatgactgctttaaaaaaggatggagggctaggctttcaggacattcaggcttttaatgaagccatgctagctaagataagctggagaatactgcaaaatccccaaagtctactctcaaaaattctgttagggaagtactgccatgaggaaagtattttacaggtgacttgtgtaaaatcttgttctcatggttggcgacgatcctcatcggaagagacattcttgtgaaacaactgggctggattccattgaatgagcagactcagcctatgggaccggcccctctgacctcaagaaactggcgagtaagggactctttatctctaattctttggtatgggatgaaggaaa

SEQ ID NO: 23971 - DNA, 695 bp, Arabidopsis thaliana columbia
aagttctcattgcttcttcaacaagtttttcggttctgtaaagtcatctatagctttagctttatctttcttgagcgattctatttgctcatcagctttctttaaatcctcctgaatttgattcagttgtgtctgcaggctcccgtacttttaccaatccgcgaatgcactttctgaaaatgtcaaagaatatggtcatcatcaatgtcttttaaagctaatgaaaaccaaaaaaagattcatatatcagttggagagagttcagtatcttgcctcgggtgtaggaatcctagaaggtcgacggtcaggagtaggctttgagttaacggttggaggagaacggtcaagcgaaagacgagtatttggcaccggggaagccgaattgctatcggatttagaagcagagagtttactcagtctaggaggtggtggtgatggtttactacgaggagtctccatcaaaccagttctacagtaaacatgaatcaagacaatgttacactaaacatcaataaaaaaaagttttaaatttgtggatctaacattattttaccaaaacaagagtaattaagttgctaaaaatcataacttttcacctgactaaatcaactaagttcccaaaagtcaaaacatttactagactcaaatccattcagttacatttacgagactaaatcaactacattccaatcaaa

SEQ ID NO: 23972 - DNA, 485 bp, Arabidopsis thaliana columbia
tttttttctttaagaatatgatgtaactagattttaaatgatgcacttaaatctgaaaacaattttattctctgatgactgctaagctttggaaagtttatcattaaacacacctaaagatacttctacacaaccaaagaaaaggggacggccagttggggcaaaaactgtcaataggtctccatcaaattcgagaaaaaacggtatgttttaatctgtaaactcatttcattttctattaacaatataagtgcatacttacaacagttttaaatttacccttttcaggttacctagaccacggtgtccctacatacagatgcaagtattgtggtgctttgatgtggtttaatgagaggatcaataaaaaatctaatagcgaggatcctaagtttagtctatgttgtggtcaaggcagtgtcaaattacgttttctagaggaatcacctgagctaataaaaaaacttctaaagggaaatgatgca

SEQ ID NO: 23973 - DNA, 524 bp, Arabidopsis thaliana
atgatcctacaaggactcaaggctcttcactctgaaggttttgtccactgcgacctcaagccatcaaatgtacttgtcttcccttccaacacacgtggagagccatgggatctcaagcttgctggtttcggtttatccaaagagcctactatggactctagcttgttgtttcctggaacccttgaggagtacatgtcgcctgaggccattgagcgggacaggtttgttgggaaggacaaactgatcggaccagcccgtgatatatggtctctaggacgtattgttcttaggatgtttgggggtatcctgttgaggtgagaggctctaacacatggaggctgtacgaagatatctctccggcagccacagactttgttaggcggtgcttggcatggcgcccttcgaatcgggccaccgtggatgagctcttagaccatccttttgctgctgaaaaacttccattgcttctttctttcttaagggttcttctttcgtaagaaggaatgtcaatgaaaaattgaatg

SEQ ID NO: 23974 - DNA, 518 bp, Arabidopsis thaliana
cctatctcatagactggttcctccatggaaactacgtgcaaagacagcaacttcaactgctcggcatcacttgcatgctaattgcctcgtatgttcctctccaatctcactagtaaatctcttctcaaaagctaaactaaacttatactgcatttgtttataaacttttcaggaagtatgaggaaatctctgctccacgcattgaggagttttgcttcattacggataacacctacacaagagatcaggtataccgagattgctgtctgaatcctcaaaaaagaaagtgtgcaatgtgctaatggagtcgtgatgtgcaggtcctggaaatggagaaccaagtacttaagcattttagctttcaaatatacactcccactccaaaaacgttccttaggagatttctcagagcagctcaagcctctcgcctggtatgcatttcgcaatttgctcccctatctcttctaattacaaagtttagtagaaagactgagaatgtgtccatatttgattgctga

SEQ ID NO: 23975 - DNA, 584 bp, Arabidopsis thaliana
tactcttttaccttccaagaaccgatttcaggatttcaagatgtgattgagtcaccaaattaggatcatcgtgtttcctttcccccaagtaaaatatataaacctattattatcagaaagataatgaaccaatgagcaattacaacaaaaaatgttcctcacatatctaaaacagttaagagtacataccgggaactcggggacaaatggtgggagaggtcaagaatttataccagaggcatcgtccatagcagtgtctggaggagcagcctctggagacaatgccaagtttgatgcctgaggaggatcggcctcgtggggtgttgttccagagcttagctttccattcattataaacacaaaaccaaatgctatagctgcaaagcacaatctaaaagaactatccgttttcaaagtttgaatcatttttcaacgaaagtgttcgttctcaaaagattttcattgttttatagatagatctccattgtttttactttttaagctaaactgattaacaaactttggctccaaaaaatgacagaataaccaattagtacacatactgattgtatcttgcagtaaat

SEQ ID NO: 23976 - DNA, 1171 bp, Arabidopsis thaliana
tatataatactacactatacatcataaattcgcccacttgctggttaggtttgcatgagaatgcatgtgacgagcacctcaatctatgctccatttccctttatttaaattaaataatatttctatatgacttttgtgctgtgcaaatttgtatttgtccctttactatactaaatatatttcagattaatattacagcatcagatttcctcgaatattgtcagaatgtaaaacgtgaaagaagttaaaattcagagaataattaagtttgataaattataataacccatctgtgaataattattaagcttccggatcccagtgttttgggtgaataagaacgttttttacttttttatttgaatttgattttaaattgaatggaatatattgttcttaatcacacacgacgattgcaaccaaattcataacacgcttaacactttatgaaaataaaaacagtagagaaagggaaataacaactatttggaattttttattttgggttctagttggattcaattattttcgtgactagtattaaaaaccagaaatagattgatatgtatatcattaattaactcctttatttctaccatatttctcttattttataaactttctaattaaaatttcgggaagtcgaagagcaaaaacaaaagctatcaaatatatcaatagtactagaagtagtctgcagaaaatgataaacaaatgttaaaaaggaaaaaaaaaaaaataaagctaaacgaaacgaacaaattattgcgaaattatccacgtggaaatagaaaactagattaagtgtctaaaatcaggagccacgtggttagtattattatgcattaagaaatcttcaccgttggatctgatatccatcagtagattctcacacctaagctgactcagcaaatgctcgtctctcatctccttctgtcgccggagctccatcactttccggtgagagttcgagtgcctcgccatcacgaacgtcggactcgacgccggtctatactccggcacgagcctccctgatttgtacctcactccgcaagcgttacaaagcgtcttcggacccataggtcccgtcctccattgcggcgtcttctccgtcgcgcagtgcaaacaacgtcgtcctcctccgctttctccgcaatccacgtccatatct

SEQ ID NO: 23977 - DNA, 624 bp, Arabidopsis thaliana columbia
cctggtccgaatcctacacctgttttcatcaaaccaatctctactctcttaaaccaaaactatctataaatagcttcgagcgattcgcgagtctgcgatcaaaattgggagaaattagaaatttacctccgataagaccggcgccgaaaccaaatccgcaaccgacaccgagtccaaaagctggaccaacttttccaatgtctctgatcctaacttggggaagtttccagagcaatcctttgtcatcgtctccggttcttcttctgttgctcatcgtccctttcgctctctctttcggcgtggattcgccaatacatactttaaatgggcctatattataaggcgcactcttatttctcaaggcccaacttcagcccaatagtcatatagatctcatttcacaagcgatatttgttatgtttattttattttaatcttttgttttatatcataatgaattttatagaagatatctgttatgtttatattcataatgaatttgttttatacataataatatggatttcattacaacatttttttaatacatacaacttaaaaccacaattatctcaaatttcactttgtttcagtactttataatattgccaacatatatatata

SEQ ID NO: 23978 - DNA, 516 bp, Arabidopsis thaliana columbia
cgttatctccaacattctcatactcatccggtagaagcctagagtccatcttggcaactaaccaagtaatctcatctcgaacacgaaccaactctgtagcaagatcatccaaagcacacaaatccatgggaacaataaacttataaactttcccagggtacttcagcctaaagcaatcttcaaactcaactcttatcagaccctaaattcttaggcaaaccctgcaccattatagtaaacacagcagtagaattcgcgttcgggtcactgatattcccattcccatctctaaacctagtaaacttcaacctagcttcaatagcagcgattccaaaatgcgagataacaacaacaataacaacaaacacaaaatgcagccaaagcaaagctgaacctttctgaatatgcgtaatcatcgttttcgaaagctcatcactcaacaaagcagtcccagcatataaattcaacggaagcataaccgaaacagctaaaacagcaatggagaaaagaagcaca

SEQ ID NO: 23979 - DNA, 555 bp, Arabidopsis thaliana
ggatcttctattttttaattagtcatattttctttgtagggtttcctttttcttctctgcatcatctatatatacacaacccattgcgttgttgcgtgtgtctgtgtggattgatcgagtaacaaattatccaaacaatcccttcatcgaaattttttttcctggattctaatcatgtcgctgaatcctaataccaaagcggaggtccgccggaatcagtacaaagttgcggtggatgcagaggagggacgacggaggagagaagagagcatggttgaggttcgtaaaatcaaacgcgaggagagtctgatgaagaagaggcgtgaagttcttgatgagttctcgggtttggttgatacgaagttggagagtttgtcggatatggtcgctggggtttggtcagatgatcttgccttgcagctcaagtacactactcaaatcagggcccttctatctagggcgagagatcctctaatcgacgaagtgatagattctggtgttgtcctcggtttgtagagtttcttaagaaagaagataccctaagattcagtatga

SEQ ID NO: 23980 - DNA, 800 bp, Arabidopsis thaliana
aagagcagctaatctgttctgataaggtttaatagtcgaaagctcttcctctgtggccaatgtgttgtgaaagaaaacgtttgggaactcttcgtggaacgcagtcatactgttttgcccgtagatttttcctgcaacaatgtagatattggtggtcgaaggaaaccccatcgccttgaggaagacggcagcttcacgcggcgtcatagggcaattaccttcaagacgccgttctgtaccattgatcactttttctttccagtgtggaatactaaacctcatcttctcaagatcaatggattcttcattggatagactgtgattgcatccggtaaacgccaacatatctttctcgtacctataatgaaaatttctgttaattgatgattctctcagcaatcagcatcattcattcattagagagatggagtaataggggtagcttgtaccgcaagtgaagagcgaggtagggttcgttgttttccctaagtcttgaagagagaacattgctcagattctctatatcttcagagtaacgaagagcttcatagtttgcgcgacatcgaagccgctggatggaaggaggcggactgttgttggctagccgagaatcagtgtgattgaatacaatcaccttatgcttcttaagtaacttggagattgagtttctgtaataactcgactgcacgcaaacaaataaaccaatacagagttagataaaatcgttgaataaccgaaagagaaaacagagaagtaaacaaaaattgcaaatggaaatgtttaccttagaccgctgttgc

SEQ ID NO: 23981 - DNA, 536 bp, Arabidopsis thaliana
tgggaaaccagtgctgattgaactaattgatgccaaaaccaaggaacccaaggatactttggaggtaacaaaatgttctgcagatatctgaaaatttacaagagaaaatagttgtctagttactctcacacatgttcttttcacatgcaaagtatataaatcaatgacatgcatacttttgtaggttagccagggcttttcgtattataaaatcagatcttttcctaaaaattaaaataataataataataatagaatgtcttggagttacaatcacatttgagactttcatgtgttttttgcctgcactgaaagtttgaccataagttccttgttcaaggttgacgctgctctaattgctactggaagagctccattcaccaatggtcttggcctggaaaatgtatgaattaacaataaaccccattccttatgaatatgttttcattttcgttccctgaggaccttatttggttactaaagaaataataaaagctgtgattcctcacagatcaatgttacacacaaagaggttt

SEQ ID NO: 23982 - DNA, 557 bp, Arabidopsis thaliana columbia
tttgatctctttatagagttgatcactcctaagactattaatgcacgaacattaacaaatacaacaaaaaatatatataacatgtaagacattacctcaagggttgcgcatagtttgaggtacaatatcaccaagtaagccttcctctgatggagtagacacggcaggtgtatcttcagtagtaggtcggggtaaccgcggtgaaggagcattattgtctctgtgaagttgatgaaggagttcttggtaataataaggatttggtaatgcaggagggagatgatgatgagaagtgaagctatgtgggtcgtgtgcagtgaggattccaccacgagggaatccaatggtttgatggcaatgttgtccttcgtatgttgtgatcactatcgatggatcatctgatgaacgttctactctcttcttcaccgtgcatctgctgtttgtgcatctatagtagctcctatatatcacaacaacaataagaaatataggttgcatatccgttaactaagagaatgatcaaagaaactgatgacttatatacgaccttgggaatg

SEQ ID NO: 23983 - DNA, 552 bp, Arabidopsis thaliana columbia
  unsure (1)..(552): unsure at all n locations
nnnnnnnnnnnnnnnnnnnnnnctaaaggaagattgatttaagaattttcaggtcggatgcggcgtgaacgcattattcggcctacggttcgcgtacagatttgtaggcatgataagacgcgtcagcgtcgatcaggcatcagcgcacaaatgccggatgcggcgtaaacgtcttatccggcctacgccagacttacttaaccatctctttttcaatcaactggatcaggatatggatcactttaatgtgaatctcctgaatgcggtcggcataaccaaagtgcggtacgcgaatttcgatatccgccgtgccagccattttgccgccgtctttaccggtcagggtgatcactttcattcccttctcacgcgccgctgcgatcgctttgatcacgtttgcagagttaccggaggtggagatcccagcagtacatcgccttcgcgacctaccgcttcaacgtagcgggagaaaatatgattgaaaccgaaatcattaccgacgcaggaaatatgactaacgtcagaaatagcaatcgccgggtagccggacgg

SEQ ID NO: 23984 - DNA, 523 bp, Arabidopsis thaliana columbia
tcaatggagaagctcaaagttgtgtgcctggatcgagccaagagaaacagtttgatgacacgagcaattgcttacagaacagaccaaaccagaagtcggctaaagaatgtttgccggtggttagccgtcctgtggattgcagtaaagacaagtgtgccggtggaggtggcggtggttcaaacccatcaccaaaaccaacaccaacaccaaaggcaccggagcctaagaaagaaataaacccaccaaacttagaagagccatctaagccaaaaccagaagaatctcccaaaccacaacagcctagtccaaagcctgagacaccatcacatgagccttctaacccaaaggaacctaagccagagtcaccaaaacaggaatctccaaaaacggaacagccaaaacctaagcctgagtcaccaaaacaagagtcgcctaagcaagaggcaccaaaaccagaacagccaaaacctaagcctgagtcccaaaacaagagtcgtctaagcaagagcaccaaaaccagaag

SEQ ID NO: 23985 - DNA, 586 bp, Arabidopsis thaliana columbia
gcttacattagtcgccaacttaaagggaagcagctacacttgtcaatttatgaaaaggaactattggcattcatctttgcagtcaggaagtggagacattatttgctgcctagtcactttatcatcaaaactgatcaacgtagcttgaagtatctattggagcagcggttggagtactccagttcaacagcagtggcttcccaagttgctggaattcgactatgagatacaatatcgacaaggcaaggagaatttagtggctgatgcattgtctcgagttgaagggtctgaggtgttgcacatggctttatcgattgttgagtgtgatttcttgaaggagattcaggttgcctatgagtctgatggagttttaaaagacataatttcagctctacaacaacaccgctgatgctaagaaacactattcctggagtcaagacattttaaggaggaagagtaagattgtggtgcctaatgatgtggagattacgaataagctgctacaatggcttcactggtcaggaatgggaggtcgtctggacgtgatgctctcacagagagtcaggacttgtctattggaaaggat

SEQ ID NO: 23986 - DNA, 540 bp, Arabidopsis thaliana columbia
cctcctgttctggaacttccagttccaatcgaagcatatagatccgtaaatagatttgtatgtatagccacttcagccgtgctcgtcatttctcgaaagtatcttttttctgggaacatgggtaagctaatgatctctttttctttttgccaagatttgtctagcgttctatgaagtcaaaagcaaacagccttcttggttcaccaaaatcgaacggttgtactgggaacaatggtacatcaatctgaatgtgcttcagcccactaagccccctgtcggaaagtctcaccattctaaactagttatggaccctggaggttcgattgatcaatttcctgttctcatctccaaaaattacatctttttattattataagagtgtgaagtgattgtcatgctctaatcaataactgtagaggcatcggaggagagaagttctagtaggacactgcttgagcaatcccttcaagaagtcttgttccaaatcataaaattcgtgaatgagaagaaggatcatgttcttcccattaacgatggtgt

SEQ ID NO: 23987 - DNA, 110 bp, Arabidopsis thaliana
cccgcttgagggcgtcgaccatgatgagctgctccatgatcgcctcgttgatgggcgccgcatggctctggatgacgaacgcgtcgcagccgcggaccgactcctcgtag

SEQ ID NO: 23988 - DNA, 490 bp, Arabidopsis thaliana columbia
catagttgtctttaattgctttgttttccatttctttgaaccgaagttttctaatttctaccattcaaggttctgaggcaggagaatgttgattacgttgttgctccttacgaagctgatgcgcagatggcattctgagctattactaagcaagttgatgcgagtatcactgagtattctgatctcataccttttggctgcctaagagtaagctttctgttacactttgcatgagatatatgcagttcatcagaatttccatttcattactggtatatagaattttaattccttatcgacacgacactagagtataattcaaaacttcaactgctaatttttatgtaatagatcattttcaaaatggacaagtttggtcatggtgttgagtttcaagcctccaagctacccaaaaataaggatctcagtctatcaggattttcaagccaaatgcttctcgaaatgtgcatattaagtggctgcgattatt

SEQ ID NO: 23989 - DNA, 593 bp, Arabidopsis thaliana columbia
ctgttcagtttagggcacttctcaagaaaatcgttacagctaaggagtctatgggagatatgatgaagacatcgtcttttgctcttaccgaagtaaagtatgttgctggtgacaatgtcaaacatgttgtcctcgagaacgttaaagaagctactttgaaggttcgttctcggacagagaatatcgctggagtgaagctgcctaagtttgatcacttctctgaaggtgagaccaagaatgacttgaccggtttagctagaggtggtcaacaggtccgagcttgccgtgttgcttatgtgaaagccattgaagttctagttgagcttgcttctctccagacttctttcttgacccttgatgaagcaatcaagacgactaaccgtagggtcaacgctctggagaatgtggtgaaacaaagctggagaatacaatcagttacatcaagggagagcttgatgagcttgagagagaggatttcttcaggttgaagaagattcagggatacaagaggagggaagtcgaacgacaggcagctaatgctaaggagtttgctgaggaaatggttcttgaagacatctctatgcagagaggga

SEQ ID NO: 23990 - DNA, 661 bp, Arabidopsis thaliana
agtcgactctagactacttcttgtttttgtaccagaagaatcaaagcagcctgcacaaaacctcttgaagtcgagggtttctcttgtgagttgtcttcatactattcccttgtttatgtcaagttgctttcgtcttagtttagcggatgagaggaaccaactttgtttgttgttgtcttttgtacagattgaggttgatgagattggaaagagttcaagtaacaaccagagaagtgactcgagctgttgtgcatcttcagtaaccagtgatgatggacaggggacaagagccccgagtgtggttgcgaggcttatgggtttagagtctctaccggtaccaaatgtccaggaacctcgacttaatcccgatcttgatccgttcttactcagaccttcacaaaacactaacagatgggatgcatatgagaatttgggttatgtaaatctccgcagtgactatgatggtatttcttgggaccatttggattcaagaatgaacaaggagtgtaaccggcctatcgaccgctttcaaaccgaaacgttacctccaaggtcggctaaaccaatccctgtcacccacaataggctcttgtctcctatccggagtcctgggtttgttcagtccaggaaccctgcttctgtaatggaagaagcttcgaga

SEQ ID NO: 23991 - DNA, 859 bp, Arabidopsis thaliana
cctacagcgaaactctttttgagtccagagcttgagaacttatatttcaaaactgacatgcatctcaacatccaaatacttctttattggagtgtaggaaacatggcggcttagagtgatagaatactggaaactgctgaaaccaatggtgcaaaagaactccataagaaacgtgatggacatgagctcaaaccttggcggtttcgcagctgctctaaacgataaagatgtatgggtaatgaatgtcatgcccgttcaatcctctccaagaatgaagatcatttacgaccgtggccttatcggagccactcatgattggtatgtaaatgacttgatctcgaaacattgtgcataatccatatgatgttaaacgaaattcccttgcaggtgtgaagcctttgacacatacccacgaacgtttgatcttatccacgcatggaacaccttcacagaaacccaagcacgtggatgcagctttgaagatctgcttatcgagatggatcggatactacgcccagaaggatttgtcataattcgtgacacaactgacaatattagctatatcaagaagtatctgacattattgaaatgggataaatggtccacagagacaactccaaaaggtgatcctctgtcgaccaaagacgagatagttttgatcgccagaaagaaactttggagcttgcccgccatttcagtgtcctgaaatctaacagtcaacaggcgaatgaatgagatttacagcatcagaggcgcgtagctgaggaaaatactcgagcaatggagaagtgtaaattacacgacaatcatgcctaagccctcttgcctcctggctcgtgtactcttaggcaaatactgc

SEQ ID NO: 23992 - DNA, 861 bp, Arabidopsis thaliana
gtttgggagccacgcccaaatatcatctgctcctgttttacttggtttcagtttgcagattgtgctttcatactgaggtaggacttccctgatgagagagaggttccactccagagtaactggatgtctgagatcagctactgttaaatcttgggtcgcagctgtaggaggtcccattggggccaaagcctcagtaagagagagccacggggagttccagacggatgtggtagcaccggagccaataatcttgcctagatagggtttgagaaggtctctaccaacgcaaatactgcgccaccggtgggaggctgcagcaggcacagaacatttcaggaaaggggagttatggcagtatttgcctaagagtacacgagccaggaggcaagagggcttcgtcaaaatacgccaactaatcttagccaggagcgccgcattaaaggtgctgatatctctgaatcccaaacctcccttcttaaaagatagagtcattcgtttccaagaaatccaactcattttctttttctctgaattagcatcccaccaaaaacgagttagagccgattggattcgtttatgcatagagcttggaagttggaaacaagtcattgtgtaagttggcatagcagctaggaccgatttcagaagagtcatctttcctgctgaggaaaggaaccttgaagaccaacttagggctctttgcttaatgcgatcaatgatgaggctaaacaaatccttctttttcctgccaaaaagttcaggtaatcctaaatacttaccctgacctccctctttttgaatacctaggattctctttgcttgatctttaatttcttgttgagttcgagaagagaaggtgat

SEQ ID NO: 23993 - DNA, 1511 bp, Arabidopsis thaliana
gtctttccttttttttcttatgccgaaacctcgggattcattacattatagatacttattttatgtctttgttatcttcttttatttttttgagctccatccatattgatttagtctaatcaacaaagattctatcatttttgtatttgcaattcaatatggttatatattacataacatatatatgttcttttttttttcatctttggcttaaattttcagaaatagtcgaacggtcgattcttttttttttttttactttcatgaaaagaaatttattattattattattgaaacttagaattctacaatgtgcaatggaaaaaaattataagtctacttcgtaaatttgaaattctaataattctatactattctatgactatatagatatatatatagaattaaggttatgttttatttatttaatgatgaatgatagtcactatttatgtgagctatattctgttctagaatatatagaatatcattaattctaactagataaggaaaaatattaatagaatagttaattgatacgatctagtagtttagtgaatttgtatgcatgcgctattttatttgagcccgcttagctcagaggttagagcatcgcatttgtaatgcgatggtcatcggttcgattccgatagccggcttttccatattttttcgtttttttttacatgatttttaatgtactttcaaaatcaaagaagattgaaaagacttctttgacctttttccaagagttaccactccatttatattatgtcatataaacttccatattaggaatatatattgggtaaaagagtttgatctttgcaaaattaatcaagaaaataaaggaaaatttttgtgatttagttgatttatatatattgtatatacaataaaaaaaatctgtatattgagagaatatatcttcttactctttgtattccaatagtggagtgtatttcacgtcatttatcattatcatttagttcagttttaattttatttagttttgtacaatttcaatcaaaaaaggagtctttatgtcacgttaccgagggcctcgttttaaaaaaatacgccgtctgggggctttaccgggactaactagtaaaaggcctaaggcaggaagcgatcttagaaaccaatcacgctccgtaaaaaaatctcaatatcgtattcgtttagaagaaaaacaaaaattgcgttttcattatggtcttacagaacaccaattacttaaatatgtgcgtatagccggaaaagccaaggggtcaacaggtcaagttttactacaattacttgaaatgcgtttggataacatcctttttcgattgggtatggctttgactattcctcaagcgcgccaattagttaatcatggacatattttagttaatggtcgtatagttgataaccaagttatcgctgcaaccccgagatattattcagtgaaggatgacaaactctagactttggtcgaaacttcttgatcatctgccctgaggaat

SEQ ID NO: 23994 - DNA, 834 bp, Arabidopsis thaliana
ctttaaatgcaaaaatcgataatgacatcctatataatattcaaccttttataaggttatttattttttagtgattcccaattaatagtatagtttcattcgatatttcccctttagaagacaaataagcacattttaattacgttttagatgtactagtaccttaccccatccatctagaaatcttggttcaaaccttatattaccgggtaaaaaatgcctctctttgcaactagaagaatttttctattttaaaataatcaatatgaatccaagatttttcttgttcttatataattttcatgtgtatgaatactaatccatccattttttttctttctatgcaagcatttataatcggcttttttttttgtgcaaacatagttgtattcattcagacccaaaaaaaggggttaaagattacaagcccttccactttaaagtgggacataatgaacgtacagaggaacaagctgacatggaagctaaaccaaacaaaaaagtaaacaacaagctgtggcgatagagtcatgaaaactcggagacaaaggctaaaaagcaatatgccacaagcgagttcatggtgtgtcaaaggcacgtctgcgaatgattcgaggagattacaagtagtcactatcgatatatcatgtgacaatgacgttgaaaaggattcttttacctcaacggttgccggcacgaaccgtgacgaggtagttagaagtcttggatggttactcaccttgcaagtgggaaaccatgtaaagttcgaaaagagagttctctccatatcgaaggagtgtagtgaaagtttcgccaaagaggagcattgctgta

SEQ ID NO: 23995 - DNA, 540 bp, Arabidopsis thaliana columbia
tgcccaagtctagaaggaggagcccatgatgtcgggatctctttccatgtcggtttatctgttgtcagatccaacaagaaggtgtcgctgagaagcactccagcgtctgtgcagccacctgagacaaccagtttagagccctcaatggtgcacgagctgtgccaagatcttggcaatggaggagttcctcctgctacttccttccatgtgggatgcttagcgtctagatcaagcacaaatacatcattaagcaatccttgtcttccacaccctccaaagactaccaaccacgacccgttgagacacgagagtgtgtgtccccaacgtcctggaggcgacgacgtcaccctcacacgctgccactcaggacactctgcatcaagattgagaacaaaagtatcatccaatggctgcatgttaaccccttccccaccaaatagcacaagccggtgcccaacagcacacgcgctgaaattgcagcgggaaggttgtcaatccctcaacagtaaatttacgcaacacacagcttcaagagtggtg

SEQ ID NO: 23996 - DNA, 493 bp, Arabidopsis thaliana columbia
ataactcgtatcaagaagattatgaagtatgatccggatgtgactatgatagctagtgaggctccaatcctcctctcgaaagcatgtgagatgtttatcatggatctcacgatgcgttcgtggctccatgctcaggaaagcaaacgagtcacgctacagaaatctaatgtcgatgccgcagtggctcaaactgttatctttgatttcttgcttgatgatgacattgaggtaaagagagagtctgttgccgccgctgctgatcctgtggccatgccacctattgacgatggagagctgcctccaggaatggtaattggaactcctgtttgttgtagtcttggaatccaccaaccacaaccacaaatgcaggcatggcctggagcttggacctaggtgtctggtgaggaggaagaagcgcgtgggaaaaaaggaggtgacgacggaaactaataagtggaatacgtgtaggggatttcaagggaatatgtagtaa

SEQ ID NO: 23997 - DNA, 556 bp, Arabidopsis thaliana columbia
cgccagtctgcgtcattcgagaatctgaagtcatgaataagacatctcatttcaaatctgaagaagaagtggttggatagcaaaatgtaaaagaggtgatattatctaacaacagagagactatagcattttggtggttgtaacgtgtgaacacttgtcttattccattgaccgcctgagataacttgatcttatagcccaaagctgcttcccaacagcttccatgtcaggccgctcttttttagtaggagcagcacattgaaatgccaaactaaacatcttccttagtatcttctcatctactcgttccctcgcgttaggatccactagttcaaaaactcgcccttcattgtacttgtcgaatgcctaccataccgcaaactcgatttagtaaaggatgatgtaagttggagaagaaacattataaagtggcttacccatcggaccgtaatcctctcatcaggaagtcgcttggcctccactggacgacggcctgtgagtatctcacaagcaaaatccgaacgagtaacatcgcttttacagtgagatgaaagtt

SEQ ID NO: 23998 - DNA, 518 bp, Arabidopsis thaliana columbia
cgccagtgtgcgagaagctttagccaaatgccaagaactcgaggagcaattacaaaggtaacagcaaactaatcattactctctttttcaatgtagagtctctaaaaatctctaacttcacttttctacaaaacatcaggaacaaccaaaactgcccgaattgttcagtaatcgaagatgatcctaaaagcaaacaggtaaattttccaaagataccaatttattaccttacctaacagagatttcggttttttaaatttataattcatgacattgaatgtttttacacaggacaatgaactagcggctgctgcagagaagctagcagagtgtcaagagactatattacttctcgggaagcaactcaaatccatgtgtcctcaaacagaacaggttgcttcttctccaagccaagaacaacaagccctaaaccctgaagaagaggaatacgcaacttccacaaatcctcaagacagcaaattgagttcgccttcagacaaggatacaccatcgatgaa

SEQ ID NO: 23999 - DNA, 389 bp, Arabidopsis thaliana columbia
catctggctgatcctgccgtttgtctggcgtcgcatggtcattcctgccagcgggcatgttgccgcacaggtggtcgcactgctgattagcggtggtatcctgacctgggccggatttaacgatccgcaggagatcaacggcaccttaagcgccgatgccacacctgctgaagctatctcccccgtagccgatcaggactggcctgcctatggtcgtaatcaggaaggtcaacgcttttcgccgctgaaacaaattaacgccgataacgtccataatctgaaagaagcctgggtgttccgtactggcgatgtgaagcagccgaacgatccgggtgaaatcaccaatgaagtgacgccgattaaagtgggcgacaccctttacctgtgta

SEQ ID NO: 24000 - DNA, 305 bp, Arabidopsis thaliana
agaactcaaactctcaactggtcaaacttgagaccgttcaactgagtgtcccacacatcatgaaacagcggtgagtttgtggaatccggtaacacaacagctgaagaatcctgggaggatagaatgaatggttgcttgtatgatccggcaagagactggaaggaagagacttgttgatgtcagctcatcagtttccaggaaagagaatccatttattggatcagactgtggttggtaaatctgatgagtaatgtcaagacattgatcagcttgtacaggcgacgaagcacccggtttctgaagta

SEQ ID NO: 24001 - DNA, 576 bp, Arabidopsis thaliana
cgatggatgcaaaaagaatatagatgattatatgcttcgttgtaaagcttgtgactttgatttgtgtttgtattgtgctactttgccaaaaaagatatggcacaggaatgatgggcaccctctcactttatgttgtgaggaaaaggaagaggcgagcgataaatattggtgcgacatttgtgagaaggaattagatccaagtatatggttctatacatgttttgattgtggagtcaccttgcatgctcagtgtgtattaggagatttctcacgtctcgtgctaggacaaaactattggtttggggaaaaagtcaagtttggggcggttcctaacaatcgcaacactcggccattatgcatccagtgtcaatctcgatgcaaggtctccgtcatcctaaaggaacgtaatgaatacaatcggtatatatgttcccgttcatgtttattgagttatttgggtgaaaaaatttgaacttatgtttaatgatataatgagtggttgtagctatcatgattgtattatttcattagcgtttctatttttatttccaaaaactgatatgtaatacagtgtta

SEQ ID NO: 24002 - DNA, 1010 bp, Arabidopsis thaliana
aaaaaacaaacaatttttacaaaaatgttttaaaaaaattaaagggtaatactaactttatttttattcctatcaaagagaataatagaaaattactagttaaacccagataaaggatataacctatttttgagacattctagtaattatatcctatatttgagacatgcctttaaattaataaacataattatagaaaaatataatttaacaaacaaaagattttctattttgtttgataatgcatccgctaatattgcttccattgatgaattaataaataattatagtcttattttaggtggaaaacattttcatgttcgatgcatttgtcatgttttaaatttatgtgttcaagatggtttattggtttctcaaaataatcttatttcaccaattaaaactacgttgaattatttatggggtcatccacaattaatgaaaaaatggtttgattttgtaaaatgcataacatatcccccaaacagttttctcgagatgttcctactcagtggaattcaacatattatatgcttgttgattctattggttataaacatttattgtgtagttttattcaacaaaatcgcagttctttagcttaatggcccactcaacatttttattatccggtgtttattatcctactagtcattttttttttattaagaatcccaaatgggcttatggaagatgggccaaacgacaaatacacggttacaaaatgaaagaagcccaaaacaaacccagcgaaaacaagatcagaaccgtgcggtacaccggaaacacgaacatcgccttctagaaccgacgctagcaaggacgactcctatgtggctacgacctcgacatcaaacttttggcttgagctagcgaaccccgccgcaaatcaacgccaagaacaagcctaacctggaacaatcctttcggaaaagggagaccgccacaaccgagacccaatccctcctctccccaacctagcaagacgaaggattcgaaacttaccccca

SEQ ID NO: 24003 - DNA, 535 bp, Arabidopsis thaliana
ccatgaaagttcttaagcaaagaaaggaatacaaatatgcatctgtttggtctaattcttggatcaccttaccttaagtggtttagatttatcatatcgcccaccaacaggattagctgctgcaagaattgatgtcctagcattcaaggttgcttgtataccagcttttgtaatgcttatcgtctgctgctccattgcttcatgaatagcaacctttgtgcccaaatgcaataattttcatcaaacacactctaagaaacataatcgtctgtatagtaacaagcaatgatgctgacttacctgatctttgatatccatcttgtcaaactcgtcaatgcaacatattccattgtcagcaagcattaaagcaccagcctgttgaagagtcagataaccttaattagaaaaagagcatagaaatcaaatttacaaagaaaggctatccttctttaaagtggttataaagtttaggtaacttgaaaactctaaaattacctcaatgcagaattcaccagtttccggttcttttgcacag

SEQ ID NO: 24004 - DNA, 558 bp, Arabidopsis thaliana
taaggcatgatgtattatacatcatgtatagcacacttgcatacctctcttctaaatcgcaagagatcacattattgacaaagacatataacacacaagaagagtccttacacgtacgcatacaataactctcccacacataagccagggagacaagtccctaaccctcagacaataggtattggtcaatctcgttaacacattcgacgaagaactgaaggagcctctctaggtgagccaccttctcatcaattctctcatacttcaagttccacttcaccacacttccagaccctccttgcttagggcttactttcatcgttttcgagaaaatattgtactcttccttcagaggtccctctaacaccctccactggatcatattcatcttcatatcaatcgcctcaatcatatcctttgacacttttggctctccatctacaccagaaaagtttacaaatcaaatatatcatgtttttctttctttcccgtgaaatccagttgtctagtatatatcacatagttgaagggttaatcttcttgcataaagtacatata

SEQ ID NO: 24005 - DNA, 559 bp, Arabidopsis thaliana columbia
cccgagcatttgtttctgcataatattattgatattagttcacttttcaagttattattatgacaagttaggttaggaaaagtgttgtaacctgcaagtatctccggtgatgaaatcgactaaaccattgatgattttcgtccatagtatcctgatcgaatcaaagaaacctttaggttgagtctctggaatttgaaatggattagtaacctgcatgttgatgaaaatgatcacttaattatcaacatcaacattaatcaaaaccgtttgaattccattgtaattaatgaaacctgagttccattgtcaagtacggtagccgttgtactaaattgacactcggctcggtctacttcgctgaactgagagtccttgagtatagctacaaacaaaaaaaacagaggattgttatgcaaggaaacaggcaaggtaaagggaggaggtgagtctttttttataaggaatcacctgtgcatatatactttgcagcctgatctttcgtcgggtacagcttaaaagaccgagtagtaaccgctttcggttttataatgaaaaattg

SEQ ID NO: 24006 - DNA, 719 bp, Arabidopsis thaliana columbia
atacaaataaaatggaccagtttctgaagtcaatacagatctaatagtgtaggtaactcactcttcaagtttcagtcaatgatgttgcggctgttcaattggtcctcgaatcggctacacgaaccaactctcatctctgtgctcatatcgttctccggcgccggataatagtctgctctaagctgtacatcccttaagtttgggattctcaacaaaaagttcatgaaatgctcatgagctgttccatggatgaacagcttcctcaaagtcaggcactcttgtaacagacctgctccaggaagcgagagactcctctggttaacatctctatcctgtggtggccaataatcaagctcgctcaagctcaagcttccaattccggtcaagaagaatctttcccataaactcaaatccatctgcattggcggtgcggtcagtgcgaaaccgattgtgtccccgcaatctaactgcatctttgagagctttgggtagagagcgagacaacttaacccaaactctggctcggctggcctgcgtttacctctgcaatctccttctatcttgatcctaatctcttccaaattcggacagtcatctagtcctgtcataggtaatggcgtcaaaaattctccaacattgatccataaagatagatactccagtttctcccatactctatcttcagaacagaatccattcacatcactagttgagcagtg

SEQ ID NO: 24007 - DNA, 403 bp, Arabidopsis thaliana
ggtttaaggctacactgagcttagcttgcaaacagggaataacagaatagtttgagaacaagaaggccaaagaagggactgtactgaccaagagcagcaagagcttgcacttccatcatagctttacgtctgcaaaaattcagctgtgattacttgaacaaaaacgatccaaacaagatgaactattttcagcagatatgtgtctttctcttactaagaaaactcgaggaaattatacctctctgaatctagatacaactttcttgtgctgtgtttcacagcatataggcaaccgtccattctctgcaacaccttaaatacgcgactgaaatgtccagcaccaatttgctggagaaaccaaaccaaaatatgtaagaagaagcgacataattccgtcatgatc

SEQ ID NO: 24008 - DNA, 433 bp, Arabidopsis thaliana columbia
gccagtgtgctctaaaggactataaattcaaacaaatcggccagcgagtaaaactgctcatctctagtgactgtcaacgctaagtgggataggggaaccgccggaagaagccgtcgcgctgcataagttcctgttctccaaaaaagcgccagagctggaaaacaccgcgtttgccgtgtttagcctcggcgatagtcttatgaatttgtctgccagtccgggaaagatttcgacagcaagctggcggaactgggtggtgaacgcctgctcgaccgtgtcgatgccgatgttgaataccaggctgctgccagcgagtggcgcgcccgcgtgagttgatgcgcttaaatcgcgtgcgcctgtcgcggcaccttcgcaatccgtcgctactggcgcggtaaatgaaatccacaccagcccgtacagcaaagacgcg

SEQ ID NO: 24009 - DNA, 635 bp, Arabidopsis thaliana
  unsure (1)..(635): unsure at all n locations
gacatttctcgacacacgacgtgttgatctattggatctgacctagggaaaggctgttttcagtttaagtttgattatcaggaggatatgtagaaagtggtagataatagaccttagcactatgatcagtggatggtgatcctccagaaatgggaaccagttatctcgccaacctttccctctttgatccccttctggatcgagctccaaggtctccccanacattactagcaacctgagatgttaaagactattggggaagagctaggtgatattatggatatggaaataacctcatcttcagctaaaatcaaagttatgattaatggtcttcaacctgtaactaaagaaactttggtggatttccatgatgggagtgaagctcctgtttcactgaaatataaaaatctcaagaatcattgccatcactgcctttgcctctctcatgagacgaagaattgcccgggggtgctagcagtaccaggaaagcctacccatcagaattctccaacaatctctcaggactcaaaaggaagctctataaattattatacccccaaagataacttcctagcaccacggagttcccaccatgaaacttcaaactccaaggaagttactaacaaccggaaaag

SEQ ID NO: 24010 - DNA, 581 bp, Arabidopsis thaliana columbia
  unsure (1)..(581): unsure at all n locations
nnnnnnnnnnnnnnnnnnnnnnnctaaaggcgtggatctgactggtaacgcggcacgaggatctccagctccccacgattgatctcgttgatcacccacatcagcggcacgtaggcgatcccggcacccgccgtcagccagcgcaccagcgtcatcggatcattagtcacaaatcttccttgtgggatcaggcgagtcgagatcccttccggtgcgatcagttcaaattcattgtcgggccgcacgctgtattcaagccatgaatgactactcaaatcggcgggtttttccggtatgccgtattgtgtgagatagcttttcgcggcgcacaccaccattggcatcgcgcccagacggcgggaaaacaggctggaatcctgcaacgcgccgacgcggatcaccacatccagaccgtcggcaatcaggtcgggggctggaattccggtaaccagattgacgctcaaacctgggtattctttcagcattttggctgtcagcccggcgagaacattttgtgccatagttgaagaacagccaatgcgtactgtcccgatggggggtgttattgaaggcatacagtt

SEQ ID NO: 24011 - DNA, 469 bp, Arabidopsis thaliana columbia
cctcctcttccttcttccttttcggccttcattctctcaaacatcgcctgcccacaacagtataacccaaccaacattgttttactagaagatcccatacaaaaacgacccatatgcatggtctataaacaaaagtagtataatagccagagaagtgtaaactgaccttcgtggcacgtggctcaacaaatgacttattagcctcgatcataaagaaagaggacaagaggttaaccccttgccacatctccgttgcatcggtaaggagtttcctccgcctgctaagcacgtgaccaaacaaacccacaaggattcccacagaggtcgccttgaagtaaacaggatacagcttactctgcacaacaccaaactgttgcctccccaacactgaggctaaaacgtagcttgacacaaacgtcacccacacggaagtcccaaatgctgccgctatccccgtcaaccccacaat

SEQ ID NO: 24012 - DNA, 589 bp, Arabidopsis thaliana columbia
tttaagatagagaaaacggagaatctgataatagctgaccacatgaatggtaagcaggaagagttgatgaaagatccggattcgtacggtcgagatagggctaactatgctcaagccggtttaaagccgatcgttcaggcctatcttggtcctgacctaactcataagctcttcaaacggtacgcagttagagcagctgccgacaaagaaattctcaacaactgtttctatcatatgatcgctgtttcagcggttagggtttaatgttatcgatatatgtacataacatgcgtagtattataaaaagtatttcgacgacgaaatggtttgatgcatggtaaaataagtaattatcatttatcacactaggtttcttatatttcagataaaattattgtgttcccataacttttgaaatcttacacctttctcctatttattgaactggataaaacaataatatttgagaaaagaaaattattcaaagaattgatcggaaaagtgaaacaaaccatttacaatatcacacagtacgtgaaatatgagaaaaagagacctcgtgaccacaatgacactttcccacgtgaca

SEQ ID NO: 24013 - DNA, 282 bp, Arabidopsis thaliana columbia
ccagagagtcaaatgaaccccaatttgaggtgacaaactacccatgctcagaagtagactggatgcacagaaaacaacaatacataccattacaacagcgaatgcaagcaccagatttcaccttgcacaagttacacaataacttcctccgagtttcttttatcccaggaaaattcaagatgggctccatttttttcaagtcttctatatacacctcaggcatccacagagaacaaaacagatgagcaaactccgccggcccaccattctcagtttttgaga

SEQ ID NO: 24014 - DNA, 578 bp, Arabidopsis thaliana columbia
ccgcctcgtctaattcacctacagccaaatcaagcatgtctttatcatccgaactttccgacaccagagatttcaatccatcaatctcctgccaacagaaagtaaacctaatcaatgatgatctttggaacagatatataatacggtaaagcaaattcactaccttttgtttggccctcaaatcattgatcagcaacattgaatctctcagcttccgaagttccttattggctcttgaaaactcctctggtgagtactcaggctgtcttcgaacaacggaaaacacagtttatcgatcatgtcaaaaaatcaacaaccaaaaggaaagcttaaataacaacaatgagcttaatctttgggattacctggttgataagcttctgaaggacagcatttcgatgctctatcgccgagagcctctgatccattatcttaataagatcaggagacaactgaggttccattcctgtcattatacatctcaattcaatcaaatactaaactataatccaatgcaatgtttattcagatcatatttacgtacaggtggtgtacagacgaatcatatttgacgagag

SEQ ID NO: 24015 - DNA, 610 bp, Arabidopsis thaliana columbia
  unsure (1)..(610): unsure at all n locations
gttctgttactaaacttgagactgtggcttcctcttcagtgttaaggttggatgatagaagacattttttgaccttctcttacaatgactacacgaagaaatggcgtttccaggcatcagcggtttgagagttttcgcggtgcaggaccaaattggatcttaattgctgggggtgctttgttgagtacattgtccattcgttttggctacaaattaaagcagtctattgactccaaacctcctcattccaatgccactggtggattaaaacgtacttatctggttgtttagtgcttacatgtcctagaattcgcttgtattctctatcttattggtaggttgtcttgttgtgcagctaatggaacaaccgacagaggaagatttaagggctgctgcttgcattctaatgcatcaccctgtgacaggcataatgattgttgctttcactgcactcccggtgagagtttgtgagtttgttattcttactactgaatttgcttatacataacttcacttcacatagtctcttactggggtttgactttgtggtatctttgaagtgannagagattttgggagatgctgcaaatagttgacagaatatggagat

SEQ ID NO: 24016 - DNA, 293 bp, Arabidopsis thaliana columbia
ttacagtcagattacaaggcagttcaatctctaaccagagctaaagataccattatcttgtactatttcaaatactagtatccagtgaacgggaactcgcctcagaaactacaatgtcgtcactcgacatgcgtcgatcttcacaagtaacttctacaagtcactaagcaccacaagactcaacagctgcatgccgtagtagcgtcggaagctccaccataggcactcacgcgcccctgtgcttagaccgaaccgcagctattaccgacctcgcactatcaatttcagccgct

SEQ ID NO: 24017 - DNA, 523 bp, Arabidopsis thaliana columbia
taaaaaaacatcttttattaaccttttggttctatctccaagaatcatgtaatcaatcaaagttttgatactctttggtacctgaagaatctgttcactgcttctcaaactactctttccaataacgcaaaccgtaccgccacttccgcctccagtaatcttggccccgtagagagtcccgttctcggttttcgagctcttcaaattctccatattctgcactaatcttactaatctgtctgttccatcagagccaatcccacacgcactgtagctgtcatggcactgccaagcaaacacacgattaacaaacggttaacttactagcagaactcgatcataagaaccgcgtttgatttgtaaaactattgattcacctggtacataagctccccaagaccaatgacctgttcttctgaaggagttgctgtcaacaatgctttgaaagcctgagaaaaatatcacttttgttacagtgccacaactaaaagttaatatcattgaactgactgatgatatatat

SEQ ID NO: 24018 - DNA, 464 bp, Arabidopsis thaliana columbia
ctttcaatcatttccaggttaatacaggcgttaaggacaacaagatgcaaagtttcttccttgcagagacactcaagtatctctatctactcttctcgccgacaacagtcattcctttagacgagtgggtattcaacaccgaagctcatccacttaagattaagtctcgaaacgatcaggtaaatctcaaacaatccaacaaagtactgctacgaaaaccggcatttagaatacgccagaggcattatggtcggataacaaagaagtaaaactccctggagaggtcacagtgtgattcgtaggaggggctctatggatatatcttaacagagcaattggatttagcttggctattcaaagacccttttatttaagaaaccatttttggaaagatttcaagatatagactattgttgtactagttgggatcagacccaaacaggttcacacagtttacacttgtg

SEQ ID NO: 24019 - DNA, 350 bp, Arabidopsis thaliana columbia
taatgagcggggaattgaagtattcttctaagctacggattttcatgtttaacgaccttaagtgagccactaggaatttcagaccagagtctcttctcggtgagggtgggtttggatgtgtttttaaaggatggatagaggagaatggaactgcacctgtcaagcctggtactggtctaactgtagcggtctacactctgaacccagatggccttcaaggtcactaggagtggctggtaatgatcaatttccttaccttgatactggctatggcttcgtgctttggtttctatgaacaatgttgatagttctgctcttatcgagcaggctgaaatgaacttccttggaaa

SEQ ID NO: 24020 - DNA, 584 bp, Arabidopsis thaliana
gatagaggaggagagttcgtttcacaagagttcaacaatttctgtcaagaatcaggaataaagcgacaccttacagctccatacacccctcaacagaacgaagtagttgagagaagaaacagaaccccattagaaatgacaagaagtattatgaagcacatgcagatgccaaattatttatgaggagaaggaatcatgcactctacgtacttgttgaacatgatagctacaagatctctacaagacaaaactccatatgaagcttttcaaaagaagaaaccaaacattgaacatctcaggatattcggttgtattggatatgcgaaggtggaaacaccacacttgaagaagctagatgatagatcacggattctagttcatctaggcatagaaccgggctctaaggcatatcgattgtttaatcctgagaatcaaaaggttgtagtaagtcgggatgtcgtatttgatgagacaaagagttggaattggaccataaagacgcggaacacagtcacaacggaaacttcagtctcacaattggacagtttggaaatcacgagattgaaaacgaggctgagatagag

SEQ ID NO: 24021 - DNA, 825 bp, Arabidopsis thaliana
tgcctgattccttctccccataaataatttggcacatgcatgtgcttcataatacttcttgtcatttctaatagggttctgtttcttctctcaactactccgttctgttgaggggtgtatggagctgtaagatgtcgctttattcctgattcttgacataaattgttgaactcttgtgatacgaactctcctctcctatactggtctgaaagtttgtattcttgctcctgactcttgttccacgagactcttgaactttctaaacttgttaaaagcttcactcttttctttcaacagaatagtccacatgtacctagaatgatcatcaatgagcacaaatacatacctatttcctgcagcggtgcttggcgttataggaccacatagatcaccatggactagttcaagaatcttggcagctctaaatagagtggcttttggaaacgcaagtcttgtttgctttccaagtaaacatgagctgcaaagttctttttctatgcttccaagtgagaatccttgaaccaactccttttgcatcatcgatttaattgtatcaaagttcacatgtcctagccttgcatgccatctacttgattcacttattgttgttaagtgcaaacgtgtagctccttttattcccattcttactttgtaaagacgattcttcgatctacacgctttgacaagtagtttcccatcacgatcatgcatcgttagttgatctcctttcatcataatgttgcagcctgattctgtagcttgtcctaaactgatgatgttgctcttaagatccggaatgaaatagacattggatactttttgttg

SEQ ID NO: 24022 - DNA, 568 bp, Arabidopsis thaliana
taatatcatcggtaaccaaataatatctcaaagagattttaacataaatgtatttttgttgcagaaattatccaaaacacaaaaaccctaatagaataatagttgatgatttaattcgaatctaagcacgctctccacgaatccttcttgccaattgaacatctttaggcatgatcgtaaccctcttggcatgaatggcacacagatttgtatcttcaaacaaaccaaccaaatatgcttcagcagcttcttgaagagctaacaccgcatggctctggaatctcagatccgtctacatcaccaaaaacgaaacaattataatcaagaccaatcttcttcatcaatctaggaataactaatcaatttcttacgataactgacagacaaaaattgtaccttgtaatcttgagcgatttcacgaacaagacgttgaaaaggaagtttacggatcaacaactctgtgctcttctggtatttacgaatctcactgattcataaacaggaactactgatttcacatcatcgaagacggaatgatttcagaacagagattgtgattttgaagagg

SEQ ID NO: 24023 - DNA, 558 bp, Arabidopsis thaliana
ttgaacatctttaggcataatggtaacctctttgcatgaatggcacagagatttgtgtcttcaaacaaaccaaccaaatatgcctccgcagcttcttgaagagctaacactgcatggctttggaatctcagatccgtctacattgcaaatttccaccaattatttatcaatctttttcatcaagttaggtataactaatcagtatctagggtttcgatgattgaaagacaaaatctttttaccttgaaatcttgagcgatttcacgaacaagacgttggaatggaagtttacggttcaacaactctgtgctcttttggtatttacgaatctcactgattcatcaaacaatagtcatcagaaattgaagacgatgagaagattgtgattcgaaaagaagaaaacgtgaaagttaccgaagagcgacggttccaggacggaaacggtgaggtttcttgactcctccggtagtcggtgcagatttccttgccgccttggtagcgagctgcttcgtcggagcttttcctccgtgtgattttctcgcggattgcttcgtacga

SEQ ID NO: 24024 - DNA, 500 bp, Arabidopsis thaliana columbia
agcccacctcttaaactctagccttggcattatgcacataaacatgtatgtacgcgtttgagttgactttaccgtacagacagacagttttcttcttgaccgaggcttgatcttcttggtagacattgacttgatcttcacggctcttcccttggcttatttagctttccttagagccacaattcttgccttcattagcctttgatgaggaaatatttggccttgtccttatgacttcggccttgaggcctttctacttctcttctttattggaggtgtctcggcctcatcggcctctctctccatttcctcacacacactaataacatattgtctcggttcaacgttctacctaccaaattaaactgcgtctacaccgttagagcgtgccttgaatcccacgtgtaattacgctatagagatagagaatagtaagaattgggttcatggtttattgactgtgctttagacaaagatcgatgcttaccatgaggggaaaa

SEQ ID NO: 24025 - DNA, 643 bp, Arabidopsis thaliana
cttattaaaattatcttggcagttggaacacatctgttttatatggtaattctgtaaaggagaagtgtagattaaggacataaagctctaatgttgaacctatatactgtacattgtaaatcattcccttctattaatgaaatcattctgctgacaattataaattgcacataccaaagaggaagtagtcgaggctcttgttggggacaaactcgtaaacaagtattttctcttctccttctagacaaaacccgagaagcttaacaagattcctatgatggagttttgcaacaacaacaacctcatttttgaattctcgtgcaccttgtctcgatgcttttgacagcctcttaattgcaacttcagtaccgttaaggacaccctgcataaattgaattagacagcatatgtcatcccattgtctagatcccttctgcaaatttttttacagaaactaaagatcaattaggtgctcaaattttttataagatgataccatgaaaacttctccaaatccaccgcgaccaattatgttgcctccgagaatttatttgttgcatctcaatcgctttgaaatcgaattgcagtgagtgtgtaatggtgatacagtgctggatctgcacttaaaagtgtagagtatgat

SEQ ID NO: 24026 - DNA, 537 bp, Arabidopsis thaliana
ctggaaagtttttctctatgatgttattcagtgtcacactgccaacacaaagttgctttagtagaagaattttaaacattagctacaattacatatataatagcatggagctacaaggaaactagagagagtgaaatataatttacctgacagcgcatgttcttggagtcataaaaatgacagttcgacatagtggacatttgttgcctatattccacaaagcattaataaacaacacaatagtaaaagaataattttccaggagtaaacaacaatcaaccatataaacccaccgcgatccattgactgaaagaggcatgatcggcagaatgtatgcccacatggagttgtagcaggttcgtacagcaatttcaggcaaacagtgcaatcaaaatcatcagaccgctcagccattccatgggttttacgcatcgaattaggcatcactttctccaattcctgaagattggatcgtagaggaccgcttcatgcgatcagaaagaaccccaaacttaaaaacgacacattcagttaggc

SEQ ID NO: 24027 - DNA, 481 bp, Arabidopsis thaliana
tcaaatgcatatatatgtcttaccgtgtcaatataatgagtaaatatctaaataatacaagaaatacttcgaataatgttcttaagtacctcaacaattttttctgctacagttccgcttcagtatattctaaagtattacaatatctcttacatacataacacacaaaaaaactcccacaagagttacgtatttattaagttataaacagaatgttaccgagaactccaacaaccacaagatttgccacggctacgatcctcaccgtccatttccctggaaccgccacgtgtgaagacgaggacgtttgatccgtttggtgaggaggttttctaaagtagtaagggaagtacggcaaaatagcattcggcggtggagggccatagaagctgctgccactactgtctccgccaccatacggtggagaagggtagttaggtatattcccaaccggaggagggtaatttggtaaattcgggga

SEQ ID NO: 24028 - DNA, 388 bp, Arabidopsis thaliana columbia
cgcaggaattagagttttaggtctgcttcgatggatatggatcaagagataggtctgaattctcctgtgtatattctattcaatatgaactatcattatgtttacacttctgtataggtttctctgcatttattctaggaaactttgagtcatgatcgattgtgttttgtaattgggaatagagtaatgaatacatgtgattataactgcaaatcaattagttaagtcatgttattcgattcaatcacatttatgaatctgcacagatttgatggtgaatcagtagtgtcaatgagtaatagaagcaaggatactgaaacagtcccggttgagaatgactattatcgggaaaacggattcatcagtgatggtgatggtgatgatgtga

SEQ ID NO: 24029 - DNA, 527 bp, Arabidopsis thaliana columbia
catcgtctgacggcgtcaacggcggaagtagcggtggcgatttcggtaacgataacgattccgttagtgttgtttcggatgttcagagtcctaattacttaaaattcaccgatgaagaattgatgaagcaatgtagattagagacatttagagtttcaggacctggaggacaacaccggaacaagcgtgactccgccgtgcgtctgaaacatctccccaccggaatcgtagctcaagccgtcgaagatcgttcacagcacaagaaccgtgcttctgctctaaaccgtcttcgtacgctcctcgccattaaaggtctcaatcccattctctctcaatttcgttcttttgaactttgaactttgaaaaattgattctagttttgcctttttccagtgagaaacaaagtggacattgaagcttatgctcctcctccagagcttcttcagattctacctcctaagtctaccattagaacttcgtctggttcacagattgggtccaacaatcctaaattcgtacctgtatgt

SEQ ID NO: 24030 - DNA, 941 bp, Arabidopsis thaliana
ttccttttcccatgattcttttacttctgcatacttctttcttctgtaccaataaactcctccgagaaccatcagcacagggatcaccaataagatgaccaaaccaataagtagcggatgtaatttctttttttcctctctaggaacgggggcctgttcatttctaggaataggagcctgggggagtttagagaggtccagagactgcataaattctttgcttttactaaaactccacccgagtatatactggttactggtcaatctcccatttgatccagagaacccaatatacatcttatcttgaaaaatttctgacagattgatgtctcttgatataagaggccggtttggtttctgaatctctataggggccagtgtaacatttagcaacgatccatcataatcaatccacacctgaacaggctccccactcacgagatttatgcttatattcttccccaaggcgtcagaaaagtaagacgggagagcagactcaatagatatcgggttgttcacatcaatcccaacatgagccttttctagatcatgaaaatctactgtctcaacagtatcaagctcaatagctagcagatgagaagaggaagtcacatttgttgagctgttgaagacacccaagtactgagttggaaacgcgtgagagaaattcatggaaggagatacaacaaaggccataccgtggcctacctcagctccgaacttaggaggcaccagcgcgcatacaaaatgtgtatagaatgagagtgatgaagatggatcaaaaccaaagggctgcttgataaaagcatgaccgattttcaactgtgaagcatttgtcaactgcaaaagtccaccaggaaggatcatggcgatcccatcaataaaaagatcttcttgatggaagccattgtagacaaacccagtttcttgttgacctgaca

SEQ ID NO: 24031 - DNA, 434 bp, Arabidopsis thaliana columbia
tatctggtggtttgcttgttactgttgatggacctcatggcaaggtataaatcgtttcgactttcctggattgtattttgatataaagaagggtctaagtctaacacatgtgtatttattgttacagcatgttgaagaagtattagagtatgtccgatatggcttgtggtggatagcacttggtgttgcatcttctattggtcttggttagtcactcaaatagcgtagtgttctttcgcatttacgaagcaattaacattagtcttactacttctatcttcttgtataggatctggtctccatactttcgttctctatttgggtccgcacattgctttgttcactctaaaagcacacgctatgtggtcgagttgatctaaaatctgcaccatatgatacaatacagttgaaaagggttccttcatggcttgata

SEQ ID NO: 24032 - DNA, 577 bp, Arabidopsis thaliana columbia
tgatgcgccgccgtctccgccgcagtaggtaaatcggtggatttaagaccttcttctccgtactgatcgtagatctgacgtctctgaggatcgctcaagacgtcgtaagcttcagagatctgcttgaacttagcttcagcttctttcttgctcgtagggtttttgtcagggtgccatttcatagccattcgccggtaagacttcttcagatcatcttcgttagcatttcgattcactttcagaacattgtagtaatccacccccatttgatccaaatctttcaccaaaccaaacaaaaaaaaagtcaaaaccagaaaatcgagagaatcttcagctgtaatcgaaattttgaagagaagcttgagatttcaaagagattgcagaagagaaaaaaggaatcggattcgagatattttgccagtaaaatctgaaattggaagagagaaaaaggaaacgaagagtggagtgcgtgtaaggtagaagaagaacatgacaaaggagaatgagaaaattgttcttaatggagccacgtggcatttattattactttatctttacattcatctttgtggtgaat

SEQ ID NO: 24033 - DNA, 610 bp, Arabidopsis thaliana columbia
gaaactctctgagcttagagatagtccatgttgaatctggagaactaagcatccaaaggccaatgaagctaacagggaaagaagtggtgtccatagaggttgacaggcaactaaacaggttccttgtttcacaagctatgtcagaggctagggttttagcggatgggggtgacctgagcggggcagttgggattcttagaaaccgtgagagggaattgtcggagaaccgtctgctcaatccagcgacaggctttgtcaatcactgtcgtctgagttgagtgcgttgcaagaaaggatgactagcaggaggatgtaccggacatcagggcgagcttacgccttctcgagcatgagctcgcattcggctcagagagcaactgctcgtggagattcgacccagggttttagcccggtgcaggcgtatcagacgtctccaatggctcgtatggtgactcggtctcagctactggtgctcgaaagcctactagaccgtcccctggtcgtggagacaaagctgaatttgacagaaagaataagaaatgggttctgtgattgctggtttggtattatgttggtttgctgagtgtgaagagagacattgagttggtta

SEQ ID NO: 24034 - DNA, 380 bp, Arabidopsis thaliana columbia
aaccccgatcacgtcatcgttgcgattagctttcttgttgttgcaaccaatgctcaaaacactccacaagactaccttaactctcacaacaccgctcgtgcgcaggttggagtaccgaacgtagtgtgggacacaactctcgcggcctacacattgaactattcaaattttagaaaagccgactgcaacctagatcactccaacggaccatatggagaaaacctagccaacggaagtagtacctcgttctaggccatctcggccgtcaaacattgggtcgacgagaaaccttacgacagccacgcctacaacaattgcaaagggatctaatatctctatcaatataacccctataaattaataatcgataaaataataac

SEQ ID NO: 24035 - DNA, 330 bp, Arabidopsis thaliana columbia
acactagctatccgatcaccactcatacgccgaacgttcaattaactcaatatctccaagtagaggatttctaaaaaaatgcggtttatttggttacactaaatcagtttatattggtttcaaaatagtaaaacaaacaaatttgtaaaattatccagtttgatttttgttcaaccatttcggtttggtttggttcaaagaatgagacaaaacagaacatatagagataaaacagtgaaatttcgaggatttattacctttcttgaccagcggtgtcccaaagctgagctttgatgattttttcgacgacatgaacacttcttgtggcga

SEQ ID NO: 24036 - DNA, 469 bp, Arabidopsis thaliana
gagaatggtgtgtctttcaaaggaaatacttattggcttgctttagatgaagaaacaaatttcttactcggttttgattttacaatggagagatttaaacgtttgtgtcttccctcaaataagaattgtgatacgatggttctatcggttgtaagagaagaaaaactctcagtatcacatcagaactattgttcatcaaagatggatatttggatgaccaatagaattgatagtgaaaccgccatgtcctggaagaggtacttttctgtggagtttaaaatccttagtatgtgtcattctttaccgttttgcaatagttttctgatcgatgaggaaaagaaaattgtcatatcgactgtaaggggtaatgagaacatggtaaccattattggagcgatcaatgcgtattatgcagaagtccctgtggaatctacaaattggccatgtagtccatattttgtcagttatg

SEQ ID NO: 24037 - DNA, 1097 bp, Arabidopsis thaliana
tgatgatctgtatttaaaacgaatgtgagcatcattcatactcttgtacaggatcaactgttgctgtggttttgatggataagctggggagaaaagtgttgcttattgggagttttgcgggcatggtaattgttgaggcaaaaagtgctatttgaatcaaactttacgcagctaatatttaataacgctcaatgtatgtagatgtaaatgtttatcatctttaacaggcagtatcgctgggtctccaagcaatagcatatacttcgcttccttcgccctttggaaccttgtttctctcggttggaggaatgctgctgtaagttttctatcacaacaacagcactggaaaagggggatgttttattttgataaactaggggtgtgattacgaatgcaggtttgtgttgtcgtttgcaactggagcgggtcctgttccaagtcttctcctgtctgagatatgccctggtcgacttcgagcaactgcgttggctgtttgtcttgccgttcactgggtatgcctttttttttttttttttttctctttgtggacttttttaggaaatcgataatgttgaaataataataagcttggagaattacacgctacaacaggttataaacttctttgtcgggctgctgtttctgagaatgctggagcaactaggttcggtgcttctaaatgcaatatttgggttcttctgtgtggtggcagtcatctttgtgcagaagaacgtggttgagactaaaggaaagagcctacaagagatagaaatcagtctgctctcttccacccagtgattgatctctttattctgagaattcgtattattcttctggctctctttttttccttggagagacacaagtaacgtgtacctaatatggaagtaggagtgagtagtaagtaggtaaacaacatgtaaggaaatggatattattcattcgagtatagccaacgtttcaactgattttgtaataaacataagaccaaacttcattcaacaatggtaggttctcaactcatgtacagaagtgcacctatctaatttttttgttgcatcacattcatgatgttcccttattgtatagtctgtctg

SEQ ID NO: 24038 - DNA, 547 bp, Arabidopsis thaliana
cacattaaagatgttttgctgacttgtttgtttcttgatttttatgaattatgaagctttgaagaggctaaacaatggattccagtattcaaacaatcacggtttatgcggagatggtttcactgatttgaaagcttgcaccggcttaaacggtccgaaccctaaccgaccagacccaacaaacccaacgaatttcacaacagttgacgtgaaaccagaatcagcagatttacaacgaagcaattgcagtaacaacaatggcgggtgttcatcaaaatccttaaagtcttcacctttaggaatcgtcatgggtctaataggatcaatcctcgcagttgcaatctttggcggttcaacattcacatggtacagacgaaggaaacagaagattggaagcagtcttgatgcaatggacggtaggattagtactgagtacaacttcaaagaagtttctagaagaaaaagctcttctccattgatcagcttagagtacgcaagtggttgggatcccgttagacgaggacagagcagtacaacaacagtgcat

SEQ ID NO: 24039 - DNA, 597 bp, Arabidopsis thaliana
gattatagtgttagttcatatattttacaattttattggtcatttcttcatatcgtaaccactaaccacccattgtcgagattttgttgattggtttggtaaaaagttcaagatggcccaataagttggaaattaaaaaacatcatggtgacccaattttgaccactaaagacttctagaaccgttatgtttttccacgttttttctagtattttaagagtggttaaatttacgacgtacataataccattagtgtgattgagtgggtgaaagtggaccacacgtaccataataaacccagcattgtctgggtccaactcttccattatcagtgccgcatattctttggcttgcttttgaatatttgagagcttgtttgcagaagcactaagactaataatctgcaataaattaccaacaaattagaaaacaaaagctaaagtatttgaaacattaataacctaagctaaagtaacaaagactactactctatctatctattaccattttgtcgtgtcacatgaagttaatatattgatgatgttaatagtaaacgtcagcagataaagtcagtggggatttgcgcgtggacaaaat

SEQ ID NO: 24040 - DNA, 565 bp, Arabidopsis thaliana
aacctctcatcttctacttgttcatcttccattccaatctcaagatgcacgcgaagaccgactccgaggtgacaagcctctcagcttcatcgccgactagatctccccgtcgaccagcctacttcgtccaatctccatcacgtgactcccacgatggggagaaaacagcaacatcattccactcaacaccggtactcaccagcccgatgggatctccaccacattctcactcttcctcaagccgcttctccaagatcaacggctcaaaacgtaagggccacgctggagaaaaacagttcgctatgattgaagaagaaggtcttcttgatgatggagatagagaacaagaagctttgcctcgtcgatgttatgttttagctttcattgttggattctctctactctttgctttcttctctttgattctttatgcagctgctaaacctcagaaacctaagatctctgttaaggtttgtgagagttgacttagtagatcgagatcagatttcagatctagagtcgtgcttacgtttgtagaattgaattttgcagagtataacgtttg

SEQ ID NO: 24041 - DNA, 751 bp, Arabidopsis thaliana
tatggaaattagggaacgaaagaactgatgtaaaccgagaacaataaagataatctaatgttcttggatatgtaacaagatctcaaagaatgctaacctaaacagtagactggagtttttgtatccttgaatccacgaaaaatgccttgaagtgctaaggaaaccacataagcaggagcaccaagcgccctaaggacaagaaactgccgcgcagggatgaacatttctgacatctgggtttcaggtaaaaaaaaagacagaaaacatgcattcctcagcatagatttctcacgaaatttcgtaagacatagaagacaataagcactctctggaccgaacttacagattgtatacccattaaccttagaaagggtccagatgccaaagacaatgccagtgcctcgaagatgccaattccaatggctaacactagcgctgttgacactgaagataactgtttcctttctggtaaaccttgagaaggtatgtcactctgactatcttctgtaaatccattcaaagagatataaggctgggaaaaattgggaagagaaaaaagctattatcaacgtatacctgaggctaaatcttgagcggcaatctttgcaatatcttcagcgacgagagaagtggcaacgctgcggagcggaatgttgaacagctttgatatggtattgacaatggccatggaaacgccagctgtaccctactctacagatcctgcatattggctagaaggggagtccttaga

SEQ ID NO: 24042 - DNA, 621 bp, Arabidopsis thaliana columbia
aatgtggctccggttgattggttggctcatggacagaacgctgtggaactatatagtaaagagacaaggaagacttctctgtctcacgacaagcttcttcttggagcagcttatgaagcggtgaaggctctttgggaactctcagcttctgagggaaaggaaaatacaacaaatttgagatggaagagtgtctgtgggaagaacgggacacttaccaacgcgatacaagtaacgaaaaacagatactacttgagtcatgatactgaatatagttttcactttctaatgcttactttggttcatttgttttgaaaatattgacaggctcggttacaaatggaagaggggagaattacagctcttggtagggattcttcaagcttgaagaagatggagaaggactttgattcaaactgtgaaagggaatgtttctcatgcttttatgatttgcatctctcggcttctggctgcaagtgctctcccgaagaatacgcgtgccttaaacatgcagatgatctttgttcatgtgatgtgaaagatggatttatcttctccggtacacaatggatgagttaagctcgtggtcagagcattggaaggggatcagatgatgtaagatat

SEQ ID NO: 24043 - DNA, 501 bp, Arabidopsis thaliana columbia
cgatgcgggacgtcagtcgccgagagaaacctggctgcgcttgctgttgatcaacgcaggttttccaaagccccggactcagatacccgtgacgggcccagacggctttcctcgctatttcctcgacatgggctgggaagagttcctgttggctgtcgaatacgacggcgaccagcattggaccgacccagcacaatatgcccgggacgtcgaccggcaggagtacatcgccagggttggctggaccgtcattcgtgtggtgagccgccaccggcccagcgacgtgattcgacgcgttcaaagcgcgtgggacgcccggacggggggtcgactctgcgcgtagggcgacaaactacaagtaaccaccacccctaacgcagacccaacgcagaaacaccacacaccccacccgcacccccgtcgactctgcgcgtagggcgacaaactacgagtaatcacacccccaccgcagactcaacgcagacccgccgcagacgcaag

SEQ ID NO: 24044 - DNA, 597 bp, Arabidopsis thaliana columbia
atcttgtggctgctcttgtccttgcaccttttgcactcatctttgaaaggtcagtctatgtttaaacaatatttataatgttcttcttttagacacagtactactatacatttcattgtttcttaattagcatgttgtggtctaatatgtttcttcctgttactaaaacataaaatcggattattttggttttggttttgtaggaaagtgaggccgaagatgacactatcggttttgtggaaaataatggcacttggtttcttagagtaaggactaagctttccatttcacattcttaagtcaaaacaataaacattatgttttggggaaaaaaaacaatgatatgtcataaagttgcaagtaccttaatacatatatgtttttgtcccggcttgtgtgtaggccagtcttggatcagggttttggttacttggggatgaacatgacatcagcaacatatacatctgcgatcatgaacattcttccttctgtcacatgtataatagcttggattttaaggtaatctatggtttaaactttgacacatctttagaacagaattgattgtaataaacgggtgatatgtgaatagaatgg

SEQ ID NO: 24045 - DNA, 493 bp, Arabidopsis thaliana columbia
gctctaaaggtattatccttaaggataaagaatatcctattactatttatcacatcgcaccattcaacaaggatttatggagtttactcaaaagcagtcaagagtgtcctccaggagaaagcaaaataacaaataaatgtttacataatagttgcatttataaaaatatgcccatatgggctcaagtaatgggcttcatataaatatgctcgatatgctattaataatatccacataaataaaacaacgggcgtgttatacgcccgtttcaatatttaacacatggggagattacatgttttcgatgatcgcttcaccaaactctgaacatttcagcagcttagcgccttccatcagacgttcgaagtcataagttacggtcttggcattgattgcgccttccatacctttaacaatgaggtcagccgcttcagtccgaaccatatggcgcacgatcatctcagcggagagaataatagagccaggatttact

SEQ ID NO: 24046 - DNA, 471 bp, Arabidopsis thaliana columbia
cgccagtgtgctctaaaggaaacccggtcgaaaccgggttcagaagtaacggtgttattagcacaacggacgtacagcttcgcgcatccctttttcgagaaaggcatccaggtcattagcaacctgctcgaccagaccaggcacttgcgtcaggtcctgctcccagtggtctttttctgccaaaacaatcgctaccagttcctgggtgccgataacacggtcacgatgctggctccagagttgctgataacgttccagccagtgtgcatcgtcctgtaccggatatgtttcgccgttacgctcaccacgatagaacgcaatcaatgccgctaatgcgacagtaaggcgcgccggaagtgtgccgtttgccttctgccctgccagcagctgtggcaggatgcgggtgcggaacttggtcataccgttgagcgcgatagacagcagctgatgcttaatgtacgggttacggaa

SEQ ID NO: 24047 - DNA, 440 bp, Arabidopsis thaliana columbia
atagtataccgaaccggaccatccatctaatttcaattgtctaccaaaaccgaccgaccagtctttgtcgaaagttgtctttcttcttccttgttcgattttcgcctcctttggcttttcattctctctctaacttctctatgttaaaattccgaaagctcgattcagaaatctagaagcttcctcgagggccctcgcgtagaaagtcgaactcaaattccctggagacaaagaagaggaagatgagctcatggaactacgttgttacggctcacaaaccgaccagtgtcactcactcgtgcgttggcaacttcacaagtcctcaaggagctcaatctcattgtcgcgtacgaacctctccccctactctatttggtaacaatttttggttggcaattagtcccctttggaattgcagcggtgaatttgggttaagggtt

SEQ ID NO: 24048 - DNA, 402 bp, Arabidopsis thaliana columbia
gaacatgccgatcaattctgtcagctcatagaggattatttcaacctgctgatatttaatcacccaagacattcttaaattaatttcttttacatgtatctatacaaaaaaagttaggaaaatgatctgtatagataaagtggacttactcgtgggagaaacttgatgatgacgtcttcgatctcgtccatgacttctatagctatgaccatttcttcatgtatcgacaccatatctatctgtaacttccaaattattagtttctgctttcttgacaaatacacaaaatgtctataaacaaattggtttcccaaagagagaaattctaaccgtggcaccatgtacgaggggtaatcggacagacaaagcatggagttttcgagttagcttgctcaacgcttc

SEQ ID NO: 24049 - DNA, 1356 bp, Arabidopsis thaliana
ccatgtttcttggctaattctccgactttgtctatatattctataggaaggcatctacctccacaactacatcaacaaaaatccggttttgtcaaaccacaatgagtttatcgaaccggaaaatttaacacgaccaaaatactagtccacaattaatattcttttgaacaaccatgaaattttagaacatttggtcatatttgtgggacggttctatataatacttgtaagtttgtaactcatttctcttcaaccagaaatgagacaaccctaatacataaccggttaattacgaattatactctacaataatttcatttttctattattagtcctctaaaagaaacctaaaataaacctctacaccaactttagctaacacatgttcacaaaacattatgaaattataattaggctttgtttttatttgcttgataaaactaacacttactttgcttgagtatctcaagacatataagcttagtaaccggatgatggagatctcctttgggactcctcacggcagcttcaatagcaccaatctccatcgtaccgtcttcctcattcttcaccgtcctcggatgcacaccaccgaggcttgaaacgccgccgttttcatatatatgaatgtgagagtcgtctccaagaatcacttcactccctctctcatcacaatggaccaacacgcttatcagattccccattgtccctgacggaacaaacatcgccgcctcttttccagcgatctcagccacctctttctccaaacgcagagccgttggatcgtttcccaaaacgtcgtcgtctacttccgcgtttgccattgctgaacgcattgactctgttggtttagtcaccgtgtcggagcggagatcgacggttctaattgtagttggcgtcaccatcttgatttggctcactgcgttggattataaccaaaacattaaataaaagatcccattagaatgaaactcatctaaataaatataaagtcacttgagttttacttaagcatacctagattctgttctgttaggctatgctttttgttttcttggcgaagagataaaaagagatgtgcttcgggtgactcaaatggttgagagaatgagtgatcaaatcaaatacgaaatgacgacagggaatcttatagaaagaagatcggtccaaccaaataagtgttggatgcattatgacaaattggtaaagtaaggttttcttaacgtttttgcctaatttcttaacttatactgtactagtttccttgtttttcagtctatactttttagttgtatgtaagtaaataattctatgataactatcaaaataaaagttatgatagttaatattaaataa

SEQ ID NO: 24050 - DNA, 532 bp, Arabidopsis thaliana
cgcggaagcttgttcgcgatttcaagcatctcaacctcgatttccagctgatcaaggatccagagactggaaagaagaagcttaagatcgattcgtggtttggaacacgcaaaaccagcgcctccatcagaaccgctcttagccacgtcgataacttgatctccggtgttaccagaggtttccgttacaagatgaggttcgtgtacgcccattttcccatcaacgcctccatcggcggtgacggaaagtctatcgagatccgtaacttccttggcgagaagaaggtttgttttatcttcttcatctctgatttgattctcatagattcgtgtagatctcggaatgaaatagactgacactagattcaactttatgattggacgatgatgattgatttctgagtttgcgagcactgaacttacatagaaatgtgtttattggaataataggtgaggaaggtagagatgttggatggtgtaccattgttcgatctgagaaggtgaaggatgagattgttcttgacgggtacgac

SEQ ID NO: 24051 - DNA, 548 bp, Arabidopsis thaliana
gagctgttgttggtaatgtgagctgttgcagcagaatcaggaacccaaccactgtcgtcactaacgtcggttatgtgaagagctgagaaggcagcagctgcagcttcagagtgttggtaagagtcatcaaatcgatgccagcactgaagagcatagtgacctctttttccacaaatctgacacattggtttctcactcgcagagacagaagaacttgaggaggagaactgttgttgaaatccacgacctcgagttgagaagtttcctttgcctctgttgtttcttcctccacggcctctgtttgaagatcggaaagtgttgaaagccagatggggagaaacgtcagtgacagtgtagccttggagacgatcgtcaaagttcttgagacgataaacaacatcttcataagatggaccaggaaacgcatctaaggttccctcaagagaagtgattaacggttcatactctcgagtaagaccatgaaccatggcaaaaatcttcatcttttcagcaactggacttccacagaggcgagttggcacatatag

SEQ ID NO: 24052 - DNA, 1089 bp, Arabidopsis thaliana
  unsure (1)..(1089): unsure at all n locations
tgttgatatagatatctaaagaaaaaggtagcaaaataatatctctttgccaatattgcagcatgatatacattgtttgataataataataaaactatgatatacattttccgatatgagtttgatttcaacgattttatttcagctgaagaattgagaattagttatgacattccaccattcaccagagcatcgacggaacaagctcacaccggaataaattacgcttctggtggtgccggacttctcgaagaaactagccaacatttagtaagaacagaataaactcaagagcgagactacaaacaaaaatatttttatcttctttgggtatttcatttcatatacatatatgattaacttaaaaaaatagttattttgtaataatggttttaacttcttttttttaaatacgagtggtaaccatatttacaaggtttacaattttgaaaacataatattctatagaaatttaatttatccaatatttttaataacggtaaacgcaaacgctttaatcatgcgtttgtgattacagtttccaaaaattgtttgataaaaatacttaaatgctgtgttctatgataaacacattacagtagtttaacatgtaaatgtaaacaaaaataacagatataatgctttagattccaatttaacagcttaggcaccaatattaagctatatatatatatatatagaatcgatgagttttctttccaggttatgtataaaacatgtgattgatcaaattatatatatattttttttaaaaatcttaattagtctcttaatagacagcatgaatcacaaggaatcaaacttaaaactatactatacatgttttaggtgactaaagaagaataatgtggtccatggaactaatcatttgactataattgatttgcttttttggcaggggacgttaaaatcactcatgtattatatttaacattgcttgcagtctcccactatatataaaacttaaactaattacctatggattatgatatattatttttgacaatatatatagggtgaaagaatcagttttgaaaagcanataactaatcacccggagatgattat

SEQ ID NO: 24053 - DNA, 534 bp, Arabidopsis thaliana
ggtcagagattgaagtccatctgcagtaaagttgttctcatcccaaagaacgtggtaatgagcaggtcgagaagtgccctgttaatggagttttgatttgttaaacacttcaaataaattctcacccacaaactcatttgagattgtaaattatacctgaataccagcatgaccacagaggtaaaagtcaaactctgtagggtggcagattttagagtccacaacagtgcctacaattaacaaaggggtttaaaaccaatgcaagggattttcagctgattaggtctacgcacaaaaagcttgacaaagatccaaacttgtctcaccaggtaaaatattcccacttctgtccaccgaatggcgatcattgtggttctgagcaaacagcctcgtgtgatgacgcttctgcaccaccacaaatgtcactggtggttgataactgcttccagcgacgacaggcctgaaatgagttgaaataataatcagattaaacagaagaaaacgagcacgcaacacaagccatttgttagaagt

SEQ ID NO: 24054 - DNA, 462 bp, Arabidopsis thaliana columbia
ctaatctaccagtctttaatgacccgacttgcgaacacgccacaagtactccaacaagcgtcactaaatccggttgaaacccaaggctctgcatttccacaacagcttcaaatgctttattagctaatccattttgagcaaatccagagatcaacgacccccacgaaactgcggttttaaacatcatcctactaaacaccctagaagcaacctctataaacccaacttttgcatacatatcaaccaggctggtttcaaccactacattcataggaagacctgttctatacaaatacccgtgaaccgaacggcccattttcgtatccccgagatcaccagaagcttgtaagagaccaacatcacaaccctatccctaccaaacccttcattctgcatttctctgtaaaactcaacagccttcaacgacttaccagcctgtgcaaaccctgtcaccattgttgt

SEQ ID NO: 24055 - DNA, 589 bp, Arabidopsis thaliana
ttactatgacttattaacgtattccctgattagtacaactaatataaaatgttaatcttcttctcataatattcttgaagcaaattagcactgaccgatcgatccatggaagaggtgaagaaggatgtatactcggtttgggcattaccagatgaggaatcggagccccgattcaaaaagctaatggaagctttgagatccgaattcactggcccaagattcgtttctcacgtcaccgtcgccgtatctgcttatctgacggcagacgaagccaagaagatgttcgaatcagcttgcgacggtcttaaagcttacaccgccaccgttgatcgcgtctccaccggaactttcttctttcaatgcgttttcttgcttctccaaaccacccctgaggtataaaagtcaggacttttcatttcaagattcgatctttctaatagaattgtatagaagacatacttaagataaagtttagtcctgactaatattcttgattacatattgaaatcttgggtttgtgtctgccgtctggataaagatatgtggcttgggtaatgaatttagaatctaatgttattatctgtaatgt

SEQ ID NO: 24056 - DNA, 536 bp, Arabidopsis thaliana
ggagctcgtgaaggtcaggcaagtcgctaaagaaggcgtcactagagctagaagatgagaaggtccaacctgtggatgaatgatgacacttctagaatcagaggagaggcgatgggtcataccgcagcgctccgtgatgctggtaaatatcgacttccttctgcttcttgatgcttgtactgattatctaagggttgaaacaaccttctctttaatttgaattttattttgcagctgagaaagccaaatacgcggctagagacccgatcgcagcattgaagaagtatttgatagagcacaagcttgcataggatgcagagctctagtcactagagataaaggcagtcgagtttgtggatggagcggattagcttgcagactctagtccgtagcccggtcgcagtctgttgctagagaatgtgtttgctgatccaataggctttggaattggacctgatggacggtacagatgtgaggccccaagtttccgaagcacagctcaagtctgagaagacaagtttaaccatagctgtcta

SEQ ID NO: 24057 - DNA, 594 bp, Arabidopsis thaliana columbia
taattgcaaatactatttatcttattttcttaaaactattttccaaacactcataaaaaatttaatatgtaaattttatattttaatacccttcacccacacgggatttatccgctgattcttacttagttgatctttatgataaccattaaaagatgtgggatgtggatgttctaaatatcaattacataaaagactgttttatttatatatatggtccaatgtatccaataggctctttagaagataagtcgtagggatgcaattagaaaacaaaactaaaataaacgaaccaatatatgatggaatgggacaggataaaattctaacactcagaactcgaagtcgcacttgatcgggaaaacagtggaggtagttgtagttccgtttgaggtacttaaaggaagccttagatcatcgcaatcaaccttaggcttaatcctcctaaacttcaagtccccaagcttaaacctaaccctaagcctgaacttgatctctatattgtatcaccggatatcctctcgcgtttaaagtcctagctgtcggcgttaaaatacaaggttttggcttggacgttggtgtgagacggttgtg

SEQ ID NO: 24058 - DNA, 388 bp, Arabidopsis thaliana columbia
gtcgactctagtttccccgtgttgagtcacacagtgacgagtctcaaaatattccttatcagaatcacgagccagagatttccgaaatcgtgtctcgtgacaccaaaagcgtgaagaacaaaccctccaccccatttagaagcaagctgtccaaaactatcaatgcacatgaggaaagcaaagaaggtgccttcgattcccagaggacaaagccttgtactgagaaccaccatggggatccacctgatcttacttatcatcttcgtgaaagattcttcggttatcacaaacaaggaatctggtatcccgagagttaagttccagcgtttgatgaagactagatcaagcattcctgagaagacgtatagaagttgtgcaagaagagtat

SEQ ID NO: 24059 - DNA, 564 bp, Arabidopsis thaliana
  unsure (1)..(564): unsure at all n locations
gtcagccggaccggtttgccgtcctcgccgagcacgtcggcggtgaaggcgtcggtgtacttgcggccgagctggaagatgtggccgacctcgatcccgcgggccgagaccagcggaccggcgccgtccggagacggatcaccgtcgcgcacttcggcggcctcgatggtgccatcggcggtgaagtcacggccggccaccagaccgacgacatgcttgccgagttggtcggcgccggtgatccaactggtcccgtccaccacccgcgggtctaccaggtagcgaacaccgttgtccagcaatgccttcgggccgatataccccttgaccaagaagggatacttggcgaagtcggcgtcgtcgagcagggtgtactcagccgggtcgagcgcggcatccagcccgttgtcgtcgacctcgcggtcgccgggcaggccgatgcccagtagctcccagccgccgcccggttggcgcactttgagcaggacgttcttcagggtgtcggcccggtgacgcgcggccagattncgccattggccacttaccagtgtccgatggcggggt

SEQ ID NO: 24060 - DNA, 515 bp, Arabidopsis thaliana columbia
tggaactaagcataattaacgggtacgcatgaccttcatgagtgtttccaattataaaatccctaccgacctcaacaaagtaaaagcaataaaaaacaaaaatggcgtttactccgaagatcatcacatgcctcattgtccttacgatctacatggcatccccaacagagtcaaccatccagtgtgggacagtgacgagcacactggcacagtgcctgacctacttgaccaacagtggtccattgccatcacaatgctgcgtgggagtcaagtcattgtaccaattggctcagaccacaccggaccgtaaacaagtatgtgagtgccttaaactagcgggtaaagaaatcaagggcctcaacaccgaccttgtggccgcacttcctaccacttgtggtgtttcaattccctaccccatcagttttagcaccaattgcgacaggtacgtctccataactttatttttgttttatgttaggttgatttgttttgtttggaatataactagttttaat

SEQ ID NO: 24061 - DNA, 371 bp, Arabidopsis thaliana
gaaaatctattaataggtgggaactttgataaagaattagaccttggtacatgagacggagaagcattctctcgagaatgatcacgcatgaggtatcatcgtcgacaacgagtattcttaggccactaggatactgctcgttgatcggcattgagctttggtgggacgctcgaaagcccttgagaactgtgaacgtgatgttggttgcatcaggagcagtggctctgactggagactgtacagtgttgaggtcagtagccactgctttcacgtgcgcggcgacgaaggcgactggttatagctgtagtggcactctgttgtgattcggccaattggtactatgcctacgtgtaagcatgcccgagtccttg

SEQ ID NO: 24062 - DNA, 622 bp, Arabidopsis thaliana
  unsure (1)..(622): unsure at all n locations
caaggaaccttatcttaaaatctgactaaatcaatcttaaatcttaaccatggagatagctgtctccacatcctgtttgttttgcccatccgtgcgtcctctcatgtattctaaagcatcccttagcttcttcaacataacatgtccctccaaagaagccacctctcttaacttagcctaaaagagagtttccaagaatatatttcaacaaaaagagagagtgagaattgttatatgaaatcaagaattgtagaaagtaacctcattagccaaactaacagctgcagcaagattcttgtcgaatttactagcgaggtcacggaccgaaagccgcttgtgctgatcagacaacaactcgctctctttctcgacagtctccttcacagatggacctttttcatcttcctttggttcctctactatctgattatcaggtcctaatttatatgttggaaagtgatcagaagcaaagctcacatctactgatactggaaccactgataaagataatgtccttctatttcaggacacactttcgtcattttatcccggatctttatctgtntcacaacaataacaaagagaaatcaaaaaacattagatgatttgaattggaaggaga

SEQ ID NO: 24063 - DNA, 545 bp, Arabidopsis thaliana columbia
actggagcaacaacatgctattaaggatcacaagcagacaagttcctacatctgcaagaacagctgcccaaatcagcggatgaccagcaaatgccaatgcaagaatagctcctttcatagtgattgatatgaccacattctccaccactttccttttcgctctttttgcaagctttatcgcctgcggtattcttctgatatcattggacatcagaattatattaccagtctctgttgcaagtgcagagccggaaacacccattgagataccaatatccgctgtagctaaagctggtgcatcattcaacccgtcccctaccatagccgttggcccttcttctctctttaactgttttatgatttcagatttatcttctggaagaagctctgctctaacaatatccatagcatttcctagctgtgggttcatataacatttaagttttcattagtgtgatttactaagtttcaagagaagcatcacactcattaaaaaaaaaaaggattgctcacctgttcttgagcatgcattgcagcggcatgat

SEQ ID NO: 24064 - DNA, 1071 bp, Arabidopsis thaliana
gttgaccaaaaaaaaaaatccttttagtttctgataactatatacagaaactccctcgagttttaagttattcatttccagtaagattcacagttatgtgtttagttcgaactaaccttttttctgttgccattccatagatacaagcctctctattggagcaaaagcaggtgtttcccctttccccggttctttcgcaacacctgatttgattaccattgacaacagcatatacttattatgaaaactgttttttgttttcctctctaggcattgcggttgcttctgtatcgggtttggccattcttctactcgcaggtttgttcttatgcatcagacggagaaggaagactcaggacgctcaatacacaagcaaaagcttgcctatcacatcatactcgagtagagatacatcaagaaatccaacttccacaacaatctcctccagtagcaatcactctcttcttccctcaatctctaaccttgcaaaccgaagcgactactgtggagtccaagtctttagctatgaagaacttgaagaagcaactgagaatttctctagagaactcggcggatggtggcttcggtactgtctactacggtaagcaattcgacactacatttcaatctccttgaaagcttttgagtattgattcgaacatttttcggcattactctataggcgtgttgaaagacggacgagctgtagcagtgaaacgactctacgaaagatcactaaaacgcgtagaacaattcaagaacgaaatcgaaatcttgaaatcactaaaacatccgaacctcgtgatcctctacggatgcacatcaagacacagcagagagcttctactagtctacgaatacatctcaaacggaactctagccgaacatctacacggcaaccgcgcagaagctcgtcctctctgctggtcaacccgattaaacatcgcaatcgaaaccgcaagcgcattatcattcctccacataaaaggtaaacaaagatcataaccaaaatccaatatcagaatttcgcaaatctcattcctctgttttacaggaatcatacacagagac

SEQ ID NO: 24065 - DNA, 437 bp, Arabidopsis thaliana
gatcctttttggctttggttttttgtttctacaaatcgctaaagtttttgtttttgttttcttcttttgtgcaattcagtgctacggagtgcaaggattgtatttgtgtgtgatcatggtggaggagaaaacgggaaacgtgactctacttgatcaaacagttgaagatttgttattacaggcacaagagcttgtaccgatcgctttgtccaaagcaagaacagtgaaaggtttctcaagcagatggagagtgatcatttcaagattagagaagataccgacatgtttatcggatttgtctagccatccttgcttctctaagcacactctatgcaaagagcaacttcaagcagtcttagaaactttgaaagaaaccatcgagctcgcgaatgtttgcgtaagtgagaagcaagaagggaaattgaagatgcagagtg

SEQ ID NO: 24066 - DNA, 598 bp, Arabidopsis thaliana
atttggttgtttggaatacgatgatttctggatattcaatgaacgaggaactctctgaagaagctgtgaagagttttagacagatgcaacgtattggacatagacctgatgattgcagttttgtctgtgtcacaagcgcttgctcgaatctctcctctccttctcagtgcaagcagattcatggcttggcgatcaaatctcacatcccttcgaatagaatctctgtgaacaacgcgttgatttcgttgtattacaaaagcggaaacctgcaagacgcaaggtgggtatttgatagaatgccggaacttaatgcggtatctttcaattgtatgatcaaaggttatgcgcacgacgggcatggaacagaagctttgcttttataccaacggatgctggactcgggtattgcgcctaacaagataacctttgtagccgttctttctgcttgtgcgcactgtggtaaggtcgacgagggtcaggagtacttcaacaccatgaaggagacgttcaagatcgaaccagaggctgagcactattcttgtatgattgatcctttaggctgagcagggaagttagaagaggcagagagattcataga

SEQ ID NO: 24067 - DNA, 585 bp, Arabidopsis thaliana
attcttagggtcgcaaccggtaacaatcctccactcatggctctcgattgccggatgacaaattttaaccggcatctctccgaccaactcctcccaccgttcctctatcaagtccatgattgaagccgactgctcaggcgtggctaaagaagcaaggatcgctacgcagttgcctagagcgaaccacctaaaatccatacgagctggactaacgtttcctataaagtaaccgccacgtagaggcatgaaatcgaagacccactcagggatcgagtcagggataacgttgaacttgttaaccgctgtgtgcgagtactcttctgttttgtaacggtaaatgtcgttgagctgctgaaaatcgagccagaaataacttctcatgtggaagctaagcgcgtgtagccgcttcactatcctctccatgaactctttaccttccgcgtcgtgctttagcatcgacattgctgatctaagagccatgaagaagagagcttggatctctatcggatacccgtaaaccccctacacaagtatcagttcgttaaacactaattctgtaaccaaacctaagtttgtctagagacc

SEQ ID NO: 24068 - DNA, 477 bp, Arabidopsis thaliana columbia
caagcttggaggctattacatgagcccaattgtcttttttcaagattcttcaagagcaggtactttgtgaattctccatttatagatgcgtctgttggaagtaaaacatcctatgcgtggagaagtattttgtctggtagggatcttttaattaaaggactgaaaagaatcattgggaatggaaaagagacattggtatggattgataagtggatccatgatggaataaacaggagacccacaggaattcaatccctccaaaacattagacttcgagttgatgctctgattaatatggaaacgggatgttggaatacgaatctgttgagagctttatttcatcatactgatgttaggattattcaagcatcaaagccagtagttgggagatcagatttcttttgctggacagaaactaggaatgatatctattcgattagatcaggatatgatttagcttacaaatttcatcattta

SEQ ID NO: 24069 - DNA, 579 bp, Arabidopsis thaliana
gtaattttggtatatttaggattgtgttgaagattatagtatcaacgtaccatttaaagcgtttcaagctttgggatgtaaagtggatgcagtgacgccaaccaagaagagaggtgagaaatgcgctacaatcgtacacgaccttgaagacggacggcaacttcctactgagaagtttggtcacaacttctatgtgaccgttgcgtgggatgatgtctctgtggatgattacgactgcattgtggttcccggaggaagatctccggagctcttggtgatgaaccccaaggccgtcgaattggtcagaaagtttgttgagaaaggcaagtttgttgctgccattggaatgggaaattggctacttgccgccacaggcgcccttaaggtaatatacaccgttttacaaaaattcgttttactattctaaagacttaaaagttaaaactgaagccgaaccaaaccatattttaatttaaacgaaacaaaaatgtcaagataagttgctctaagcacataggaatctcctatggttatggttatgctaatattattcagcatattgttgaggttagtagatat

SEQ ID NO: 24070 - DNA, 522 bp, Arabidopsis thaliana columbia
ttttctcgtggaagttgtgaagccgatatacatattctctgaaagatacggtgacaaatctttgttcagtgaaagaagaggccactttgggacattagcttcctctgctggtgataaggtgacattaagctgtttttcttcctggctatacaaaatcgtgactcggagtagatttccactgattaaagaaagatttctgaactgaccattttgatcataataaccggcaggagcagatacaatagatctcataccattaatattgataccaacatggttatcatcaatgtcaccaaattcatcgtctttatgtatatcaagctccacagcaatgatatggttggagctatgtccatcatgtgtatcgttgaagatagcaaggtactgatcagcggatcaccaggaatgcctctcgtgggagagatccaaaggctataccgtgagaacctttgtctatacgctcagggtctatagcaaagaagaaggtaaatgaaaacgaagtcgatgttaccgttgaccgaa

SEQ ID NO: 24071 - DNA, 566 bp, Arabidopsis thaliana columbia
tgagatttgcattgccattaatgaacaactgcgctctgtttctgcagatgcataatttatccaaagtggatcacaagaactttttgaatgtgatcggttattgccttgaggaagagcccttcaagcgaatctggtttttgaatacgctcccaatggatcactctccgagcatctgcactgtgaggatttcatctcctcaagaaaccttgtttgatttaactcgtacactctttgaactgtttgaactgatctctcatctcatggcagctcaatacgtggagcacttggactggcctaccagactcagaatcgtcatgggaatagcttactgtctagagcacatgcacaatcttaacccacccatcttgctctccaatttggactcctcttctgtgtacttgactgaagacaacgccgccaaagtctctgacttttctgtcatcaactccatatttccctctaaggagggttcctcgagcaagaaccttctagaaccctcgttacttgatcccataccaacgtctttaactttggtgctgttttatcgaaatcatcagtggaaaatt

SEQ ID NO: 24072 - DNA, 552 bp, Arabidopsis thaliana
cattccacatttcgcatacatgtcaacaaggctgtttcctactggtgtttgggaacaaaatccacactgaatgagactggaatgaaccgacattcctactctcaaggctgataattctgctgctgcgcgtactatgttaacaaaagtgactgcatttggctgaaatttctcaaccttcatctgacgaaaagtggcaacagcttcttcagcctggccatggagtaagtacccgttcatcattatattccaagatacagtacttttctcgaatccacacttgtcaaacaaaactatcgctgcagcgagggcatcacatttggtgaacatattgataagagcatgtgccacgtgacattctgaatcgaacccatgctttataatttgtccataaacacaagaacctcgagcatagtcactacagaaggcacaagtttgaagcataccaaccatagttcttgagtctgggcatacaccatgtaacttcatgttcttgtacacatcaaatgctttattggcatcacaatctgagtatcccttgcgctagacgttgaa

SEQ ID NO: 24073 - DNA, 519 bp, Arabidopsis thaliana columbia
tgttctcggctttgtcttactttggcattaactcgcagtggatgatcggatctggtttacattcatggaggtagttcattcctctagcaatatcaagagcaaatctcagagcttttgaaggagaaagacgacctttcttttgaagatagacacttagatcaccctgaaattgagatgattaatgaaacaagattgcttgccacatttgtgattcaatgagctgaaatgaagtatgaaacaatgcgtacttacttttggattacactcaactacaatcatcatcggtagattttgagtgacggctccaacaaattgaacaatatttggatgccgagcttttgctagcaaagtcaattcgtttgtgaaagcatttctgctcgtaaaaaagaaccggaaatagacaaacacaatgttagattacttcatgctacggacaaaatcatacagagaagttcaagaataatgcatacactcgttcaggatctgaatagctatctttatcgaatatttttactgaga

SEQ ID NO: 24074 - DNA, 546 bp, Arabidopsis thaliana columbia
gtagtctagtgaaccctttaattctttcggaaccttcaagttttccaacaataatcttgtccttgatgatcaagctggtatccgtgtttggggcacaaattttatgggagttgttggctcatcgttggttaaagagtttcttgatgatggaaactttgttatcaagaacacatgggacaacgacacagctggtttcttatggcaaagctttgatttcctgactgatactttactgccaggtatggcattgggttggaaatttcacaggggaatcaatcgatacttggtggcatagaggttagtcacttgtacgttcaagaactttttgtagatatagaccatatttgcacaaaaaaaactagatagaccatatatatattatgacatattctatatatagtgcaaatttggtatacaaagtagtgacttccgcggtgaaactgactaaacatctacaatttgtacttttacattgttcattatcatttgcttagatttttttattgttttgccatttaatttaattacatatcaccagtaataata

SEQ ID NO: 24075 - DNA, 552 bp, Arabidopsis thaliana columbia
catattgatgcagcagagaaagcagtaaagaaaagacatgatccaactgtatgtcagagaattaaagaatccaacgaaccaagaagctgtcttcaaggatgctccttgctccatgtggcttgtcacattggtgactctgtcttgcttgaattgttgttgcagtttggtgctgacctaaacataagagattatcacggaaggactccgttgcaccattgcatatcatcagggaaccacaaatttgcaaagattctactgcgaaggtatattttaactcttaagaaacgcactcttaatgaatgttaggactcaaactaaaacctcctagctccacttccccttgattccatgactctgtttctttggtagcttggctcttccattgcatttttcttgaattagtcgttggtagttttggctcataatgcggttgtatttatattttcttaaattgtttttgaaaacgcagaggagcacgtccgtcgatagaggacgatggagggctaagcgttctagaaagagcgatggaaatgggagcgataactgatgaag

SEQ ID NO: 24076 - DNA, 489 bp, Arabidopsis thaliana columbia
cttcccgctggatccgccgtacctgtagcttcaattccatcagattccgatcagaaatggcaccgtatgactgaaatcgttcatcagagaccaccgattgatgattcacgacgtttattccagagactatggactgacgaagacgagatcgagcttctccgtggctttctcgattacatcacaaaccaccgtggtaacagctctcatccgcctgatacggcgccgttttatgaacagattaaatctaagctacagttagagtttaataagaatcagcttgtggagaagctaaggaggttgaagaagaagtataggaatgttatgagtaagtttagttctggtaaagaagtgttctttaaaagtcctcatgatcaagctacttttgatatctctaggaagatttggaatcaaactgggaaaattattggttttgaagataataatgtgatggatttagaagaaactaatcatgtaaataacgcgaatggt

SEQ ID NO: 24077 - DNA, 349 bp, Arabidopsis thaliana columbia
gatggtgaagaattgtgatatggactctttgtatatcaaccgtttaaggtaccgtgctccgtgggatgttctgtctggaaaattccgacgtggcaccgtgacagttgccggagacagtatgcacctaatgggcccattcttaggacaaggatgttcggctgcgcttgaggacggtgttgttttggctagatgcttgtggaggaagttaaatttaggtcaagacggtataattaatgtatcttccttcgcttcaaggatgcaaatagaagaagcaattgatgagtacattagggaaagaagaggtagactcgtggggctttcgacacaaagttatcgtaccggtagttta

SEQ ID NO: 24078 - DNA, 641 bp, Arabidopsis thaliana columbia
caaaataatagagcactaaagcttgttcgtactcttttttacacaacatgctaataatttttataccttaggagtgaaattttagtggtccaacaacttaagcacctaagatccttccccacttttgtttggggctcctttatatctcttccaatggttacttttacttcctcttcttctcttcttgttccatctttcatgtgagagagagagttgaattttgcagatgagtatgagaagaagcaaagcgtaagggaagaggagcttacgagaactgagtgaggaagaggaagaagaagaagaaactgaagatgaagatacttttgaagaagaagaggctttggagaagaagcagaaaggtaaagctacaagtagtagtggagtttgtcaggtcgagagttgtaccgcggatatgagcaaagccaaacagtaccacaaacgacacaaagtctgccagtttcatgccaaagctcctcatgttcggatctctggtcttcacaacgtttctgccaacaatgcagcaggtaaatttttgtcatcttttttcaaaactcctgcaacaataaccataaacaagaacaagaaatatgagaccttttacattttgtgtttaaggttcacgcgctcagtgagtttgatga

SEQ ID NO: 24079 - DNA, 541 bp, Arabidopsis thaliana columbia
gttagtcctccatgtccattactcgcttcttcataactattgctgaattctcccggatcctcagcagattccttgtcctgcattgttactagcctatcctctaacaccttaagctgatccaaaatcactaacctctcttcctcaaactctgataaagattcaccaagcatgctcatatgttgtacgcaatctaatgttatcttctccaaatccacatccatctcagaagaattatcctcttctctattctcctcctctttatcatcatcatcagcctcacaatcgttttccacaacgatgatcttgttcttagctttcgattcatactccaaaacctttgcccgataaacctcaagttctctctggagttgttccttctctttctctcgtttcaccatcaaatgattcaatagctgcaaggcttcttgatcatactcggcttgttcctccatcattctctgatactgcaacgcttccatctgaactttcgctttctcttcttgtagcctcgtgatcattgccattgtctggttagccgata

SEQ ID NO: 24080 - DNA, 540 bp, Arabidopsis thaliana columbia
tagtaactgccgccagtgtgctctaaagtatttgcgtttggctcacattcccacgatgaaaacacgccactccttgaaccaacgggcgttttccgtaacactgaaagaatgtaagcgtttacccactaaggtattttcatggcgaccataaaggatgtagctcgactggcaggcgtttcagtcgccaccgtttcccgcgtcattaataattcacccaaagccagcgaacgttcccggctggctgtgcatagtgcaatggagtctcttagctatcatccgaactccaacgcccgtgcgctggtgagcagtactactgaaacggtcggtctggtcgttggtgatgtttccgatctgtttttcggtgcaatggtgaaagctgtcgaacaggtggcttatcacaccggtaattttttattgattggcaacggttaccacaacgaacaaaaagagcgtcagtccattgagcaactgatcctgcatcgctgtgctgcgttggtcgtcatgtcaaaatgatcctggatgctgatttagcctcattaa

SEQ ID NO: 24081 - DNA, 555 bp, Arabidopsis thaliana columbia
tgatgacggaaataaccttgcagatggacatgaagtcgtggtccgtcttgctatcgccgagccccaaatcaggtaaatcagacgctaggccaccaaactctctcaaaacgacgtcacgtttgtactgaccgacgagaatacctggttttctggtgaacccggttgcccgacccgatttggagacctctagctctgttccaagaactttatcaactcctaggaatgttttcacgaatggctcgaccataattcgagggctcgcagttattatgtaccgtttcccgaacgtgttgaagatacgccaggtatcgggcctcacgtcctccgcatagaacctcgggaggacggaacggaccactagctcaacgtctcggatcttgagacccgcgaacgtgatgaagacaaatacgttgatggctaaagtctcggagatggtcaagtacgtaagataaacgaatggtacggacacaagtaggatcaacgctcggagcaagctccctgcctcgagggctacgaggaaatagtaagggaaggcgctacgagagattagtagtg

SEQ ID NO: 24082 - DNA, 589 bp, Arabidopsis thaliana columbia
tgtcacatttgttccaaatctgcgaaggaacttgatctctacagatactttggataagttgggctttaagcatgaaggtggagatggtaagatcaggttttacaaagaaaacaaaacagctctacttggaaacttggttaatggactttatgtccttgatggtcacacagttctgaatgaaagctgtaatgctgaagggccaaaaataagacaagtttatggcattgcagacttggtcacatgagtgtgaataacatgaagattctgactgagaaaggtttgattgacaagaaggatatcaaagagctggatttctgtgaacattgtgttatggggaagtcaaagaagctgagttttactgtgggacagcacattactgaggacctactaggatacctacatgcagatctttggggatcccaaatgttacccatctctctctggtaagcagtattttccggctataatagacgataagtctcgaaaggcttggttgatgttcttgaactaaagatgagacatttgacaagttctgtgagtggaaagagttggtggacaatcaggtcaattgagagattaaagtgttgag

SEQ ID NO: 24083 - DNA, 399 bp, Arabidopsis thaliana columbia
ctttccttctcaagatccctctctttcctcttcttttccctcagcatatcctgcagttcctttagataaattgaaatcagatccaagtgttgaaagaatgagaaatcctcatcaatgtccacttcactctgcgaacaaaaagcacataataactcagtctaaccacaccaaacaccatgtgaaaaaagaaaaaaaagttgaaaaagtatgctaacattgctcaaattagcttccatctccatgtactgaagacctttctgaacaaatttgataagagcaccaggtggaaccatattcccatcaatgttggatttattaatccctgcctcataacctagagtgaatgcagcgtgtgtaaacctgcaagacaaagataggattgatatggaaaaacagagc

SEQ ID NO: 24084 - DNA, 528 bp, Arabidopsis thaliana columbia
tggttcttgtcttcccattggaagtaaatacaatatacggatcacaatgcccgcttggatctacagctgctagatcgaccccctcaattagagcaacagttagcaaccaaccatctccatgcgctttgatgccatgatcactgcctataattggatttgacatgtaatgatcagtcggataaacacaccacgctaacaatgagagaccgcaagacagaatatgaaatggtcgatgctgtatcttcatggatgttacctttctgttttcttgcctgcatgaaacgggaaatcagttgcaatactctttcacattgaagaacgagaaccccactaacaacaaactccccaattgaatccggtaaatcaaggccattaaactcaagcccttggattgcactgggtatggcaaacacaatgtggacaaatacataaataccaatcaagaaagtggataacacggtgaaattggcaaaatactgtacagccaatttccagtctgattgaggctcagcttgcaaggaagagaga

SEQ ID NO: 24085 - DNA, 504 bp, Arabidopsis thaliana
caatattataattacatatatacgcatcggatctaaacatgtaggctagtgatggatattattgctgttattgtatcacatctatattcaacaaatcagcatattgcatcttttgacaaagaaaaaaataacgattcgaaatttcgactatcaatactatttgacctagaaaaaaagagagtcatatatgttggtcttttaggccgaaagtatttttttttttttaaatgaggttagctgaaaaacaagaaaggtaagtagaaatactctagtctgaattaggttgagttggaccgattgatattctatattttggttacacgtctaaccaatttttggttatatataatgattaatgtctaaagaccatgattcacttatgattaattcatgaaaataaaatgctaagcataattaaaataaacaggtgacgaagagagaagtaaaaggaggatggaacaattggagatggagacctcaaaagatgttttcaagacggagctt

SEQ ID NO: 24086 - DNA, 533 bp, Arabidopsis thaliana columbia
tgtctattatgcaacacttgcctttcctacttgctacaatcacagtgtcaaattgtttagtattgtatatctgataattgcttgtccttgttaagctcctccaaagcaccatatatgaagttgatcttgatagacttcttcagagtatccatgtatatctgcaagatctgggaatggaagagatacgtaggaggtacatctctttaaatgcactcttagaaattttgcaaatctatgtctgtttattatgtggagatttttcgtacttggcaatactaatgcattctcggttggtattttttccaatgaaaagagctggggcagatgataaacctctgaggatggtgaaaactgttctacatgaacttgttaagctccgcggacgcgcaattaagggccacttgtctcttgtccctattgacatgaggccacaacccatcattctcgcttacatcgatctaaaccttgaggtgagcctccttagtcgtctacttcatgccagaaattttgcaaattgctgaactgagggttgg

SEQ ID NO: 24087 - DNA, 567 bp, Arabidopsis thaliana columbia
cattgtctgtaaccgggctcgagcttcatcggaaacacagaaccgtatccttcttctctgaggagctggggatgatgagaagcagatgaccaccactgtaacgttatctgatgagtctagccttaacgcttcccttccaagttccatagcgcaccttctaggatcaccgtgtctcctaagtccttgcctgacgaaagtaacagcatactggcttgtcatcacgtcccaaacaccgtcacatcccataatcaagaactcgtcttcctcagttagaatcatctgttgaatgtccgggtctgagatcagaggtgacaaagattcaccaaggggtgaaaacctctttattgaccagtctccaagagctcttgtaacagcaaggtcaccatagagatactcgccttcaaagtaccctcctaaatcctctactcgtctccgttctggctcaaatgtagatttgtgatcaaatgacatatcaacagcttttccttttctgcagagaccgcacgacaatcacaacattagcgaccattaaatgtcttccgattacaagagcagtcaatgcggttg

SEQ ID NO: 24088 - DNA, 390 bp, Arabidopsis thaliana
gtttccagaaaggtctcgaacaagaactggtgtcttggcatggaactcaaggatcttatcatcagggagcagagacagaaacatccttcagcatgatatccgagtccagagcgattttgtcagcaaactcgtgggccacaaatctgaagtctgcggtctgaaatggtctcatgatgatagagagcctgcgtctggaggcaatgataatcaggtgatcttgagcataagctactcagtgctctgcaatctctgtgttccatatgttaagagccaaagttgaacttccttgaagcctatcatattaacactggtgagtactttttttggaaacagttattggtatggaacaatcattcacagcaacctattctgaagctgactgagcataca

SEQ ID NO: 24089 - DNA, 575 bp, Arabidopsis thaliana
agaaacaccaacggatcttatgttacggtagaactcgtagagtgaaagggagagactgttagctaaggtcgccgtgtacgagttatcagactgaatcgctgcttgaaagacctcgaaatcttccatccactgcataaaaccaaatcagtaccaaaggattaaagagaagatattacaacacaataataataaagtaggcaattaaagaaagttaacctctaaagcaaacttgtgatctgcgacatcagttttgttgaaagccaagacaagaggcaaccgagtcttgtagagaatactacaagcgtaaagcatgttgctcataaaagtgattgggcttgaggaacggggagtatcaaccacataggtgacaacagtggggaaggttgaagcgaaacgttcagtgattatagccccagaagcagaccatgtaaagatctcaatctgaccaggagtgtcacaagaacataatcaagctggtctgcacgtttctcaatcacagagacaacctaaaacaagtagcaaacaaagacagatcaatcaatgaaaactgagagaactaacacaatgtgagaaga

SEQ ID NO: 24090 - DNA, 952 bp, Arabidopsis thaliana
gtgtttttttcttttcaatacggtttcggattgatgtttttcgtgtttcgtagctttggatcatatgatttactcatgatctgttatcagatcttgatgagatgggatgtatggaaaaggacacatctctaaatgtgagcatacctgtcttaatgatctctaagtcaagcggagatgctctcaacaagtctatggttgacaataagaatggtgagcctttgtgatttcgcacttcagtttttctcttgttggtcctgtagctctacaatttgaaccatctggtattcgtataaatctcttttaggctaagtccagtttctttatgatgcagttgagcttttgttgtatgctccaaagcgtcctgccgtggacctcacagctggattgttattgctcatggctgtgggaactgttgtcgttgcatcactgtggtcagagcttacagatcctgaccaagctaatgaatcttacagcatactagcaaaggtgtaccagagaattgtggttaagcacttttgcatgctatggtttctacaattaactgcctttgatatcctatacacgtagtttacatttcccagatactttgcgtagcagcctcttgttattctgtagacttggtgatcaaaacttcagtttatgtagctgaattaacaatgtctttttaaagaaaaaaaaataatttactgaattttttccaggatgtttctagtgctgggaccagaaaagatgacccagagaaggaaatccttgatataagtgtcactggtgctgtattttttattgtaacagcctccatatttctgctgctccttttctacttcatgtcatcatggtttgtatgggtgctcaccatatttttctgcattggcggcatgcaggtaatttcattaacatccggcggttttgaacctgtctagaatttagattaaatgtatatgtgctttttccg

SEQ ID NO: 24091 - DNA, 650 bp, Arabidopsis thaliana
  unsure (1)..(650): unsure at all n locations
accaatgttgttaggttgctcttgcgcatctacaatgtcagccattgtgtctgttgctgtccgttctttcagttggcgagcaatacggttgatgttatcgttgaataggaagttctaattcccttgtgaccgtgtatgacatgtatcaacctgactataacagacgaataaagtgtgttgctaagtacctgaaatacaaattctgaaaagacacaatgttagtatctcttataacaaaaacgaacttgatcttaacaattttgaaatctcaaatatagcaaacaaacacccaattggcaacggcgccatattgataataaatttttaatcaattatcctaaaacacaattcatgtcattgtagtattttaggtgtcaatccaaatgggtgtgatgcaaacagatgagatgtgatcagaagtcactaagtcaagccaagcaataacagttttggggtttctacagtcctaagcgaacatgcagaaaacagaagcaataacagaattactaagatcacgtcgccacaacaggctgatgccagaagtaggatgtggtcgagtacaggtcgagtaacagcaggatatgaacagctatcatcgctgncagtctgttccagacactgggtgtggcgagtatctggcgagtacagca

SEQ ID NO: 24092 - DNA, 513 bp, Arabidopsis thaliana
cgactctagcctcctctcatcactacgtgattaggctgcattctacctacaaatgtcgacccaacatcctttttgtggatctctgacggatatgccgatccctttttgatagcttctttgaacaatgcatcacatagtatcggatccaacaccaccattgatttgtttgttggctttactagattttccttctcaatgtatttgaacacaacgtcagtggcttcagaagctgtgtacagatttcctttgtcttccccaactgatgcaaatattgcactattgtgtatgcttgatttatagacctctataatttcaagccctttctctgactgagcttgcgccgtggagcgctctccaggagactcggagacttccgctttctttttctctggcttgaaggatttgtaatctgggtggctgcggttgactgaaatcaatactatctccttcttatgcttgtctccttaacagatactgcgcatatatgtcaaagatgtgacagagtgcagttgc

SEQ ID NO: 24093 - DNA, 525 bp, Arabidopsis thaliana columbia
taacacagcaaaaacatcaaaatcaaacaacttaatctagatcatacacatatatcacagcaatatcaacaaaaacctcactatctacaacactccaagatctcattttcaccaataacaatcaacgtctacaaaactcattatacagctgaacagcagtgatcaccaatatgaaacaaaatcagctaaaactcaaatttagggtttaaagagtcacctgcttggccttgtaacccaaacgacgagccttatcaggacgagtaggcctgacgagacgaacaatcgaaggttgctgtctgtactcccagcacctaaccctctggaggaatctcatcacatcggactgtttcttcctccatagctcagatacatacttgtacgcacctatatcaatcaaatcattaagctaagtagtttgcaataacagatacgtaacagaaacatcatttgaacaaacaatggagaagctgaatcgatctaagaaacgagaggatttgatctagaagaagggatggaggagaagga

SEQ ID NO: 24094 - DNA, 488 bp, Arabidopsis thaliana columbia
aagtcttatactttggtgaacataaaaaatttagttaccttccggtcccaagtctctccacagcttgaacaagggcctctacttcagcaacagaaaaaggtcgacggatcctacgctgtgccacttcagatcgcttggttttccgaggtgggactactgtcaacgcctgagcatgcagaggagatacaggaatcaaggctctcgagtagatggttttacccctatttggtgcagagggtttggagtcaaggtcactttctacagagttactcggtttagcatgcttccctggtgatgggagacacctaatgatgtcaaaaaagttttggaaaacatcagaaacagagttcttctctacactaaagaaagaagcagcatacattgacctctggatagagactgaccttgttagagtgtgaggtacattacagggacgtgcaaagtcagaatcttcaggagatagtggttttgtggattgtggaggattt

SEQ ID NO: 24095 - DNA, 550 bp, Arabidopsis thaliana columbia
gtatactgcagttatgacagacgccgaaaaactctccagagggacttaaaacaataggttttggttcttccatctgcacattaacaaaaatgattatagaatcaaacatgaggctaatcgaaaaatggttaatccacaaatctgacctctttcaaagtgtctccactatgaagagggtcttgagtgagatcatatctccggatttgtccaaacaaatctttggacacacttgaatagtcctcaaccgaaacataagcaatcacggaatgtgacacttgagctggaatcatcacctacaaagtcccaacagacacttagaaaagggcaattgaaagttatcaaatttttgtttataagctgcaaagtatggaactttaacagaccagagagtgaattggaaggtgggtatcaaatatcttcaaaagcttcggcgcagagaactcccaaatccgaattttccatcgagcgacgaagtcaacagtaactgacggtttcgtcggaagcggatcaacaatcacagacgtcacaggcgctgtatgatctcgagtga

SEQ ID NO: 24096 - DNA, 476 bp, Arabidopsis thaliana columbia
cgatctctgataacgtcctaattactcacgagacccttcacttcctaaagacctctggagctatgaagaacttctctatggtggtgaaaaccgatatgtctaaagcatatgacagattggaatggcctttcattcaagttgtgttgattcgcaaaggttttcatcctattattatttcttggattatgcagtgtgtgtccacagtgtcttattccttcctggtgaatggagttcccatgggagaggttattccttcaaggggtatcagacaaggggaccctttgtctccttatctgtttattctctatggagatgttcttccaggcctttgtgagaaaagttagagagatggccaacttattggaatcagggtagctagaggatgcccgcgaataaatcacctcttgttcgctgattataacatgttcttttgtaaggcaaaagcaaagggttgcagagctctccagcagattttg

SEQ ID NO: 24097 - DNA, 538 bp, Arabidopsis thaliana
  unsure (1)..(538): unsure at all n locations
gagagcaagattcgtttctgtgtttccactttggatagtgttttccatatacaacttctctggttccgaggtgtgtgtgcctcgtcaagaacaagaagtccaggccttcccataagtatctctctgatatcatctaattctttgtctggcttcacttctctcaccatctttgtctttttgtcctcgtccttaactcctgcaagcttctcatacagattgtagctgatcccgagtatgctcttcgattttatccaagagtatattttcaccatccttatctcattattgcttcttgcagtggcattcttctgcatcanaagtcccagcgccgccgagttctctttcccagtaaagtccaaactgctgagattatgaaagggaatctttatgttccatttcttgaatcctctgccatgtgagaagcaactcgcaggagcaatgatcactggtttgcaatctgggaagcattgaagataggcttgcaggaaaatgatggtcagacgagtttttctggtcccgggagcatgtgacatgatgc

SEQ ID NO: 24098 - DNA, 594 bp, Arabidopsis thaliana
tttatatatactcaacagcaaggaacaacaaagatacaaacggtgaaaatttgtatattcaaaatttacatattccaaatcgaaaagtaaaaaaaaaaaccaaacaaacaaaaggttctcctctcacagaagaaagagacctcaaaaaaaatccgagaaaagaaggggcgcacgcgcgtggtcaaaccgaaccagccagccaccgtagatctctcagataccatcggatcttcttcatcttccgatcttttactcagtggagagagaaacacgagatcaaatccctcccaacgctacgctgcgttttagagacgcaatcatcggaaaccaaagcagatctacaaagaggacaagtgaaattgaattgatgaagccatccttccaaacacttcttgtggaacacgtgtcgacattccagcttcctcacctcttcaccttcctttaacttcgacaaacacacaacacaatcggagccgccaccactccgtcaccgcaccggtacgagaataccgattaaactaagctgatcggcgagacgattatgttggctagtccgatgctatagagacatcgctacggggagataggatttga

SEQ ID NO: 24099 - DNA, 569 bp, Arabidopsis thaliana columbia
  unsure (1)..(569): unsure at all n locations
aactgctgcagaaaccattctagcagcatctatctttgcaagtccaatgttctcagcgagcccagcaatgaactctcgggcatcttcactacaaatctcaacagaagaagactcccacggagctctacacgagagttaccaaacaagttcagaattataccagaagccaaaccagtagaatctacttaacaagtaaaggtcaatagatagaaacctgctgcaagcgttcaggacaaaatcaatagatgttctgtaaaaggaatctcctgtattttttggctcaaaagtgacttgtactccagaaattctacatactctacgcagctgtatataatttcatagcaacaaagaaagataaaaatccaattaattcaaatccattcaagataattccacaatctagtggaaagaagaaagtagacatatactaacttgaataatatcatcatccgtgatgtcttttccgctggttctgttacaacgatcgctggaaactanactagtcagttacatttgtaggacataaccatgaacacacaagtaatactaatacgattttgtagaaatga

SEQ ID NO: 24100 - DNA, 538 bp, Arabidopsis thaliana columbia
tgacgaggcatttggctatcttaagtgtgatcgccatcacgccaatggtttctccgtaagtagtatttggcgtagagcaaagaagccggaaatcacggtcgacaagccattagcaaacatcgaacggtgcagacctggatcgcgcagacgatcttttttgacgatattagccgttactaccaggtgccctacgtgttcggcaataaccactaacgccgctggcagaatagtcagaatggcaaaccactcgaagcgcggcgtatagagggttggcagcgcaaaccagtgagcattagtaatcggcgtggtatcgacaattcccattgcgaaagagagcgcgtaccccaccagcacgccaattaaaatcgggataattgccaggaaaccacgaaacagcacggaacctaaaaccgtgaccgccagggtggtaatagagatgatgatggttttggagtctggcgtttgccttcagccgggagtaaaccgccataccggcagctacgccgccagctccagaccgatgacggcaacgattgcg

SEQ ID NO: 24101 - DNA, 305 bp, Arabidopsis thaliana
  unsure (1)..(305): unsure at all n locations
nnnnnnnnnnnnnnnnnnnnnnttaaaggataaatgtcttaaaaattgatggcgttgggattccagccatgacaggcgctcacttaaccaaagaatacgttgcccaaccgagcgtaatgcgacattgcgctcccgtccgcgcagtaaataccaggcgctgatcgccataataaacatggccccggtcacgtagcccgccattacggtgtgcacaaatttcacctggctgaccggattaaagaccagctcgctgaagctggtcatctccatacgcagggtgtcgatatcagaatgcgcaacggacg

SEQ ID NO: 24102 - DNA, 495 bp, Arabidopsis thaliana columbia
  unsure (1)..(495): unsure at all n locations
nnnnnnnnnnnnctaaagaaactataaacccatcgccagagagtctttctctctgaaaaagccgcttatcacagtgcataaatttgccgctgctttaatcagccaatattcactgtgaggtatttgctaaagccggtaacgaccaaacggatatttagtcaggctctgaaaacagttcatacaaaacagaacgtgactgtgatctattcagcaaaaatttaaataggattatcgcgagggttcacacatgttatttactatccaacttatcataatactgatatgtctgttttatggtgccagaaagggtggtatcgcgctgggtttattaggcggtatcggtctggtcattctggtcttcgtcttccaccttcagccaggtaaaccaccagttgatgtcatgctggttatcattgcggtggtggcggcatcggcgaccttgcaagcttcgggcggtcttgatgtcatgctgcaaattgccgagaagctgctgcg

SEQ ID NO: 24103 - DNA, 362 bp, Arabidopsis thaliana columbia
caatactctataatctccttatccgttggtttccgggtcaacccggttttaaactaacaaaagcacacggcgtctctccccaaaactcgtcaggtctagccaccaccgccgcttcattcaccgccggattcgtgtacaacaccgcctccacttccacactactcacattctctcctcctgaaataatcacatctttcgatctatctttaatctctaagtaaccatccccgtgaatcacaccgaggtctccggtgaagaaccacccgtttttaaacgaattttgagttccgatcggattttttaagtatccgagcatgattgaactccctctcaacactatttctccgactgtttctccgtct

SEQ ID NO: 24104 - DNA, 519 bp, Arabidopsis thaliana
ccccttgctttcgtccatgtaaccaaccaaactaactcacaaatatgtttattttcttttcttttttaagatttgaaaagtctctaacttactgatcacttacacagacaccgggtacatggaggtggatgttgggagtctcggcgattccagcgatcattcagttctgcctcatgctaacgctgccagagtctccacggtggctctatagaaatgataggaaagccgagtcaagagacatcctcgagagaatatacccggcagagatggttgaagcggagatagctgcactcaaggagtctgtccgggcagagacggctgacgaggatattatcggccataccttctctgataagctcagaggcgctctctcgaatccagttgtccagccacggtctggccgcaggtatcaccgtccaggtcgcccagcagtttgtgggaatcaacacagtcatgtactacagtcctactattctgcagtttgcaggttacgcatccatcaagacagccatggctctt

SEQ ID NO: 24105 - DNA, 586 bp, Arabidopsis thaliana columbia
  unsure (1)..(586): unsure at all n locations
tctcatcaaattccctgccataaaagtctagaaacagtaagaacaaccagcatgaattcattacataaaaataaaaaaaaaacataatttttttttccaacttacttgaaaaagtaacctctgacattgcatgcaacatttcttgctacgcagagatgtggaacgacaagggctgtctgataaatgggcatacgaaaatggttagatacccacttggaaaattaagtgatacagaatttaattcacaactaaatgcaagagcaaccacatgcctctgcttgtggagcataataaggaagatatgcagaaacaacatgaacccgtggttgatccttgtcctcccaaaccttcatacggtcatcaatgaccattgccattttcgggtggcaaatgccaccattgaagacacttaacaacgatttcttggcgtctgatatgcaaagagcaagacataaaacaattgttagttcgagtttcagagagagacagagacagatagttgggtaaaacatgatcaggttcatctcttaatactanaaactgagaggtcggcaaatcaatcaggcacgatagagggagggagaag

SEQ ID NO: 24106 - DNA, 1293 bp, Arabidopsis thaliana
tcacatgtagtaaagagaatctgaaattgtaacgatgtgcgatcatagactctgaagaaaagtcttcccaacaatcaaaggcaagacttaaacccaacttcttagtataatattgcagatcttatcaaatgttctaatctaagcataatgattccacgttgttcaaccaatgagaaatggagcaaatctgagaagcaccgaccgaactaaacagctacatagagacaaccaatcaaaacaagtctgtgaattgctcagagattataaagattttcctagcaatctaagtatgatgagtcagtgtttcatccaactaaacatgaatcaaatcatagcaatttcagagatgattatagtgtaacaaaccgagtaggctttagagggatcaagcacctgtgaaaagcttgaatgctgttgggatgctccgtctttgcgtaacccaaaaaacatcagatttcttgttcaaatacagtccaggatctataatcaccggttttgctctttgtgatctaaaagaaaccagatcaaaacaacaacaaaatcagagttccttctactatacgaaacaaaagacacagaaaacaaaaactctaaaactcttcttacgctttccatccaatgttactagtatgatcaatgaagttcaaatcccgcggcaaatgcgaaaagatatgcaacaaatctgacacacaaaaaggtcaaatctttagtgaacaatcataactaaaagtttcaatttttctcaaacaattcctcagaaacctcaccatcttgagtcactaaaggatagtcagaagagctaagattgataaaccaatcccaatcagctccttctctaagcaaaatcgcagcggcgtgaagtgtattggcaaccatagtaggtccacgatacgtgacaagattagctttctcaatcatatgaacattcataaaccttcgaaacaaagacgagtttttgatatatccatgaagctcctctctctcctcacgcgaagattctctatctaaatgaacaacataccgattattcggatggtaaagagccaaaagagttcgccggagagatttcccgtcgccggcggatccagaaatcaagtaagcaaaacgcggtggcgacgggagtgatgagatttgttgaggtttgattttggattcaacgaaagctgatgaaccagatccggttaacaaaacgggtcgggtaaaagggagaaatcggactcctccggttggtgaagttagggttgttgtgaggaagagtaagaacaaagcgaagattgaaccaatcaatagagg

SEQ ID NO: 24107 - DNA, 473 bp, Arabidopsis thaliana
tcggtaaacagttaagagtgttgaaaatcacctcaagatgatgtttttcggcgtttcctagtcttccatcatcagaaaacacgttttctttcgtaacatgtctccttccaaacaacattcgcatggtcactgcgtaaccataaaccctcgagagctctctaacatcgaccgtctcggaccgttgatacatggagtgaacgtaagctatgagattatccgcttcgatggttcttgcagcctccaacattttcaacgtcttaacggacataatttccgttgtgatcactcttttcatcttcatgaattgttcaccgtacggtgaaattcccattgatttgtaattgtctccgattgtctccatgatgaaaagttgaggccggtctgccaaatctgcgtctcgctctctaaacgcttctctagcgatctcgtcggagtttatggtgatggcacggatgccggcaaagttgaaacat

SEQ ID NO: 24108 - DNA, 599 bp, Arabidopsis thaliana columbia
cttaattttgactcctacaagattttcaaaggctaataagacgcatgtattaacaatatatacccggtgattacaggttatgactaacgggaggttcaagagtgttaaacacagggtcttagccgatacaaggagatcgaggatttcaatgatatatttcggcggaccgccattgagccagaagatcgcaccattgccatgccttgtccctgagcaagatgattggctttacaaagaattcacttggtctcaatacaaatcttctgcttacaagtctaagcttggtgattatagacttggtctctttgagaaacaacctcttctcaatcataaaacccttgtatgagagtagtcatgatgatctttatcatcctttgtacgatagaaagtcataatcacaaaaagaaggaaatggatagtgttttggattagcttttttatgtttggtatgtttttcattaggtacaaaagctttaggctttgcttagagtttgcccaaccaaacctaacttttgtatcttctcgtcttcttcttctttttgccataatttgtttatctttcttgtaacaattagctagtgtttattttctctttatgt

SEQ ID NO: 24109 - DNA, 183 bp, Arabidopsis thaliana columbia
tggggactttacagcctctttgcatattgactatccgatgctgtttgagcttcgtaatgctggaattgaacgtgttacacactgtggagtccttgagttcattgcagaagaaggcatgatttacatgccatattgggtaagaatcagtttcctctttgtttgtgaatcgaagtactctggatc

SEQ ID NO: 24110 - DNA, 552 bp, Arabidopsis thaliana columbia
ggtggtgatcttgagaggctttgatgctcgaatccgagaatacataaaaaacagaaagcaatggcaggagaagaaagacaaagaatggacggtgtcaagggcactagttggggctctagactacttgcaaggaaaaacgtctataatagaagaaaatctaaacaaagcagactttaccgctatgtggagaactctagcctcagagatagacaagttgttcttcaacagcatcttgatggcgaacgtgaagtttaccaatgatggagtcgaaaggttaaaagtagacatggaggttctatatggggttttccggacgtggtgtgttagacccgaaggtttctttcctaaactaagtgaggggcttacgcttctgaagatggaagagaagcaagtgaaggacggtctgagtagaggcgataagtggctacgtgagaatagaattcgatatttgagtgaagccgaagccaagaaggtagcgaagagtagagtgttctcttagttagatatttttcagcaaatcaatatctcatacgaaggtacattcataggtga

SEQ ID NO: 24111 - DNA, 522 bp, Arabidopsis thaliana columbia
agaggatcccccgtaaagagaaactcggagatcgaattaccgcgcttcaacagttagtttcaccctttggcaaggtttgtgttcatcatgaattcatgatctgttatattgatatctctactatatattatccatacataattacgaaatttttttagctacttctgttttcaaatttatttattattattttgtgatgatttttacagacagacactgcttctgtcctccatgatgctatagattacatcaagtttctacaagaacaaatcactgtaagttgataatctctcaaatatgaaatactactactaattaattgttggttttagttaactgttatatttattctttttataatcatttaaataggaaaaggtctctactagtccacacctgaactctataggatctggtgaacagaagcaggtacttaacttagttaacggttaaacaactctataatctaaaatcaattaagtagtttgatttttgttcttttgcttatgatcattaataaga

SEQ ID NO: 24112 - DNA, 611 bp, Arabidopsis thaliana columbia
ctctgcaagaacgagaaagttgatgatgcttatttactgttagacgagatgattcaaaaaggagctaatccggatacttggacttacaattcgataatggcgtaccactgcgatcactgcgaagtaaatcgagcaacaaagctgttatcgaggatggatagaaccaagtgtttaccagatagacacacttacaatatggttctcaagttgcttataagaatagggagatttgaccgcgctacagagatatgggaaggaatgagtgagagaaagttttatccaacggttgcgacttacactgtgatgattcatgggttggtgagaaagaaagggaagttagaggaagcttgtagatactttgagatgatgattgatgaagggataccaccgtattcgacaacggttgagatgttgaggaatcggttagtcggttggggacaaatggatgttgtggatgttttggcagggaagatggagagaagcagttcttgttcggttcaagatatggcggttgagatgagagggaagagaaggagattgggacgtagaagtgaaaatagtgaagatgatgatgatgattttgagcttgaaagagacactatatgagaata

SEQ ID NO: 24113 - DNA, 530 bp, Arabidopsis thaliana
tcggtcttgacgtgttcaacagatgctgcaacggttgtctcggcgtcagttagagtgctcctggcggtttggttaacggttttctcagcatcagtgagagaagccgtgacggattcagcggtgcttgtaacggattctttggcttcgctgagagccgaagttgccttctctaagaattgagccatttttttttgtggtggaatatttttgtcagagagaaacagagacttatataataagttaagtaagaagaagattgagaggaatttaggaatgtgaaacgaagtgatgctgttaaagagggctgtttcaacgcctccagcgaaacactatagacagaatctccaaacgtgacttcctttatcaactcttgattttggttattagcatcattagtttttataattaacaaaagtcatcatgagtataatatgcttattgatgagatattttggggtgtatttttttctttgtaataaggtgaaataattgggttgcattatctattcaaatgggtcgatgattgaatt

SEQ ID NO: 24114 - DNA, 852 bp, Arabidopsis thaliana
agcttaccaccttttcgctccaaatttcgccctctcgtctattatggattgttgaactacgaacaagattaacattcactttcgctctctcctcttcaccatcaatatgccaaccacctaaccatcggtccacgtaatccacgggactaaaacctggcaaacagtttagagtgttgaaaatcacctcaagatgatgtttttcggcttttcctagtctcccatcatccgaaaacatgttatctttcgtgacatgtctccttccaaacaacattctcatggtcactgcgtaaccataaactctcgaaagttctctaacgtcgacctctccgaccgttgatacatcgagtgaatgtaagcaatgagattatccgcttcgatggttctcgcagcttccaacatattcaacgttttaacggacataatttccgttgtgatcacttttttcatcttcatgaaatgttcaccgtacgatgaggttcccattgttttgtaattgtctccaatggactctacgatggaaagttgaggccggtctgccaaatctgcgtctcgctctctaaaagcttctctagcgatctcgtcggagtttatggtgatggtgtgggttccggcaaagttgaaacatgcgatatccgtttttagctctttcatggcaaggtggaaatatttggacctaggacgagtcatgattagttcgggtagattgccgaggatgggccatcctggtcggccaggaggaagctggcgacaccggtctttggttttggaaggccttgagaatattcgacctagtaaagtgattgatgcgatgaagacgataaatcctagtaagatttgaaagcatgtgttaaa

SEQ ID NO: 24115 - DNA, 503 bp, Arabidopsis thaliana columbia
cggtaagctgcttggcatggactttttacgtacaagaaatttgacagactgttaaagcctaaatcaaaatacgtggtgtgtagtgtacaccaaactgctatgcgaggattatgagtgtaggagatgaggaaagcaggattgtcctgatagccaaggccaatgtagctgtgggagaggagttaacgtacacaacgcatttctatatataccattcttcaatctaaagctgattgattgtcatagtttaagaaatgttgtgtggtgttttggcaggtatgattacttatttgatccagacgaggcagaggaactcaaggtgccatgcttatgtaaagcccctaactgcaggaaattcatgaattagaatagaaaggtatagatctctaagtttacttcacaggctacaacaccaagaagaaaaggccaaagcaagattgtctctttttgctccaaaaacaatagatttataggtagagagaaaagctaagtgatccaagtctgat

SEQ ID NO: 24116 - DNA, 460 bp, Arabidopsis thaliana
cccctcgattgcctccaagctatattcaattgaagcatactctgaagtatggcaacaagactctctcagttcaagacgttggagtcatcatgcagaagtcacctcgaactgtgaactgtctgagcaaaaggaaacaattagagcacccgcatcaacggcactctacactgctgctagaggcagacctcagaccatgaacactcagggtcaaggtaagggacgtggcacgtcaaactctacgagtcgtctaacttgctggttttgcaagatagaaggacatgtcaagaaagattgctatgctggaaagagaaagcttgagactggaggacaaggaaaagcaggtgcgattacaggcaagttggtatactcagaagcattgagtatgtctgatcaggaagcatagggcagatgggtgatagactccgggtgtacatatctcatgacatctagaatggattgg

SEQ ID NO: 24117 - DNA, 597 bp, Arabidopsis thaliana
agaaacccttgccaaacttgagctacttgatctctgtggcacacatatcctcgaatttccaagagggttggaagaattaaagagattcagacaccttgatctttcacgaacacttcaccttgaaagcattccagctagagttgtttcgaggttatcaagtttggagacacttgacatgacgtcaagtcactaccgctggagcgtacagggagaaacacaaaaagggcaagcaacagttgaagagataggatgcctccagcgtttacaggttctttccatcaggctccattcttctccatttcttttaaataagagaaacacttggatcaaaagattgaagaaattccaacttgtagttgggtctcgttacattttgcgtacaaggcacgacaagaggaggctaacaataagtcacctcaacgtatcacaagtatccatcgggtggctgttggcttatacaacatctctagcactaaaccattgtcaggggatcgaagcaatgatgaagaaattggtaagtgacaacaagggtttcaagaatttgaaatctctgacgattgagaacgttatcatcaatacgaattcttgggttgagat

SEQ ID NO: 24118 - DNA, 494 bp, Arabidopsis thaliana
  unsure (1)..(494): unsure at all n locations
nnnnnnnnnnnnnnnnnnnnnctaaaggtcacctgaaaaccactccagatccaaccaagataggtggtgttgccgaacggggcttgttgtaaaaaaataccccagttccagtctatagacataaatctactccagaaaaaagagggtagcagcgttaactgctaccctcgaagattgttacccagcgtattgcggttttcaggcccgatggggaacgaccatcaggcgtatagtctgtccgtgctacgtaacaatcgagagggctggaatttccgcccctggttcttgtaattagttcagtgccttgtcattcggttctttgaacagtgctttcatttcgtctgacagttcgaaattcatgttcaggtttttcggcggaattggagttttgaaccacttatcaaaccatttttccgcttcaccggagtctgcacctgagcgatggtgtaaccatcagcttgttgaactgcggatcatctttacgcaacatacaa

SEQ ID NO: 24119 - DNA, 430 bp, Arabidopsis thaliana
caaattctcttctagttcatgaagttcccgccgctttcctgccgtcatgtctgtgcgtcgcgccagttagttctgcaatgaacgcacaacgctgatatttgccggaacgccgttagttgtataaccctgccgatgcgttttatattctgtcagctggcgttgttggttttgtttcagattctgtaatgccaaatcttcaaagagcagatcaagatactcatctttcgaaatctgaaagacaaattcatcctgaccttcaccatcctggctggcctggccctgaccactgcctggaactccgccgccatcctggggacgttcaattcgtgcgttctggacgaaatggtcattgcccggatgcacgttgtggtgcagacgtcacgcccctgatgaaacatcggttcgctaatatcttctgtgggaatggata

SEQ ID NO: 24120 - DNA, 514 bp, Arabidopsis thaliana
ggtacccgcacctccaaggttcataatcttcaaacccttagagctgcagcaagaaaacataaggaatattcaccacaaatcttaaatgcactcagtaaatatagacggagacaatgaaataatccgcgctaaccttatgaaggtatagagattgtgatactcatttctttgaatgttacggaacagatgttcatggtcagttttcagtcttatgagaagatcaaagtaatgcatgttagcaccaccagcagcatgcctttcaaactcgacatagtcaatctaaaaacgaaaaaaaaacaggttagaaaacccaactctatctcaaagcctataaaaaatctccaatccttaagaaccataatttacctcatcgtgaagtataagcgttggaggtttaggtaagaagaaaaatcccttctcgagtggataaagaaccccatcttctgccttgagagacgatttcactgcaaaccgcatcttgggaactgcggaacttcccaggtttagtgatctt

SEQ ID NO: 24121 - DNA, 533 bp, Arabidopsis thaliana columbia
  unsure (1)..(533): unsure at all n locations
nnnnnnnnnnnnnnnnnnnnctaaagctggcgtgggatccgcattactttacttaacatacccagcgtgccagccagtttttgcggcagtgtgcgcgcttcactttcaggccagacaaaggtgtaaatcaccgcggacaccacggtaccaatgatgatacccagggcgcgatcgcgaatttccaccaggtcgtacactgggccaaaaacgttttcgagcgtggcgagcgcgaaggtgaccaccatctgtgtgccgatataagaagagcgttcagagctggtggcaatccatgcgcccaacaggaaaatcggtgccagcacaaacagcaattcgacaatattgtccagccagggcatgaccagtagcgtgaataacagcgccagaatcgcgccgcaaaaggccccgccaaaacgcagcaccatcttctggtacgacgaaccgacatttgggttagcgacgatcacgcatgtcagcatacaggtgtgaatgccttccagtccacgccgctgtaaaaggtgtacagataaacaggc

SEQ ID NO: 24122 - DNA, 534 bp, Arabidopsis thaliana
  unsure (1)..(534): unsure at all n locations
nnnnnnnnnnnnnnnnnnnnnnctaaagtgacgccaacagaaatatgactgaaggcggtcgcgatctgatgaaaagcgtgggcaaagcagaagagaacaaatcggacagctggtttaattaatcgatgttagtaacttcaatcctataattcttgaagataaaaaaccctctgtagtaacagagggttttgttcattcatagtgcagggtcaaatcattcccactcaatggtagctggcggcttgccgtgatgtcatacaccacgcgggaaataccgttcacttcattgataatgcggttggaaacgcgaccgaggaaatcgtacggcagatgcgcccagtgtgcggtcataaagtcgatggtttcgacagcacgcagagagacaacccagtcatacttacgaccatcgcccattacgccaacggaacgtaccggcatgaacacagtgaacgcctggctgactttgtcgtacaggtccgctttacgcagttcttcaatgaagatggcgtcacacggcgcacgaggtcacagtac

SEQ ID NO: 24123 - DNA, 1176 bp, Arabidopsis thaliana
cccccttttatttgatcggcgacggagaagcctaagtctgatcccggaatgtctgtctccgagctcaaagaacgccacgccgtcgctacggagaccgttaataacctccgtgaccagcttagacagagacgcctccagctcctcgataccgatggtttgtggattccttttcgtctctcttcttctctcatcttcttcttctttaatttggattgaattttgccagtggcgaggtattcagcggcgcaaggacgtactcgggtgagcttcggagcaacggatctggtttgttgtcgtactcttcagggacacaccggaaaggtgactcaaagtttgcatctttatccttcaagcatgcttctttgtggagtgttttctagcctgtgataaaaagcttccattttggggttgtatctagtttgttatttagttggtggtgtttataagatgttaccagttatcatgtatgaggatttgcttaagatcctacggaaatgtagagacaggagagttgattgtgaatgttagcttgttgttgatttaacatgtgggatttgcaggtttattcattagattggacaccggagaggaaccggattgtcagtgcatctcaagatgggagattaatcgtgtggaatgctctaacgagtcagaaaactcatgctattaaactcccttgtgcatgggttatgacatgtgctttctctccaaatggtcagtcggttgcgtgtggtggattagacagtgtatgttctatctttagccttagctcaacggcggacaaggatggaactgtaccggtttcaagaatgctcactggtcacaggggatatgtttcgtgctgtcagtatgtcccaaatgaggatgcccaccttatcaccagttcaggtgatcaaacttgtatcttatgggatgtaactactggtctcaaaacttctgtttttggcggtgaatttcagtctggacatactgctgatgtactaaggtatggatattgctttcatctccttggctcattggcatcagtttgtttgataaagtagaatatatttgaaaaactacttaatcttccagaaccataccatttggatcgagtgttggaacaacatataggtttggtcctattgaatagatacgtttatttgacttgtgtataaagctagcatggatgatata

SEQ ID NO: 24124 - DNA, 768 bp, Arabidopsis thaliana
agctcactcatggagccaaaaaccgaaaaaacccgaaaatctaggcttgttttgaagtgagttagggactgaatccgagagaaagctcactggtgagaacaagctgatggctctacaaatggcattggagggatttgaggcaatggtggaagcttaaactgaggaggtgatgtaactggaggaagatttatgaccgggaccagaggaggaggcaatgtagttggaggatcaggacttataaccgggaccttaggaggaggcaatgtagctggaggatcaggacttataaccgggaccttaggatgaggcttaaccgggacctgaggaggaggcattaccggaacttgaggaggaggcatgaccggagctgtgggtggtttaggacaaaaagaacttggctgaactggttgagcaagaagggcatccgcagcaaacgtttcaatcccaaaaaagctgaacattagtttaagtttctgtgcaggacctgaagcaatgctgcagctacttgggtcttgttgaactccattgtctgaaacttgagcataacagttacttagatccggtgtcccatcaaatctcattacatatcctccaagccaattagtagtctcttctcttgacatatagacctgtccattttcatcagcacatgtgacactaatcttgattcctgcaacaaatcaacaaacacatcttaaggaacacaagcatagacagcaatgtaaaaatgttggaattattattccagagacaggaaaatcaacaaag

SEQ ID NO: 24125 - DNA, 451 bp, Arabidopsis thaliana
ataacgtgccagagaaacaagaaaaacaaaatcactgccttaccgggttttccaccagaaagtatagcactttccgtgggttcgacaccaataacctggtacaagtaaacatcaactaattaaatataactacaagtacaagtaaacatcaactaaatctaattacggaggttataacatctacagttgattccagctgatatgctacaagccctcttgctatgtaccttcaattcaggttttctttctttaatgaatcgaccaacaccagtgatagttccaccagttccaatccccgcaaccaatatatcgattttgcctcttgtatcttcccaaatctcaggaccagtcgtctcataatgaatctgcatttaatcttatatcaaaacactaacaaatacttgcagcttttaccaatggaaccagtgaatcccagatataatcgtgatga

SEQ ID NO: 24126 - DNA, 228 bp, Arabidopsis thaliana columbia
agagaagtgcctgaggcggagttgatgcagccgaagatgaaatgtgggatgacgtcaggggccaacgttagcgtgtcatggacgagagtggcagacaaggatgaatctccggcgtaggaatggatgaaggagcagacggaaggttgtggtgaggagaatgagcacgtgaggccacgagcttgagtgcattgatcggtggagcaagagacggttgagtaagtggatgag

SEQ ID NO: 24127 - DNA, 517 bp, Arabidopsis thaliana columbia
tatacttttaattaaattttgcagagaattaaaggtaatcatttgccaaggaaaaaccatgcaaatatgcaataagtagaaataatgttaatgagagtaagcgttgacatatattacgtcctggtccgaacattcttaaagttgcgtaacactaataaccttagaagatggttggttgactatcaacatcttattgaccaaatgtttttttttttttaattataaaacagttgctcattgctctagcccagagaaagcagctcaattaagtaaatggcgatgttaaaatctctttcatcgattttattcacaagctttgctcttctgttctttcttgttcatgctcaagatcaatctggtaatttaaaacagtcttggctttgtttaatattcagatgctaaaatacgtttttacatcaagtgcatcgtttagttaagaatttgcatacaattttcccagaaaactactctcccttagtatttatcttgaagcaaaccaagcttccatacatcaatc

SEQ ID NO: 24128 - DNA, 484 bp, Arabidopsis thaliana
aggatcccccgtaaaatataggcatcacaatctgctcctgatcttctttgcattttaagatttctaccaattcatctaaacaccagcttgaagaagggtaattcttagatagcaccaccagcgacactctagattctcgtattgcttgcaccagttcaggtccgatcctctggcctcgttcaatctcttggtctttaaatgccacgattcccttgattgcaaagtgaaaacgtaaatgactgagaaattttctacgaacgtctgagccgtggaagctcgggaagacatgatatttcctaacgtgggtcgaagaagaagccattagagatagggtaaagagaacttgaagaatatatcggagcgttgcattgactttgacaggagttctaatgcagttatccaaacactaaatagatcgaggagaaactctcttagagatttgaatgctgattggttgattttttaagtcttcgtatgatggaac

SEQ ID NO: 24129 - DNA, 528 bp, Arabidopsis thaliana
gcagaagaatgtcagataatctcgcggatcctctccctcaagtccattttctctaagtgccttgattacatctgtgtacatcatctccattgttcttttctgccaatctaatatagcttggactgatccactctcaggaataccttcaggccacattggaacaacaacatagaccttaaacttctctcctgctttgattttgctaacaatcttcaaagatagctccttcggaatcagatgcagagcattgatttcctctggtttgattccatccgcgctccaagcaaaagagcttccaaggaagtactggttttcgatatagatgaagtcgttagctcgtctaatcgcgtgaatgtaagcatcttgaatactcctatcaattatattatcttttccactcacaagagctgcttccgctgcagcttcaggggagtcaggaaatccagcagctgctccaccatcaatggatctacacaactgaacatccacacgtcatgatctctgagaacagacgggagaaggcgggat

SEQ ID NO: 24130 - DNA, 506 bp, Arabidopsis thaliana
ccgatgtgtctgatctttgttttgtattccttaagcaccatcccataactaattacttgtcttttggttgtagaattctgtaagatatgattttgaggcaatgactaagaacgctaagcagtacaacatatggggtccttcccaaaccaaggaagaagagagttcaaaggtgaccttatatctctagcttagtttaatagagatccgatgctttgaagtcagatgttcaagttccaacatatgtgttttgtttttttgtttttttgcagcctacttataacattgatggatcttcttacaagatctcgcgcactccgtttgagcctattgggagaccttgaaatccgcttggccctatcgcgagacctgtgagagatacaaggtttgttcacagcttttacctctagttattcattgaaagattacgtataccaattttattgataattctaatatcttcatatttcaggtatttggaaattacatacaaatgagacttcaattac

SEQ ID NO: 24131 - DNA, 595 bp, Arabidopsis thaliana
gtagtttatgtaggtgatctctaagagatttagatattgggtatcttaaaccttccttttggtttgacagctagtcttctcttggtccgttgattaagtgtatatatgggcgactttggttctaggcttctaagaattccaatccactcaagtgtcgctgatgcttatcgagaatggatggtgactccctttgtcaagatttgttccggctttagcattcttgatcatcttagtaccttacctaccccgtcttttgatttggctaagaactcttacttgtggtgcattgatgatgttgtttgtcatggtttttctgcagccaagacttgggaagcgcttagaccgagaagcactcaaaaattgtggactgcttcggtttggttctaaggcgcagttcctaagcacgcgtttaacatgtggataagtcacctaaatcgcttgcctacgcgtttaacgtatggtttccacaggttgtgctctcgacagaagttggtttggtcttgggcagaattgctttcttggacctcacgatccgcgttctccgctccttctctgcttagaaaagttgtagctcaattgtgtgaatcagagagac

SEQ ID NO: 24132 - DNA, 1034 bp, Arabidopsis thaliana
attgtgtctgagctctcaacctccaaagtgatagtcttgccagttaaggtcttcacaaaaatctgcataccacctctcagacgaagcaccaaatgaagggttgactctttttggatgttgtaatcagcaagagtgcgaccatcctctagctgcttaccggcaaagataagcctctgctggtccggtgggattccctctttatcttggatcttagctttgacattgtcaatggtgtctgagctctcaacctcaagggtgattgttttacccgtcagagtcttcacaaagatttgcataccaccacggagacgaaggacaaggtgaagagtagactccttttggatattgtagtcagcaagagtccttccatcttcaagctgcttaccagcgaaaataagtctctgctgatccggagggattccttccttgtcctggatctttgctttgacgttgtcaatagtgtcagagctctcaacctccaaagtaatggtcttgccagtcagagtcttgacaaagatttgcataccacctcttaaacggagaaccaaatgaagggttgattctttctgaatgttgtaatcggccaaggtacggccatcttctagctgtttaccggcgaatattaatctttgctgatccggaggaatgccttccttgtcctgaatctttgccttaacattgtcgatggtgtcagagctctcaacctcgagagtgatagtcttgccagtgagtgttttcacgaagatttgcatctgaaataaaacaatagaacaagtagaaaccaatcagcgaacatataccaaatcaaaagccgtaagagaaatcaaaacaacaccaaagagaaacggatctaaacataagaaacctaaaacagagagaatcgaacaaagaaaacacaaaaattgaatagatcgtccttgaaaatcctaatttcacaatcaagcaagaaattacacagatgtaaacactacgaatcgatatcttagtaatcaggacaaaatttagaagctggattgacgaaacgaacaatattg

SEQ ID NO: 24133 - DNA, 536 bp, Arabidopsis thaliana
caacaccaacatttggacgaacacagtacttctttggtgatgtgaagtaaagctgtgggtagtgggttatgttaggtagtgagatgtattgtgatgagaatcaagttgttgtcaaggaatgtgataagagattcgaaatcctgaagccagaaagaaagagaaaaagtttgagaagaatcttctttagaccttaaatgcaacataatgatgggtagtattggttagctgtaccacgcaggaagtttgcttcttcaggtcaactacaaaagatgaaaccagttagtattacaaggataacaatgccaaggcaaagatattccttttacaacttccatattttattatagatcctcagaatcgatatgagaggtaagaaaccacatcacagaatgtcagcacatacaaatccagtagcaggaaagagttagaagattcctccaaacaacagccacattaacatcacatcaattcatcttacaggagaatagacccacaaacaatagcaccactatgatagaattctacgaaatagtgag

SEQ ID NO: 24134 - DNA, 1124 bp, Arabidopsis thaliana
acacacacacacacagagcatacgtcacagcttaagcatcagcaaacctgcaaccgacagatacaaactcaaatcacaccactgaattaatatttactttctaaatgattcatagattcaggataagtacccaagctcagaaagcttcatgtgggcctcagcgtaatcagcgaaaaaggcatcttcatcctgttcacattgtcacaagaaaccatgagttctcttctctctctctctaccaagtgaaaaacagaaaaaagggaatgaaagacatacagcagcgtatttctcgaccaaaggacggaaaacagggtcgtccaatagtgctttgtcagagacaagctgaagaaggccttccttctctccgctcaagagttccctgcccatatataatttgattagtaaccatataagccactgaatcctcctacaagggaacttgggatactcacttgaagtaagagttgtcgaagattagagggtttgatgtccatgcaccttcgaagccagacctatccttgtggcatcgtccctgcgatatcatattttgctagcactcatcagaatttgtaagcttggagcaaacaaattttaaagttttaagcagttggagagaaacgaaccagagtgtgggcaccagataaagcgacaatgtctttgtcagataagcccatctgcttagcaaagacatctctcaaatggtcacaacccttggtagcatcaggaagacgaccctctggaggtggttggggcttgtcctgaaatcaagatatgcattttagaaacagaaaatcaagtcccacaattatcaatcagccatctctacaaagaaagcagaacacgttctctcgaccaaattgagtatatgataaccttagagacggcaaacaaatctacagcaatgactaacctctcttccagggtggaaaggaatgtcagggccaccagtaacttcaacggccacaacaccagcaagctgaatgatcaatttcacaccacaaggatatctagagttagaatccaaaccttacagttatcaccgttaaccaaatagtgctttttaaaatttaaaaccatgtacctgatggacacagcaaaagagatggtagggattgctcctgatg

SEQ ID NO: 24135 - DNA, 415 bp, Arabidopsis thaliana
ttgattgtgatgttaaaaaagggagagtgataagcgaagagtacgaacttgagtatggaagagattgtctagagatgagtgtagaagccgtcaaatcggaggaacgagctctcatcatcgacgatttagttgccactggtgggacactctctgcttccattaacctcttgggtaaataatatctttctactttcattagctagaaaatgaatgctacatgctaaacaagatgatttatatatttacgcttaagaagttgtatattatatctgagtataattattgaactaaaagtgagtctcttctatgcactttagagcgtgccggggccgaagttgtagagtgtgcatgcgttgttggtttgcctaagtttaaggtactatatgacctactttgttcgtttgcataagttgaa

SEQ ID NO: 24136 - DNA, 567 bp, Arabidopsis thaliana
  unsure (1)..(567): unsure at all n locations
atcaggctcaagcatcatgaagaatacttgaggatgaggttaacaaggtatggttgacaagtaaaatcagagaatacagaacaaatagaagtgagtaagttcttgtttaatatctgcaaatttgtaacagagttcttgcttctatctcaagggtagactagttttggttagtcgcattgagcgacaatgttttttgtttgtcttttggatctgtagcagaaccaagaacaggatcgtgtctgagtagtctattgctgtttgctgctgtcagtaccatcataccgaggaagatcaaaactgagatagatgagaagataagcattaagccagaaccgaccggatctttcacctcttgcgcatactgaaccgagtctaacgcaagaaaagtgagtgggaacgagtaagcccaccacgcgacattgaatcttttcattgatttcttgaaaagatttggcctacagacctgaaaatgttaacacaaagaaggtcaatatatgtttgaaccttgtttcttaataagtgtgtcgataacttaccagggacatgaagatgnaaagtgaaaggaag

SEQ ID NO: 24137 - DNA, 1072 bp, Arabidopsis thaliana
taaactccagtttgttccgaatatggttcatattacgcagtctttgaagattgttaaagaggttgatgcggcgctgagtctgtttaggtgggctaagaagcagccttggtatctgccttcggatgaatgttatgtcgtgttgtttgatgggttgaaccagggaagggattttgttgggattcagtcgttgtttgaggagatggttcaagactcgagtagtcacggtgatttgtcgtttaacgcctataaccaagtgattcagtatttggctaaagctgagaaactggaggttgctttttgttgtttcaaaaaggctcaagagtcgggatgcaaaattgatacgcagacatataataatctaatgatgttgtttctgaacaaaggtctcccgtataaggcatttgagatttatgagagcatggagaaaactgatagtttgttggatgggtcaacttatgagctgataattccaagcttggccaaatccggccgtcttgatgcagctttcaagctttttcagcaaatgaaagaaaggaactccgaccaagctttagtgtgttttcttcgcttgttgattcaatgggaaagctggtcgattgacacatcaatgaaggtttacatggaaatgcagggatttgccataggccatcagcaactatgtttgtttccttgattgattcatatgctaaagctggtaagctggatactgctcttaggctttgggatgagatgaagaagtcaggtttcaggccaaactttggattgtacacaatgatcattgaatctcatgcaaaatcaggaaagcttgaagtagcaatgacggttttcaaagacatggagaaagctgggtttttaccgacaccatccacatattcgtgtctattggagatgcatgctggatctgggcaagtagactctgcaatgaaaatctataactccatgactaatgctgggttaaggcctggcctgagcagttatatttctcttcttacacttctggccaacaaaagacttgtcgatgttgctgggaagatactactcgagatgaaagcaatggggtattccgtagatg

SEQ ID NO: 24138 - DNA, 503 bp, Arabidopsis thaliana
ctatcagtgttttctcttcttatagcaaataacacgatccccgatggccagcgggggattccggtatagcagctcacgttcgtatgcgcctttcctgcacgaagtcatgagcgctgtaaagcagaactatggagagaaagtgttggttcaggtgagccataggatactctcttaagaactatgattgttgtcagaactacgataaaagatgtccggaattaatatcatacactcatcttttcagtttgaagattttgcaaaccacaatgcgtttgaccttttgtctaagtacagtgatagccatcttgtcttcaatgacgatatccaggtagcatcttctcctcaagattgatcttttttttcttaaatttttggttgtgatgtcagagtgcttaccaagaacttgattttgttttctgtaattgcagggtactgcatccggtggtgcttgctgggcttattgcagctcagaaggtgcttggtaataaactggctgaccatac

SEQ ID NO: 24139 - DNA, 564 bp, Arabidopsis thaliana columbia
agtgtgctctaaagctccattcccatcactgcaatatgcgttttaggcagcgtggtacacattcgcgcattaccttcattggtcaccaggcataccgaaccggtctctgccaccgcgaaattacagccggtaatacctatttcagcactgaggaaatcttcgcggattttttgccggatgaataaggtcatcgcttcaggcgtttccggcccctcatagcccagacgttcgtgtagcactcgacggatctgatggcgatctttatgaattgccgggaccacaacatgagatggcggatcttgatccagctggagaatatattcacccagatcggtttcaatcacctgaatgccagcatccatgcacacatgattgacaccaatctcttcggtcaccatcgatttagatttcacaccttccgggcatttttgcgttgggcaacctgtaaaatgtagcgggtacgtcttctttggtccctgaaaatagacgtgaccgccgttttgcgtcactttttctgagagctggtacagataagcgtcgagattactcagaacatgatcacgt

SEQ ID NO: 24140 - DNA, 559 bp, Arabidopsis thaliana
aggattggaaacccatgacggaaccatcggcaatagagacggtgactcgacaatccgatttagcaaccacgtgatgtgtgaacacgtgcagcactttgacccgacccgctaactccatcttcgactctatctccattgttggtccgacccgattcccatacccgaaacccggattcgcatatccatctcctagcgttggccccgtccctcctccgccgaatgcgtacccggaaatcccggcggacctccgattccaggaaaccccggtggacccatgcttctcgggttacctggaaaaaccggtggatttgggtttctcggaatcaccggagcacctggatttctcggtggatttattggaaattccggcgagcctggatttctcggtataatcggagctcctgggtttcctggaaactccggcgagcctggatttctcgggaaactcggaggacccggattcccagaaaaatccggtgaacctggatttccggtaaatccggcgattctggatatcctggaaaatacggtgaatctgggtttcttggagttacagtga

SEQ ID NO: 24141 - DNA, 2483 bp, Arabidopsis thaliana
actgtttcgcgtttacaggttgctgctagttttgcagcagaaggagcaggaatgaacgaactcaagcagtggaatgatttgtatggagaaggaggctccaggaaaaaggaacagctctcttacttcctttaataatccatcccactcctatcaacatcttctacaatgacatattctcaaaagtgtttataagttctgttatttcattaattagtaatttagtattatcatattaaacatttgatttcagagattttgtaaataaaaacatgtacagttaatctatatcttgtatcttattatataaagattaacggtttatgtattgcttagagatgtactgatcataacttttatactaattctagttgcaacacaatattcaatgatgtggcatgcgtacttacgaaattattattagaatccacacagaacacaagaaagcagctagcaagtgtaaagactgagactttaccagcacatacaacgccacacttgaatctaatcactctttcaactgcggatcgctagagctagtagctgtaatctctgttttggattctgaatttacagcttggagggttctgtagaactcctcaggaagaggcccgggacggtgatgcggaacatgtttaggtatcggtgcaaggatcaaattctgcatatgcaaacattgcaatattgcatctttaacaacaagtaagatcaagaatatggatcacaaaacagaacagaacagggtgtaacgaaccgatcattttgccaacgagagtgagctcatcgctagcttcctcgatgagctcctcgactttaccacaagcaagtcgcttctcaatcactccccagtcttcttcttccggacacaccttgagacggtggcgcatgaagctccccactgctttccgctagtcttcatattcaggaaccaccaggattttcctttagcgttttgctatcgaggtctatcagcactgacctcaacgatcccagtcgtctgcttcaccttcgccaataatggccgaccgatcacacgctggaacatctccggcccgccgctagatacgcttctctccggcgaaatcaaattatgccttttcagattaatgcgttgtctattttggcccattcaatatgggcctaaatatattaacgggctttactttggataacccacccctaagcagagcaaagagtctaatcggaaaacctaaattctgaaaatctccgatatgagattttggacatcggcggccgccgctgagattctccgacgtgatgagcacgtagtgagaaagctcttgaaccctcgtgtgtactccaaactcgttaatgcattctctgaaactgaaaccaaattgagatcgctatgtgaggattcaaatcctcagctcaagaatgcggtttcagttttccaacaagcagtcgactccggtagctctctatgtttcgccggaaataatctcatggcaaagctggtacgctctagaaaccacgaactagcattttcattttaccgcaagatgcttgagactgatactttcatcaatttcgtgtcgctgagtgggttgcttgaatgttatgtgcaaatgcgtaagaccgggtttgcgttcggggttctcgcgttgatgttgaagcgtgggtttgctttcaatgtgtacaatcacaatatcctcttaaagggtttatgtaggaatctggaatgtggtaaagctgttagtttactgagagaaatgagacgaaattctttgatgcctgatgtttttagctacaacacggttattagaggcttctgcgagggaaaagagttagagaaagcattggaattagctaatgaaatgaaaggtagtggctgttcctggagtttggtgacttgggggattctgatagatgccttttgcaaggctggtaagatggatgaggcgatgggctttcttaaagaaatgaaatttatgggtttagaggcagatcttgttgtgtatacttctctgattcgagggttttgtgattgtggtgagttagatagagggaaggcgctctttgatgaggttctggaaagaggagattctccctgtgcgattacatataacactctaattcgaggtttttgcaagttaggacagttgaaagaagcctcagagatatttgagtttatgatagagcgtggagttcgtccaaatgtttacacgtacacgggtctaatcgatggcctttgcggagtaggtaagactaaggaagccctgcaacttttgaatctgatgatagagaaggatgaagaaccgaatgctgtgacttataacattattattaacaagctgtgcaaggatggccttgtggcggatgctgtagaaattgttgagttaatgaagaagaggcgtacaagacctgataacataacatacaatattttactgggaggactctgtgccaaaggtgacctagacgaagcaagtaagcttctctatttgatgctgaaagatagtagt

SEQ ID NO: 24142 - DNA, 544 bp, Arabidopsis thaliana columbia
aagtaaggaactaaactaaactggtcagtggattgagcaaatgttgtaatccctcaccccgccaccttcagattcagccaagtaatttacgagttcacgaacaatctcaatgtcttgagggaatctcttgtagtatttttcattttggcgagcaacttgttcaaaaccggcttcatatacatcatctgctgtacatgctttaccaattggtggaattcctccagttattagcacttgtttgagtccttcgggtgcaaaactcagatatgtaagtgcacaaaagccaccgaaactctgtagatttgaagaaaaaaagatgaatacaaaatcaaatgacaagaactgaagcaagatgaccaatagacaatacaaagacaaattacctgacccaaaattgtccaaggatcagccttaggaacaagacgaactctaataaactcagcatctttaactatattatcagctcgaaagtgaaccaaataatcagctaattcctttgctgatttgaattgaagcatagaggaacatgttaaaggagtggaca

SEQ ID NO: 24143 - DNA, 1331 bp, Arabidopsis thaliana
atattacatccagcggtaatttacattaatattacacaaacattatacatttttcaagcagaattttacattaacactaaacttctactaggtacttcaagttacgtccttactaattagccaatttgaaacataattatacaataactgcaaaaagatacaataacttctaaaatatttcttcagaagttacccccattgtttttgtatctctacaggatttcacaaattcgaagtgctgcattgaagatgtaacacccttcacagtaatgttcgccttcatgccaataagcacagtctggtacatttatcctcttagagtaagcaaactcccagattggaccgaagtatcttcattagctggttcatacgccaacagtgtgtcaatttaaccttcacattctgcttccaaatcttcagagtaaatattgaacaaaagcctatcacctaagctcttgaatatcatgtcgaatgtagcccctgctagatcaccccgtccagcacacatttggaacatggcataggccacggtcgccgattcatcatcaggaactatttcatttagcaaagcaagggaaccttgtatatccctttcacgggtcaccaaacccaaagcttcataataaagagcctgacgattctgaacagccaaacaacgcttaaagaagcttctagctacaccaccaggatatattttcggtggctcgagacatagagcagttagatttgctgactttacaatgtcccgcgagagtgcaatgtccttcctcgtttgtttgtgagtattacggagctaagtaatatgcgtcgtcatctcccagcttcttcacaataatatggaagatatcatctggtaaatctgataaagacattacttttgaggtttatgaagtttaaaaggagtaaggaaaatgaggtgtggatgagtagacgaaccactgaggacatatttataggacacaaaaacaaaactgactttcattgtttaacctaaacctatctgggctatagtactaatgaaacatccgtacaccacaggcgctgtacagatacccgtccgtaaaacatgtatgctgtacagatactcgtccgtacactgtcttacggtacactacgatgttgttcctatagtacactacgtatgctgtacagaaaacaatccgcacaccttcatgtacactacgtttgctgtacagaaaacaaactatatatgttctcttccagcatgtcataataattagttctttaataatcaattcaaacaataatcagttttttcataattaaatcaaacaatatgttctttaataacccattcaaacaataattgg

SEQ ID NO: 24144 - DNA, 303 bp, Arabidopsis thaliana
cttgtttctcttatatcagggcagaaatcacattagcgttacgatccgcagggaccatcgcaatgctttgttttaattaaacagtcggattccccttgtccgtaccagttctgagctgactgttcgacgcccggggaaagctcccgatgaaaccacgttacccgtgaggatctgtccgaagattgagacaaagacaaagagagttttgatgttcttatacttactctgttatataccaaaaatagtcagatttgtcccaagtcatgcttatatgttcacaagcccgttcttgcaaacgtacca

SEQ ID NO: 24145 - DNA, 564 bp, Arabidopsis thaliana columbia
gccagtgtgctctaaagcgaaatattgcaacgcacaggcatgttggacggggggccgaaaattactctacctggcgatgacacgccaactgacgcggtagtcagcccatccgctgttactgttgaaacagcagaaactaagccgatggataagcaaacgacgtctcgtagtaaacctgcgcctgccgttcgcgccgcctacgataatgaactggtggaagccgttaaacgttttcaggcatggcaaggattgggggcagatggtgctattggcccggcaacacgtgactggttaaacgtaacgcccgcccagcgtgctggtgtgttggctctcaacatccagcgattgcgcttgctgccaacagagctttctaccgggatcatggttaacattccggcctattcgctggtctactatcagaacggcaatcaggtgctggattcgcgagtcattgtcggtcgcccgatcgcaaaacgccgatgatgagcagtgccttaacaacgtagtggtaacccgccgtggaacgtacctccactctggacgcaaagatattctgcaaaagtg

SEQ ID NO: 24146 - DNA, 200 bp, Arabidopsis thaliana columbia
  unsure (1)..(200): unsure at all n locations
nnnnnnnnnnnnnnnnnnnnnnctaaagcgtcggcaatgcgttatagacattcagctcttttgaggcgtgaaccaacgtgccgacgcgatagttgtaccagggatcgttcagcccaaccgccacctcaatggcacaaatccccgccacggtgcctgtctcgctatcttccagcacgaacacatagccctgctcacttttg

SEQ ID NO: 24147 - DNA, 509 bp, Arabidopsis thaliana columbia
  unsure (1)..(509): unsure at all n locations
nnnnnnnnnnnnnnnnnnnnnnnctaaagcttcgctatcatctacagagaaatccggcgttgagttcgggttgctcagcagcaactcacgtactttcttctcgatctctttcgcggtttccgggttatctttcagccaggcagtcgcattcgctttaccctgaccgatcttctcacctttgtagctgtaccacgcgcctgctttctcgatcagcttctcttttacgcccaggtcaaccagttcgccgtagaagttgataccttcgccgtagaggatctggaattcagcctgtttaaacggcgcacggattttgttcttcaccactttcacgcgggtttcgctacccaccacgttttcgccctctttcaccgcgccgatacgacggatgtgagacgaacagaggcgtagaatttcagcgcgttaccaccggtagtggtttccgggttaccgaacatcacaccaattttcatacggatctggttgatgaagatcagcagcgtgttggactg

SEQ ID NO: 24148 - DNA, 477 bp, Arabidopsis thaliana columbia
  unsure (1)..(477): unsure at all n locations
nnnnnnnnnnnnnnnnnnnnnnntaaagggcaagaatattacaactaactttgctggacgctttttttgtctctgtcgcccagctcaacattgaacaagctaatattaatatgcaaaaaaccggcgcaattgttgatttcttctcaccaggcgcgctgaaataagaaaaaggtaattccgccatcgcggagttacctgtccccttaccgtgagaacattattatgaataaatatctgaaatatttcagcggcacactcgtgggcttaatgttgtcaaccagcgcttttgctgccgccgaatatgctgtcgtattgaaaaccctctccaacccattttgggtagatatgaaaaaaggcattgaagatgaagcaaaaacactgggcgtcacggttgatatttttgcctctccttcagaaggcgattttcaatctcaattgcagttatttgaagatctcagtaataaaaattacaaaggt

SEQ ID NO: 24149 - DNA, 475 bp, Arabidopsis thaliana
tgaatatttagaagtgatgaacttgttgtctggatagtttctgttgcattttttctcaacaaactggaatatcggctgcgcgaacacctgaaaatgttatatggttcgtttcattagccaaccatgagaaagtgagaaaaaaaaaacgatctctcttcttggttttggggtttacctgataggcaccaataaggtggacagcgatgcaagcgtttgcaaagtcaatgagccaaaagggctcgaaaaacccgaaatctgtgaggaaatctccaggggcattgtttccaaatgcagcatagccgatgcatccacataagatgtagaaaaaagtggtggttgatactcccacaagacttgctcttttcatggctttgttctcagctgggctagatcttagtgtatcctgcaaaaaacataaaactttcaccgttagtgatacaatactccaatctgtaattttggtaaacagttttga

SEQ ID NO: 24150 - DNA, 329 bp, Arabidopsis thaliana columbia
tcaggatcaatagatttgggtgccaagttttttattccgattcgtttatgtggaagaggttaaaaaatcagcgtctaccaataacagaccgttttattctttcaaacccggtacaagcttcggggttcttgcattggagatcatggaaccaccaatgtgatccggttatgtctcaaaactgaaacttggtctttcttacgtatccccaactttggtattttcatagagttggtcagatacgaagggaagctaggtcttattcgtcactggataaacaaagatcaagaagattatcacggattatgggttttaaagagcaggtgaggaaa

SEQ ID NO: 24151 - DNA, 593 bp, Arabidopsis thaliana
cttcttatgaagcatttacttgtatgcttctcttcttcattactttagcttctttcttttcgagcttcttaattctaccttaaactgttccgtctctcctgctcaatgtttgatggtcacttctattcacgctgaacattttgctctaatgctcttacatgttatcacattcagcttggagcagattgactgctggagagaggagtaaagttttacggagatggtacaatcttttatcccgtagcaatgcgttctcttttacttttgtagtgttggatggggatgtttaggattataaggttctgagccacttcatttcaccaaacacaggtatgacctcctgattgcacacaaggaagaacttggacaacttataactttggagcaaggaaaaccactcaaggaagccatcggagaggttaatgattcattttttatttgagaacattgaatgtgctgtttaggcttgtctcaactgttgcaatcgtttcttaaatgcaatatatgattctgcaatttagtttacaggtagcatatggggcaagttttattgagtactatgcggaggaggcaaaacgtgtatatggtgatat

SEQ ID NO: 24152 - DNA, 267 bp, Arabidopsis thaliana
gccttcggtatccaggggtcgcggaccgaccatagaaccctgttcaataagtggaatgcattagctgtccgctcgcaggttgggcagtaagggtcggagaagggcaatcactcattcttaaaaccagcattcgaaagagttgttgcggatcagggggggaagctctacgttcgtggttctcctgtagctggatcctgtagaaccacgagaatctttagttggaatgtgattccggctcatgaccttttgagattttgtgaagagttg

SEQ ID NO: 24153 - DNA, 694 bp, Arabidopsis thaliana
  unsure (1)..(694): unsure at all n locations
tttctttttttctattctgatatgagctctctatgtgaaggcacgacgtgtttcaagatattaaaaggtataataaggctacaagcacttatccgtggtcacatggttagaaggcaagctgtttcgactctgtgctgtgttatgggaattgtcagattgcaagcacttgctcgtgggagagagatcagacattcagacattggagttgaagttcagaggaaatgtcatttgcatcatcagcctttagtaaatgctcttcaagcacttctctgtgatttcggtttcttggctgaatagctcttaactttgattaatgtttttgtcttatcaggagaataaagccaactcggttgttgatacacattcttacttgggaatcaataagctaacaggaaatgcttttgctcagaaggtatacttgtttctactattactatgtttgaaaagttgagaagaccatggtggatgattctgttgccttattcttatcagcttctagcttcatcgccaaacgtgctgcctttgtccctcgacaatgattcttccaattcaatctggttagagaactggtcagcatcttgcttctggaaaccagttcctcagccaaagaaagcatcactcagaaaatctcagaagaagtttgccagtaatcctcagatagtcgaggctgagtttgcgagaccanagaagagtg

SEQ ID NO: 24154 - DNA, 546 bp, Arabidopsis thaliana
ttttctttttttgtgtgtgtctgaaccaaaccaatggttttctgcagtgggtgcaatgtgataagtgtgaagcatggcagcatataatttgtgctttgttcaacagccgaagaaatcatggagaatccaccaagtacacttgccctagttgctatatacaagaggtggaacaaagagaaagaagaccattaccactaagtgctgttccgggggcaacaagtttaccagttacttctcttagcaagcatctagaggagcggttattcaaaaagttgaaggaggaaagacaagagagggctagacttcaaggaaaaacttatgaggaggtgatctctaactctttaaggctgtcaactgttttatgcttttgttcttttacgatacatgagctttaggttcacgttgacagcctggagcaaattttgttataataaccatcgtacttcattattgatatatcaggtcccaggagctgaatcacttactgtcagagttgtggcatcggttgataaagtattagaagtaaaggaacgtttcgttgagctt

SEQ ID NO: 24155 - DNA, 696 bp, Arabidopsis thaliana
gtagaaagctgagctaagcagcaattgagcattatggtgcaaccaaatattggaagcatttttagcacaatcttcacgtcttctacttgttggaccgtgcattcgagccaaatatggtgtgttttcccctctattgctttgtttagacatgtcaagctattggtaagtgactgagaaggcgtcttttcttcatgttctgattgaacttctctggaagtaaagtgattactcgaagttttactcgagcaactaactatggaagctgcgagaagaacctgttgagatgttaggaaacaaaaaaataaaatatgattcactgataataatagaaaacatgttttttcaaaacatgttttttcaagttaccttaaagattgtggtaagaggactaccacgagggattttgtttttataaaacctcgaacctaatagaaagacaagaatggagagaaatatagagatggtggagactccaaatccccactcccagcctttgttgtcctcgatccagacaacgaacgtcacggccacaagtgctccacatgagagacagaacacatagtagttgaagaatgtggatctttgttttcgacctttgggcgtgccctcgtcgaattgctctgctccgtgtgacggtaatgacccttttaccctccgattcctagagacactagatatagtccacaaacagaaacg

SEQ ID NO: 24156 - DNA, 545 bp, Arabidopsis thaliana
gaattcatgcttagttagctttaggaatataaattcctcatcattgattaatcaataaaatagatagtataataccatactattagaaaataaatttatccaataaatagagtcatttaaaaaaaagacgattgtgtaaacatttaaaaatttaatggttggccatttgtaaaagtaagtgcacacaacaattgaaataggtactttgtgtcaaggatatgatatccttgacacttcagatctattctgtgagtaaaattaatactgtattttcatattagttaatatgcgatttgtttcatgtcatcatttatgaaaatttataaaaatattattttcatagcaagatctgatttatttgacaaggaactcggagacattgatgatatattcatgattcagacaacaatctagtctcgaggtcgcgtgtgtaatcttcaacgaacgcagtgtatctggtagggggaggacgtcgtcatttaacttctcgtattccatgtccctttgcaatcaaactttatgaccttaggacaacgcaagtgtta

SEQ ID NO: 24157 - DNA, 126 bp, Arabidopsis thaliana
ggctctatgatttcttacctggtggccaacctgacccgactatcaatccaacattcctacccgaattaaccactcagtgcccacaaaatggtgacataaacgtccgtttaccaattgaccggttca

SEQ ID NO: 24158 - DNA, 624 bp, Arabidopsis thaliana
tgcaataattattaaaatttttaaaaatcaaatgtttatatattttttaaaaacctcaacttaagagcttacgattggacattgccaaacatttaaacttttatccaaacttttaacttcaaaactttcaaatcaattataaaaatattgctaagaatctttgctaagaaattcaccattatagattctctaacaaatcttggcataatcattattattaaaaaaaactttttgtagagttcttgttttttcctttataatttacttttctttctctttttctttttttttggcagaatttaacaattttttaataaaaatttaaaaatatagcactatatatgtatcagttaactaacataaaagataaattaaatgaccaatggaggaggtgacggctccgacgatggtggctccaacgatggtggtaagttcggcaacagtgtgaatctagtgaggacatgcggtggatccggcgagtggttctcgcgaggatggtggcttggaggacggcgatggtggtgaggacactggtagcccggcgagggcagtggtccaatgaagatggtggcttggagttggaggactgcggtagtggtgatgaagatgacggcggtagtggtg

SEQ ID NO: 24159 - DNA, 758 bp, Arabidopsis thaliana
caccacacctgtggcatgtatcatcagtaatcagtcttctcctctttaagtttcctgcagtgggtaaggcgttatgagccgatcgccaccaaaaatgctttatttttggtggggcattttgtttccatatatttgtaaatacagtctgagctgaaacctcatttggagagggcaaggaagcatgttgttgctgggagagcttacgtagtagatggtagcctgacttgacagagtagtttccatcatgcgtatatatccatgtaattgcatcatttgctcctgttatagaaggtcgaatagcacggatatgaggtatatcattttggtgtatgagtttgcagagaagatcttcattccatctgccttcaatgagcaaatcacttactttcaactgagaatagatggagtcacatgtaccaacaggaggacggggaggatttaatggtagccaattatctttccacaactgaatattattaccattccctgcaatatattttaggccacgagagatcagctttgtaccatggaggatgcttttccacgcatagctggattgacttgtagcttttgcatccagaagtctctcctttgggaaatactttgctttaaaaactcttgccatgagtgagaatggttgttgcagtattctccaactctgtttggctaacaaaagcaatgttaaaatcttttagatctcgaattgctaaccctcccatcttttttgggtcattgagtgtcgaccaggctacccacgg

SEQ ID NO: 24160 - DNA, 442 bp, Arabidopsis thaliana
tccctacggatctggtagggtaagctcacctttcacctctgcagatggatcagctaggtccatggagattgacgcctatcagacaaatcctgaagttcttcctcaacatgaaaaccagaaactcctttgcggcgttatcgtagtgctttcttgcgaatctcatgtcgttgtggatcaaacggttccatggtttgcaagtagctcaaacgtttcagatatgtggctggaaaaaagctgagaatctcctctaccaactcatttggaagattcggcatcgtcatcgttagtcgccgaagaaaacggcagcaggtggctctcaatgttatgttatcatttgatctattaggataacgtggctcttaatattattttagggttttggttttcagcattcctctattggtaattattaaaaaattatactgatgcgcaatatttatgt

SEQ ID NO: 24161 - DNA, 2060 bp, Arabidopsis thaliana
aaggtcttctagaagatcacatcgcgtcttcggcagcaactgaagatacaggggagcatgataagaagccaaacaagggagatgtgtcaccgtagcctcctgccatttcagcctaaagtgagcacaacatagaatccgatccaatcttttagcaatgtaaaactgttgggatttccctctcttccatgtgaatcgatttcctttaaatcccatatctatcagggacaactcgtttatccaatctccaaatgctacagaatccggggacaaacaaccattaccgcccgttctttcatcaagtcggactattgtgttgaaatctccacctatcaccactggtccatctattcccctgattacttcacgaagcttctcccacaaaccactccttcggctaaccgtaggagcagcgtacacaactatcaaattaagtatctcgaactcattctctatacgcgcatagacgaactgctctgaagactccttaatctcaactttcccaatttccgacctccatagtacccaaatgccacccctctggccaactgcgtcgattctgaaactattttcaaaccccaaaccatgacaaatccgatctgctctcgcccctcctgcgtgcgtctcaaacaccgccaacaaatctgtcttgtatttcttcaaaagataacaaactgatcttcgaaagttaggtttattcgccccccggcaattccacataatgcaattcatcattaataatcgataaagaaaaagaataaccgggcaacccgtcacagaagagtgagctccgtcgatatacgtggcgcggccccctgagtccctcccgccacaaccactacattatcctccaaactcggcctaatctcctccgccacttccatgccgaccaaatcgggtttctcatgtccaggttctccgtcaactccattgaagaatgaccctcctggtcgacccagacttatctcttctatcctcacacgtttaccgttggccgaaagctcattactctcatgggctttatgactccaggcccgcctatcccgtagcccttctctaattactcctttcccttttccctccgttgtagcgacaaatttggtaaccttaacttgctccccactcctatcttggaccactgaattcatgggatattcattctccttattatccgtaacaccaataatttctttccttctcccctctgtttccacatcctctcccaacttaccaaatgagttcgacgtcacaaccaactcatttccttttttcctcacatgatcccttgatttgcgattcacattaactctagccccaccttgtgcattcacattccggttaacctgagccaccgtcttcctttgtcttaccggggtgaatccaccccatcatgtgtaggaacaaccggattctgaacatttttggtcacttccacactcatgctctcctcccctattccatgcgagacccccctaggacacttatgaacaaggtgcccatacataccacactgtgagcagatgttcgctaacccctcgtatgagacatagaatctctccccgttaaccaccactgttcctttaagaggtttctgcagatttacttctacacaaatcctggcaaaacgtcccctttcaaaactgagtgtgtttaagtccaccttaataggtttccccaagctattagcaatccctagtaggatgtacttatgatacagattccatggaaagtttgaaatccgcacccacaccggcgtcgtaacaatctcatcccgcaagggatcaaaatcaggcgaccaagcttgtgcgatgagatagttcccaaacgccttccacgggcccccagtaagcgctgccagatactcctcttccatctcaaaacgaatcatgaaaaattgtcgtggaagatccatgacgtacattgcaccgcaaggcttccacaattctcttaactttcgattcaacaccggcaacgaaatatgacgacccaacactttcactaccatacaccttttccacagaccattcgatcgcatccaccacttcttgaccaatcgtaatgac

SEQ ID NO: 24162 - DNA, 458 bp, Arabidopsis thaliana
tgtggattgcagtaagtttggatgttacaacatcttctctccaccaccaccgacgtttaagatgtcacctgaagtccggacacttcctccaccgatttacgtgtactcatcgcctcctccaccaccgtcgtcaaagatgtcccctaccgtcagagcatactctcccccaccaccaccttcgtccaagatgtcaccctctgtcagagcatattcaccaccaccgcctccttattccaagatgtcacctagcgttcgagcttaccctcctccaccaccaccatcaccatctcccccaccgccttacgtatactcatctcctccaccgccctatgtgtactcatctcctcctccaccgccgtatgtgtattcatccctcctccaccgccttacgtatactcatctcctccaccgccttacgtgtactcatctccacccccgccttacgtatactcatctcc

SEQ ID NO: 24163 - DNA, 296 bp, Arabidopsis thaliana columbia
  unsure (1)..(296): unsure at all n locations
tagtctgtgtgaatacagatataacaatggttatcgttgtgcatatgatgtacttgttaaatggtaactagcgaaacgaagttgacgtcagagtcagaagtcgagtcgtcatggcgaaggagacatcctggacgaggtggtggtgacaatcatgagtttcactccttgggaagacaatcgtctatctactgattgaggcttgaggagttctcacatgctttatgtgagaaccgcaagaacttcggcgtcatgcacctggatgagtttgttgtctgcatttggaangcagaggagaa

SEQ ID NO: 24164 - DNA, 629 bp, Arabidopsis thaliana
  unsure (1)..(629): unsure at all n locations
cgtcatctttgtctattcgtttagattttcatgtaaacactcattattttaatgcatattatcaggtactcatccgacaaagacatcaagattgaaaggttgacagagaagaacagtgtgatcgtgactatcaaagacaaagctgagatcatggtcaacgtggttccagtgaccaaagaagatgatagaatccacaactacaaattacctgtagatgactgttttgcccattttgaggtccagttcaagtttattaatctgtccccaaaagtcgatggaatcttgggacgcacttatagacccgattttaagaatccggctaaaccaggagtcgtaatgccagtggtgggaggtgaagatagctttaggacatcttctctgctctctcatgtttgcaaaacttgtttgttctctgaagatcccgccgttgcgagtggctctgtcaagcccaaaagtacatacgcattgttagattgcagccgtggtgcgtcttccggctatggactcgtctgcagaaagtagttccaatacaaactcagtttgctaagaattacagatattanaagtatattgttatgttttgtgtacgtatacaattatatgtttgtcaaataaacagagaataaggt

SEQ ID NO: 24165 - DNA, 705 bp, Arabidopsis thaliana
gtgagcttggttgcaacttataagagatagtttttatttaatcaatacaaaaaaaagaaagaaaatgtggttttattttgcacccattttgccatttctatattgttagagtttttcttctcaactttttttttttgttttgtttttaaataaaaagtgtgtataaaatatcaattatcaatatagatttttgtcaattttattagttaagaagttcgaacggtctcttctttttgcctctgttttgcagtttacacttaccatttttacccctgccgtttttgtggattaattgcgttatacgacgtcctcttacactttcactccaaacgacgctgttttaagcaagaaactccatcgtcttcttggcaaaattctggatgaaagaaagtagaagtcccgcccaaattggggacgaacacctttcaccaacggcgaaggctgatctgattgatagaatctgcgctgaacttggagtatgtgaagaagaagcactttgttaccttgatggattccactgggattttgattcggcgttggaggcttgccgcaaccaaacctctccgtttccgccgtccctcacagttgaatctacgccggtgaacgctaactccgcgtcgttgacaactccattaatgatcgatcctcttcggagttggaatccgccggatgaacaatcgagaaatgaaagtatcgcacgatttt

SEQ ID NO: 24166 - DNA, 553 bp, Arabidopsis thaliana
gaagttggatcatcccacaccaaaaccaacactctaacaccttcttgagatttgactttaagcaactctcctaatgtaccttgggtcggatcattgttacgacgaaccagcctaaccggatggaaaactgaccaacctgtgatataaatcaacctccttgcccgtcgtatcgcatcagccatatcttcccagcattttccatgtctatactgaatcccaccatcaagatgtacactcggaagagtaccgtcatcaacatgagcatcctgataaagagtaaccctaccgcctttccttaaagggaagtatgtaccgggaactcctacacattcaacaccaaaaccaacacccttttggtaaagtctcattctttccattggaatatactgaatagacagactcaacacagcaccttgtttacaaggctttcctctactgttaagtatcggaaacagcccttcgattctattcccggaacacaactgctcggttgggattcaacagctccaatgatctgtgaccaataatacactgtcttcacaacaaagtgact

SEQ ID NO: 24167 - DNA, 850 bp, Arabidopsis thaliana
atgaaagctttctgaatttgaccaattgcaagagcatcacatgatttcgttcaaacaaaagttcctaaacaagctttcaacttttaccgcaataattagaccataactggcaaagaaaaaataacgcagtaggcactagggtagcctttgtaatgttcacaagacggaaactagaaaaccataaagagaattaaaggaagaagctttattaatgagaattatccaatgaaagatcctccatttacttccttatataaacaataatataagcaaatccagctaaaatcactcttaaaccataagaattcttcttgtctatttttttgtttccatttctagcaaaacattcttcattacccataagacaaatcaagcttagcagcataagataaagactcaataaaccctaaccacaaactgagtttcttcctgacgactcataccccaatcacaaaccacattgttcttctactcttctcattatctttgcttggggtatgcaaaacttatggaaaaatgtcaggaaaaactacgaaaaattgaaaaacaagaaagacgaaaatggtagaaacactaagaggcagaaggaagaggacgaggcggcggcaacatttgacggagattaggaccaccggtagctttaagtatgaaaggatgctgcaaaagctgttgagctgaccatctcttaggaggatcactctgtaaacaacaagaaacaaagtgacgaaactcctgagacgccgtagccggagcttcaggtggctgagacatacaaatagcacacataagactagcccaatcaccttgtctactcacagcaaaaggaaacctcccaagtaaaactccaaga

SEQ ID NO: 24168 - DNA, 452 bp, Arabidopsis thaliana
tctagaggatagaggatcccctaattcgataacaattggaaatggaagctatctaatctctaggaattcacaactggataaaatccgatagtggtaaaaactcataaaccatataagaaaggattgtagttgacaattttggagcacgttggctttgggttgacatgaatctttcttcttaaccgggtggccatttcatctgtcggcctccgaggacgtgcagatgaagatggtaaacagattggcctgaatgagaggaagttaattcagtcatgtgtatgaggacgatgatgcttaattggatggaaaagaaaagaaaagacttacaggcttcaacaccgttgttgataaccacacggaacccatcaaggattccttctttctcagcaacaatcttcgatgcatgtagaagttggccaagaacctctacgtgtcttggttcagcctgcgac

SEQ ID NO: 24169 - DNA, 327 bp, Arabidopsis thaliana
tattaaccttgtcttgacatgaaagatagctttctccccagccgcccgagagttgttgtttcgacaatagaaattcacaagctttagcaacatgtggagagtttttcaatgtttttccatcagctaccagcccttgcactccaaaccacgtatcatacgtgaggcgatcagcccgtgatccataactacggaaatgtcacagggtacctcgaagcaaccaactagaagatacaaagatagtatataggaaaatatgtgattctgcaaatagagttataatgaatatagacttaccatgagccatctgctgcttggatgggttcaatg

SEQ ID NO: 24170 - DNA, 433 bp, Arabidopsis thaliana
caactgctcggttgggatttcaacagctccaatgatctgtgatccaataatatcactgtctttcacaacaaagtgaacttctcgcagcactatgagcaactggtacatcaaaatgctgcaccaatacaggacgcgcaccatcgctactaacgacagttctaccaatcacagcaccagagatagagacagtaacataaggatcacttgtgatcttagaagaattctcaccatccacttcatgaatcctccgacctaacccaaaaaacatcccaccaacaagggtgttatggaaaccatccatgttaggaagatgtttagcttccttaagccatatgtctaagttaccatgtaataactcaaccctcaaagagccactacttgtatcaaacggcacgagttgcttgtccagccacctggcaaactcgttgcttga

SEQ ID NO: 24171 - DNA, 466 bp, Arabidopsis thaliana
aacgtcgtcgttttactcctactccttctaatctcatccgccacgtgttgtccgccgtcagaccgccgtgcacttctagctttccgatcagctcttcacgagccttacctcggcattttcaactcatggacaggccaagactgttgccacaactggtacggtattagctgcgactcgctcactcaccgagtcgccgacataaatctccgcggcgagtcagaagatccaatcttcgaacgagctcaccgaaccggttacatgaccggacacatctccgcctcgatatgtgagctcactcgtctctccgccattacaatcgccgattggaaaggtatctccggcgaaatccctaaatgtatcactcgtcttccttttctccgtacactcgacttaatcggaaaccaaatctccggtgggattccatacgacatcggaagattaaaccggttagctgttttaaacgtag

SEQ ID NO: 24172 - DNA, 595 bp, Arabidopsis thaliana
ccccagatttatacaacccaaggggttcctaaagcgtgaatccgtagtagcaaagtaccaacctagctctaccaccacgtagccaccagcatggaactgttctggtatagtaacatttgacggggaatacctcttgctagacaagaaggcaaccttgcatccatctcctcctgagctctctaaaattgacacctactgcttgtggacgttccaccggtatcctcgcctggcaacatttgtaaccgtcacataacaagtttgttacttcttgactactcttgctatctttgcagctagattcacaacccaagatctctgattctatatccgtcatcaacgccttagtaccgcaacccacagccacgaggcggttctcgtcggtgatgaaatatgggctgcccttgcccgtgacgtttaaatccggtagcgacttttggggtacttgactagtattacttgaacaacctaacgaagtcacaggacctttgatgtgaacactccgtattgttcattattacttctggaagagagatgttcacacttccctgttgattctcgcaggaatggaacagttgtgcggacgaccggaagtggt

SEQ ID NO: 24173 - DNA, 479 bp, Arabidopsis thaliana columbia
tatcaataattgataggagagaatggaatagaatagaataggcacacaaatggatccttcctttattatttccatacagattgtataacttgtattacatatttgatttctctaaactcctagaacttttttactcacccccaaataacaaacttaatcaaaatctacgtatatatatatatatatttatgataataaaaaaattacaaatagaacatgcaaataacaacgaacccaaaaatcacatcatttacatattcaactctttcttttttttttccacatgtttacagaattaagaatttggaagcttggaatttttttttgataacgtgtgaaatcactgacacggaataaaccgtgaccccatcattctacaagctactccatcaatttacctgcatatattatcatatcatcagtaactttaatcaatgattaagtgcaaatgaatatatgattagaaacaaaacccaaaa

SEQ ID NO: 24174 - DNA, 587 bp, Arabidopsis thaliana
gttctacattttatttaaatttccaaaacccttattaaagactaatgtatatgtaaaatataagtgatcagctttgtactaacatcaaatgtcaaaatgaatgttcaggctcaaaagggtcgattcaaatgaatgactatgtgataccctacaaggaggacaaagcttggttcgaatacacaagtggtgcgaagtttgtggacatgcacattggttggaatgtgacgccagagagagttacagtggactgtagcggaactccggagacgcaagaggcaatgatgctgagagagttcacgcggcttgtggaaggaatcaagcgtggcgacttagaggctgatcgtaggtggccggatataagtaagaagacgcagttgatcgttgatgctgtaaagaaatctgttgatattggttgtgaagtggttcatctgtgaaacttgttgaaatcttctgctaattagattatgatatttatgttagtgtcattgatacatgctttatggtaactaacttttataagtcgaagatgatatgtacttcatatttttatttggcactccatatgtactcaaaactgagatatgtta

SEQ ID NO: 24175 - DNA, 535 bp, Arabidopsis thaliana
agtaacggttgccagtgtgctctaaagtaccagcagatccgggtattgaggaaaggacggtccgcgaaggaggggaggagctgcttcagggctgtgcggaaggccgtctccccctccagcgggatggggacgcccttctccggcaagctgacgtgcattgtttctcctgttggtgtcgcgccgggcacggtaactgccttggggttgtggtagccgtacgtgatcgggcgatcttgaggatgttgctgcgcggcggaatgatgaagatacccgttgcgaaattgaggatcgtgggcatgtgttcgaggcggcgttgctcctcgtctgagatgcgcatgtaggcgattgcttggccggttgagacagcgcgaccccgaaggtcgacaagcccggctgtccaggcgcctgttgcgaggatgacgaggtcggccgtcatggtcgtgttcttaaaatctttgagaacaacccctgtgaccgtgcggttatcaatcggggagaagaggagacgggagacttcgccgtgcacgaagcgtac

SEQ ID NO: 24176 - DNA, 284 bp, Arabidopsis thaliana
tgttcactttatctctgaagatgaaccattccaagtaaaagagggagagaatgatgagtgtgctgaaatcagctatgttcagaatcaaggtggctacaacatgcgggtataactagttaaaaccctatccaaatctcgtcaaacagtagcaccgatgtcgcctcgcctgtaggaccaagtctatcggcagcagcaacagcagtagaaccaacgctaactgtttgttccttgcataccacgccaagggttcattccgtagcagtagttttaaggaggatatcaac

SEQ ID NO: 24177 - DNA, 1211 bp, Arabidopsis thaliana
gcaggtctctagtggatcgtccctgtgggcttcgtcataaatttgtaaccttctattgattcctttgctggagaaacaaaatttcttcaaatctaagaaagaagacatagtgagagagacgacagtttttatagaccagtcctattttctcaagaacattgattttttttttctgctatgatacacaagtgtttcaattggaggtttcattacatgatcaattctaccttcatgtacttgttccacttcaatccatccctgactccaatccttcttgctcattttataccctttgatcacaagatcaaaaacttgtaacagatccttgtctttaggattcatttgtgaaacacaggggtcatattcatgagaattaacaccaaatattggtttcacttccaattgcaaatatattcctcgtaaaatttcaaggtacttgcgaggaacttgtaatgaattttctcacaaattcgtcgcagaattgctgggactttgcgagcagataggagaacatcgctaatttgttgcaaaatttgcgagtaatatatccctcgcaaaattttcttcttcctcttctttttcttcttctctaatagaactggcagaaactctttcgatccctaaatagtcctccatccttctaactttgtacctaagaactacacaattttcatagaacagtcctattttcttatcaaaggaccattgattttctttttctacttcaatacacaactgtttcaattgcaggtttcattacatgatcaattctaccttcatgttactgttccactttcatccatccctgactccaatcctttttgctcattttatatcctttgttcacaagatcaaaaatatgtaacagatccttgtctttaggattcttttttgaaaccaagtggtcatattcatgagaattaataccaactattggtttttacttcaacctgcaaatatatatctcgccaaattgcgaggtacttccgaaccgaaaaaccaagatattgattcgacaaaaagaaataaaaatcgaacaaacccaaatataaaactttagtgccttaaatttgttatcttcaattgattcctttgctggagaaacaaaaaattttaaattgttctaaggaagaagacagtgtagacgacagtttctctaaattttttctttactttttattactttcttgggttcctttttttcttttttg

SEQ ID NO: 24178 - DNA, 539 bp, Arabidopsis thaliana
tttaaatctttaaaaccccattaagatgtctttaaaatcccttgtaaaaacatatctaacactgcctatcttttaaaaacggctaaaaatctttaaaacacgatttataagcttttaaaatctcttgtaaaaacacataccttttctaattcctcttcttttccttcttcctcttgcttttcttcttcttgctccttttttcgtcctcttctttttgttcttctctagtataactggcaggaactctttcgatgcctaaatagccctccagccttccaactttcttcttaagaacctcacaattttcatataccagttttaccttctcaccaaaggacattgatttcctttttctgctttgatgcacaactgtttcaattgcaggtttcaagacatgatcaattcttccttgatgtccttgttccacttgaatccatccctgacaccaatccttcttgctcattctatatcctttgatcacaagatcaaaaacatccaacagatccttaattaaccttttaaaatccgttgtaaatagt

SEQ ID NO: 24179 - DNA, 520 bp, Arabidopsis thaliana
tccataagaatcattttcactaagtttctaactatcaagtcaaaagaaacggttccaaaaccctactgactaaagcaaagagaccaatcaagatttagaaatagacaagcaggagtcaaaggaaagataccgtgatagcgataccctcgtcctcgaggatcataacagcgtactgcaagcaagctctccaactgtcgacatttttttatcctgaaacgattcaaaaacagtaacaatagattaattgcttattcacaaaaaaacaaactttaaatccgttttaaaccaaaattagagtaagtcgaacaacccagacgatgatgaaatgccaataacaagtataaacggatcaaatggagaatcatagactacctaagagtaagatcgaaaatgcttttcgcaaggcggcgagagagacaaaatttctagggtttggatgcggagacgggagatgcagagtttataaagcttttatccaatttatttgatgggccgcataaatattcgctaggcccatttt

SEQ ID NO: 24180 - DNA, 485 bp, Arabidopsis thaliana
tgtaatacatgtggagataagtcaaatatggttatgagttgtgagcagtgtgaatttgttttggaccttaaatgttctattttgccaaagatggttaaacatgaaaatgataaagatcattttttgtctctatgctacggagaaaaaacgagtgagccgtactggtgcgaggtatgcgaagaagaattaaatccaaagaaatggttttatacatgtgatcattgtgctattacttttcatatcaaatgtaccctcggagacttcacatggatgaaaacgagaggtgaagatgagtcatccccagttgtgtttcttaataatcgtatgactcgaccaatatgtagtggttgtcattcacgttgtcaattcccatccattttgaagtattttgagagattttgttctctaaaatgtttcaaaaaagaggtccgcatggtacccgcatttatctgaagttgatttcaacaaattgcgcttgctagtga

SEQ ID NO: 24181 - DNA, 594 bp, Arabidopsis thaliana
tgtaatttctggggacagaaacaatgtctaaggtagtgtacgaaggatggatggttaggtatggaaggaggaagatcggacgatcgtatattcatatgaggtattttgtgttggagcctcgtcttttggcgtattacaagaagaaacctcaggattatcaggtgaaattatacctcagctttagcgaattttgttctgtctgcttcaatttgtatttcctttgttatgagctggagaaatggtgcgaggttttagctgaaagatgaattttggaatgttaaaataggttcctatcaagaccatgttaattgatggtaactgcagagttgaggatcgaggcttgaaaacacatcatggacatgtgagtcttcgttttaaccttttctattaccatgttgatacttgaagtgcttattgatgtgtatgtgatgtgttccattgagtgtgttacatgagttatctaatgctagatttcttataaacatatcacttatgcatatacaatctcttttgggcttgtcggctccactttgcagatggtttacgtattgtctgtctatacaaaaaagataagagtcatagaattacggtatg

SEQ ID NO: 24182 - DNA, 441 bp, Arabidopsis thaliana columbia
tttcactgctgcaacattatgggctttataaaccccatttacttataaatgggcctcgtacgaatcatccgatgtggcgtttcgttgaccgttgaaatttttacacacttcgttacccggtgtaggggcaaatttggaatttcatgaacattttcaaattctttataccaaattggcacgttgagagacttctcgtaaaccaggtctagtggcaatttcgaaattttgcagctacattttcaaaatcttaaagccaatttatataaaacgactcttcttccatttttgggttaacaagttcgtggtgagtagtggacggagagatgtggcggtccttcgagttgcgtcgtcgtcgaggagatcggaatctaatggcgctttcatcacttctcaactctccagattcttctcagctcctccttcggtacgagacattgtttg

SEQ ID NO: 24183 - DNA, 586 bp, Arabidopsis thaliana
agtaaagtctgacgggacactactggaagacaatcatccacagtcggaaataaaaatgcataaaagccctctggaagtgtcttcagaaggtctgagtactgtaccagacaacaaggacgtagaaagtactgaatctacaagtcccaagccatctctggatcaaaggaacagggacacagaaaccaaatctcctggtgagagcattcttgatgataattgcatagattccacacaagtgtataatctgaaccttttagagagtgaggctatcgaccaggcagttagagagcaaacatcttatgcaagccatgaagttgcagatgaggaattgctgcagtcaaatgttttcaggggcttagagtttgaaccacaatcagcaggcttagaatttgcaccacaatctgcaggtatagaattgaacagacctaagcaagagttgaatctggatcctacttttcctagctttggttttatcctgagactattcgcccaatccagaggacatgccaccgcttctcctatgcaatggcttattggaaaggttcacattcttttcgtacctcatgggggaacagtcgaacagtag

SEQ ID NO: 24184 - DNA, 590 bp, Arabidopsis thaliana
ctataaaaaatttcgttactatttgaaatgtactgtgaagtttggttaagcaagtattgtgttgagccaaaaaaaagaacactttccctttggacacatcaaatccttgtcaccgcttatgcgacatctccggttgccacgcgtcatctacggtttagccgagagctttcatgaactttcttcttcctcttggcatcaccgcttctcccaggaaaaacccgaagaagctcaagcaaagcaccgcatcaacttttctctctcgcttgtggttctctctctgtagatcgtgatacagtagtaatcgaaaggattcgaattttcccgcgcgttccttcactttataaagactctgctatcgtaaataatgtatcagtggaacttaccgtaccggaaagatgacgtggaaacaggcgttacgtcaagaaggcctttactatacccagcgatgcatgaaaatcccgagctccggtggggatttatacgcaaggtctactctataatcgcctttcagcttctagccaccgtcgctgtcgctgccacggtggtcacgtccgtccaatcgctctgttcttcgccacacggacttggat

SEQ ID NO: 24185 - DNA, 143 bp, Arabidopsis thaliana columbia
gaagaatgccttagtaattagtctttattaattttatagagcgttaacaaaagatcacaacctacgtgtatcttgattgactggactggtaacggtaatgcaattattgctgaggggcgtatgataacttctgatccagatga

SEQ ID NO: 24186 - DNA, 736 bp, Arabidopsis thaliana
aattacctgaggttgcgggagagagctgcgattaagaagacgacgaagattgcttggtgagaaggacattgacggctcatcctgattatatctacacacattaggattatcatcattaattagctgtaaaattattctaacgttaattgttgtgaatttcaaattattctcacatgttaaacatgtgtatatagaatcattgattaattcaatttattcttttaatgaaaatatcaaattattcccaatgtagttagaatccttaatcaatccaattatgttttattttaatcaaaagtcttaactcccacaaattatgtgtgtgttacagataaatgacataacaaattaattctagaatgcgagtctgaaaaatatatgattacatctttctggtttattaaaaacaaactaaaaataaatacaagaatgttaagcatttcaatcaaaagaagcattttgcaagagtagaagctaccatctggaaatatttgcaggattttggaatgagaaatcccccaagatgatgatggatcaaacgcaaatgacgaagaactctgctttgctgcatcatccgaagtcttgagcggtttacctgcacagtctcgtgctcaggtgcaccggttagcctctgaaccaacactttgaagtttactggctcgactcggtagacatgaggatgcattggattcaaaggtgatgatattgcaggcctcttcaagggctttgaaggttg

SEQ ID NO: 24187 - DNA, 1106 bp, Arabidopsis thaliana
ggaactttacataatatcaaaatgattacaaagatggtaaatgaagacttcaaagatttgaaaggtcaaaaaagaagaagaagaagaagaaaactacgaatctctatagtttgttgctcctcatcagacaaaatccaagaccaaacaaaagcatcatcatcaagctttacacatgcatggagtgagaggattttcccaaagatcatagttagggaaagtttcttcaggtaaaccggttcgtgtttgatgggttacaactacatcttccacaaaagttgcccatcccatgtaaggatccccaaatgatttcgacatcaaccctttatccggtttgattgatttctggcgatgccccatatatctacgcgctccgatgatcagttttgcaaagtttccaccgtgtgtcatcacaaatacatctgatttcaagcacaccaagaaatctagagccgcaagacttgtaacgtgttttctaaacgttgttagttcctctttgcctgctaaatcctcctttgttacctgattcaaaggacagttaatgtgagagacaagtttgtgctgattcatcaaagaattataagagtccggtgttgtgcttaccaaatttgggaacatgtttcttagtggagccatacggttttgaccgccatagacttgaccagatgcaacatagatttgtgtttcttttggatagcccattgcacgtaggatcacagcaacttctcctggctcaagagggcatcgaccttctttgcgcttctgcaaggcgagctgccagagatgggaaccattctgcaatatatgtcaagaaatttcattaaggtagcggttgaggttgtttagccaccaaaagaagttgacaactgcttataaatgtcaccttgaaacgccgaggccattccttttgtctgtattctgccattttaactttctcttcccttgtccccacaaaatcacagaacgatagaccaaccattcctttctcgaatctaagatgaagagcctatacaagagacatgggtatagttttaagttgatataatgcatatggtcctaagtttatacaaagtcgaatctctgatatggcatacatatatggatttgga

SEQ ID NO: 24188 - DNA, 1740 bp, Arabidopsis thaliana
ttaattcaaaaaccaaggataatacacggtaataatacaagagtagaatcgtaattatagcatcaaaacaaacgctctttaaaaatcttcgtcgagagagaagacatggttatcaaacgcgccgttaccattaacgctagacataacggaagccttttggtaatcaccaacacgtttctcgaagaaattcgttttcccttgaagtgaaataagttccatccaatcgaacggattagtaacaccgtacaccttcccgtacccaagcgcacccaaaagcctatccgcaacaaactcaatatactgactcatcaaatcacggttcatcccaaccaacgcgcacggaagcgcgtcgcacacaaactctctctcgatttcgaccgcgtcgcagacgattgatttcacgcgttcttcgctaagctttgttttgagtagcgtgtagagtagacaagcgaaatcacagtgtaaaccttcgtcacgtgagatcaattcgtttgagaatgttaatccaggcatgagtcctcgtttcttcagccagaagattgaacaaaagcttccggagaagaagataccttcaacacaaaggacataatcgtcaattcaagtaacaataaggaagacccacaaaaaataaagggtaaaatagtaaatataaggtaccttcgacgcaagcgaaagcgatgattcgttcggcgaaagtctgagaaccgtcgatccatttcatagcccattgagctttcttggcgacgcaagggattgtttcaatggcacgaaagagatgatctctctctttgttatctttgatataagtatcgagaaggagactatacatctccgagtggatgttttcaatcgcgatctggaaaccgtagaaagcacgcgcctcagagacttgaacatcggacatgaagcgagaagcgagattctctagtacgattccgtcagatgcagcgaagaaagcgaggacgtgtttgatgaagtgacgttcaccgtcgttgagactgttttcccagtcgcggttgtcttgtgatagatctacttcttcggcggtccagaatgatgcttcggcttttttgtacatttcccagatctgtgggtagtgaattgggaacatacagaatctgtctggggttggtgttaggagcggctcttctggcattgaaggcatctttgaagggatttgaagatttgattgaagaagagatttgattgaagagattgtttgattgatgaattataagatctagggctgaatatttatataggagattatagggttttggggtttttgaatttttgacgtgaagagggaaaatagaggagggaaatattaaaaatgtttgaaatttgtttggtttcgagaagcttgttcgggaatttttatccaaagaaaaaagcttgttgaggaagatgaagggtattatcgtcaatacccactgagatttagccttggaagcgagggaagtgataaagtttggcggcaacatgcgataaatttgccgggtaagtataagggtataaacgacattttgttaaaactcgaaactcttggtggggacgcgtacgtatgtggttctcgtgtgttttcatgtgaggtacacgcacctacgtttgatgtgttgcgatgttacacgcgccaaaatgtgttttagagagttaaagcccattaataagcccaatggatttatcggaccagaatataatcatataagtattgtaattggacttgggggcacaagaggg

SEQ ID NO: 24189 - DNA, 1006 bp, Arabidopsis thaliana
ccatataattacttgcctgctaatgttgctttaagtgcattctgtattctgttaagttgttcctgagtttgattacagcctcttatgtgattcgacgtatggctttatttggaacagtcattaagagtgaggttgcagccagtaaatgcaagaatgagtcgcttctcaagtcggatgttggtgaacggccgcacgtaacatttcctgtccacattcaggttgccaaaatgctggaaaatggtctgacatttgggagcttcgattctaattttgtgagagaggcatcttctgacaagtttactattgggtgtgatgactccaatattgagtcttctcatgggacagccgcatcagctaggttggtgactaatagctactttgagtaaatcttacagtgttacttgcttcaatattctcatgaattgatctagagtctcagatgaatgagtttctgatatgaatacctttatatgaaacttggtttgcaggaaagatatatcaactttttctcaggataagaatcatgagatttcaaattcagcagctcagaacgagttaacattgcagccagatcaaactgttctccctgaagaaggttcagaaggagataaagtaaagaacgaggttttaccaatcacagacactcatcaggttggttattatcaagaagccccacacaatgtctttttagtcttgtgcattcattgtcagcatcaggccaaccgcgtggtttttctagccaggaaatatgaacacaatgcttaatcactgtcttttatattttgttgataattgcaggctgcaaagtgtgatgctccacctatctcctatcctgatcagtattccttagcagccgctcaacaggcaatgcacctttataggcaacaatactctcttaactatttcccttatggtccatattccccccttattatatgccgcaacatacattcccagtacttgagccaaatgggtccaacaacagtcttacttacacccggagatg

SEQ ID NO: 24190 - DNA, 777 bp, Arabidopsis thaliana
atcattactccgatcccgaagccaacacaataggatcgaaatcctatgatgttatcccatgctaatgtatccagagcgtaggcttgctttgagcactctaatttcttcaaagtaacagcgccggacgacgacccggccaattaagaccaggagcgtatcgccgaccgaaggatgaagccgaccaatgtgcaacacatgcgaaccggctgctgaagtacaatagaccactctacaactaattaagtgatcatgtagactctaattttacacttgaatgaaactcgtgtactcaggctgctgaaaagcatagaattacctccaaggagctggtcaagcttaatgtagccgatggaatcattcctgtaactgatcctacctctaatctatttgtgtgtttgcctcttagacctcttttgtcagtttggatcattgagttactctcttacatgctgtgcaggaaccgtttggtggggcccatgctgatccttcatggacgtcgcagcagataaagattgctatcaatgaaaacatgaatgtaggcatagttattcttctcaacgttggatgtgatctaaaaggtttctaactttttcttgggacttgtaggaatttgggaaaatgagtggggaggaggagctcctgaagcataggatggctaagtacagaaagattggagtgttcatagaaggtgaaacaatagagcctagtaggaaagtcaaaaaataataatatatgagattttttcgggtagattgacctatattagcattcgttgat

SEQ ID NO: 24191 - DNA, 1416 bp, Arabidopsis thaliana
tcattcctgaactatcctacctctatctatctgttcctctacacttctttctcactttgatcactgagtactctcacatgttgtacaggaaccgcttggagggcccatgccgatccttcatggacgtcgcagcaaataaagattgctatcaatgaaaacatgaatgtaggcatagttgttcttctcaacgctggatgtggatctaaaagagttctaacttttttttgggaacttgtaggaattcggaaaaatgagtggggaggagctcctgaaacacaggatggctaagtaccgaaagattggagtgttcatagagggcgaaccaatagagccaagtaggaaaatcaacatgaagaaaagggaagccgtgttctcagatagccggaagctgcagggtgaggttgacaagctgaaggagcagattctgaaagccaaggagacgtctacggaagccgagccttcgagtgaagttcttaatgagatgattgagaaactcaaatccgagatagatgacgagtacactgaagctgcaatagcagtaggtttggaggagagactaacggcaatgcgcgaagagttctcgaaagcgagttcagaagagcaccttatgcacccggttctgatcgagaaaattgagaagctcaaggaagaattcaatacccgtttgactgacgcacctaactacgagagcctaaaatctaagcttaacatgcttagggacttttccagagccaaagcagcatcagaagctacttcattgaaaaaggagatcaataagcggttccaggaagctgtagaccgcccagaaattagagaaaaggtcgaggcaatcaaagctgaggtcgcgagctcaggagcttcttcttttgacgagttacctgatgcactgaaagaaaaagttctgaagactaaaggggaggtcgaagcagagatggcgggtgtgttaaagtcaatgggtctggagcttgacgctgttaaacagaatcagaaggatacggctgagcagatctatgccgcaaacgaaaaccttcaagaaaaacttgaaaagctgaaccaagaaatcaccagcaagattgaggaggtggtgaggacaccagagatcaagagcatggtggagttgctgaaagtggaaaccgcaaaggcgagcaaaacgcctggtgtcaccgaagcatatcagaaaatcgaggcacttgagcagcagatcaagcagaagattgcagaggctctgaacacgtccggactgcaggaaaagcaagacgagctcgagaaggagcttgcagctgcacgtgaactagctgcagaggaatcagacgggagtgtgaaggaagatgatgacgatgacgaagatagttcagaatccgggaaatcggagatggttaccccagcttcgctgaacacaaaacaagacattgtttg

SEQ ID NO: 24192 - DNA, 530 bp, Arabidopsis thaliana columbia
agttgcccgaagtggcgaagttacaatacattacattagtaaattaaatatatatctaactagcaatcttaattcttttattattcattgaaaaattattacgactataaaaattttgaatacacaaataccatatatatatatatatatatataacccgtataaagcttataataaatatgtagggtaaagattttaaacatgttttaaacaagtgttacaaatttaactgataccagcttctaaacttcactaagatatcaaagtcttatcattttcttttagtatataagaacatactatcacatatgaataacttatacctcactgacttactacacatcacacacatggaagattgcgcagagaggagttccctatttccagagactcattgctgcgccgttcacgaccttgcagtccttgcctacttctatggtcgagacagggcagaaccgtgtcattgatgcttcgatactctcatccgtgaaagggcaaaactcagagtatatacattgttttattaaggc

SEQ ID NO: 24193 - DNA, 844 bp, Arabidopsis thaliana
cagcgattgcagaagctggaaatgtgatagagtcaatctatggttgtcctcaagacattgaaggtgttgtcaaaggtggacatatctacatcgtccaagctagaccccaagtttaagctctctttttctacttgtaccattccctaagttttcaatcaaatcttataattacaagctaatcttttatatgtttgctattacacatgtaatatttctacatcatggcacactcctgatacaaacaaacatgattcaaagtttcataataaatgattgtgtgataaaaatccaaaactcgtttaaacgacatcgtatgaagggtcgcataagcgaagaaggatataaaaacagtcgccgagaaagtctcccgctatggataccgttctcatggctacaacaccaccaatcagatgtcttcatgcttcaattcctacggtgttccgttcgccggcgatttatcaggtcagctgccggagctcccaactgttttcctaccgttcgacgactatgatgagcatgtgttttctcagacggtccgatttgagatctcgctttcttagtactccgaaaaccacttctccgatgagacgacctcgcttttccgtcggtgcttctacggaggagtcttcaattccttctaatcggaaccttatcgtggctaactccgtcgtaatcgtagctttagctgtagctaatcgcgtgctctacaaactcgctttggtcccatgaaacagtacccttttttcatggctcagctcacactttcgggtaacttaacaagagtggctatgaagaaattgggcagtgaaggacgctacttagattatgataaatgaatggtttt

SEQ ID NO: 24194 - DNA, 1107 bp, Arabidopsis thaliana
taaagatcaccttggctatcacatcaaagcagtatcatctgagtttgaaggtccttcacagaaaatccaaatggtcaaactcaacagtacaccaattatcttttgtgaattgtctaacagaattgagatttttgacaatttgaggagtgacaaggacgtttttgagagtaagtgatctcgaaaggcttttaacagaggaagagccaacacaatttactggaatattggaaccattacccactattactgattgagtgttgctatgattaagaatagagtggagattacctggcgaagaagacagatgagccgttgaaccggaatccaagacccaagaatcccaattaggatccgtcagtgtctccgtcatttgtgatctaggttgaatttccattagatgcgcttgttgaacctgttgatgtggtgaagacgacggagtcggtggtcgaaatgagctttgttgataaggagaccaatttccaaagtagtcgggccaagctggaaatgggtcttgcaaaaatggaggggtggcacaatttgagaatgtgggttggaattgtgagttgttgttgttgggacctccacctttgtagtggttgttgttgcttttgttgcccttgttgttattggactgttggtgttgatttgatgaacaaagcgctggcggtgcaagagcaatggtgagagctgtggttgatgaagaatgatcgttgtgggttgcaataaggtggtgtggctttttgagacgactctcctacagttccagcatcaaacttttctctaagttggacaaggatcgttgtgtttgattacattaattatgttatcaaacttttctctaagaccattaagcaagtacatgaccaagttacgttcattgaccggagcatcaacattggcaagcaaatcggcgagtgatttgatcttctgataataaacttggatcgatcaatctccaatatcctgggtacgaagctcgttgtcaagctgaatagctcttacttctttattgttttgaaactgattctctactcgtatccaaacataacgtgatgcgcaccagtttggaaggaagatcggaacagaggtggagcaagtgtgccatag

SEQ ID NO: 24195 - DNA, 589 bp, Arabidopsis thaliana
ccatgtctgagatttcctagcctgttttccgatgaatcttccagactttccgtcgtagtactccggccatccatccttcaacagtcgtgcctccgccaactctatagcccgtcgtgctatttgtggccgtccagtctttatgcttgccgccgttagtaaccatagaagcactacattttgcatcagccacatgagtcaacaatattgattgaatgattatatttccaaacaaaaaacaaaattaatcaaatgtggcgttagaaatagaaaatagggttgaatgaaagtatttacgtggatcttgttttggttctaccattacaataaagatattataaaaacaaactctgcttattttttggacaaaccaaaaattcaaacagatttaagagttgaatattctttggccatcatagacggcaaacaaatccaagaattaatgtcggtttcggcatcggattccctaatcatatagtatatcttagtctactatactattactcttcaatcgctcatgtttagcatctatatcatatttatttgcattcgtttattttctcatgttttttatgaccttaaattatattta

SEQ ID NO: 24196 - DNA, 795 bp, Arabidopsis thaliana
gaatatatctttatctgattagtttttgttttttccgggtaagtacagaacaaaattcttgagttcaagaagattgtcaaagcaagggagcaggtagttgcaggaacgatgtaccacttaaccctagaagcaaaagaaggtgatcagactaagaattttgaagccaaagtgtgggtgaagccatggatgaacttcaaacagttgcaggagttcaaggaatcatcttcttgaatttcacttgttcaagttaatgattacaaatgctctgagagtaattaattatatgtgtgtaaaatactttgctatatgcgaaacctaaaaagttaatgtaatcaagaaacttgttcttatgtcctgcaaatatctttgtatgtttgtttcctgtttattcttatgtttcaagttacaacattgcactgattgaaagatcgtaaacccaatgacaaagaagatggcttctttacttctccttgagagaattgatacaacaaatctcatcaaaagtttatcgatgataaaccacaagaaacatgtctacaaacaacaacaagagcatgagcagcagcaacaaaaggtagatcagagtgacatttacatatcgtaaggcacgcgtttgtacagatccgaagcaaccgaggcgttgcaacgcttgcacaggggtacgcatgtaagtaacgagtccagggttttcagacatgtcaatctcctccggtttagtcccttgaggaggtgtcaaacaaaatggtgaacaaatgactcacatcgaagttccaaattgatccaagttgtgcacgg

SEQ ID NO: 24197 - DNA, 631 bp, Arabidopsis thaliana
gcagcactaccaccgccaccgccacttccaatggctgtgagaaaaggagtggctgctccgcctcttccacctccagggactgcagcactacctccaccaccgccacttccaatggctgccggaaaaggagtggctgctccaccacctcctccacctggcgcaagaggaggcttgggagcgaagaaagtaactagtaaactgaagagatcaacccatttaggggccctatttagattcctcaaggggaaactagaagggaagaatccagaagtaagatctcgtggcgctggaggaggaagtaaaggcgcgactggaagcgctccagccagcggaaagcaaggaatggctgatgctcttgctgagataacaaagaagtaaatcacatctcacttcacttataaacaacaaaatggtcaaaactcatacttgcttaatggctacacaggtctccttattttcagaagatagaagaggatgttcgaatgtatatgacttcaatcaatgagcttaagacagatattacaaagttcaagaacaaggacattaccgagcttcaaaaatttcaccatcgtattgaatcagttccttgagaactagaagatgaacacaggttagtgatacaacataagtg

SEQ ID NO: 24198 - DNA, 771 bp, Arabidopsis thaliana columbia
ccaagagagctacagatcacctgtcagccaggaaattcggttccactgaggggtccttgccaagttttccgcagcgtaagttccctgtcccagaactctctgcataaatagtgtacatgatagaagttacaaaaaggacaacattagatgatattataaattcctacgcagcaagctatttgcatctcaaatcctccaacaaccaagcaatattccaatctacatttgtagaattaatgtctgtaatacatgatgagattctttattactgcaaaagatggagactatattttgtcaacttccatacattttaaaaaggattttattaaatctgcgaaagatagataaatattttttcaacttttacaaaaaggaaaaaagttatagtggtttaattgaatgacagcatgtatcacacctaatcctaactataccacaattcaccattgatgtaacaacagcatattcaggaatcaagttaaaagcttaagaaaatctaataaaaacagtcgaggtagactaagtcctatctacgagattgatgaatgaatgcacttactgttttctccatcatcttcatcactgccattctcaaaatcttcagcaaaagataagcgggaagatcccttaatctttctcttcttgttacgcttctctagctgcaactcctcttccctgtagttaaaaaaaaaaagtcaatcaagcttaatccaaagaataacaccaataactatgaacaatagacctaaaaacaaaactcactcttgctgt

SEQ ID NO: 24199 - DNA, 438 bp, Arabidopsis thaliana
gatttctttctccataacttttttatcagcaaagtgataatgaacaccgtccatctccatagacctcggagatcgagttgtgtgactcacagagaacccaaacattgaaggaaactccttcataagcattgatataagcgttcctttgcccacaccagaatgaccgcttatgacaataggcttctcagcattgcctctcacacctttactccaagcaacaacttccttccttagtaacttcttctgttcccgcacataaggactatcgacctatcaatgttccaacacgtgagaactccaaactgatacaccacaacatcctaagttactgcaacaaattactaacctcgaggaaccagatggagtcgttgcgaggtgaaccttttttaataaccaaaatccgaccttcgtcaagaacaaacgcggagtacccttgct

SEQ ID NO: 24200 - DNA, 1376 bp, Arabidopsis thaliana
tccccgagcattaaatgcccgtcaacacgtttcttctctcacccatgaaatcacgtgaacatatttcacgcgcaagacagaagaaaaacttgttttatagtaactatttcgaaaccccaatctgtatgtaacgtctgtttttcttttttcttcgacaaatctcctattgtcttttacctgaatacatattgtaattttgtctcgaagcaaaacgttctaaaaaataactgaaacttttcaaatctaataaaagctaagtaacccaacaaaccaagtgaacaatcaaataatcaattaggctaaagagtactattgctttattgcaccctcaaaaattattaggatgatgagaatgtaatatatcctatatatgctaaatcaccaagtgcatgtttaagtttattaaacataatctactaatataaacttctattaagaataaaatatttagttgatcaaataataagtatctccatacaaattccagctgtaaaaaataaaattaggaaaacgaaatactaaaataataaagtttggagatatatagaagaaaaagaaaacagagcgccattatcggtgaaagctgtggttgttccttgaaatccgattctgattccttccttttggatccgattctatctccaccttcaagcacaatattcgactcggtactctctctttcttcttcttattgcaaaaagattctctttttatctgttttgtggatatagagattctggataaaaacaatcatcttttttctctcaaaaatctctgcttaagaactgggattcttcaaaagctcttctcttgtctgatttcttctgaatttcccctctaagtctctccaattcttctccattagctataaagtcgattcctttatcaccgttctgaagaatttggtcgaaagttttggcctttagtacccaattttcaatcctggcgataactgaattgaaaagggtccaaaagttacatcacctgaaaacaacagtcctgttgattgtgttggcggtttggagtgcttgataagtttaatcagggcccttgacatggggtcctgcttatcatcatctggaggtggaggaagcaggagatctctccatggctctcctcatgttcctggtcctgggaggaggaagaggcctcccaagaggagacctgggtcttgtagttcttcgtttgataacaccgaggagccacttcttcataggatccctggaaggatgtatctgaatggctctacagacaccgtgtctctcttctctcaacagggcaagaaaggacttaatcaggacgctatgattgtttgggaggttagcttggaaattatacacatttgttgcttaggctacctatagtttagagatgga

SEQ ID NO: 24201 - DNA, 471 bp, Arabidopsis thaliana columbia
attaaattatcgtaccgttttgttttcttcctgattaatactactattttctaaatttcgaatacaaaaaaaaaatcgtgagatctctatcactcacctcttgttcaagctctcaacttcttcatctgtaacttgtcctccaaatacgactttgcttattccatccgacggctgagattgtttcccccaaatttaaatcagaaacgaatcaattctcgcaattaacaaattgagtgaaattagtttaaagaaatcaatctgacggctcagattgtttcccctaaattccaaatttacagaaaattaataatcacaacgaatcaaattataaaattacacaaaaaaattagtttaaatattttatctgacggctaagattgtttcccttcaaattcgtagatcgcgaaattaacaaattgagtgaaactagtagtaattagtttaaagaaatcaatctgacggctcagattg

SEQ ID NO: 24202 - DNA, 810 bp, Arabidopsis thaliana
gatcccgatgccccatggtcatatgtgatgcatctctgccaccattccgtcctcgtcctcttcccctataggatcctcttcctcctcaccctctgattcacgtttacttgagtccatacttgaatacaaaagcttgctttggtcttcttcaggatcgtcttcgtcgtaaactcgttcctcatacacctttaaacgaccaactatgtcatcaaaagttatggcattaagatccaagacttgttctaaagcagccacaatgtgaatgtatctcttccgaggaacactcttaagaaactttttaacaagtcttgattcttcaataattacacccaaagcagccgattttactgagatctcagacaacatgcctgcaaagtcatctattttatgagaatccttcatcttcagtcgatgaaattcagccattagggtctgcaatctagcatcgttcactctctctacccccacatctcttgctttgatcgaatcccatacttcttttgctgtctcaagttctccaatccgtaatgcttatgattcaggaatggattgaaacaacaaggtgcatgcaacatcactcttgtcttcatcaaacggctccgtaaccttctctatcacatcccaagtcttgtgaaccttaagcgctctcctcatcctcatggcccatcatgtgtaattcgttgcgtttagcataggacattgaatcgaagaagatctactcacttctctcattgctttagctgcgggtgaagctgcgggaattatttcactcattctgcaagatcgatcttgctgtgatacaaatctagt

SEQ ID NO: 24203 - DNA, 552 bp, Arabidopsis thaliana
gtgcaatggacgatttcctgaaggaatttttcccagcggtgtgggagaggaagaagcacgtacacgagaacaactactgcaagtacgataaccagttcttgcaactgttcacctcgtctctttacctagctgcactcgtggccagtttcgtcgcgtccgccacctgttctaaacttggacgcaggccgacgatgcagtttgcttctatcttcttcttgattggtgtcggtctcactgcaggagccgttaacctcgtcatgttgatcattggaagactctttcttggctttggtgttggatttggcaatcaggcagtgcctcttttcctgtctgagattgctccagcacagctccgaggaggtctcaacattgtattccaactcatggttacaatcggaatcctaattgccaacattgtcaactacttcactgccacggttcacccttacggatggaggattgctctcggtggagctggaattcccgctgttatcctcctcttcggttcactacttatcattgagactcccgacaagtctcatcgagcgcaac

SEQ ID NO: 24204 - DNA, 525 bp, Arabidopsis thaliana
  unsure (1)..(525): unsure at all n locations
tccagattctcaatcccaagctttggtttcagagaatagggcacgtcgtcgtgctgaagcagttggtctaaaggattacagttatttggaaccttcgaaaatctttcacgctgcacggcttgttgctgttcttgaagcctatgccttacatgaccctgaaattggctactgccaaggaatgagtgatcttctctcccctatactctcagtcatacctgatgactacgaggcattttggtgtttcgttgggttcatgaagaaagctcgtcagaatttcagagtcgatgaggttgggatcacaaggcaactgaacatagtctcaaagattatcaaatccaaagactcacaactctacaagcatcttgagaaagtcaaggctgaagactgtttctttgtttacagaatggttcttgttatgtttagaagagagctgactctggagcaaacattgcatctctgggaagtgatttgggcagaccatagctcagtaagagntgggatggggaaacttcctggagcagacga

SEQ ID NO: 24205 - DNA, 1001 bp, Arabidopsis thaliana
atttcttccaactcaaatatgatgatacagcactctgacttacaggactaccctggaataatttcaggtacgtggctcctgagtatgcaatgacggggcatctccttgttaaaagcgatgtctatagttatggtgtagttctactagagcttctaacctgtagaagaccagtagacatgtctcaaccttcgggagaggaaaaccttgtgacatgggcgagacccttactagccaacagagagggcctggagcaactggtggaccctgcattggctggaacctacaactttgatgacatggcgaaagtggctgcgattgcctccatgtgcgtccaccaagaggtctcacacagaccattcatgggtgaagttgtgcaggcactaaaacttatatacaacgatgcagatgagacctgtggtgattattgcagccaaaaggactcatcagtaccagactctgctgacttcaaaggcgatctggctccttcggatagcagctggtggaatttgacacctcggttaaggtatggtcaagcttcgtcgttcataacaatggattatagctcaggaccactagaggacatggagaaccggcctcactctgcctctagcattccaagagtaggaggtcttattctaccaaacagatcaggtccgttaagacccatgcgtagtagaagaaacttctttagactgagaggaagcatgagcgaacacggtggaccgtcgtcgtctagacatctctggtccggcaatggtgactggctctgagaaaccagaaaatgtacagtgaagaaaagggaaaaggaggctcacaaactcttgagctgcatggttaggttctggttaatccggccaggttcggttcatctgggtaaagatttccggtttgatttcttttaggagctgtttgttgttatgattatcctcaatagagatttaattgtttgtttttgcgaggatgcaaaagcacagggagggttgtattttgaaggacgcctg

SEQ ID NO: 24206 - DNA, 536 bp, Arabidopsis thaliana
atactttggcactcccttaaaatctcatccatgctgttatacctttctataatacgtttccttctttgcaacaccgaggccgctattgcatagagcaccaaatcatcagtgggaggtgcacgttgccttatcctactccacgcggattttcccatcccggctctgattgcggcttgatctgcccacattacttcccatagacacaatgtctgatcaagtgtcagctctcgtctgaacatcacaacaaccattctgtatacaaagaaacagtcttcagcttggagtttctcaaggtgcctataaagctgagagtctttagatttgattatctttgagactatgttgagttgtcttctgattccaacctcgtcaagtctgaaattgtgacgagctttcttcatgaacccgacgaaacaccaaaagacttcatggtcatcagggattacagagagtataggagagagaagatcactcattccttggcaatatccaatgtcagggtcatacaaagcataagcttcaagaacagcaactag

SEQ ID NO: 24207 - DNA, 887 bp, Arabidopsis thaliana columbia
gaggatcccccaattgtagataatttttacttaataatacatcatttaccatatcatatatagatattagtttggtcaaattgtacaaaaaaaatcgatttctcctgaccgacatagattcagacaatataaagcccagtcataaacccaaaagtgtggataagataataatcttagcccaacaagcagcgagagagagagagacttattattagggctccgtcaaatttccccaatttctctctgattcctctctagaaatcgaacttcttcttcttcgtccaagctttagaatcgaaaatcgatggcggatcaaagttgtaagccgttgcagtttttcgtgagactactcgacggaaaatcagtaaccctaaccttttcctctccgatagcgtgtggcgagcagatcaagcagcggatcttcgagcaaacgaagattccgacgcatctacagagattgataagcggaggattccaaatccccggcgcatccgcgatttctcagtctgacaccaccatgaatcttgtcctgtccctccgtggaggcaaaggtggactcggatcgttacttcgtaatgtggttatgaaagctggacagaagaagacaaacaatttcgattcgtgtagggatatgagtgaacggagatgtaaacgccgagaacaggcttcaggagtggaaggatggtgaataagggaggaattttgagaaaaaggctcttgagtatctgaaggagcaatccaataatgctaaacaaggtgttggagatggagctacgcagaagaatgtcaacaagtataaggggggatctgataagtgtattttggctgtgcatttggctttgaacgaaactttcaagaatgggaatacgacgaaagggaagaagatg

SEQ ID NO: 24208 - DNA, 1267 bp, Arabidopsis thaliana
cgctctctttagtcttaacagcttaaacatgtccatactcatttcaaatgatcaaaaccatattcataccacttacaagtatcaagatgtaattagtctcacaaacttccatcagatagaaaccaatgtaaaatgaagcagcatagtttaaaggattagaaattaaacactgaactaggaagatcatcgaaaccaaatcaaacagttaacaaaatccaaatactttcaagactctaccttgagaggagtgccacaagcaattagtctaacagagttatcgcggcaataacttaaaagaggctcatattcttgccaacgttgagcaggccaatgtgtcacataagacttcaatgtctctccgtccatcctgccaccaaacaatattcacgatcacgtgaaaagtacgcggcggcaatctcgaattttgcagtaagtttatgtgtagacaaacctcttatccatgtattgattaagctgatcctgcaaatcgagagggaatgcttccagtgctacagagatttgacgctcgctctcaacgcatctcttcctcaggtttctaacgatttcgagttcaagctctttgtcgtctttggtaggcacttgctccgcctcaccgaggtacacaactctcgcgttcaacagcttctcccacaccttcttcttatcttttcccatagccatcggctcaccaatggccgtcgcgtcatagattctcgaggttatcgtctcttccttattcacgggtggaggcggcgacggtgttgtggtcgcaggaggaggaggaggagctgctgattccgcaggcgatgttactgtagcggacgagctctcctcggaggctaaagagacagacggtttgagaaacaaggaagcagccgagactagaagtggtggcgcgagtagaaaagcgcggcgagagaaggcggttcgtgatggaagatcggaatcagaaagagcaacaatggatagagaattgttcttctcgctggtgaggttgatcggaaaatgaaggccatagaaacgtcggcggcgaggacgggaggaggaggagcaagggcagtgaaataatggttgagaagcgaagagatcattcgtggtgagtttcattctcagaggccagagctgagaagagagctccgtttgtacacgtcagcgtattacatacattgctaagaccgatacgaataagagaagaattttaatattttcctcactgttaaaacaatcgtcaatttcttctgaatttttgagcttgattttattgatg

SEQ ID NO: 24209 - DNA, 571 bp, Arabidopsis thaliana
cattgcttaagttcatgaaggaagagatccctggagttacatcaccaatggtgtatgttgctatgatgtttagttggtttgcttggcatgtggaggaccatgaccttcatagtctcaattacttgcatatgggtgctggtaagacttggtacggtgtgccaaaggatgctgctctggcttttgaggaggttgttagggttcatggttacggtgaagagctcaatcctcttggtgagtatgataagtgttatgtgttagtgactcatagttactcaatgtatcaattcattgttctgattgttggctttgttgtgtctctgttctttttgttgcttttaaatgcttttctttccctccaaaagttgtcaggggtagaagctgtatgcaagcaaactaattggttatgcctcttacgttcttgtcttattagtgacattttctactcttggtgagaagacaactgtgatgtctcctgaagtatttgttaaagccggaataccgtgttgcaggtaatggttttttatgtttgtgctctgtttatctcatcatcttgttgtttgcatgtctcttc

SEQ ID NO: 24210 - DNA, 1090 bp, Arabidopsis thaliana
  unsure (1)..(1090): unsure at all n locations
caatggtggagaaacaagatagcggctaggaagcttaagctctccatcatattggagcattcctgcataacgtatatcagggacacgtacgcgatcaaacttgtcgaaatctttgtattcgagggcctttgcatgcatgaccattcgatcagcacggaaattgaatgtaacaactgcgtcaccatcaacaattggacccacagcctttccattatcatcaacaataacaaacgaaggcaaatactggtcattggcaccaggttctgccctcagtgtcttaactgcttcaagagcgcttttaaatttgtggggagcttccccaaggacttgtgcatcccaacctcgtttaacaacactccaatcattctgcaaggaaggaaagcaaaaattggattcatttctaaactagactagacaaggcatgacattcatacaagatctcacaagcattgcctacctcataacggtccattgtgacatacattcgacctccaccagatgcaacctgagcatcaacacctttcgcacgtaaagcagctaggtcagcttcaagagtttcaacaaatccgacactagaaccatccaaaacatcacgaccatcagtaagaatatggacgcggattctcttagcaccacgttctgcaaaacccttaagcagcaactgcaccaaacagaaccaaattaaagaaaattaacaaacgccaacgtttcaaaagaaatgtgtaacagatgagaattaagtacctggacttgatccaaacgagagtgaactccaccatcgcttagaagaccaataaggtgcacagtgcctttctcaaaagattgagagatgtatttgaaaccttcatcttcatagattttccctgaagcaagggcgagatcaacaagcttagcaccttgagcgtaaattcgaccagctccaagagcattgtggccaacttcactgtttcccatgtcgtcttcgctggggagaccaacggcggtaccatgagctttgatcaactccatgtgtcgggcttccctgtgaagaatnaatcgaccgttgaagtcataatcggaatccacganatcacgaggaaagaagtggata

SEQ ID NO: 24211 - DNA, 912 bp, Arabidopsis thaliana
tttaaaatacaaagataaatcatcagcatctgagtttttctttagacgaaacaaaacttcgaattcggttgtttcgggaaaactaacctccaactgattccttcgccacataccaataggatttgaactaccatttacttcttaagacctacacaaatttaaagcccgcattggtgtgaaatccaggatttaaacgatcataacataaggtgttgagaacaaggagctttaccgttttttaaacttagacatcgccttttgatttcttcccagtgacaatctgcatgatgcgaagtcctctgctaaaagcttcattgaataatatcctcgtttgcattgactggaatccaggcatccatgacaagaacgctactggaaccattatgagtacccaaacaatatgtcatacatgcgagcaacagagacaacagcattccagaaaatagtgtaattcttcagccacttcctttgagtctgtgcgatcagcagaattccccagccagttgggatgaatgcaagaaggcttgtgaagatatcgatgaagctgaaatgcgtgaactcgagcaaagcaacaatcaccagtatagcaagcacgatcaggaggaattggacaagcctgtaccgtatgtgagcttttgccgagtacttgtcacgggcgtattggatgactaggaagagcacaaatatagcaaagatgtatatccatgagaacaagtagacaaaaaggctggtggatccgtttgcaattttaagctggtatacaatcccatactggaagaagaaaaaccggaggaccaagatgatctccacaaataatcctgccttcccggtgtttctcaggtggtcctgttcctcgtaccaccatttttcccagctttgttcagatttcgttgagatgtagacctaggggat

SEQ ID NO: 24212 - DNA, 1125 bp, Arabidopsis thaliana
ctgcaagcaaaagtactgacgccattgtgagtcaaatattcaccagatgttctatcaatctccgggggagaaacaaggtaacggcttggtagcttaagctctccatcatactgaagcataccagcataacgaatctttcgggtacctcacacggtcaaatttgtcaaaatcttcgtactcaagtgccttagcatgcataaccatacgatcagccctgaagttgaaggtaacaacagcatcaccgtccacaatcggaccaactgctttccctgattcatcaacaatcacaaacgggggcaaatactggtcattagcaccaggctctttcctcaaagtcttcacagcttcaacagcgtttttgaatttgtgaggagcttctccaagaacttgagcatcccaacctcttttaacaacttcccaatcattctcatatcggtccaaagtcacatacatacgtcctccaccagatgcaatctgagcatccacaccattctcacgtaatgcaacgaggtcggcttcaagggtttccacaaatccaacactagaaccatccaaaacatcacgaccatcagtaagaatatggactctgattctcttagcaccacgttcagcagatcctttaatcaacaactgcgcaaaagcaacaacaagtttaaggaatcatcaacaaacattaaaccagaatttgaacaaaataatgaagaacatatcaaatcaaaacctgtagttgatcgagacgagagtgaactccaccgtcactgagaagtccaacaagatgcaaagtattcgtctcgaaagattcagaaacgtatttaaaaccttcaccttcaaagattttgccagaagcaagagcttggtcacaaagcttagcaccttgagcaaagatacgaccagcaccaagagcattatgaccaacctcactgtttcccatatcatcttcactaggaagtcctacagcagtaccgtgagctttgatcaaagtccaagtatcaggagctccctatagagaaacaagagtaagttcaatgaatccaaaaagcatcaaaaatcaaagattaaggaggtaacatacatgtttaagagaatccatggctggagttggagcgttgtggatacagttgtact

SEQ ID NO: 24213 - DNA, 813 bp, Arabidopsis thaliana
ttcttccacctatccttctcgaccagataattttgtaacggattggatttttttgtgtcactatccgatttttatttttcctaactccgccgaatccgttcctctgtccttttctttctccactctctgtctctgtctcttcctcttttgattctccgatggaggctaagttactcaaacccgcgttttacaattccccaaacctcaatcttacgaattcttcaagactcatctcgcgattatcaatctggaacgataaatcaaaagttggactatcttctgggtctctcttcctccgtctctccgcagcttctccgatccggtaatgtgttccgtttatttaccgatcgtcttccattgatataaagaatcataaatcttgttttaaaccggagataacgaaaaaagccaccgcctttaatttgctttgtctgtctcgttgattaaggcattgatgtgatatgggcttattgcgtacagatactctagggggctactaagggtagatgagagtgagtatttgaaacttgaaagcattagacactctttgattcgtcaagaggacagtattatctttaatcttcttgaacgagctcagtatcgctacaacgctgatacttatgacgaggatgcctttactatggaagggtttcaaggatctttagttgagtttatggtcagagaaactgaaaagcttcacgcaaaggtcgaaactttatcagcaatagttgttcatagtttccgaaatctttctctttgttgatggtttgtttggttgaagttaggtggacaggtacaagagtcctgatgagc

SEQ ID NO: 24214 - DNA, 611 bp, Arabidopsis thaliana
gtaacactggacaaaccaagatttcagtgtctcttttttcctcttagttacctcttctgcagagggacggtcctttgggtcaaaagcgatcaaacgctgaagtaacttcagcgccacaggatcgatattggggaatttatgggtgaaaggtacaggatcctttcgcctcatgtttccccaaatactttctagccttctcattccgaatctacacagattcattataaacaacttcatgacacacaaagctaataaaaacacacttgcgttcaaagcaagtctatctctcggagatagagagagagaagcctctgtattgggagagttagtttagcttccgggaaaaataaaaacaaaacaaaccctggatagagttatcggcgacggagttccaagcagatcagtcacgagttctagctggtgcacaacgtttttgccaggaaacaaaggttttccagttagcatctctgcaaatatgcacccaacactccacatgtcaatcgccggcgtgtactgcacacacacatcaattccataagctcacacatcatcacaatatgcataagtatatggaaacaggacaaagaacaaggcttttcgttagaatagaa

SEQ ID NO: 24215 - DNA, 1902 bp, Arabidopsis thaliana
tcgccatattgctgagactattcgatcagcggctctccatctttctaatttccttgttcctcacgacttcattctcagagctttcgagtctttcggttccattacaatgactatgtacgatctcacggattcagggaaggatatgtgttcgagtctttgtttactggccgaagttgccggtatggttgcggaagaagaacaatttcgtcgtcttctaaagactgtctctaaagaagaagatagcgacaagagtttcttctatcgtttcccgagaaaaatcagatcgtctttggtgaagagaagatacacgcagcaaaaccctaacggggcttctacttcttcagcggttctcgatctgaacctaatcaccactgattacgacttgaaaacccaacaaaaccctagttttgatgagccgttagttggtgtataatggggcttctgcgtcttcatcgttcttgaaccttcgttgttatgatccttcgttacccttggattacaacacggctaagttggggaagacagagaagaaaaacctaacaaaccctaattaccaatcttcatcttcgtcttcatgcctaacggagaacaaaagccgcaagaggcgtgccgtgcagcagaggaagagtggtaaactcaagaaagcgagggttgtttctttgccaaggatgtctatagagacgccagagtgggttttccaggtgatgagatacatgaacgctgatgctgaaaccccgaggctgatatttgagaggactctgttcaatagtgatgtcaaatcaggcctgagccgtctcttaatccctttccagcagctaatcagaaacgacttcttgacgcctgcggagtgtagagccatacagaaagacgaagacaacgaagatgacaagaatattggtgtgggaacggttcttgtgaaccaaagatttcaaaagtggggtttgcgtttcaagatatgggcgatggagaaggactctggacatggaacattgaattacactttgaattggggttggaatgatgtcgtcaaaagtagcagcttaaaagtcggcgacaagatcagcctttggactttcaggtgccgtggagtcctctgctttgcacttgacacagagtagctcttcacttgttcactagcttattcagtgattttgagtttcagtaacttattggaagtgttaattaacaagattaggattttggtgtggttctctcctttattagtagtaacttgtctgtctcctatgttatctgagatcttttaccattgtttgaaatgaaatattttgttataaatatggtttcttgttttctctactttagttaccttttatttcttgtaatatattatatcaaagtataatgtcatggaagtgatccatttgcagcaagtgttttcgtacattaattaatcaatttgagaaagttatcacacttttttagttgatcaaatcaataaccaaaaaaatagaaaataaagacaactaccatatcagaaataaccaagttttgatttcattagaaaggagaataggaaatattgaggaagctaaaggaggaatgataaatcgcaagtagtttcaaaacaaacaaacaacaataaaactgtgtctcttataagaatcctgagctatccctcactcagattatcacatgaaagttttctaccattataaaatgactcttcctcttcttcgggtttactcggcaccatcgggctttgatgcctccttaatctcatctcctgcttcgtcctattcaccaaaaaagaaaccatcatgtcaacaacataacttagtgatcaacgtatattgtgttgttaatacttacagtcatatctgaagtccagagagtgagattgtctctaagaagctgcataatcagtgtactgtccttgtatga

SEQ ID NO: 24216 - DNA, 355 bp, Arabidopsis thaliana
tgcaactatttctcgtaaattaatttgtgacagcccaagctcgatgaccctaattaatgatagggtaatattacttgctttaaattatcatattccacataaaacatatatcagcttgtatgaagaaaagtctgaccaaatagtgttaaatctatgcaaatgaaattgtgcatttgtatatatatattgacctctacatccaaaacttctaccaaatttcgattcaaaatcttgtagttcaaaagaagattgatcaactataatggagaacgaatcgccctccaagaaaaacatgccgccatcgtgcggaacactcgtaatcatcctcagccacgatggtggtggagtcagagga

SEQ ID NO: 24217 - DNA, 1785 bp, Arabidopsis thaliana
tgatttggtgttgagatgaaaaggcatatcaagtttgattctacattccatactggaaatgtaagtttttttaatgggtttgttgttcttgcacttcattcatgggacaatctggtcggtgactgatgtgccattgttgttgtggcgtttactttgggtttaaatgagagagagaagaattgtctttatgttttttttgataagagagtacttttattattggtttaaagtttcgatttgttcatagaacaaaagtatatgtatctcttcccactcaacaaatattttttttatcgcgtgtgattcttaatccgaaagagactccaactttcttctcagttgttttattcacattcatattgaccaagttcattcttagtgattatgttaacactaatcttatcttacacaatttagttctccggtcacgaatgattaaaatatagaatagtcttatctacaaagaaaatgagtagttcggacaaaaaaaaatagtccaacaccaaaataaaaaatgtcatctcttcactggtttcccaatatcttcatcgttgtcgtcgtcttcttctccttgagaagttcacaagttgtactagaagaagaagaatccacagtcgttggatacggctacgtcgttagatcagtgggcgttgattctaaccggcaagttttgacggcgaagcttgatctgataaaaccatcgtccgtttacgcaccagatattaaatcgcttaatcttcatgtcaggtcattataatctcctctctcaaaccaatctccaaaaaaactaaatttagcaagtttttcaaactaatttaaaatgtgcgattatataggaaagttttcgccattatgattatgtatatatatgtgcagcttggagacaagtgagcgtttgagaatcagaatcacagactctagtcaacaaagatgggagataccggaaaccgttattcctcgtgccggaaaccactctcctcgccgtttctcaacggaggaagacggaggaaactctccggagaacaatttcttagcagatccctcatcggacttggttttcactctccacaacacgacgccgtttggtttctccgtctcccgacgttcctccggcgatatcctcttcgacacatcgccggattcatcagattcaaacacttacttcatcttcaaagaccaattccttcaactatcatccgcgttaccggaaaacagatcgaatctgtacggaatcggagagcacacgaagcgatcgttcaggctaattcccggtgagaccatgactttgtggaacgccgacatcggcagcgaaaatccggatgtcaacctttacggatcgcacccgttttacatggatgtaagaggatcaaagggaaacgaggaagcagggacgactcatggggttctcttgctgaacagcaatggaatggatgtgaagtatgaaggacatcggataacttacaatgtgattggaggcgtcattgatctctatgtgttcgcgggaccatcgccggagatcgtcatgaatcagtacactgagcttattggaagacctgcccctatgccttactggtcatttggtaagagacattgctctgttcattttgtttgcttaaagtttagtccatagcattatgagatcatatacttgtttgtgtgaactgagatgtgtgtcttgctttgattttgtgaaggattcaccaatgtagatatgggacaagaatgtacagacgttgaatatgtagttgatggatatgaaaagctggaatactcttgaggtgatgt

SEQ ID NO: 24218 - DNA, 1309 bp, Arabidopsis thaliana columbia
tttttttttcttttttttcttattttcctactcctttttttattcagttatttgcgtaactttcattcatatatatagtcaaacaaatacaagattgtaacaacatttctctatggttgtgaattctgtttcacttactaaaaaatctagacgcatctctatacaatttttggtacgttaaacgctcggttgtattcttaggaaataagaatgttaggtttgcttatctctccttagtccttatgattatgagaattattttctattttaggtgttccatgagatatttataaaaaaaacatgataatgaaactacagttttttttttttaattcataattttccattaaaaagacatattacaaggcccaaacagaaaatacaacacatgcctcagggccaaacagaaaataccaaaaaaccaacaacggagcataaagcccaaaggggaaccatggaaacaagacccaaaatacaacgttatgtgtttcggctgcatcattaaaatcacaaatctagtccgtttgtaagcccatttgggtaaattttagttttgaaaaaaaaaaaaaaaaaaaaaaaacattgttggaaggttaggaggttaataaaggaaaaaaagaaatgaattagagagaggcaaaggcacataaccttataattatttagcccgcatttaaatcaccgatatatacttaatacttgcacacacactctacaaatctgaaattacaaatctcatcatctccttcctcccttgcgagatctgatcgtatcaatggagatcttctacttcgtggtgttcggtggcctggctgcgatcgtcgccggcttggagctgagcaaatcgaacaaagaccgcattaacacctcctccgccttcaactccttcaagaacaactatctcctcgtctactctctcatgatgggttagttctcactacatctgatcacgatccattttctgatttctatagagcttagtgtcggtgtgtgatttgaccggaatgaatgaatgaatgctcccaatgattgattgattgtccatagatcctaaaatccaacaatgaatttatgtccctggcggcatttagctggggactggttgcagggtccgtatgtgtactatctctacagcacttatggctttggaaagggagagatcggtcagctctttattgctggttttggatcttccatgttgtttggcaccattgttggatctcttgccgacaaacagtcagcattgcttcgtctgaattatacttcacctattgtttgtttggatcttcttcaatgactctgtaactta

SEQ ID NO: 24219 - DNA, 610 bp, Arabidopsis thaliana columbia
attattacataacaactatctatcaaatcaacgatagaagcatatagacatgcataatcttgattgtgtaaaacttaccggagaaagcagagtggcgaaaacggcatcgtgtctacaacaatcggatccatggatgaagacgattttgcggttagctttctctcttggaagtccatgctctttgtaagccaaatacctcccatcttgaagctttatccgcggcgctgtgatcggtggaccaccggaggagccacatagcttcggcggaggtggtttcaacttggactgataagtaaacgccacgattatcccaacaatgacaatcacaacagaaggaaaaagaaatttttttcgaggccatggctttaatgagctgttccttgatgaatctctcgtcatttaaaagaatgggaagttgatcggagaggcacggaggtcaacggcgacgattcttgaaaagagagccaactgttcaagaactacaacatagagatcgtttttttgttgttgttttgagataaaaatagagaagcccatttttatatgttattcattatagtaatggcccaagatgcttaatatactaatgccccaatagtgttaaggccca

SEQ ID NO: 24220 - DNA, 535 bp, Arabidopsis thaliana
ccccgagtccgaaatgggacgtttacggctttggagtgatccttctcgagcttctcacgggaaagattgtgtctgttgaagagattgtgctaggaaacggacttacggttgaggacgggcaccgcgcagtgagaatggctgatgtggcgatccgcggcgagttagatggcaaacaagagtttttactcgattgtttcaagttaggctatagctgtgcgtctcctgttcctcaaaagaggccaacgatgaaagaatctttggctgttcttgaaagattccatcctaactcctctgttattaagtcttcatcgttccattacggacattaatatcagtttgatacaactagagtgaactagttagtcaatttgatttcattgctaacttgttttgttgtaaaaaaaaaattgtgtttgctgtttttgtttacaaaactcgatttcccaacattaataatctttttcattgaagaacagtccttatgggaatcggaatggttaaaaattgaaagaaaaaataaaccaacattgattga

SEQ ID NO: 24221 - DNA, 821 bp, Arabidopsis thaliana
agttttcaataatttccattattgcctagatatctcaaacctctgctttttctttttgtaaatgtctctctcttttgtttcatagaagaataatggagtaccatcctcaagcaattaggttatgtgcgttgatcttcatctctttctatgctcttttacacctcgttgaagcacaagaccaaaaaggtatatacatatacacatttctttgttgtttttgataatgtttcgtcgaaattatgttcttacttagttttctgatacattttgttcgcttgtgttactaggattcattagtttggattgcgggtcattgccaaatgagcctccttacaacgatccttcaaccggattaacatactcgacggacgatggtttcgtgcagagtggcaaaactggaagaatccagaaagcgttcgagtcgatcttcagtaaaccgtctttgaagcttagatacttcccggacggattccgaaactgctataccttgaatgtcacgcaagacacaaactatctgatcaaagctgtatttgtgtatggtaactacgatggtcttaacaatcccccgagtttcgatctttaccttggtccgaatctatgggtaacggttgatatgaatggacggaccaatggtactatccaggagattatccacaagaccatatctaagtctctccaggtctgtcttgttaagacaggaacaagctcacctatgattaatacgttagagctacgaccacttaaaaacaatacttacaatactcagagtggctctctgaagtatttcttccgatattatttcagcggttcaggccaaaaca

SEQ ID NO: 24222 - DNA, 1569 bp, Arabidopsis thaliana
gcttttgcagggtacatatcatatgttggagatattatattaatcataatgtagagaaaacatatttgaaattctacatcacagatttaggaaattaactaagcatgtaatatatttgatcgacaataatatgatttatatcttcaacatatggtatgtatttcggcattaatgttaatttccatttcatgttgtgcctactataataaaatcatagaatgtatacatattatatatataaggtacataaatgtttttctttataagataaataaataatattgatttagatattttttcgacgatagagaaagagatcttagtggacttctgcaactaaaaaggctgtatgacacatacacacgtcctattgtttcctatctgtccgactacctcgaacctcttgtgccttgaagcacaggctgtccaggtgatacatatccattatcatatttacttattaataaatatatagtaatgtatttgtgtaaaagactcatattgtattgacatatatttatcgaaagtgaccacaaaattttggtgtatcatttatatacaaaacttcaaattttcataattatatcaaattttgcagtgagtaaaatatataactcaataaagatgtacttactatagtttttgttttgctttatttttggtgtgcatcctaaataatttaatgaaattatattatattatgacactgtgtagttttttaaattaaaaaagaaacgtcaggagtcaggtgggaattggcatggttcttgaaaaagtctgtatgggtgaatgggaacccatctctccgccttatgcctcttttccaataaacgaatattaagatctctatttcttccctatatatttttttaaaaaaatttaatgttaaattatatttaaaagaaaaagtgtactttgttacaactagtgcagcaggttattaaaagtatttaagactaatttctaagactagaaaaactgttaaaaatgatcaatatcgagctcgtagccaagcttggaaggccttatcgtaacgcctatctccggattgtctgatgattgtgatttggttccgtgtctgcttatcaatccatccaatcacagtggctggtgtgttgggtgcagcatcgtgtctcctaccgtttcgctcgcgccatacgtgatagattgtggcttggaagatataccgggttagaaatccttctacacggtcctggaaatgagttgatatgtgagtgagtaaatgggaccacctagttgaataccttgttttccatatgcccttcgcaagcgcagcccaaactgtagaagcatatgaacaagagaagaagaggtgttcgagagttttggagttgttcgtacataatacgcagtttcctgatacacttccactgctattccacttcagcatacggtcgcccgtgggaagcctattatggatagctaaccaagtacagagagcatacttcggagtagcgtgacggaaccacaccccatttgtgccaagagactgtggaggaggtggcattaataagatgccaagtatcgcttgtggagaaatgtggtttg

SEQ ID NO: 24223 - DNA, 820 bp, Arabidopsis thaliana
taagatgcaatgatgcagccacagcagggcctctagcagcagcaaaaagccatgacacgtgatacaatataatccgtcccaaggtaaagggcacgaagataacaacaccaaggaatatcatattgcttgctagaacctgcaaaattatgcacatcatgaagatttaataagggccaatagtgaagaagaaggaacatagaatttaaaatatacattgccaaaaagtagaaacatcaacttacagtaaaggcattctcaaccaaatgaaacactggaccttgcattccaaccagctcatcaaatggaacgtcttctgcaccatcagcgtcatccaacccatcaaacatctgttcaacctgagcctcaagacgagctgcttgtatgtccaaccttgccagaacattttcaggattccttctagcaatctgaccaaccgcagcaccctgatccccagcatcttcaccattcccctctccagcaagattcctattagcctgtccagcaggtcttcttgcagcacgagcaccatttctgtccacatcatcatctctctcttcttgtcccccaagctctcgtaagtgcctaaagtagtcccttaatgaagtagctccaaggaagatgaagacaatacttgcagatagtaagaacccatgcaagcaatcagtgagaattactgtggtggagatgtggcttaagaacaacctttgagcttcaccaaaagttcgcacgaaagccaaacgccatatccaaaatgtaatgaaaggtatagtgagaagccagacagaaagcacaaaactcaaccgcagaaagaactgtaaaa

SEQ ID NO: 24224 - DNA, 743 bp, Arabidopsis thaliana columbia
cttatcagtcgaagttgaaacctcctcagccgaagctatgtggctcctcaagtggtccaccgattacagcaccgcggataaagcttcaagatgggaggtatttggcttacaaagagcatggacttccaagagagaaagctaaccgcaaaatcgtcttcatccatggatccgattgttgtagacacgatgccgtcttcgccacgctgctttctccggtaagttttattcactcaagattatgcatgtatgcttctatggttgatttgatagatagttgttatgtaattatactttgatcactatgttttaaaccttttatctaattagtggtatgttaatttctagcaagtagtgttgttagaattccttgtactatagagaagtttagtgagaaagttatttgagaatgacgttttcgttttttttttattgtgacctctaacattgtgtcatttacattttataggatttagtagaggaactaggtgtatatatggtttcattcgacagaccaggctattgtgagagtgatcgcatccaagtcgtacaccgcgaacgttggtttcggatattgaagagctagctgatcaactgagtctaggatcaaagttctacgtgattgggaaatcaatgggaggacaagcggcgtggggatgccttaagtacacccctcaccggttagccggagtaacactagttgctcctgtggttaactactattggaggaacttacctttgaacag

SEQ ID NO: 24225 - DNA, 647 bp, Arabidopsis thaliana
atgcttcttttctgcaccatttctatacgtttaacaaatttcgggaccttggcatttttattggattccctcatccttccctgaatgaatcagctgagctttaaaacaaaaccagcgagatcaaagtacaaaatatacagagatctacatagtaaatacctcaagactctgatggaaattagaaatatcgtctggccccattccaggagggcaagcaatgtaaaagtatggctcaaatccatgaacaaagcaacacacactgttacctgacaatataccagaaactcaaatccaacgaaatcgttccccacaaagagcaaaagaaaaagaggtttaaaaacactcaccttctctggtaaccccaaacatcctaatgattggagcttgccctgaggaacccggtaacagctccttatgactctccgcgattatagagtcaatctccaattgttggaaaactaaacaaatcaaaatacacaaatccaagtgttgagaaattttccagcaatcataagatgaagaagcccttatcaaactaagatagtactcaactgatactctgtgaattcgagagatacgcgggggagagcggaggtcgagcccaagccgaggaacgcgattcacgctcctcaatgtcacggaggagg

SEQ ID NO: 24226 - DNA, 594 bp, Arabidopsis thaliana
attttgtaataaattttcctagcatacaaacatttgctacttacattgcaacatatttgtcactaatttcgtttctctttgtttcagagtgtcattttcgttccaaacccaacgtgggggaaccatccccgtatttttactttggcgggtttgtctgtccagtatttccgttattatgatccgaagagccgaggactcgacttcaaaggtagttttataactatgtccataaactctctgtctttcacattgaattgttgcactttatcttaattttgtttgattgacccaatcacaccaaatttcaccaaatgtttttttaatatgacccagttgatgttaattcctaagtatatataccaatcatgatttcaaataatgacttaataaatatcaaaataggcatgctcgaggatcttggcgctgcacctcctggagctatagtggtacttcaagcttgtgcgcataaccccacaggagttgacccaacattcgaacaatgggaaaagattcgacgactagtgagatcgaaaagcttattacctttctttgatagtgcatatcaggtaagtcataaaagtacctttgttttgt

SEQ ID NO: 24227 - DNA, 935 bp, Arabidopsis thaliana
tgagaagattgttgcatatcgagaaggataaagaaaagcatgatccagaaaagtataagtgaataggatatagaccagaaactcttcaattgacttggctgtggtttctccgaagagctgctccgccaaggaaagagcaaactggaaagaagtgccgggtccacggctagttgtaagctcccctgaaatctgaatgtttgtcttaacagcccagaatgtaggaagcttcccgaaaaaagcaggatgtcccgttgtcttgcacgatgaactacaccaagtttagaaatcaaaacatgaagagaaaagattagttactagatgacatcaaagattttgatttataccctctttcttgtcaaaagtccccatggaagaagagtaatagctggagccatggatatagccccgtataaccgcttatcttcagcttgtctcttcatgatcttctcgagaatttcacagtctcttaacctaacagcaccaggcatgcctcccttcacaatttgtatttccagccatccagaaacaaatacacaaaaccattaaagtaaagctcaaagactgtcctcacttatagtgtatgaatcagcataagaggaacttaccggcaaagcaactaaatcataaacttgatcagcacatttcgagataagaacatcagcaagcaatctggtccctgaggatccttcaacctctagcttctgctccacagaagcaacagtaacatcagcaccagctcgccgtaaaacatcaactaacacaacagcttctatttcctccgtcccatatccaattggaacaagcaaatacatagtttctcagttatctccaatccccatctctccacacaatcaagctggacaattttagttatagataacaagaaaaaaggagaaacctttttagtagttgcagaagacccgacgccaacatcg

SEQ ID NO: 24228 - DNA, 574 bp, Arabidopsis thaliana
tgaagccattatcagacgattcgaacgaaggtataactaataataactctatgcgccgcaacattcatttcggttttgggagcatgttttcttgattgaataaaaacattcgtttaggttctgttcggtttagttggtttacagggtttattcttccgcaggatcatggtgggactaccggctgtagagaacagagaaaagattctaagaacattgttggcgaaggagaaagtagatgaaaacttggattacaaggaactagcaatgatgacagaaggatacacaggaagtgatcttaaggttcgatctttttccttcttttcttgaatatgtagtaaagatgtaaaagaagagatcttgacagttgttgatccgatgaacagaatctgtgcacaaccgctgcgtataggccggtgagagaacttatacagcaagagaggatcaaagacacagtaagaaataatatttctctaaggctttttctttatactagtatctttattttggttttaactgattgtgttatgcatttttgatatttgaaggagaagaagaagcagagagagcctacaaa

SEQ ID NO: 24229 - DNA, 652 bp, Arabidopsis thaliana columbia
tcttctcttcaattcagcttaatgggtcccaaactattcatcagcgctgatcaagtaacatagagcggtcgattcctttgtttagtaactgttctgtttatgtatgaactgaacatatttgccttttgggtaatttcaggtaactgttgggcgtaagccggtcacaggtctcagactgagcttagaaggaagcaaacaaaaccgtctctctatccatttacaacacttagtctctctccctaaaatcctgcagccacattgggactctcacgtgccaataggtgcaccgaaatggcaaggaccagaggagcaagatagccgctggttcgagccaatcaaatggaagaacttctctcacgtaagcacctcacctatcgaacacacagagacccacatcggcgatctctccggcgttcacattgtcactggagctcagctcggggtttgggatttcggatcaaaaaacgttttgcatttgaaactactcttctctaaagtccccggttgtacaataagaaggtccgtctgggaccacactcccgttgcttcctcagggagactggaaccgggaggtccatctacatcaagttcgaccgaggaagtgtcagggcaatcaggaaaactggccaagattgtggattcgtcagagatg

SEQ ID NO: 24230 - DNA, 545 bp, Arabidopsis thaliana
tgaacttatttacaacccaatgccattggcattaaatgtttgtaacaaacttattatcaaatctataaatcgattttgttactaaaatttaggaaactaaaataaaaaaaaatcacaaaaattatttaaatcatctattgttcagtacacaacaagacctcaatcatataatgtgttaagcaacttttctgtggctctaagatccgaccactggtgctaaaacaagaatcagaagctacagaagaaacttgcatagctagaatatctctagctagtacaaataaaaccggaagcttaagactactgagcttctagtatgaaacacatcatattctgtttccaatgtattggcccttgtgttttcaacactttcttgcaagtacacaatagtcaagctcttcattcaccatcttgtcataaacagaggccaatccttcaacccccacattcacgaagtcatgatcatcttcataatcatgtctctcaaaaccagcccgagaacttgatgttgatacagaatgagggttgactatgtttattttata

SEQ ID NO: 24231 - DNA, 1120 bp, Arabidopsis thaliana
tgctcaatctacgatttcgatggaaatttcgatgaattagagtccgatgagccatttgtcttctcctctactcacaaacatcatgcttcaggtgagttacgattctgttttctgatgttttgtatgttcatcgtttggttctatgtctcaaagctttgaactttatccatggctaggctcagcatcagatgggaagaagaaacagagcagtcggtacaaaggaatcagaagaaggccttggggaagatgggcggctgagatacgtgatccaatcaaaggagttcgagtttggctcgggactttcaacacagctgaagaagctgcaagagcttatgatcttgaagctaagagaatccgtggagccaaagctaagctcaatttccctaacgaatcctctggaaagaggaaagccaaggctaagactgtgcaacaggtagaggagaatcatgaggctgatcttgatgtggcggtggtaagctcagcgcctagtagtagctgtcttgatttcttgtgggaggagaataatccggacacgcttctgattgatacacaatggctcgaagatatcatcatgggcgatgcgaataagaaacatgaacctaatgatagtgaagaagccaacaacgttgatgcttctctgctttctgaagagcttcttgcttttgagaaccagaccgaatatttctcgcagatgccttttacggagggaaactgtgattcctcaacgtctctgagtagtctctttgatggaggcaatgacatgggtctatggtcctgaacggttctattgtacaaatgacatgagtgttttaaatgagttcttcttcgacttgtctgtttgctatttattcttcaaaccttagccagtgtcaaacaaaaacggccactacgactattgttttgaagattgcgatattttaagttgtaagaatgtagagaataatgtttgggaagaacaaagctcgattcatatttgtgataaacgcaaaatatagattcgattcaaacaaaaaggtgcaaaacatctaagggtcttaagagaaacaagtgagaagaaaaaacagttacggttcgataactcttcaatcccaaaagtaacaaaaaagcatgtctataacca

SEQ ID NO: 24232 - DNA, 1071 bp, Arabidopsis thaliana
ctggtttaactttcaggctcataatcttaaacttaaccttgctcttctgattcaacggctgcttttcattgttctctggatgttccacaaacttgaacactgcacttaaacatatacatacaagaagcaatactcagaggctgtataaactagttagggtacacaaaaccaaagaagacatcattcttttccagaatctcattaccagtagcaaaaacactctctcctggagccaaaacacctccgggaggacgcatataacaactcttaggtgccgttgtttggaactaaacaagaagatacagagtgacatagatgaataagtacatactaaagtcaacaaagagtcaacttctctgcaatttcttaactagttctcaaataagtatcagaaatgcgagaatcaatagccaaaattgatgtgaatgatacacataactccattaccttaaatgcagtatgagatttgctagtgttcttaagctttattgcgctgcgaacttgttttccaggttcatctgaaacaaacacaaatccacaaattctaacttcgttctctaacaatggaaatccaaatcaatcacttccagagagcctatgttaatcacttcgattctctaatcagaatccataaccaaatcaatcaatttccagagaactatgactatttctgaatcaagctaaatcgacggcagaaacttaaataaagaagacgtacaagggaaatacagataactagaaggatctagtcggagcgacggcgagctggaagaagtgatctggcgacggaagacatagtcaacggaggcttagagacggcggaaatatctgtattccgatttccatggcggctacggtagttttggtttggattctgtgttgaagatgaagaagtggtgcttctcctctgccaaaacggacatagcctgaagaggttcttcttcttctccacactcggattctgacggtcacctattggcatcggaaataatcaattttccggtgccggatgatactttccgagtttcgaataatcttttgttctctaggaagagagcaaattggtgtgaa

SEQ ID NO: 24233 - DNA, 785 bp, Arabidopsis thaliana
tctaagataccagttttgtctggtttttgtgacagttgctttgttttgtcctccacgtcagattgcacaagcgtgtaagcctctgatccaacagctagggatatggtcatcagttaggacgctagctcgaggctacgagatcgtgatgggcttgcttctgttcacaccagttgcgtttttggcctggtttccttttgtgtctgagttccagacaagaatgctctttaaccaagcctttagtagaggtctacaaatctctcgtattcttggtggtcaaagaaaagaccggtcttcaaaaaacaaggagtgacatgtacacatgtaaatggcgtatgtgtagatttaatggttatctgttattgtttccttcccaagtaatctatagttagaaagttcctgtaactttcatagatatatgttaattattttccatttccataagttcgcgtccattataatagaaagtgcatgagacgtatctttttcatatggaagacgaaaacattggttctccattctaaaagtcaaaaagaaaatgtatatcacttgaacttttccacataggtcatgataaagacaggactaatcaatcattcattgttgataatggtctcaattacctgttgctagttatttctacatttgtatagtgcaatactgttttttgtcctcttccaaataaaaactacagtactaacagagagttggtaatcataaaagttataaactcacataaaagcaattactctgtatctttgtcactcttattttatatgactgaaatg

SEQ ID NO: 24234 - DNA, 603 bp, Arabidopsis thaliana
caattcactattaataattacaatttcttttagttaaagaaaattaaaactaggtaaaaaagttaagtaaacaaaaaaaaaaaaaaactttcccactagcaaatatcaaattcaaagttgagatttcaaaattttttatctgaaatttatacaataatgaacatcaaacttaactttaattttatttaccaaaaccaaacaaatattctacttattccttaaaatagaaaaatctgaaaaatagagagaaagctgaccttaacatctctgacaccagcacgaaccaaagcgttgttaagattcctcatcgccggtaagagattattgatcatgttattatctccggtgagcagaatctcatttccgactgagatatacttaatcttcgtctgaggatgaaacggcaaaatgttaaccgaaacccaccgacgagcttgtcttccgttagccaacgccggaatatcacggttaggaacggtgacaacgacggagataccagttccagcgaaggcacgtaggatatcgggattccatcgaagatcttgacgctatcaatcgaagtttgtgtcttgataaagttagcccctgagtcggtggtgggag

SEQ ID NO: 24235 - DNA, 898 bp, Arabidopsis thaliana
attccatgaactgtttctactgtcaagtgttgtatcatatctcttataaggttttgttgtgtttgtgtatagttcccctgttttacaagtgaaagctctcaaaaatctcatctttgatatctttatggctatctccttatggtttcgtgtttgaaagttctctgatttattggtctgtcttgtgttttttgttgcagacagtggttcctctcaatacatgggttctaatatccaactttaagctagcttacaatctcctgcgtcgccctgacggaacttttaaccgtcatctcgcagagtttctagaccggaaagtccctgcaaatgccaaccctgttaatggggtcttctcttttgatgtgatcatcgatcgccaaactaatttgcttagcagagtttacagaccagctgatgctggcacttcaccaagtattactgatctacagaatcctgttgatggtgaaatagtgcctgttattgtcttctttcatggtggaagctttgcacattcttctgcaaacagtgctatttatgatactctttgtcgtaggcttgttggtttgtgtggtgctgttgttgtctctgtgaattatcgtcgtgcaccagagaatcgatacccttgtgcttatgatgatggatgggctgttttgaaatgggtcaactcgagttcttggcttagaagcatgaaagactcaaaggttcgtattttcttggcgggtgatagctctgggggtatcattgtgcataatgtcgcggtaagagcggttgtgtcaaggatcgatgttttggggaacattttgcttaatcctatgtttggaggtgacgaaagaacggaatctgagaaacgtttggatgggaagtactttgttacggttagagaccgagattgggattggag

SEQ ID NO: 24236 - DNA, 468 bp, Arabidopsis thaliana
taaaatatatatagtttctgtccgaatcggcctatcttcacaaaatctcgattccaatcaagaatttatggcaagaaaggtcgatcaatcaatcagatgattatggatctagagatctctaaatttgtgttgttgtgaattgagaatgcgagagcattcgacgatgtacaattacgcccccgaagtgccaccgcaaagtaaaaggaagaagacgatgaatgaggcgtctccgtcgtggtctggattaccggattctgtggctgtgagttgcatggctcgcgtctcgagattggaccaaacagccttatctctcgctccaagaaataccgctctctcgtaacatcccctgagctctgcagcacgcgatcgctgattggttgcactgagccatctttcttcgtctgcttgcgcatcttacctgatccaacccctcgctggttcgtccttacgggtagtcgtcgactgagg

SEQ ID NO: 24237 - DNA, 662 bp, Arabidopsis thaliana
tttggaccatatttggagtaggttcggctttctctccaagacattgggcaatgggatttgtaaagataaagttaccggaagctataaagtagtgaagatgtgtttaattatctttcagtgaaatttgtgcacgtgatcctgaggtggagtatagtgttcttgatgtcgaaactggtgaatggcggatgttgagtccacctccttataaggtctttgaggtaagaaaatcggagtgtgcgaatggatcgatctactggttacacaaacctactgagagggcttggacaatactagccttggatcttcacaaagaagagttacataacatttcagttcctgatatgagtgtcacgcaagaaaccttccaaatagtgaaccttgaggaccgcctggccatagccaatacctatactaagactgaatggaaactagagatttggagcatggatacagaagtagaaacatggaccaagacttactccatagatttagagaatagagttgcttcccgggaaaggcggaacaggtggttcccccggtgtcggtttctaagcaaggaaatattgtcttctatgataatcacaagagacttttcaagtattaccaaggaaaaacgagattctttacgctccgcagacacttgtgttatactcctttttttg

SEQ ID NO: 24238 - DNA, 566 bp, Arabidopsis thaliana
gtgcactaaagaagggttaaatacactcaatgacttttatttattggctgaacggaaaaccttacgttttgtccatacttatatcatgatcatcgagtatattgatggcatagagttgtgtgatatgcccgatattgatgatgcgctaaaaaataaaattcagcaatcaattaatgccttacatcaacatggcatggtttctggcgacccccatcgtggtaacttcattataaaaaatggtgaggttcgaattatcgatctctccggaaagcgtgcttcagcgcacgttaaagcgaaagatcgtattgacttagagcgtcattacggtattaaaaatgagattagagatctaggctattatcttttagtatatcgtaaaaaaatgcgcaattttatgcggcgtttgaaagggaaaccagcgcgctaaaaaaaatcccacaattacatgtcttcaccaggacagttttaagcggagttatttatttcacaggtttacatgaagaatattagatacattgacaaaaaagatgttgaaacctgattgaaaataaaatatctgatgatgt

SEQ ID NO: 24239 - DNA, 570 bp, Arabidopsis thaliana
ctcaagccagtgtagatgctagcatggcggtctgatatgaacattaaatccggattgtctggagctataatgttgagcttgtgaaaaaaaccattcatatgcactatcattttcgctgttaacaataccaaaagcaagtgggaagatctggaaattcccatcttggcaacatgctgatattagacagccaccatatcggcccttcatagaggttccatcaacaacaatgacgtttcgcataaatgcataacctttaatggaggctgcaattgcaattaattggtacttgaaacaccgtggtccatttggctcatcatcatactctgtaaagcacagacttgcctgggttcgcttgctcaagtaggccagcgtatgcggggattagtgcatagctgcctgccatagatcctaatgacttctccatggcaacctctctagcacgccaagctttccaatatgatatactaacatggtagtcgtcaagcaggaacttcctaatcacacagcatttggcccaagtttaataccgagaaatcgagattgcataagtttgcctatgacttgagttgt

SEQ ID NO: 24240 - DNA, 938 bp, Arabidopsis thaliana
ggattgtcaggagctataatgctgagccgctgaaaaaaccattcatatgcgctatcattcccataggagctataaggttgagccactgttaatgataccaaaagccagtgggaagatctgaaaatttccatcttggcaacatgttgatatgagacaaccaccatattgtcccttcatagatgttccatcaacaacaatgaccttgcgcatataggcataccctttaatggaggatgcgaaggcgatgaattagtatttgaaacggcgtggaccatttggctcatcatcatactctgtaaagcacaaactacatgggttgcttgctaaaggagtccagcgtaagctggaatcagtgcatagttgcctgccattgcctgccgtagatcccaaagacttctccattatcacctctctagcccaccaagctttctagtaggatatactaaaatgatagttgtcaagcaagaacttcctaatcacagcaacatttggacaacgtttaataccaagaaaacgagattgcataagttcgcctatgacttgagttgttgctaaatggtggtatctacgcctttgatcaatctttcatgtgtgtctctgatttgcctttcgcacttgaaagctgtcagaaaaatctaccttaggtgcataaacacgccatggacaagtctttgagattcatttcaaaaccacaaaatttggagtggaacttgtggttgatggtgtgtatagctatcttaatcttgcaatcagtcttcgacttatagactctgccaacatacagcttgtctccttcatatttaacatcaaagaaagcaaagtccaaacctgaaataaaatgaacatctctcagcaaaatgaattagtatgcaagttaaatagtccacgacgatcataaatagaatagtataacataaggtatctattttaacacttaa

SEQ ID NO: 24241 - DNA, 2293 bp, Arabidopsis thaliana
aatcaggacacacctgcaccattgatcaaagacgtagataccaccgcttagcaacaacacaagtcataggcaaacttatgcaatctcgatttctcggtattaaacgtgggccaaatgctgctgttattaggaagttcctgcttgatgactaccatgttagtatatcatacttgaaagcttggcgtgctagagaggttgccatggagaagtcattaggatctatggcaggcagctatgcactaatccccgcatacgctggcctacttgagcaagcgaacccagacagtctgtgctttacagagtatgatgatgatccaactggaccacgacgtttcaagtaccaattcattgccttcgcagcatccattaaaggttatgcatttatgcagaaggtcattgttgttgatggaacctctatgaagggccgatatggtggctgactaatatcagcatgttcccaagatgggaatttccagatcttcccacttgcttttggcattgttaacagcgagaatgatagtgcatatgaatggttttttcacaagctcagcattatagctccagacaatccggatttaatgttcatatcagaccgccatgctagcatctacactggattgagcaaggtgagaaagacaacagtttccattcagccttttatatattatacaagtaatgtctgatttgttgactatttcaatcaggtatacacgcaagccaatcatgctgcttgcactgttcacctttggcgtaatgtcaaacatttgtataagcctaaaagcctttgccgtctaatgtctgaagctgcccaagcgtttgatgtcactgagttcaataggatatttctcaagatacaaaagttaaacccggatgtgctgcatatttagttgatttgggtaattttgtttccttcttcataatattgttcagcttcaacatattgatattgaatggttatggattcagttgtttacataaccctttactttttggtcgatgtagggttttcagaatggacaagagtacattcaaaaggtcggcgtttcaatatcatggatagtaacatatgtgagtcgtggaacaacgttataagagaggcacgcgagtatcctcttatttgcatgcttgagtacataagaacaaccttgatggattggtttgctactagaagggctcaagctgaaagactgccctacaactttagctccgagagttcaggagcgagttgaggaaaactatcaagccgcgatgtcaatgttcgtgaagccgatttgcaactttgagttccaggtccaagtaaggactggtgaatgttttattgtcaaaggggacgagtctacgtgttcttgtttggaatttcagggattagggagaccttgtgctcacgcaatagcagctgctgctcggcttggagttccaacagattctttagcagcaaacggatatttcaatgagctagttaaactaagttacgagggaaaaatctatccaattcactctgttggtggcaaggtcgcacccggaattgcttcaggaactacaggggaggtgcatccaccatttgtgcaccggccaccaggaagaccaaggaagataagaattttgtttcgtggtgaattcaaggcaagttcataaaagtaacacagattgttgtccattctgttttttaaaagctaacagctgctatacttctaattttcagcgcaagaagaccgcttcacagaggaggtgttcatgttgttgtggcacaggccacaacaaagcctcctgccgtaatgctatataagaagtcaactacttctatgggggggggtattaggtgttatgatataactttctggtatgggctaaataacggttgttcccgcattgtttgcggaagcgagagtgtctacttctactaatgcacgctacgatacatttttcaaaatagtaaggtatatccaactgttgtgtatactttcttattttgattgttatgtgctccctgcaattcgtgtatatttgtgttgctttcatgagtcccgatgtaattaggaaatgccatgtaacaccgtttttgaaatgtatatattagaaaccccgcattttgtcgatttccacttatttggtccgtcttctaattgtttgcaagtttaatgatcgcaaattgtttacaaactgatgtaatctcgcattttatgatatcaaattgtttaccaaaatcaaaaactataccctaatactgcctaaggaacccaagcaaataggtttacgcactagattatgtaactattgcatttaaatgtaacta

SEQ ID NO: 24242 - DNA, 558 bp, Arabidopsis thaliana
cgggtacgagctctagcaactagaagggctcaagctgaagactgccctacaacattagctcctagagtgcatgaaagagttgaggaaaacaatcaggctgctatgtcaatgtctgttaaacctatttgcaactttgaattccaggtctaagttcggactagggaatgtttaattgtcatattggacgagtctacttgtttgtgcttggaattgcagggtttagggatcccttgtgctcacgcaatagccagtgctgctaggcttggcgtccatacagattcgttagaagcaaacaaatattttaatgagttagtgaaactaagttacgatgagaaaatctatcatattcactgtgttgcttgagaggtcgcaacaggaattgctttaggaactacaggcgagctgcatccatcttttgttcgtcggccaccagggagaccaaggaagatacggatattgtttcgtggtgaattcaaggctagttcctaacggtaaacagtacaaagtccattatagtggttaaaagctaacagcctctctactttatatatgcagcga

SEQ ID NO: 24243 - DNA, 759 bp, Arabidopsis thaliana
tgtacggttcacctttggtcggaatgtcaaaaatctctacaagccaaaaagcctctgccgactaatgtttgaagcagcacaagcgtttcatgtcactgatttcaatcggatttttctgaagatacaaaaattaaacccaggatgtgctgcatatttagttgatttgggtacgtttgtttgactctctgttattatattggtcagcttccatatagttatagtaaattggttgacaggattgtagcttacataaccatgtatattataatgtgtatagggtttacagaatggaccagagtgcattcaaaaggctagcgtttcaatattatgaatagtaacacatgtgagtcatggaacaacgttattaaagaggcacgcgagtacccacttatttacatcctggagtacataataacaactttgatggattggtttgctactagaagggctgaagctgaagactaccactttagctccgagagtgcaggaaagagttaaggaaaactatcaagacgccatgtcaatgtctattaagccaatttgcaacttcgagtttcaggtccaagttcggactggtgaatgttttattgtcaaattggacgagtctacttgttcttgcttggaatttcagggtttaaggatacattgtcgtcacgcaatagaagttgctgctcggcttggagttcctacagattttttggcagcaaacgaatattttaatgagttagtgaagctaagttacgaggagaaaagctatcc

SEQ ID NO: 24244 - DNA, 2432 bp, Arabidopsis thaliana
gggtataccaaactatttcaataaatgtacttactcctgcattagtagaagtaaacaaacccgcttccgcaagatatgcgggaacaaccattatttaagcccactccagaaagtttcttcataacacctattagcaccccatagcagtagttgacggcttatatagcattacggcaggaggccttattgtgtccaacaccacaacaacgtgaacacctcctctgggaccttgtcctgttccgctgcatattaaaagtagataggttattagcttgttaacagataagaagtacattgtaatgtttactaataggtacttgccttgaattcaccacgagacaagattctgatcttccttggtctccctggtggacggcgaacgaatggtggctgcagctctcctgtagttcctgcagcaatttctggtgcgacctctccaccaacagagtgaataggatagattttctcctcataactaagcttcactaactcattaaaatatccatttgctgctaacgagtctgttggaacgccaatccttgcagcagcggctattgcgtgagcacaagggatccctaacccctgaaattccaaacaggaacaagtagactcgtccaatttgacaataaaacattcccctgtccgttcttgtacttggaattcaaagttgcagataggcttaacagacattgacatagcggattgatagttttcctcaactctttcctgaactctcggagctaatgtagtagggcagtcttcggcttgagccctcctagttgcaaaccaatccatcaacgtcgttcttatgtactccagcatgcagataagcgggtactcgcgggcctctctgataacgttgttccaagactcacatatgttactatccatgatattgaaacgccggcctttggaatgcactcttgtccactctgaaaatcctatatgaattacaaaatacagaggttatggagtcaacttcatctcagccacgttaataacaatatatgtaagctgagaaaaacacttacccaagtcaactaaatatgcagcacatccggggttcaatttttgtatcttcaggaatatccgattgaaatccgtgacatggaaagcttgtgcagcttcagacattaggcggcagaggctttttggcttatatagatgtctgatattgcgctaaaggtgaaccgtgcaagcagcatggttggcttgcgtatagacctgcaacaatattagggaaatcattcattatccaatcaaaatagaaccagcttattggcatattaagtaaatcgatatatgtatactatatgaagaaacgtgagatggatggttgtgtctaaccttactcaatcctgtgtatatgctttcatggcggtcagagataaacattaaatccggattgtctggagctataatgcttagccgctgaaaaaaccattcatatgcactatcattctcgctgttaacgattccaaaagccagtgggaagatctgaaaattcccatcttggcaacatgctgagatgagacaaccaccatatcgccccttcatagatgttccatcaactacaatgaccttgcgcataaatgcgtaccctttaattgatgctgcgaatgcgatgaattgatatttgaaacggcgtggaccagtaggatcatcatcatactctgtaaagcatagactgcctgggtttgcttgttgaaggagtccagcgtaagctggaataagtgcatagctaccggccatagatcccaaagacttctccattgccacctctcgagcccgccaagctttccagtatgatatactaacatgatagtcgtcaagtaggaacttcctaatcactgcagcgtttggaccacgtttaataccaagaaagcgagattgcataagctcgcctatcacttgagtggttgctaaccggtggtatctacgcctttgatcaatcgtgcatgtgtgtctctgatttgcctgccgaacttgaaagctgtcagaagtatcaaccttagatgcatatacacgccatggacaggtcttggaaatgcatttcagaaccataaacttaggagtagaacgcgcagttctgaagtgaaacttgcggttgatggcgtgtatagctatcttaatcttgcagtcagacttcgacttaaagactctgccaacaaacagcttatctccttcgtatttaacgtcaaagaaagcagagtccacacctgaaataaaaggaacatctatcagcgacatggttgtagtctgtaatataaatagtacacgattaatataaatagaatagtataaggtgtgaactctattttcccaattactccataaccaaatttgttttgcaacaagcatcaaacaaaatctatatgtagatatggaatgcaagttataccttcaccttttccatcgttaaatactggtgg

SEQ ID NO: 24245 - DNA, 518 bp, Arabidopsis thaliana
tccaatcctattcggtcgagacgcccaccagtatttaatgatggaaaaggtgaaggtatatcctgcaatccgtctataaatatatacatgctttgctgatttatctgaatgcattggaagttgatagttcgtttacgtagtttatgttttctataccattctaatgtagaatgattggttctatttcagtatcgtttatcatacatgtgctgaatgatggtcattgtgtttcaagtgtagactctgcattctttgatgttaaatatgaaggagacaagctgtttgttggcagagtattcaagtccaagtttgattgcaagattaagatagctatacacgccatcaactgcaagtttcacttccgaactgcgagatcaactccaaagtttatggtcttgaaatgcatctctaagacttgtccatggcgtgtgtatgcttctaaggtagattcttctgacagctttcaagtacgacaggcaaatcagagacacacctgcaccattgatcaaagacgtaga

SEQ ID NO: 24246 - DNA, 518 bp, Arabidopsis thaliana
attataggaacaatacaaaaaacacaaacaggtagactactagctcagaggtcaaaagcagttagaaaaagaaatgcctatgcaagtttgcatatttagtccaaaagttcagttcaaatctgtccgaaaggagaaaataaagcctttaccggaaaatcgaattttttgtttgctttcagaagaatttcaatggcgtctgtgtaccccagctgtagaaactctttctcagctacgtcctttacaagatatattgtaaattaatcagaatatcagacagtgcaaactgcatagtattcttttctgatcacagagtgagaataggcgaacatacactcaagcggcgaatgattcctttctcaatccatgtatcgaaaaactccatgtcttccttgcaattatcaagaacgtactttacctatcagaatatcaagagatagattacaatcaaattaattctaaatgacatttacagtttgaaaggacatataaagtgaaagagcaacatactacgtactgga

SEQ ID NO: 24247 - DNA, 604 bp, Arabidopsis thaliana
agaggttctgcgaacctccaaattctgtgccttgataagttgagacgaatcagaagcgaatttgatatggctgaagccaagttcgatggcgtgattgagaggatgaagcagagccagtgcttccgccaatagaggagagttaacctgcagatccatagcagaggcgtgactgagctgttttcctcctctgtggaaaacccaaccaaaccctgccgagtgattatccttccatgccgcgtcggagttgcagtaaaccaggatgggcgagggaagcagtggttggatctagatctgcaaaggcttgggtggaggttgaatgatctgagccatctgccattcttttgctctaagcatcgctaagagagcaacatccactggctggatttggagctgattgaatatcttttgattcctggcatgccagagcgaccaaaagatccatggagcaattggacctgctccgattccagtgggaggtaagcatatgagtgactttgtagcctcgaagccttctcgaaaattattaatctgattggagttcaaagtaacttttgtagggatgaggttccacacttgtgtagcaaactacaggagatgagagatg

SEQ ID NO: 24248 - DNA, 1774 bp, Arabidopsis thaliana
ccatatggtattacaacttgcttctccttagtgctgaaccgttgtccgactcgttttccattttgagagacaagggtttttctatttttcacaaaacaaaattgtggcatttctgaatataatacgagtaaaaaatatgtcagcagaaatgggcttggatcgattttgatttgttggattccataattcaatcttgggcttccaatccataagaaaaaagcttggtgtatttttttttacaaattagaagaaagttttttcctctttaatcagtactcttctccttacccattaatggcaaatgcaaactaaatttcagttgacccgtcaaacaataagttaattttttgccacgtggccatatttctcaccggacaaagcctccaataacctcggcgactttagatggtgaataatcgacgaacaacaaagaaactacattgacgaaacaaacaaacaaaaacatagaagaagaagaagaagaaacaaaacaaaactaaacaagaaacagaggagaaaaaaggaaacgacgaggaaaaacaaaaacaaaataaaaacaagcctcgttcttcccttttctctcttcaaatcttttcttttacatattttcttttcttttttttgtctttaatacaaatttactaactaatcagaataaaaatgggttcgagtaagtttaaacgagccataggagccgtaaaggaccaaaccagcgtcggtctagccaaagtcaatggtcgaagcgcttctttatctgaacttgacgtagccatcgtcaaagccactcgtcacgaagagtttccagcagaagagaaatacattagagagattcttagcctaacttcttactcacgcagttacatcaacgcttgcgttagcacgctttcgagacgccttaataaaaccaaatgctggaccgttgccctcaaaaccttgattttgatccaaaggctcttaggagaaggagatcaagcctacgagcaagagatcttcttcgccactcgccgtggaacaaggcttctcaatatgtctgattttagggatgtttcgaggtctaattcttgggactactctgcgtttgtcaggacttacgcattgtaccttgacgaaaggcttgatttcaggtaagagttcttgtgcttgatccaggttccgattcgggatttcaagttatttatgtaatttgaatgatatctaagatatgcggtttttttttttttttcattgcaatttttgaggatgcaagcgagacacgggaaacgtggagtttactgcgttggaggagaagctgacgaagaagaacaggatcaagctgcggcagatctctccacggctatcgtggtcaggtcacaaccgatcgccgagatgaaaacagagcagattttcatcagaatccaacatttgcagcaacttcttgaccgtttcttggcttgtcgcccaacaggtaataacttgcgtctcaagatttctttctctgtgtgtgtttgtttcttggataaaaatttatataaggaccaatgttattttgttaacaggtaatgcgaggaacaacagagttgtgattgtggctctgtatccgatagtgaaggagagttttcagatatattacgatggtaacagagataatggggattttgattgaacgattcatggagttagatattcctgattcgatcaaggtctatgacattttctgccgggtctcgaaacaattcgaagagctcgatcagttctactcttggtggtagaacatggggatcgcacgggcttctga

SEQ ID NO: 24249 - DNA, 1337 bp, Arabidopsis thaliana
gctgcagacgttttaagtaagtagactgttttctgcggctccatggaaaggttctgaagatctgttgcaagagaacgctgtcaaaagcagtatgccaaaaagtaggtcaagtccattggagagccccactatacatgtacacagaactttatcctcatgctacaaactcaaaacatagaataacccaaagtacattatatagagggaaaaaaaaacacttcatacattttgctgactgataatgtcaactagataggtagtcaaaacatatgagagtgatttaacccaaaattcctaactttcttctctaaaagcacaaaagaaaaggtaatgaccatgcattctttattgttaacaagctcgattctgaaaaagtgtccaacaacctacctgcacatttttcctgagatttgattcttcagaaggccctctagtagataacatctgcaatctcttttctgacttcctcaacaaatctgtgatctcatgagtgagcatctcgacttcacgatgaatccctttgttatctccaaatgtaggcataagagcctttgaatgtgcctttgctagttcattcattttgtctcgcaccttttgtatattaaaagttatctcctcagaatcatcaacccaagctggtggcataccaattgtgaaggcatcactactgcaaacattcacaacaacacttaaatcatttgctcattctgttacctaattcgtttagggttctaattctgtatctcaaatcaatcccatgattacaattcgtttctatatataagttcatagaatttcccaggttttgcagaatcaaacaacacattatattattaccttgatggaccaggatcataggaattcaaaggagcataagaggagtgattggaccgggaaaatgaaccgctaaccatttcgatcaccggaccaccgaacgaatcagacgccgataaagataatggagcacgcgcgctcttacacgcatccctgtgtttccggtacaccgtcgttcgattcctcgtcgccatcaataccaaatcaattgattctcaacagaatctcgaaagtaaaatttcccggagaaaataaacaaaatcggagcttttgtcgtcggcaaaagcaaacgaatctgaatcgcaaaatcgtttctcattagcgcgtgttacagacttagcaacgaaggagaagtatttgggcctttttaggcccatttatatattgggcttatagtccacttgcgcgatagggtcaatataagtgtgtggagcacacgttttaagacggtggcgcaaagacgaaaatgccgtagattcgtggcggctaaaagtcacagaggg

SEQ ID NO: 24250 - DNA, 744 bp, Arabidopsis thaliana
cccttcttttctcactaaccaaagactttatgttattttcttaatatccactgtcacaacatttacaacaattaatcaaaaactaaaaaaaaaaaaaacatttacagcaccacgaatttaacaattttctatttacaatatcatatgatcagaaaattaagaaaatgtttttttcttttttcaataaagaaaactcaacaaaaatcacatcacaaaattctacagccatcggtctcatctcgacaatagagcatcgggggataatacggcgatggtaccacctgataattgggttgactcatagatctacaaaatccgcagaaacctgaattcggtatctcacaggtacatcttctcgccggacgatctggttgtactggcccataggatgaggttgcggtggctgctgcggtggcgcacgtggaacggtgatgatagtcgtcatgcaaactttcttcttaagctcacgtgttagctcggctaagtcaatcccttctcccaataaaaccaactgatcgttctgtccctgaatcgagaccgatctcacaccttcgcgtaaaaaaaaaaacaaagttgatgaaacgattcgtgtgacctaacttggctcacaaattaaagccatagagtagagatgtatgtttaccaggttttgcagatgcgatcttcatagctttcttcatagatttctcatcactcatatccattttcaaaactatgcgttgctgaagaaagaaagagtataag

SEQ ID NO: 24251 - DNA, 489 bp, Arabidopsis thaliana
gagctcattctttgacctgataggttcttttgtttgcaaaccaaggtcatcatcctcatcattgctccaagcaaccatctcattcacatcatcatcgtcatcatcatcatcatcatcatcatcatcctcatcctcaatatcgtcatccccattctcctcatctaaattctctatctcaccctcttcaagttcccctgctagatcatcctctttccccacaaccatgtgttcaaacttttcttccttcttattttcctctttgtcgctctcgtcctcatcactctcctcttcttcactgctactactatcactactgcttgcagaagagctcgaggtttcgctctcagactcagcagaatccatttcccccttagcctcatcactcttctcatcatcatccacggccaaacttaccttctccaaccctacttcaatagaacaagccaaaccctcatcagttttcttcaaccctgattcatccaaatccat

SEQ ID NO: 24252 - DNA, 1413 bp, Arabidopsis thaliana
actacaattaagccgttaacacaaactcaaaaactttcataaaaattctcaaatattagtgtcattaaaaaagcattgttaatctgaggactgtatacattccaaagaattatcatttcccaaatttatttaaaataattttatgatatctaatcctaaatctttttgttgaggaaaaaaaacaaaaaaacaagtaaaccttgtttaggtttattagggttttaaaagtatttatatttgttttctgctgcagcagactcaaaaagctaagtaaactactcaagtccctcccttttccggcgtcgctattctcagtctcattctgtctcccgtaagtcctaactaagctttctctcttcagtcttcagcctccgcccgttattgttgacaagttttagcctttttgttaattactactttactactcttgttgtgaatttgctgctactgttgaagccatggaagctcggattttgcagtcttcttcttcctgttattcgtctctttacgctgtcaatcgatcccggttctcttctgtgtcatctccgaaacctttctccgtcagctttgctcagacgacgagaacaaggactcgtgtattatccatgtcgaagaaagatggtcgcactgataaagatgatgacactgatagtctcaattacaaagattctggtgttgatatcgatgctggtgctgagcttgttaaacgaatcgcaaagatggctcctggaattggtggatttggtggtctctttccattaggtatatatatatatatggaaaactgcaaaattttcacctgaatgttgaaacttttggtcttctaatgaatgagtgtgtgtgagcaggtgatagttatcttgtagctggtacggatggtgtagggactaaattgaaattggcatttgaaactggaattcatgacaccattggaatcgacttggtatagcaaattctcttttgtgtgttttgtgatactagcccataaactcatggtttagcttattgttataggttgctatgagtgtgaatgatattattacttctggtgcaaagcctctgtttttccttgattactttgctactagtcgtcttgatgtagaccttgctgaaaaggtaccattgcttcatcatctctttccccttttgaatttgagattgctttaaggacttgatattgatgtatgctttgttgtcaggtcattaaagggattgttgaaggttgtcggcaatcggaatgtgctctcttagggggagaggtatgtgttacggttttgacaatgtagtttacgcatctttccatgattgtgtacaatttggttttgttttgttttttttagactgcagagatgcctgacttttatgcagagggcgagtacgatctaagtgggtttgcagtaggcatagtaaaga

SEQ ID NO: 24253 - DNA, 1036 bp, Arabidopsis thaliana
caattattatttattattttagttacttgttgacttgtataattttgttgccaactccatatcttagggaaaaacaaaacaacaactactctttctctactccattaacaaagtccaccatcagaacctaaaccctataaaagccatacactcacaacagcaaaagcatccagtaccattccccccaaacaagtacttcaagaagattggtgaacacactgagaaagttaaaagagaaaagatgaagagtgactcaatcgccgttgatgtccctgcagagtctagctcagtcatcaaaggcaaagctcctctcctcggtttagccagagaccacactggctctggaggttacaagagaggcctttccattttcgatttccttctccgtttagctgccattgtagctgccttagctgctgctgccacaatgggaactagtgacgagacactccctttcttcactcagtttttgcagttcgaagctagctacgatgatcttccaactttccagtatgactcacaatatttctttcttcttctttcatcttgtgttccatgggtactaagttatctaactttctgtttttttctttcaggttctttgtcgttgccattgcaatagttgcaggttaccttgtcctgtcacttcccttctcagtcgtcacaattgttcgtcctctagccgtcgctccgagacttctcttgcttgttcttgacactgtactcatcttcctcaatacttcaaactcttgatgctatagtttatacagaaattaaacaattctctgttttcttattgatgtgtacaggcggctctggctttggacactgcagctgcttcgcggcagcggctatagtgtatttggcacacaatgggaatacgaacacaaactggcttccaatctgccaacagtttggagatttctgtcagaaaacgagcggagctgtggtttctgcctttgcctctgtcacctttttagccatccttgtcgttatctccggtgtttctctcaaacgaccctaagtcaacaataca

SEQ ID NO: 24254 - DNA, 920 bp, Arabidopsis thaliana columbia
tatttagtcatatatcgaagtcctaccccacagatgatcaagaagaagaaataatgcggtgggaagaaggttgtatggatgatgaacagaatagagtaactcacgcgactgagcaaaagccatgctgttgcttagcttatgataccgatcttactaaatccttgaaggatcgaggaaaaaatactgctcaaagttctcgtggtcgatgcagttccattcctgagagatcctctcatgttgctgcagaatgtagtgctggaagtttcagtgaagaaatagacgacaaacctagcacaagtaatcagtctgaccctgactttggttatcgtccagtaagatttatgcggactgcacttcaagagagtagaatctcatctgctatactaagcgaagaagaactattggatgctctattgctattataccatattgctgttgctccaaattttaagcaggtaattttaattattcccgtcttaattagattttgttgtattttttgtacgatacataccacaacctgaataagcttgagaggctgataggttctctttctgcttttcttaggcatcatattacatgtctcaccaatcgcaatcaatatcacttcttgaagaaactgataaacagataagagaacgggcttcttgtgaccaaataaagcgcttgaaggaagctcgcaacaactacaaagaagacgtgatggactgtgttagacattccgcatggtaagtttcacttaactcatggattgcgttaactccagaaggagggtgtagtgaagaggtttcagttatgattcatgtgaggcaacattacaatctatatttttgccctcattctgaatcattttgtcaggttccgcatctcattgttctctcgatggaacaaaggggaatgtatgcattgtgcatgtgggt

SEQ ID NO: 24255 - DNA, 723 bp, Arabidopsis thaliana
tatattaaaaaagatcgtaaaatatgcttctacatcaatcaagaaaagcaaaagcgttgtagtaccgtgcaaaacgtagagtagactgcttttaggcatgtattcagagacaacaagcttctcttctcgacgatagtgataagctaaaggggtaagaacgttagggtgtcggagttttccgaaccgttgcatctcagtatcgaatgcttcacgtgcaagtttgttcatatccctaatccttttcacaaccacggataatccgttggccatcaccgccttgtaggccgatccaaggctaccattgcctagcacctcagctgcagccttcatgagatcaggtaaaccaaaggagcctttctcgctgtttaccattataatgtctcccattccgcttcctggaccacctcctgcaccttttccgttatgcgatgaacctttctttgaggaaccttctgcgttactacgcttcttgctcgagtcgataggcttctttattgagtccggtacacgaacttccacgctctcttggtcgcttaggtggtctttaccgagcatccggaactcgggttgcctcttcttcttccatcttgtaataatagctaccacaaacaagaatatcaatagaaacaagatgaccataaagatagcttttgcagtgttattcttctcattccctgaccctgtagatgaaggtttctcatcgcattctatattcagaggtga

SEQ ID NO: 24256 - DNA, 791 bp, Arabidopsis thaliana
ggaccccaaaacatttcaggtatacaacaacacctaatgaagtctccaatctctaattctccttcttgttacagggtcccttgcactacaattatcagttgggcgatggttatgagtctgaggagatttattctgaagatgatgatgaggaggaatcggagtctgacgatgatgagcctatttgtgagtgcttgtcagattattctttcctagagtcatgtcttgtgaagaccgtagagataagcgagtacagcggaactaaaatagagttgaagcacatgaaacatttcctggagaaattgtcatgtcttgagcttgtcaaagttttttctcatgaaagagatgaagaggaacatgttcaactcagaaccaatctgctgaatcttcctagatcgtctaagtgcaagacccagttcgagtttattcctcctcgtagctctgtttgagcattactctgtttcttttcttcttggttttctgtcagctagattctattgataggatttttcatcagttatttgctttgagttgttgtcttttgacgttttattcaaagtgacaaatcttaacaagattcaatttcaactacaacaggacccaactgaagccatagaagtttattactttgattccataccccatattgaaggttacgttgaagctcataattcccatacaaaagtttatgaacatcaatcatcatgatgatgaggtgtaaacatgttgtgacattttttatttcccacaaacgctccgttttggttaagtaaccgagattataaaaccgggcg

SEQ ID NO: 24257 - DNA, 815 bp, Arabidopsis thaliana
ttggttttatttggtttaaaactatgtatgatctagaaaaaaaatattatgagcctaaagtgaattattctgattctatataaatacaaacggtaagtattaagttagaaaactaaatagtcttatgtatacaaatctcttcataattcattaaatatattgtaaatagtaatgagtattttcatatacatagactgatagaagcactttatcgttaaaattgcaaaataaaagtagttataagtgggcataaatgaccaaaatttgctaaaatagattgtattaatttttttttttttggtaggggacactggacagggagataatccaataatgaaatataaacttttgtttagatatgccgtcggtttaagtattctgataatcaccaccgtttttttgcctattccaaatttccacacattttattttcatttcttaatatttatttccttatcatttctttctctcaccaaccaacaagttctcctttctacccatttcgtctccttcattttgacgttttctttagatctgttaataatcccatccatggcttggtctagtcactagtggtgttatctctctgtgtggaataaaaagcaaggttttttaatcacttggattgttttaagatatggcaactttgaacccttttgatttgttggatgatgatgctgaggatccaagccagctcgctgttgccatcgagaagattgataagtccaagaaatctggacaggtttcgagcttgcctgctaagtcagctcctaagcttccatcgaagccacttcctcctgctcaagccggtgagg

SEQ ID NO: 24258 - DNA, 515 bp, Arabidopsis thaliana columbia
aaattaggaccattatcactagaattacctttgttgcaattcatgacctgctccagatgcacttggtaaccaatagcttgagctgttaaatgccaagaagaaatcagaaatttgtataaaaccattaagaagcaaagagagaagattataggaaatgaatcaatgatgaaactttcacatttggaagatcaaaaatcaaaatctagagaaaacagcatgtagatcacttccactacgaatcaagactcgaataaaaagtctgctactttcaatggaagctgatcaaataactaaaggtgtcaatacaaaattttgaaggatcaggaaagatggaacgagacttacgaatgggtaacgaaacaggggtcttgataacgggaggataaagagacggaggatcagaagaaacagcagaagcggtacggatttcttcgacggtgacgacgccagctccggcgaaagatgggttacgagcagatgagctatttctctgcaggtattggtatgaatccaac

SEQ ID NO: 24259 - DNA, 491 bp, Arabidopsis thaliana
ggtcgtatcaagatggagctcttcgccgacattgctcccaaaaccgctgaaaacttcaggcagttctgtactggtgaactcaggtactcgattctgtttctttttaatgtttactccattcgattctctatcttcgttcctgcatcttattcgtttgaggttgaatttacgatttagtatttgaaatttagcgtcttctcaagaggttttagagctttttttttggattcatatagttttgagcttgctgcttcgtttatgcttcagtctacagattgaattgtttatgcctaactattgaactttgctagcttaagcggatagatacaatacaatggtttggactaattgagtattttttggttcttaatctaatcttctttcacgttttggttgcctttggtgcaatttcagaaaagctggaaagccgcttggttacaaagaatgtcagtttcacagagtcatcaaagattttatgggtcaaagtggtg

SEQ ID NO: 24260 - DNA, 887 bp, Arabidopsis thaliana columbia
gcatgcaaaacatgaagttttaaacttttgacgcaattatgggatacatgacctgaatgagatttgcaagtcgggagatctaaagaggccaaaccaaaaattaactgaccaatgcaaccgcctcttatgatcaacagagtttgtcacgcagttataaactggattttctgaaatatttcttggttcagtgatataaaatttcctcagtttttttttgataatttaggatcataagtgcgttttaaaacacaagggtttaagtttcgaggcaattaggagataaagacgaacgagatttgcaagcaagaaaccaagacatgagataaaatgatattaacgactgttctattgttgttctgagaccgaggccagattaccgtgaggcgctgctttggttccggctttccaacaacctttgccaaaccatttttccacaatgcacaagagtcaaagatgccacaaggtaaagaagaggaaccccgatcacacaaccttccgatgcaaaattcaccaatgtctggtaagaatcaagaaaacaaaaacaaaagatcactgttaagcctatcctaaccagtaaaggatatagacaatacaggtggtattgacaagtctgagatcttaccaacattccagcagtaaggtgtatgactggaactattatttgatctactttgttcccttttgcatacccttcgaaagcaatgaccatcgagaatgtgtggatcgtaacaaatgccagagcaatgattgctgtaagacatggttgtcaaattataacatgagtactagtgcactagacgacaatcaagccactagcgacttaatgaagaagtgacacagcttaatatgttgtacgacaagatttgggtcacatgactcacagagat

SEQ ID NO: 24261 - DNA, 558 bp, Arabidopsis thaliana
tgttatgctggttaaatcagttaattttgtccggaaatgattgaattcctctgaagggccctcaccaaattcaaacacctcaatatcattctctatgcattcgtggagcctctccaaacctgactcagcctccccttgcaaatactcaaaaaattgtttcttagtatgatcatctggtacatagtatccatatgcatatgtccatttgagtacccgtctgcattcaatgatctggagccaagcctctgcgataaacttgagctgagattctgatgtgcactgtatgtcactaagcttcctaagcttctctgattgcattttctgcagatcccccatagctttttgcctcgacacttgattgcttgcccatcgtttatagtaatgagtgtatttctctagcgagttttttgccatctctcgcctcctttcagcctcatcatacaacccttgtttcttagccgcctcataccggttgcaggcataataccaccactactttccccgtgttctgtccatgcgttaaggcagagcaacaaaactcaaacttacaaggtggtg

SEQ ID NO: 24262 - DNA, 512 bp, Arabidopsis thaliana columbia
tattcctataaaaagtccaaatattagcccccaaataaaaagtcacaaattaaaaaaagtactaatcactttctaatgattaaaaaataaacactgatattggtttgtccacgtaacatgcatgaagattctgatcattggagttgacgaagtttagtcctaaacaacagtgaaactcacgcgctttaaaagcgcgtctactctcatttccctccctgtatttcgcattttcccaactggcaatcacatatgcatactacggttttacttaaaaaccattttccaactctccgtcagtattcgctgacgacatgtaactcacgacaagagacgtctcatcagccgtagccgccggaaccgcaactgcttgaaactgtcctttacatgtttgacaagtgacctgcatgatcgttgaacttatcttcttcatagattgttcctttaaaaacttagctctctcgagttcagcttgtgctttttgcctaatctttttggcatttgcaaactcgttt

SEQ ID NO: 24263 - DNA, 339 bp, Arabidopsis thaliana
tagaggaattgtttctggaaattccgtcattatgtttatctattccttggatggggatgggacaatctgcaggattgttatatggttttacttccactttttttttttgtgatgcaggctggcactggaatagctgaactaattgctcttgagatttcaaagaaggtaagtaatatgtttgtgttaattttctctgttaagcttcttgttttcttagatggagtatcttttattttcttttgactgtagtcccatattccattggaagaggctcggaagaatatttggctcctggattccaagggtacttattagatgcggattccaccttggtttgca

SEQ ID NO: 24264 - DNA, 1515 bp, Arabidopsis thaliana
cggctgagcaatttgagcaagaaggctaaagaagagaatcataaggttagggatatactaaaacaagcgattaacgaagctaatgttgcgaaagaagcagctgggattgcgagacatgagaattcgaatttgaaggatgccttgttggataaggaagaggaactgcagtttgctttgaaggagattgagagagtgaaggttaatgaagctgtggctaatgacaatattaagaagttgaagaagatgctgtctgaaatagaggtagctatggaggaagagaaacagagaagcttaaacagacaagagtcgatgccaaaggaagttgtagaagttgttgagaagaagattgaggagaaggagaagaaggaagagaagaaagagaacaagaaggagaagaaagagagcaagaaggagaagaaagaacatagcgagaagaaagaagacaaggagaagaaagagcagacacatcagaacttcgataagaggatgattgggaaaacttgtagtttcagtatcatgaagctagctcatcacaatcacaaccacaagcacaacaaagaaacatcagaggaagagacaaaaaacgcaaacggtgggaatcatcaagagaatagtgacgaaagtggtgaaggaaactctccaagttcagattcatatctattcaaaggttcgatctttgatatagcagagacgccacatgcacaaatgcatcacaaaaggaggtcttcgtgtacgtttttggaagaagtagagacgataaatccagaggatttggagaatttggatgggaatcatttagaagaaggagagttaaatgacaaaggagcagtagcaaggaagaagaaggcgtttatacgtagatttggtgatcttcttgttaggaggaaaagcttaagtttctcacacaagaaagaatcttccactgattcacaagataagcagcaacctcagactcccacgtctccatctccgccactaccgccgatgtctccggagccctgaagagcattgtgttaatgatatgccattgttgtgttttcttctacagtttgagttttgcaggaacttttcttttgtacatagccagccaaacgtttgaatgtgttgtaataaggacttgatcattttaatatgtgcaggttttgtctttcttaacatgttgaatcgctttatgattttaccggaacgaaccggttgctatggtttcggtatgatttgatttctcgttataggccttagtcggcccaataacgaagattctctataaataaatgaacataaacaaggcttattttgttggaaatatatttaacttgtttcactatttgtctatttatatgggccagagagacctttttcgattttcttatgtaaaacacaaaatgaaataaaactgaaaaagctcaaacaatgtggtaaaggtgtcatagttgcacttacaatgaaaatattttaatcattaaaaagaatccactttattgaatatagaagtgaatcaaatgtttgtatataaat

SEQ ID NO: 24265 - DNA, 649 bp, Arabidopsis thaliana
  unsure (1)..(649): unsure at all n locations
tcaacatgcaacatagaacgtggtattgatcttgctgaactagtaacagcagctaagttgatcatttgggatgaagctcctatgatgagtaagtattgttttaagtcattagataagagattaagagatattatatcgactccagaagataagccgttgggtggaaaagttattcttttcggaggtgattttaggcaaattcttcatgtcatcgttgcagccggtagggaactgattgtcaaatcatcactcaattcgtcttatcattagcagcattgcaaagttttgaagttgacgaagaacatgaggcttctccaagatatagacataagtgaggcacgtgagattgaggaattttcgaaatggatccttgcagtcggcgagggaaaactaaatgagcctaacgacggagtaactccgatacaaataccagatgatattcttatttttgaaagagacaaccctatagaatcgatcattaaatgtgtctatggtacaatctttgctcaagagaaatctctaacgtttttccaagacagagctattttgtgtcccccaatgatgatgttacttaattacgatcatatgcttcaaagctacaagttagtgaattactttggagattcgcanaagtatcatatactttata

SEQ ID NO: 24266 - DNA, 602 bp, Arabidopsis thaliana
ctaatgttgtattttctggcaaagacacacaagtgaacaatttggaccaacaccttctagcataaaaagttttattgatcttttgagttaattagttcaatcaatataaacataactctaatgtataaaactctaaatgattacacaatgttgttgtatgatatcaaaatttcttcccttgagcaaggtttactcgaatcgcccgaccctccagctcaaatccgtcaagcgattcaagagcggtttccatttctgctttggaagagtaacatacaaagccataaccccgtgatcttcctgtatctccatcaaacacaactctagccccaaccacatctccacattctcgaaacgctccagctaatgactcggaagtaacagtccatgataagttaccaacaaagagcttgtgctctgtttctggatacagaggttctttgttaggctttggtttgtctgcaaagttcactttcaaagcacgaccaagatactcctgagaaagaccaataacaaagatcactaaaatgtgttttttcctttttttatgtgttttgtaataaggctgcaagagacttacagttccatcgaggttatcgatgatg

SEQ ID NO: 24267 - DNA, 1013 bp, Arabidopsis thaliana columbia
taccgttttacagatacgtatctgcatgtgaagcgatgtggaagattagagggtatcctatacattatcgacaaacatcagtatttaaacttacattccatgagaaaagcaagtaacccgtttatgtcaaggaaggtgagactgctgaatatgttttgtatagagtgaataatgatgagactcaatttaccgcaagtgtcgagcttaataagcgtgatctggaagcagcaaaacttttatatgaacaaatacctaatttctatacgtggaaatgggtagatatagggattctcacaggagaaatgtcccagttttcgctgtggggagaataaatcatgtacctccaaagatagatgatgcatatcaccttcgcatcctgattaacaacaaaaatggtccaaaacgatttgatgatatcaaaaccgtcgagggtgttgttcatgaatcatacagagattcatgctatactctaggtttgcttgatgatgataaggaatatatccacggtattgagaaggctaatttttggtgttctcctaagtatgttcgcaagttgtttgttattatgcttatttccgaaacttgtgttccccagccgttgtgtgggaacacacttagaagatactgtctgtatgggaacacacttggaaatcagttagacaaccatgttagttaaattattatttttaattaaatatacaattttatagatgtttttataaatagtttagtacattcaatctaatattaatttatatgtagaatacatattgtcggacgaagacaggattcagttatgtttacaagagttgccaacaatattgaaaaagcatggaacaaatctttggaggtataagatgttgcctcagcttgaacctggcgatgacctgcctttaatcagttgatcccgatgaacgcaactacaaccgtgagtcattgaaaacaaaccatgataattggttaaagatgttactgcggaatagaagaaggtatatgatgaaataatggatgtt

SEQ ID NO: 24268 - DNA, 677 bp, Arabidopsis thaliana
caccaaaccagtagctaccgaattcatactcgcgaaaagttctgataagatcagctaagctattgaagttctcatcataacgatttgacataagaacttgagatatattggaaactctcaattttaacataaacagattacagaaacagaaatcaagaacctcaagaacaaaaggcataagaatcagagcttgaactcagcaacaaactagcagtagaattccacattgtcctaggaacaaatctaaattctcaaagcaaaagagacaaaatcttcaaaaatctctagctcctgtacaaaagatttcaatgcatacatacccgaggaagaagtttcagttcagttcagtaccgttcggttcggttcgatccgtttgccatttagccgccaaagaaagagaagaagccacgtttcttaggttcttcctccaccataacagccttcatactatcttgctcaacgagtctccaagccgcctgctcaaacgccaatcccgcaagcgtaggaggcttattcagaacaagcggaaaccctcgattcgtgcttcgaataacctcagaatcttcaggaattacaccaagcaatgacaatcccaacatctcctgcacatctaacactgacatcatatcctctcctttaatcatatcagttctcactctgttcacaatcatctttat

SEQ ID NO: 24269 - DNA, 866 bp, Arabidopsis thaliana
gagcagagtgtggattcgtagcctgagtttgtggagctcggggttggggacggtctttgtgccgatatagctggtgcagccggagtgggggctggtggagctggtgtcggtgccggtgtgcatgccggttgtgttgagggcccaggagtgatgggtgccgcagccagaggagcccaggttccagaggttagtttggcgggcctgctgaggcagttgttggagcggttaccaggtgtggtaccagtgcagactccagttgcgccacgagtggcggaggtgcagcagagggctgcggttgctgaggaggttccatcttatttgaggattcggttatgtttacaagagctgcaaaaaatattgaaacggcatggaacagatctttggaggtataagatgttgccgcagcttgaacctggcgatgaacctgcctttaatcagttgatactcgatgagcgcaactacaatcgtgaatcattgaaaaaaaaacatgataattggttaaagatgctaactccggaacaaaagaaggtatatgatgaaattatggatgatgtccttaacgacaaaggaggtgtttttttcttatatgactttggatgaacatggaaaacctttttgtggaaggttctatccgcaacgataagatgtaaaggagatatttgtttaaatgttgtgtcaagcggcattgcatctttgttattagaagatggtcgaactgcacattctaggtttggtattcctctaactcctcatgagacctcaacatgcaacatggagcgtggtagtgaccttgctgaattagtaacagcagctaagttgattatttgggatgaagctcctatgatgagtaagtactgttttgagtc

SEQ ID NO: 24270 - DNA, 995 bp, Arabidopsis thaliana
gtgtgtccatacagaggaccgcatgtttacaacaatttacaccttttactgcagagaccggatctctttgggtgtgctctggctcatgttggggtcatggacatgctccggtttcacaagtttaccataggacatgcttggacttctgaatttggttgttctgacaaggaagaggagttccattggctgataaagtaagtcttttatttaggatcaccataaagcttctctcttttggtagatttatctgatggttttaatctgtaaaaataaggtattcgcctctgcataatgtgaagaggccatgggaacagaagacagatctgttttttcagtacccatcaaccatgttgttaactgctgatcatgacgatagagtcgtcccacttcattcttacaagttgcttgcggttggtctctcaacctcttgtttgcattttgtatcttcctcttcttcttcttcatcttccattgaaacccgatttcgctttcgcagacaatgcaatatgaattaggtttgagtttagagaatagtccacagacgaaccctataattgctcgaatagaagtaaaagccgggcatggagcaggacgtccaacgcaaaagatggtaactatctaaacataagacttctctgttaaatgtttttgtacaatataaatgcttggagtgtaatgtttgtgagctgcaacagattgatgaagcggctgatagatattcgttcatggcgaagatggtggatgcttcatggatcgactagaatttacacaaagagattagcttttctttcttgttatgttttagagagagctactatattataattatacagtccctcctcttttataaagaaaatgtactagagtaaaagtatctttgagttttaatctaatctctaaatccacgatattattgtccaagagattcagaatcgtatgcatatgcgacatggaaactgtgtagtttatcggaacaacctgttgatacacaattg

SEQ ID NO: 24271 - DNA, 608 bp, Arabidopsis thaliana
acactacgacattcaccaattacatatccaagtgtgcttgggaacctttatatggagagggattcctatgaaattgggagattggttcatagcttagttggctcttgttgatattgtgtaatgtatacgcttttcattaggcagacaatttgtgaatttcaatcctctcttcttctttttcgacaccggcaggatctggcgatgtctattccaaaaggaagcctggattgggagagagcagtgcgttgcattagacatgctattcgcactacaccgtcaccggactggtggaagcgtgttcttgttgtggccccttgttatagaccatctacacaagcagggcctatccctggtgctgtattcacttctgacatgatttgtgaggcaatcattgacagaattgttgagcttcttaagctgaccaactcaggcaatgtttgtctttccctatttctcatgtctttgatctgtcacttccatttaaatctgtggaaattattttgaaatagcaagtggttttgctagtcgtcacaatctgtaaagaacctacatcctttacgttttattctagttctataatcgttgattcgttaggcttagatagaaaa

SEQ ID NO: 24272 - DNA, 553 bp, Arabidopsis thaliana columbia
ccacaggaccgacactcaaggatctggatgcttgtttcttgacctatcattcccttcacacaccctttcaaggtaagattggtgttgagcattgttgatagtaagaaacacaagttcttcgttctaaccatgaccacatcatcagaatttgtatgtttcaaatgatccgagagtaacaactttttgagtaaagatacatgcactatctatctttggctcttgcaggtccaggcgttacaacagggtctatgcatgtggtgcagccaagggaaagtgttgagaagatggaactgcctgtctttggtctcgcctcatacaagttgagaggttctgtatggacaagctttggtggctcgggccacaagctcgcgaactctctcttccaagccgcagataattggctgaggttgcgtcaagtcaaccatcctgatttcatcttcttctgccgccggtaatgatagattatactatgatgacgaaaaatgatataggaagttataacaaggaactctttatgattactgtcttgaggaaaccttacatataggatact

SEQ ID NO: 24273 - DNA, 794 bp, Arabidopsis thaliana
taacggccgccagtgtgctctaaagtgggggcaaaaatggcattatgcgtccccaaagataaaactggcatcgaaccaggttcagacagaaaggtccctaatgagctggattgaacgaattaaaagcaacattactcccacccgcaaggcgagcattcctgaaggggtgtggactaagtgtgatagctgcggtcaggttttataccgcgctgagctggaacgtaatcttgaggtctgtccgaagtgtgaccatcacatgcgtatgacagcgcgtaatcgcctgcatagcctgttagatgaaggaagccttgtggagctgggtagcgagcttgagccgaaagatgtgctgaagtttcgtgactccaagaagtataaagaccgtctggcatctgcgcagaaagaaaccggcgaaaaagatgcgctggtggtgatgaaaggcactctgtatggaatgccggttgtcgctgcggcattcgagttcgcctttatgggcggttcaatggggtctgttgtgggtgcacgtttcgtgcgtgccgttgagcaggcgctggaagataactgcccgctgatctgcttctccgcctctggtggcgcacgtatgcaggaagcactgatgtcgctgatgcagatggcgaaaacctctgcggcactggcaaaaatgcaggagcgcggcttgccgtacatctccgtgctgaccgacccgacgatgggcggtgtttctgcaagtttcgccatgctgggcgatctcaacatcgctgaaccgaaagcgttaatcggctttgcggtccgcgtgt

SEQ ID NO: 24274 - DNA, 947 bp, Arabidopsis thaliana
gattgttgatggaacgggttgactacgttttagttcctcaagaagtttggaaaagacttgttgaatggtgagcttttggttctttctgattgggacatggtccaggttttggtgcatgattgtttcatttagtttctttgtttatatacctggtcttatatctcttgcaggtatagcggaggtcctccgatagaaaggaagttgatctgtcaaggattttatactaggagttatagtgtagaggtttacccactctgccttatgttgacggacggacgagatgaaagtagaactgtaatacggttgggaaaacaggtattaggtgcccccatcatactactcaggctctttgttttgctgcgacgtacttatggtgcttatgcatagccaaagactctttgtgtttaaactgttaggccccacttaggtccctttcttacatgggttgtccgtgtttcaggcctctataagggaactttatgagaaggtttgtgctttgacaggggtaccacaagaaaaggtgtgtgtttcgagatgtttcatttctatttttagtttttgctgatgaaggacgcattgtttcgttatgaagactttgcagctttgcctcacattgatatttttttttataagcaggctcatatctgggattacttcgataagaggaaaaacggactcttggattctttatcttacaagagcctggaagagtcaagccttcatatggaccaagatgtaagtatctagagaactgtctgtgatatgtatattgacaaatcttgatgaatcacctttgtcacttggacttcagtttgtcataatgcatgcctcttgagttcttttatcgacacaaaccgaatcccatttaactcacttgatatcaatgttcgtctctttgtttgacattgactggtacatcccatgcagattctacttgaagttgatgg

SEQ ID NO: 24275 - DNA, 590 bp, Arabidopsis thaliana
caaggagacttacacaatcttacatggtatcagagcacatctctctttgattgcttcttctctcttatatctcttctctattctcttttccttactcaaaaatggccgctatcatgaacccagaaaagatctatggtgtctctaacatcaaatctcacattcctgtgattcttgacattgaagaaagtaactacgatgcgtggagagaactctttctcacccactgcctctcctttgatgttcttggtcacatcgatggaacccttcaacctgccaacgccgctgatgttaactggcagaaacgtgatggaattgtgaagctctggctctacggaactctcacaccaaagcagttccaaggttcgttcgtctttggttcaacctcaagggagatctggctgagaattgaaaatcaattccgcaacaacaaggatgctcgtgctcttcgtttggacaatgagctccgtacgaaagagattggtgacatgaagatcgccgattactgtcgtgagatgaaaaagcttcctgactctctctcaaatgttgatgctccagttcaagatcggacacttatgatgtcagtgttgaat

SEQ ID NO: 24276 - DNA, 475 bp, Arabidopsis thaliana
tagtaactgccgccagtgtgctctaaacacgacggtcaaccgcagagaagtatgcgcatcttcagtcacggtttcgacagcaatgccgccaatttcatccagcggcttacgacgaatcaccgcacaggaaccgcagaagaaagtggcgtcccacatatcgttgccatcctgcaccagaccatagaacagcgtgccttcgttcggcgttttacggaaacgccccaggttgcgttcaaacgggtccggtgagaagaagtggtgcggcgtctgcatcatcgccagctgtttttctttcaggaaccagcccatggtcatttgcaagaacgatcgcgttggtacgtggtcgcagtcgaaaatcgacacgaactcgcctttggcatatttcagcgcattgttgatgttgcctgctttcgcaatgttcatgagtggtgcgggcgatatattttcacccccacgttttgcgcaaactggcgaa

SEQ ID NO: 24277 - DNA, 822 bp, Arabidopsis thaliana
gtcctcactttccttgccgcctccttcatcggcgcaatcaccacctccgcgaacccgttcttcactccggcggagatttctaaacaagccaaagcctccgcggcgaaactcatcgtcactcaatcccgttacgtcgataaaatcaagaacctccaaaacgacggcgttttgatcgtcaccaccgactccgacgccatccccgaaaactgcctccgtttctccgagttaactcagtccgaagaaccacgagtggactcaataccggagaagatttcgccagaagacgtcgtggcgcttcctttctcatccggcacgacgggtctccccaaaggagtgatgctaacacacaaaggtctagtcacgagcgtggcgcagcaagtcgacggcgagaatccgaatctttacttcaacagagacgacgtgatcctctgtgtcttgcctatgttccatatatacgctctcaactccatcatgctctgtagtctcagagttggtgccacgatcttgataatgcctaagttcgaaatcactctcttgttagagcagatacaaaggtgtaaagtcacggtggctatggtcgtgccaccgatcgttttagtatcgcgaagtcgccggagacggagaagtatgatctgagctcggttaggatggttaagtctggagcagctcctcttggtaaggagcttgaagatgctattagtgctaagtttcctaacgccaagcttggtcaggtttgttttcctaatttttgagctcttattgatatttttttcttggttattttgattatcatttatattttatttttctgaggaaatttaa

SEQ ID NO: 24278 - DNA, 935 bp, Arabidopsis thaliana
agatgcttcttaagtctattcaccaagattttagagataattttgtagctaacattgcataaggcgataggacgaaattttgctattgtagttggagtctctactttaggtatcagacagagattggtatggttatgtctttcatctagctctgacctctcaaagaatcttgttacctcaacaagcactttcgggtttgatatcaggccaaaactgctcgataaagatctgcggtgaagccatcttgatcaggcgtccttgaaggtgccactgagaaaactgattcttcaatttccaactcagtcaccggtctgatcaaatcctcatttatcgcatctgtgatcttttgttggaaccttgaaacacatcagcatagcgaagacttgtatttggtgtcgacttgtaaagatcatcgaaataatttattgcgactttggcaatattttcgtcacctctgcaaatatccccatcgctgtcctgaacagataaaaggcgatttcgacaacgtctcgttttagttgttgagtgaaagtaccttgtgttacggtctcctgcatttaaccagcggcttctgctctttgtctgccaatagatctcctcatccgcatatgcctgatttaaatcctgtctcatctgtcttctctcccttggggtagcagttcctgtcgcaatggctcgatcaagcttatgacgaataatttttattctttcttctgcattcacccgattattctttttccatcgtgatattgcttgtctgcattcaaccagcttacgatttaagcttgagtcaccttcaaaactcccattacgtctatgccattgattaagaactacttgtttgaaacctctttgtgtgtaaggcggctatcataactgaaaaatcctcttctctcttctttctgggctgagatatttgttaccaaagggcgatg

SEQ ID NO: 24279 - DNA, 1284 bp, Arabidopsis thaliana
attccgtatccctaatcatttaataaattaaagttagttacgtaaaatttaaaactgaagtggcaaatttcttaaaaacgtttttggtcaaattttgtataacatttatatttttttttactataagaaataaataaaaatatgtcatctgagtagccaaaaatgtgattatgcagaaaatataaaaaaatcgcacacagttgaataatttggttttactttatttgatcaaaatacaaactgtatataggtatttacttatgttatgtttttcagttaattatgagatttcattccgtatagttatttcgattttccaaattcgtatgattccgtatttcccaaaaaaaatatacctgaccgagtttggcattaggaaacttggcattaacggcatcttcaagttctttaccaagaggagcagcaccagatttcaccactcttatcgagctcaaatcatacttctccgtctccgaagacttcgcaatggccaacacaatcggcggaaccatcggagccaccgtcactttacacctctggatcagctccaatagcagattgatctcaaacttcggcattatcagaatcgccgcaccaactctaagaccacacaacatgatcgagttcaaagcgtagatatgaaacatgggcaaaacacagagtatgacgtcatcgctgtggaaataaagattcgggttctcgccgtcgacttgctgagcaacgctcgtgactagtcccttgtgagtcagcatcactccttttggtaatcccgtcgtgccagaggagtaaggtagtgccaccacgtcgtccggtgaaatctccaccgagtcgatgacttctgatgcctcggttgtcgactgagtcaactcggtgaagcggaggcagccttcagggattggcacggattcgttgtcgtcgatgcagacgatgactactccgtcgtcgttttgaagtggtttgattttgtcgacgtaacgagcttcggtgattatgagtttggtgttggaggctttggcttgtttagctatctccgccggagtgaagaaagggtttgcggcggtggcggttgcgccgcggaaggaggcggcgaggaaagagaggacgaattcgggacagtttgggaggaggagcatgacgacgtcgttttggttaacgccgagtttgtgaaaattggcggcgatttggcgggagatgacgtggacgtcggagtaagtgtacacgtggccggttggtccgttgattaggcaaggcttagtggcgaattcggagatgttttggaagatg

SEQ ID NO: 24280 - DNA, 952 bp, Arabidopsis thaliana
gtgccatagatcacattaaaatgatcaaattaagagggaattcggagatagagagggattggatttttggtaagtggaggtgaatcccatactgaaaatgcactttcagagttcatccatttgtctgtcatatcaggataatgacgatcaatcacatccttgagactctctgtagtattcacccattcaagccccttcttcgtgtaaatcgtttcattgaaatcactcgtgaaaaacctatccgcttctaatcgcctgaaattgtttaaattagtattagattattaaacttttctaatttactgtgatatcttcaagaaaacttggttctatatatatatatatatcgaaaatatataccttgtggccatgatgaggaaaatgtaaaaagcagtctcactgatagcaaaacctttgattttcttctctgccataagtcccacgagaagatcaagctcctccacatcaccatcgtacacgtcatccaacacttcaatagcttcctcatcctccgttagatcttcccacttggttatcggaatcataaacatagatctcctgaactcgttgtaccgtgggacgctcctctccctgtccctgtagactaaaataaccgaaaaaaccgaattcacgtgagaatcaagtcaaacaacaatgaacggctgagatcaggttgacttactctctaaagcagctaagtcgacgtggtctggacgagcttggccgttggggtcgtggggaacaatgtctcttaaccacatcggataattcatcagttcaagggcaccacttgcttggtgacccattgagaccattagcttagtgaatccaatgtgagacatggtttcttctcccttgcgaccaatcaaatctctcatagaaatcctaaatccaatgaaataaaaccctaaatttttttacaatttggaaacttcaaaataggagagagatg

SEQ ID NO: 24281 - DNA, 597 bp, Arabidopsis thaliana
tcagtgatttcttagaatctaaatcatcgtggtttctatgtggatttgtgtagattgagatcttgaggaagaaaggtcactcttactcagaaatcatcaacgagagtgtgattgaatccgtggactctctaaacccatttatgcacgccaggggagtgtccttcatggttgacaactgctcaaccacagcaagattgggttcgaggaaatgggcgccacggtttgactacatcctgacccaacaagctcatgtggctgtggacagtggtgcagcaatcaacagagacctaatcagtaacttcttctctgatccagtccatggtgccattgaggtctgcgcacagctcaggcctacgcgttgatatctcggtgcctgctgatgcagactttgttcgacctgagttgcgtcaatctagcaactgcgtgaagggttgaaagtttgtcagtctcttatttgtaatcggagtatcaactcgagagtttgtgatgtttttttaggcgtgacagtttgttttgtttgaaggattatgtctctttgctttggttttttaatctacttaaatcaataaaatagtttaacgaaatttcgctttaact

SEQ ID NO: 24282 - DNA, 1937 bp, Arabidopsis thaliana
tcagtaattgattttctaaatctgagtatggataattttgtcaaaactacaagaaaatcagataaaaaaaatggtatcagatacataatggattctatattccaattagtgtttgtaattgtcgtaattacttatgtatcctttcgatttagggtttaagctataataagacatgcacctaaaattttggctgagattaataacacttagttcatagatacgagtttaattcaaaattcatccagacactgaatcaaaattgcctccgttcaactgttcatttcttaagaattcagaatgtttaggaaagcagagagcttctgtcataccttcctacagaaatcacaacaattgcatagacagagaaaacaactgttgggtttgatccctatttcatcaccagacagtctaaagacagtatttcaaactctgtccggtaaatgggagatgtagttgaagatcttgagtgtcttcaagtgttgaaaggtgcaatgactaacaaagtttttatggttacttggcctataaaggataacaatttttttttttataaaagaaaaggataacaattttgatcacaagaagcttcttgttcgtgtttatggcaaaggagttggtgatattaggagatagaatattcttatattcttctcaatattcttcttgttataagtttagatattatgcgattgtatctagaatataggagatctctcaactattgtaactgaaatgtgtatatattgaatcgaatgcaaagctactcctcaagggagattttcacaatctaacatgatatcagagcatagctctctttaatcgcttctctcttctttttcttctttctttttctctcaaaaatggttgttgtcatgaacccagaacagatctatggtgtctctaacatcaagtctcacattccggtgatgcttgacattgaagaaagcaactatgatgcgtggagagaactctttctcacccattgcctatcctttgatgttatgggacatattgatggcacgctccttcctactaatgccaacgatgtcaattggcaaaaacgtgacgggatcgtgaagctttcgctttacggaaccttaacccccaaacagtttcaaggttccttcgtcactagctcaacatctcgagacatctggctccggctccagaatcaattccgacacaccaaagatgctagggcgttgcgtcttgacagtgagcttcgaaccaaggacatcggtgacatgagggtagctgactattatcgtaagatgaagaaacttgctgactctctcagaaatgtcgatgttcctgtcacagatcgaaatcttgtgatgtacgttttgaacgggttaaacccaaagtttgacaacatcataaatgtcatcaaacaccgtcagccgtttccaagctttgatgatgcggctacaatgttgcaggaagaggaggatcgtctgaagagggcgatcaaaccaaacccgactcatgtggatcattcttcttcatccaccgttcttgcttgctcagaggcgcctcctgtcactaacttccaaagatcaggcggtaatcagatgggttacagaggtcgtggaagaggcaacaacatatttcgaggcagaggaggtcgtttctcatactacaacatgccgactttcaactcatggaacagacccccgttctatcaaaactcgtatcagatgtggaatcatccttggggttatcctccgtatgtcaataccaatggtggtaatggactgggacttctcggaccgcgacctgcctactaacctcggcccccaaagtggactgggacttctcggctcgcaactagctgtgaatcgcagtgagcctgaaggtcccgcaccccactccaatggcaaggcgaagtcctgctaacagcgactcatattccgcttcgttgttggaggacgttgaaa

SEQ ID NO: 24283 - DNA, 983 bp, Arabidopsis thaliana
gactctcgcctatcaaaaacttagttttttggacgtatttagctttgatttatttgttaattcataagttttaacgtttaaaccatttctttaattacttctacctccgaaccaagttattgttattcatatcacattagaaattcacttctagttctaatacttttctttttttttgccaatagtgatgttcaacacaaaaacatgtttttatgtctgtttcactcaatcatggagtggaccagttttgatatcccggtttgctatattgtgcggtttatattaacgaattttgttttttaaaactataaaccatttaaaagaagttcttttcgtcaataaaatatctaactttatattatccaaccaaatatatgaattatctcaaaattcttctatcctttgcatcattcaattattttaataaaacatacaaaatatgaaattgtcagtaataattttttctggtttgcttagttactcttccatgaagacgtacattggaaaaaagaaagttaggttcactgaactaatagtcacgtgttgcattcattgcacgggagttttttttttatcccggcggccatcaccacgtcagcatatccggcgttcttccgacaagagtgagaccaatatgtcggagaaagccctgatgacgaacttgtgtgtgtcggctggatttaaagagagataagtgagtagcagttcatccaagaaatcgtaaccgtcgttcggatcacgactaagttctccggcgtcgatggcggcgtcaatcatctcttgcatggatcgccggaagtcagttaacggatccggtgagtccacgtgttgagttacggcggttcctccgcttataagcctcgtagtagtagtagtcacggaattatcataaaccttctttttcttcttctttgtcgacgtgatagtggcatcatcgtaattatcagagaattctcttgaccggggttctggtgagtcggtga

SEQ ID NO: 24284 - DNA, 1404 bp, Arabidopsis thaliana
accagccagacctcgcaggtactgtgtgaaatctccacacacaagcattggaatatctgcactggcagctattttctccagtcccttcaataatgtgtgaacctatttgggcaagaatcattatggatcaatagtgatgtaagaatccgaaatctgagagttcttttacaatgagaaataaagaccaacctgccacagctttacatctttcaattcatgaggaacgtttacatgcgtgttagcctgcacccatcaaatacatgaaaagagagaaaacatgatcacctcgagacctttaaaggagaagaggaagtggaaacacataacttcaactctagcatcatctctgacaataaagaacaatattgaaaagatggacaacttaccacacaaagtagctggcgcttcccaggattgtcagcagcctggctaccgaattttgcttccagtacaactattaaagcaacattatcctaaaaagaaagactctaaatcagttttacatgaaaaaatatcaccaagaatgtgcggaaaacagaaatcatactatagagcatctcagagtaccttgaccaaccgattcaaagcatttttcttctgggaaacagggataatagcctcagtcaaagactgtgcagccttgttgaactcaacctggatgagcagcccaatgatttagcaaatgggcctaattagataggtaacaggagaaaactaagacatacctcatatttttttacatgtgagaacctgtctcttctgaagaaagtagcgcacccatcaattgtgtttgtattaccgatgaaaacctaaaattatccagtgaatcaatattttctggttggtacatcttgcagataagtgaccacgaaaaggtaatggaagatcaaggggatgcgttgaagcaaacctcatttgttttcctcttaaaaagaccttggtatccgtgtttatccagctcaggaagaaaaaactcctcaaaatgatcattctgtacctgcaagatgaaaaacgaaaatattggagaggtatttatccattaactagcaattgaaacgtttccaagtcagtacaacttgtgccataaatatttaacatacctcttgtagacaaactatatctgcacggtacttgacaatttcccgtaacaaattctgtctacggtatgtccaagcgagacccgatgtggggcagtaactgtatatgtcgctgctagcatatgtatcagacaatatattgtaggacagcacagtgaatgttcccatagacaaaggccgcccattagaatccaggtgcccagtaacatcagtgccactaatagagatcagcctacgcggagaaggtgatggagctgggataacacgggaagtcaatatggtacaagaaaggcccacattctgtttt

SEQ ID NO: 24285 - DNA, 838 bp, Arabidopsis thaliana
agtgtgctgtaaagtgaacttgctgaagttatggagatggagcagatgggagcagagaggatcaaaactgttcttattctcatgagtgataccggcggtggccaccgtgcttcagccgaggccatccgcgacgctttcaagatcgaattcggagatgactatcgggtaaaaatattaatatttttatttataagctcaattttcattctctttgccttgaatccaacgcatagggttgagccaataatatgcttccttaaccatatatataacgtacaaaaaaacgaaaaaatattgcataagcaacaaaacttaatcatacttttatcttttagtttctgtgtaaaacaacaacaatattttgaaatattcattttgaaaatttcaaagcttgtaaatatatacctcgaataatatgtatttatattatgacaaaattttccaatagattatgttataatatatcatagaggagtttctgattctaatgaaatctcagccgtcaatattaaagttgtcgcagtagtcgtcttgaatttgaaaacgaaaagaaacaaatatctacttggaagttttgtagcctagtatgaatcttggagtttgccagggtgtcggagatacgagctgacgtcaacaatctatgtcttaaaacctgtcccacgttccatttattttgtttgtcaataatgattaaaaatttgcattatttatttctctagctctgactctttgatgttacaatattctctctaggaactaatgtcattttttttataactatagataatcataaaagatgtttggaaagaatacactggatggccattgaacgacatgg

SEQ ID NO: 24286 - DNA, 839 bp, Arabidopsis thaliana
gccagtgtgctctatgctctaaaggtacgagtagcgatgctttttgtttgcagcattaaatcattcacactaatcaaactgaccagcgcggtatctttcagcagcaccagccactggttaccgaggccaggcagcgcatgacgccacatctgcggcatcaccagacggaaaaagatagccgatttcgacagccccagcgcctgaccagactcccactgaccaccggcaccgctttcaacgcgccccgaagcgtttgcgaggcataggcggcatacagcagtgacagagcgatgacaccacaaaggaacgggctaacgtcgaagttctcaatgtccatctgcactgggatctgcacgaacccaagattgatagtgaagccatccgaaagcgtcagcagcagctgcgaggagccaaaatagataaacagcaccaccagaatttctggcaggccacgcagaatggttaccagcgctgaacctgcccacgcgacaggacgccattttgccgactcccataccgcaaagaacatcgccagcgccagcccgacaatcaatgcacaaacggcaaggccgacggtcatcccggcggggcttgctaaagggggaaagtcattcatcaggaatgacttctggaaccatgtgttgtagatggtgtcgtaagtgccatctttcttcacttgttccagcgcagtgttgagtttctgctgcagctcagtgttgccctgacgtaccgcgatgccgaggccagtgccgaagtaatctttatcggtcactttgtcgcccaccgccgccagtttcgggttatctgtcagccactcagtgaccactgcggtgtcttta

SEQ ID NO: 24287 - DNA, 601 bp, Arabidopsis thaliana
gatccccggctccaaatttagatgcaactctcacaaactcggaccgttctggccaaaacagcttgtattcttcaccctgcaaattttgtttgttcattaaagcctctaaaataacaagtttcaagaatgcagaaacccggaaaaagtttacaaactatatatcacttttctatgcaaagcttcacggacacctccaggatacagaagcacatgagccttttcacgcagtagtttgtagatattgaaatgggagactggaactccacccattatcttatatttgtcaaacatcttcgtgtcgactaatgagtcttggagattcttaaatagcatgggatgtgccaaaccccgcaggtgaatgttcctctctgtcatgagttgaattaccattggagctaactcaaatcccaatatcatgtgatagccaacgtacaaaacaggtccctctgaaggtaatccttcgaggctccttacaactgtgccgtcttctagagttgacagcattacaggagaagtccatccattagcaatctgcactgcggaatatatcattcagtatcccctataactttttacttgatattctgattttgtttgatat

SEQ ID NO: 24288 - DNA, 771 bp, Arabidopsis thaliana
tagatgaaaattaaggatcctaataactgcatttagtcaatagtaacaagtaccattactttgttttgcaagtcgcaacacaagtgcatgtggtgattggtgaacacatagtcaacattgagactctcggtagctacataacgattcttgaaaatgagataaatcagaaaattgatagtaattcacttattcatttataaaaaaaaaatttttggcaacattagtatatagaaatttgtaaattacataagtacccttttataaacgtaatgagacatttgtgtatatatatgttacaaaataagccaacatatccatttgctcgagacatttattctcttaattcttctctctctctctctcttaaaaatgccaaaaatcttgtggaaaagcctccatctttgcttcccgtcaaatctcaccaaatgctattcttcgccgtgtattcctccgtcctccgccgatcccgacggtatcatccaacctaaccgtccctccatcgttcttctcaataacttcaacctcctttaccacaatgacaaccaccaccacccccatcgtgtcattgacttaccttcttcctccaccacaaccactccggccgccacctcctcctcatccacgtcatcatatgaatctgatatctctcctgatgtatccgccgcttttgcttcccgtcgcttcttcttctcttcccctggtcggtccaatgcaatcaccgactcaccagaaccccgggtcaagagaattctctgataattacgatgatgc

SEQ ID NO: 24289 - DNA, 642 bp, Arabidopsis thaliana
ttcctgacgcaggtcgggagatgttggatcaatgtttcatgagcaagcacttggtggaatctccctctggtgaacttttcttggtcaactggtaagtttgtctattaagaggctagctacttttggataaattcaaagtagagattgagctgctttcttctctttatgcgcaggtacgcacaatgcattcacacagaggaaaaagacggagaagtggaaggtctccacagcaaaaccaagcggttcatggtctttagggaagatgagaagagcaaagactttagttacacggaagatattggagatctctgcatcttccttggcgcaagtgaagcgttctgcctcacggcaagcatgtacccggggcttaaacctaactctatctattacattggccatggtcttggttcatacgatctaacctctggtacggtccattccttttaccctcctcatgcaccaatgctcaaccatgttccttactggatcccttctcatctctgagctctagcctctaggctatgggtttgttttacggtctttatgcatctactctctacttactactgttgagtgttcttttgttaactactactttctggatcctactctttatgttaaaccaggtgaccaatattatta

SEQ ID NO: 24290 - DNA, 1020 bp, Arabidopsis thaliana
gttgattccacagagaccctctggtttcccagtgttcctcttcagcctgatgtaacctttttctccccattttggtccccaagaattcttcacaatgatgtaatctgaacccttgcttgatccatacccaaccgcagccacaccgtggtcaagatcaaccccgcaccgcccatcaaacacgcccttcatataccaaatacaaaatgattcaacatcaacaagagcaattaactaacaaccattttctttatttataggtttataatgtacttacgccgctatagaactggaactctctaccagatgcatcaatggcgacactgagaggctgatgagccaatgccttcaagagactcttctcatcattagtaggtacgtcttggtgtccattaatggttactgtttcagattcatcctgttttcaaaacagagataattagaatgggaccacctttcattaacacatcagagaccaagagttgatattagaatgggaccttttgcatctcgcaagttccttcttccatagagtaaggataatcttcttccttgcgtagacctccgttcttaacaatgtactcaaaggcatagtccatgagaccaccgttgcagccattgttgtaggtcgtgtcacagtctatgagttcttgttctgacaatgttgtcaactttcctgtcacaatcttgtttataccttcgacagctgctactgtcgaaaacgcccaacaacttcctgcgaaacaagttttttaaagttaaatggtttagttaagagtcaaaacttccattaacagatcagagaccaagatttgatattaccacaagagccctggttcttaacttccgccacagctcctttctttctccagtcaacagacttaggaacagcttcgacgtccctgtaagcgaactctgcgtaagatctttcttcatcgcgtctcactatatcagtcttgagccctaaatacattttcttgaactcctcatggctcaaatccgcaaactcgttgagcccgagcc

SEQ ID NO: 24291 - DNA, 675 bp, Arabidopsis thaliana
ccatgctcatcaagtcctcttatgaacgtgacaagactcctttcgagctgcaaaaatgcccaaaaatctaaagcgtcagacttgttttcttatcacatacaatctttccagccataatttgcttctttccaaattggattttgttatcatgaatctttgcaaataaatagtggatgatgaatgagatgtgtagtgtgtgtcaaagtcaaaccttggtattgtcccaccgcggcgtggatcagactctgttgcttgtcggagagctcttgcaaaggccttaaaggtcgcttctattatgtgatgcgagtttttaccagcaagctgtcataataaatagaaatgaatcaaatcttatcaagaaaggtttgtcaacagatgaaacattaacgttctgttattgtcctcgtatgctttaagaaagattggaatcctaatacctgtcggatgtgaagagtcataccagaagtattcaccaatgactggaagaagtgttccacaactaaatgggaaaagagtcatttagtgattttaacaaacaaagaaaacactagaaaaaccgaaaaactggatactaaaatactaaatgtgaagaacctgagtgtcgtatgtcctactctctgcgttggaactctaagttgtaccaagatatggtctacagatagatcctgcacattt

SEQ ID NO: 24292 - DNA, 1346 bp, Arabidopsis thaliana
cacaccaaagtagagaagggaatacagttttcaattctatacagtgtactaaatgtcgttactttaagtttgaactgcgtttgtgaataagtgaagtttttttttctgctttgttgtggttcttaatgtcatccctgagttccaattttctacaagtgtgacatgtatatgtcaaactctaaatttgcattgtcgattttctcttaaaaatgatggtagcctatgttaatgggccaaatataggtttgttatgggcctataatggactgtataattatttttgttggtctcaaattgcttaaaaatatagactagttttgaagttatacagtctactctctactaaaaccagcagtgatcaaattgcataaaatgttgttataaaagtttacccaaaaaaaggtatttatcacaaatatattacttagattaaagaaatcatggtaccaagatgtaggaggaagagtaactgcgaagtactaaaattaaaagatgattcaaaattagcagaccaactaactcgcaccattctttccttacaagccttccaaactttaaaccatgtgaacacttgacaacatataacaagaatcacttttttctccttttgtttaaaaaccgactaatttatgagttttcaaaatgaattaaccatagtatttttttataaattggattattatatcccaaactaaacttcatgtgagatttctaagtcattcatgtcttttaaaaaatatcatgtcaagatttatttaacattttataaagttttaaggaaaaaaatcatcatttaatttctttcctccattattctttctcaattatatcgacatttttatttttttatacattcttccaattttccaagtcagtcttagacattaaatccaacactaataaaaggtaaacaagtaaagtaaacaatctttgtcagtattttgctttttagacactcctttctccaaattagccaactaaccaataaagatcaagtgacctcctaatacatacgcaccaccactcacattcacatacctccttgtatatatacacacacataataagaaagagagaaactaaaggagaaaaccttgtggggctctttaccaaagaagaagaagaagcgtgtgtcagagaaagtttgttgaccgatggcagccattatagtggcggctttagcgtgtatcgtggtgatgctacgactgagtgaagcggccgtgtacaaagtcggcgactcagcaggatggacaaccatagccaacgtagactacaagctatgggcttctaccaaaactttccacattggtgatactgtctgtgagttcctgaattttcttacatca

SEQ ID NO: 24293 - DNA, 592 bp, Arabidopsis thaliana
ccctaataacgttcataaataaattattaaattcaaatcttcaaatcacacacaaacccaaacccaaaccctaaccctaacaagtacaaggatccagaaaagaacaatattagacacaaaagcacaaggcaggcccagatactagctagagctcagagaagatgtcgaatggatccagtaagggacaacaagcgagggtttaccaaagcgatcgaacgtgaaggaactgtttgtaccagaagctagatcgtaagaaccaaatctagggccaaggtaatagatggagttaggtttgagccctgggtacaaacttgccgtgacacagaaggcttcactcttgccaaggaagatgcagagatctccaatatcttcagtgtaaccaaagtctttgctcatcccatcttgcctaaagaccatgaaccgcttagttttgctgtggagacattccaaatccccatcttcgtcctctttgtgaatacctgtgtgtactagacagagaacaagtacgcaatactctgactctgctttgattgagtaaagtagcgacaatcttaataaatcgtacacttgatgaagaaagtcacagagggag

SEQ ID NO: 24294 - DNA, 645 bp, Arabidopsis thaliana
ttatagttatactgtcccaattttcatttatcttgtccagttagttcttagtcatcattggtggacaattgttgtatcatgagagttttatcctaggagttctataatatatacaagctattgaacattataggtataaacgaaaaaatatcaaggagctgcagaagatgctacaccggtgcagtgaacagctgcaacaattcagccatgtcaacaagaaagcgctggatcaatatgtgaatttcacagaacagcgagaagaacttcaaaatcggcaagcagagcttgatgcaggagatgaggtaaataataggaggtttcatacactttgccaaattctatgtagaaagtagagcttgactgactcatgatcgtttccgcagaaaattaaagagctgataacagttctggatcagcggaaagacgaatctatagaacgtactttcaaaggggttgcacatcacttcagggatgtattctctgagcttgtgcaagatggatatggtaaccttatcattatgaagaaaaaggcatgtttctgcatccttttcctcaatgaaactttttcctcttttaacatttgtttactttaagtcatcgtgagtttttcattatcaaatggttactaaatttgagagtctattg

SEQ ID NO: 24295 - DNA, 618 bp, Arabidopsis thaliana
ttatataattcctctacaagtcccaacaatactacaatttctcaaataaatgtacctgaccttcaatgttgggatgttgtagtggttgattttatccatggtacatgtctagatccaaagtttctggtttattattcttatctgcaagtaatatatcaactcattcatgtgctcttctttgttcgtgtagttttcatgtgttttgttcttgttctacagacccatttttctggccggttctcatgatggctatgctagctgcaatggtcgctagtcaagcagtcatatttgccacgttctcgattgtcaaacaatgctatgcattgggatgcttcccgcgtgtgaagattgttcacaaaccaagatgggtccttggccagatttacatccctgagatcaattgggttgtcatgatcctcacccttgctgtcaccatttgtttccgagacactcgacacatagcttttgcttttggtaaggacttaaccttccatcaaactcataagttccatcttttatcattaaacaaatcctttgttctccagggctcgcctgcatgactctagcctttgtgactacttggttgatgcctctcatcatcgaacttgtctggaaccg

SEQ ID NO: 24296 - DNA, 893 bp, Arabidopsis thaliana
cagagaactgcagtgagagtttgaaagtacctgaacagcatcaagaaagagacataagaacaccactacaacgatcccaaaaatttatgcttcttgtcaaaatgcaataacatatcataaccatacctccatcccatggtgtgtcatcaggcctacaaatttagaaacaaaaaggtctaagtaagtacagaaatgacaaaagtttcagaaatatttagccagtatctaaaggtacttgttcccattacccaaatatgacagcattccagagcataatgttgttgtcctgtggagcaccactaatacccgcaggtgggtcttgctgcaacctcttgaaatccctcattaacctcttccttgctggcgtcgacatcctcctttctttctaataaacaaaacccaccaaatattcatcaccttttaaggtctcgaacctctatcaatctagaaattactactaacgatttacgtatgctaaagttgctaactttgtactagattcgaatcttcctaacaagtctacgacctatgattagcttagaagaaacatataaggcttgaacctagaaacagcttaagatcgcatcaattcaccaaaatagccacacacaaatgataagatgaaagtaaaatcaacggatccagtaaacaaacatagaagaacagagatcggatgaaaatggtaccgtggaaacagatctcgttgttgaggtaaagatcgcggagagaagaggtcgtcaaacaaacatatgtgttcagcggtgttgacagcggtaatcagagaaagttttccgatcgattcaggtcggcgattctcaatatcaccgtgcgatgagagaaatgggtataaacatcaataatttgggaagagatcgtataagtgatgaatgaat

SEQ ID NO: 24297 - DNA, 1176 bp, Arabidopsis thaliana
aaatagaataataaattgtacccaaaacagacaaagcccttaatcaaactaaaccagaagaaattttgttttatcagtcaaagagacccccggttaagtaaaaagctcacactaccttctctggttccttcacagcctcttcggtctctttggtatctgcttctgctgcaacctctgtttcttttgtcccatgagggctttcaggttcagagcttttagcatccgcatgagattcagcaggatcggaatctctcaagtttccagttacttcagctccactcgcttttggtgagctctctgtgggttcaatgccactagcttttggtgagttctcagtgggttcaacaccactctcatctggtaacttctctgtggtttcatcgccaggtacacctggtgttttcactgcacttttgttatcagtatcatcatcatcatcattatcctctttctcaatttgaacatcaccattggacaatatggtagtctcctctgggttggaagaaggtggtgcggtggactcagaggtctctctccactcaacccaagcaggtgacttttcaggttctggttcactcgggttttcagaaggatgctttgatgtagaatcctctgtttccatatcaacaggtggagaagaggctgcagtggcgttgaattcatcggcttcgcctatgacgacatcatcatcatcttcaccatctccatcagcattgggtgaaggggaagcagctgaggtcattgagcgctcattcgcagctttatcatcatcgaatgcgaaccagtttgaatttgtgaagagagaatcactgcaacgacaccatgttatatttcgtaagttaagggaccacatcaagctcaagcatatgatgcgaatcaacggattaatttctaccaggaaaaaacagttgaaccgattacctctcctggtcatctccaaggcgcaaggaggatatgacgacttctgcagattcatcatcaaagtagacatcctgcaacatagacttcataagaggttttcatatctaccatatcactaaagcttccatattggctgcttataaaaacaggcacaggagccgctgagcgagttctcagaaaggagcaaatgaaagacgttacaaatttgaacctactttccacaaatggaagtcaagctcaattcgtaaatataag

SEQ ID NO: 24298 - DNA, 483 bp, Arabidopsis thaliana
tcccctcaacactagtaggtagcggcgaagatgaggatgaggatgaagttgaggatggaggtcttcttgcacaaaccaaatgcacattgaagtcgcatattgaacaatgataaccaacttgcaatccacttatacacaaactacaacaaaaccgtccacatttcaggttgagcttgagaggatgttgaggatgggaagggtgtttgatctctggtaccgactcgacgcactccttatggaagagggtatcacaacctacctcattgcaaacatagccaccgtaaaaataaccaaaaacactgcatcctttacaagtgtccatacaaatccgatcaaagatgaacaaaggatgctcgtgaactggtaactctaccttttccatcgcggaatgatatccaaatcaacctaatctcttgtgatttgaaggaaaaggtgacttttttttttttttttcttttttttcttaaatggaatgagattttt

SEQ ID NO: 24299 - DNA, 490 bp, Arabidopsis thaliana
aggtctgtcttttactgtattctttttttatatttcattttcttttttaacttttcctttgtagttttgtgcttgacatgcattgttccttttgcaggttacaagcatcaagttcgttggtgacactgatcttgtgttaactgcttcatccgacaaggtaagctaaggttatgtgtacaagctcctttgaggattgcatgattttatggagtagtagtgaagagattaacttctcatttcttaacactctgcagacagtccgcatctggggatgttccgaggatgggaactatacctctagacatacactgaaagatcattctgccgaggtaaggatgtaactgaagaacttctacaggctacagtctcatacagttttacgttttatttatttttggtctgtttaacgtaaaagcaatgatgtggttttcaggtgcgagctgtaactgtccacgcaacgaataaatactttgtgtcagcatcacttgat

SEQ ID NO: 24300 - DNA, 933 bp, Arabidopsis thaliana
aggccatacaggtattcctttgaccaaaaggatgagattgagaagcttgtcactgagatgctgagaagtcaagtgatcagacctagtgtcagccctttttcaagtccagtgttgttggttaagaagaaggatgggggctggacgttttgcgtagattacagggcgctgaatgaagccaccataccagacagatacccaattccggtaatagaagagcttctagatgagctaaagggagccacagttttctccaaattggatttgaaatctggatatcaccaaatcagaatgaagatgagtgacgtggagaaaacagctttcaagactcatcaagggcattatgaattcttggtaatgccctttggattaaccaatgccccctctacctttcatagtgttatgaatgacctctttaggccatacttaaggaagttcgtgttagttttcttcgacgacattcttgtctatagcccggatatggagtctcacctgaaacatttagagatagttctgcaactgcttaaactccaccgactctacgcaaacttgaagaaatgctcttttggcagtacacagatcgcatacttaggccatataatctcagctgaaggtgtctctgctgatcctgaaaaggtggaggcaatgttgtgttggccattgcctaaatcagtcacagagttgcgtggatttctaggccttacaggctactatcgtcggtttgtcaagaactacgggcagatagcaaggccactaacggatcagcttaagaagagcgggttccaatggaatgaggcagccacaaaagcgtttcaggcactgaaggaagcagtcacgaatctgccagtattggtcttacctgactttaatcaagagtttacagtggagacggacgcttctggggttggaataggggctgtgttgtccaaaacagaa

SEQ ID NO: 24301 - DNA, 957 bp, Arabidopsis thaliana
tgaggaagaggatagcaattggtgcagcgagaggtttgttgtatctacatgagcaatgtgatcccaagatcattcatagagatgtaaaggcagctaatattctcttagacgagtgctttgaagctgttgttggtgactttggactcgcaaagctccttaaccatgcggattctcatgtcacaactgcggtccgtggtacggttggccacattgcacctgaatatctctccactggtcagtcttctgagaaaaccgatgtgtttgggttcggtatactattgctcgagctcataaccggactgagagctcttgagtttggtaaaaccgttagccagaaaggagctatgcttgaatgggtaagaaatgacactcagaagtacactttcttgattacttcataagatcaaccaaattaacattttctccggatgctgttgtaacattggtttaggtgaggaaattacatgaagagatgaaagtagaggaactattggatcgagaactcggaactaactacgataagattgaagttggagagatgttgcaagtggctttgctatgcacacaatatctgccagctcatcgtcctaaaatgtctgaagttgttttgatgcttgaaggcgatggattagccgagagatgggctgcttcgcataaccattcacatttctaccatgccaatatctctttcaagacaatctcttctctgtctactacttctgtctcaaggcttgacgcacattgcaatgatccaacttatcaaatgtttggatcttcggctttcgatgatgacgatgatcatcagcctttagattcctttgccatggaactatccggtccaagataacacaatgaaagaaagatatcatttttacgatggatcaaacaatccaatgaaaaaagctctacccttttataatatagacatgtatatggtggtgaacattgatgaaaaat

SEQ ID NO: 24302 - DNA, 833 bp, Arabidopsis thaliana columbia
  unsure (1)..(833): unsure at all n locations
tatcagcatattctgtttctcaaatgcattcactcttcttttaaagctatgagattcaatcatcctcctattgagcatggtgtggagatgtcccacagttggtcccaactcactcctgaacatcttctttcagtgcgtaattcttatcttgtttcgtcggagatccttgatagagaccgaaacagaaagagactttcagaagttgcaagggcagcatcttgccagcccgtgtttgtggactcgttccccaagctgaaagtctggtataggcagcaccaaagatgcatagcagccacattatctggacttacacatggatctcccgttcatcagacagttgaagcacttctcaacatgacgttcggaaaggtcagaggcagtcagactttaaatccagtaaattcgggcacaagcagttcatcaggagctgcaagtgaagatagcaatattagacctgagtttcctgcttgggatatcctcaaagccgttccatatgttgtcgatgctgctttaaccgcttgtactcatggaaggctttcgcctcgtcagttagctacaggtttgttttgttttgctggatcagattcctaattgtgttgtcatgtgcgataacatccgtctatatgacctttggcaactctgaatgccaatgagagatgtttgactgtgttgatcagttgttatatcagatgcatttcttacagtaaagtgaatttatttacagaataacaagtgtttttctttcagggctgaaagacttagcagatttcncccggcatcattagcaacgatagtaagctatttctcagctgaggtgagtagaggtgtttgga

SEQ ID NO: 24303 - DNA, 1054 bp, Arabidopsis thaliana
tatctttctcagtacagctaagaaatgacagtaacaactaacaaacaactcattatctcttttaatttgcctcattaacaagacattagacatgaaattatttttagaatggtttttcaccaatgtaattaccaggaggatcatagttgcatgtaataaaagtaccaccactgttacacacaactttagcacatcccaaacgaactgtgtttttccaaacaacttgcgtgtaatgtagacaggtgccaccgtttggatcattacacgtgttactatcgtaatcgtagtactgtttctcgttgatccacatttccgcagcatcttcagccgacatttctccactactcatcgctatgttctctccaaatggtccattcgaatggactaatgcacaatcattgatcctctggtttgcatagcttgccgcatatgcagcgacctcatcgtcccaaaccaatgggtcgagcccaacctcgtttcggcgtttcgtttacccttaagggtgttgcgccagataccggtttcaacacttccattgtgaatattcctagatggagccctgatggaagaactctcgctgtgcctggtttgagaaacgatgttgtgatgtatgatagattcactggggagaagctttttgccttgagaggtgatcatctcgaggctatatgttatttaacgtgggctcctaatggcaagtatatagctacatctggtcttgataaacaagtgcttctttgggatgttgataagaaacaagacatagataggcataaatttgaggagaggatatgttgtatgtcgtggaaaccgaatggtaatgcattgtcggttatcgatgccaagggaagatatggagtttgggaatctttggttccatcatctatgctatctcctacagttggtgttccagatatagtaccaaagaagaggaatgagattcttgattttgatgatgaagttgaggaagaaatttatcgtgcatctgaaagtttagatgatgctatgggagatagtgatgatggagaatctcatcatactagtaggaaagatt

SEQ ID NO: 24304 - DNA, 788 bp, Arabidopsis thaliana
ccgccgctccaatcttcgaaagagccacttgagaccattgcgtctatgattttggttgcgatttggttttgctccgtcgtgagaaatggaagtgaagtggaagatgtaatggtgatgatagcgatgatgaggaggaagaggaggaggtgcttggtggttgccatggaagagaatatgaggtatgaaaattgttgtagtgttggagggttcttcttttttgtttatataaaagaataatctgttaggtgaatcatgtaaattagttttgtatttggttgtagttggagaatgcaaagagctataagtattttcaagtgcatttaacatgattcatggctgattttgaatgatactgatagtaacggtaatgatgggatgataatacactgatagttttatgaagatacaaatatccatctttacctcgcccgaggaaccatttcagtatcgaggttcatcgtaaccattctcacagggtccttatggtcacttcgattgttcactctcccaaagatactctgtttcagctccataacgacttggctcattgtcggtctttgttctgaactctcagacgcacaagccaatgctagttcagtgatcttccaagccgagccaacctcaaatctatctcccagacgttgatccacaataccttttatgtctccattcgccaacattgaaccaacctgatcacttagatgcacactctctgttcttgaatgccaaattgccggttttcctgttattacttcaagaagaacaccccgaagctgtaaacatcactc

SEQ ID NO: 24305 - DNA, 632 bp, Arabidopsis thaliana
ctaaagccgagtagcagatccacataaacagcaggccaaacagtgaaaacagcgtggcggcgaagatatagccaagttgctgattaccttcgataagattcataactggcacgaatcccaccgtgcacagcagcaggcccagcgtacgccgccctgacgccatgccgccagtgaggcgcgttcgttggggtttttggtgatagcgggaaccattgcgccgtaggagcagttcatcatgctgaaaaacagtccgtaaagcataaacagaatagtggccatcaccgttttaccggtgacatcaaacggtgtgccgacaaagttggcgatcgccagtaaggtgaccgggaatgacgcatacagaataaaaggacggaacttaccttttggaccgatcttgcgtcgggaatccaacataatgccggtacccatatcggtaaacgcagtaaagaattttgaaatcaaaaagataatgccgccataggtgcctggcagccccagaacgtcggtataaaacttcaaaagataaagcgtaccgatatccagcaggatgttagaggccaggtcgccaataccgtaagagagtttctctttaaagggcaggcgtaaagttgctggatcttccgttgtgatgt

SEQ ID NO: 24306 - DNA, 901 bp, Arabidopsis thaliana
tgtccgtttaactccgttccaaccaccgtcgtgttcttatgtccctgataaaacgacgtcatattcgcagcagaaaaacgctgatcaccgtagtaacctctcacctctaactgatcatagtgtatcccaagacgttgattaggattacgtatcgaaaagttcaacgagatattgtaatgaaggttatggcttcttggatcgaactcaaatcgcgttaaatcagcttccgtaacttggaatttcacgacgtttggtcggaggataaaccagaggattaaagcaacgactccaaggcaaacgagtacaccgatgaggatgttgcagatgatgtttacgagacaacctccgcaacaaaggagacagctggagaaacaaccacagataccgcaacctacgtcggagccgcgtcgcgccatgactgtagtaagttttcaccggtggcttgattggtggaccgtaactggcgccgtttaatccgttcgccatggcttcgagaatgtcgtagagagaaggaggagagatgtagattggcacggcaacgaattatgtgaagaggtagagtccgatatatagagtagatatatacaaataatatgtgtgataatgcaataggattttaacagtgtaaacaattttggaaaacaaaaaaagcttaatgcaataggattttaacagtgtaaacaattttggaagatttttatatatagttgtttgttatacaaaatcgaattgtttacaaatgtagaaattattcgattggaactttatgatattggactattgggccgaacatgaatacatgtatacccaaacatatttttatcgtttaccaaaaacccattaaatgatatttacgtgattggtggtattgtcggggggatatggctgtgactctgagatt

SEQ ID NO: 24307 - DNA, 521 bp, Arabidopsis thaliana columbia
caacacctcctttttacctctgcccacaagaaatgtaaaaatatatattgagtaatgagtttatgtatgtgttgtggagaaggaagaattagaagaaagaatataagatgtagcaaacctgcaaagccaacagagtgcaccagctttaaactgaccattgaaatgatcaatcaaattcacaccacctcctttgcattgagaacatgccacacaacctttgaaaaaacatctttatcaaattactaaccaattcaggagtagaaaactaagagaattataaaacaggtaagaacttaccttccccttcacaatttgcacaaactaaactgtttggtttagtgccctgaggattattgtttgcggcctattgataccacagaatgagattttgcattaacgaaatggtcaatgaagtaagcagattttatagagaagagaagagtttggggaaattctaccctaacttcaatactttgggatcttgaagtctaagcagttctccttctgtccaaggagaggtg

SEQ ID NO: 24308 - DNA, 741 bp, Arabidopsis thaliana
aggattgtttacttgaacgaattgtgtacattcgagagaatgaagctttgatagccatcaacgccaagcttctgacgacgagaaggagtatcgtagagatttagattgaaatcgttagttccggagcttacaatcaccagagcctcgctgactatcgaggccgctttctcgtccccgacgatctggctcaacctctccacgtaacttctgagcatatccgcctgtttatcaacggatagagttgaagttgctcgatctgtgaggttgtcgtaaccggaaccagccgaagcaaagcacactccggtgatgatatcggaatcagacaagtgagggtctaggaaaggaggaacggtgtctttgattcccataagagatgctatgaagtccggaataagtttaccgttagagaatcttccggtagcgttgtggccggggaaattgcagccgtaaggagggaaattagcccggatgtaggttttgatgtagttgttgttgccggtatcgattgttgaatccccgaatacaagaatagccgggaacattgatacgttaacgttggtcacgttaatcacatatgcatggcatgtcgtcgagaattgcattgtcgttatgatcatgaatataattacatggatcaacattttgtctcttcttctctcttttctttctccctttataggacgactcggttgattattggagtctactagtactatatgtaatgtatgtctcatataaaat

SEQ ID NO: 24309 - DNA, 630 bp, Arabidopsis thaliana
acaccacacaaaaacaaaaataaaataagtaatcatagtatcccataaatcagtaaagataaataaaatccagaaaatactgggcctatcattttccttcaccaactctataaatgaagagataatcctacagttacacctcaaaccaactccatctcacttctcaagtcttataatttattcatttctctcttcttcatcgatcttcggcttttagaaaacctaatcagaaatggcaacggcgtcgtttaacatgcagtcagtgttcgctgctccttccggtgtattgactacacgcaacatcagaaacacaaaccaactcttcttcaagaggattgctccggtaggagtcagatgcatggctcaggtatatatacactaacctcatagtccttccacttccctacgttacttatttgacttttaatcctgaccgttccttacattgactatttttttagggcgatcctatcaaggaagatccttctgtgtcctcgacctcgacttcggccactccaccacaaatgccacagtctcctcctccaccaagttagcaagcctaaggtatgatctaatgatcaaagtcattaatatatacacttagctaaaaaaatgaagctaatgaataat

SEQ ID NO: 24310 - DNA, 735 bp, Arabidopsis thaliana
gcactgggatttgactgatcaactgatcttaggttgaactttctcatcgggagtgttgttaagtgactagagagatcgtaataagtccagaaggcagaagtatctttcatagtgagtccattaagagtaagaaagcgcataacaaattaattcatcttatgcatagataagacaactcccaagtaaaaactacaagaaacatctatatgccaagtgccaacatactcacaggtatgcgctcgagtggagatatctttatgccaatctactaacctatatgcatgagtgacgtgttgaagttagtcgacgtagatctgaatatccaatgacgtgttgttttaaaaaatataacttttttatcggaggaatgcaatccaagcatatataatcacgtgttcccatatttataagacattggtggtgcaatatcaattgtcactacagttcataaatcataataattttaggattgattttcctcaccaatctaaaagaaagttagcttttgccactttgcaaaaagaagtaaaaagaaaacgtttgtgtccttcattttgtacaaaagaaaggaaaaacaactccaacgttgatggcgacttcctcctcaaacgtagtggttcaccagcagcagccgccgccgcaacataaagtgttcataaatttccgaggagctgagctgcgacacaagttcatcagtcatctactgaaagccttggagagggaaagaatcaacgt

SEQ ID NO: 24311 - DNA, 721 bp, Arabidopsis thaliana columbia
cccttctgtctatggtgaatatgtcagagctttcaaagcttgcagtcgtcgagcatgaactgaagaaaaacatatgataaggttagaaattcatctccagtcacattacagatggaaagttggaaatctatcttagatgttggttctcacttccataacccccaaattatttaaatccataccaaaactgacaccacatctaaacataactaccttttgacgtcactcctctcagcatttgggtctatcaaaagaaaattataaaggtactgggatatttcttaaaaaacattaacaactaataccattataaagataaataagattaagacagtccaaggcagaaatgtataaaataaaacactaaagcctgaaaaatgcgagtgaaactcacattcaaattcagaatttgtagcttcgtttgtaagttgattcactatccgaggaacaacatcagctcttgtgactcctccaccagcatcaatatctgctagagcatcccagttaggagtggggataccaccccctggagtcatgcccgtatcggacaaaattctagctaggtaataataaacatatcgtagcacattcctgtcttcacattgctgattaagctgtatcaatcacaagagaaaaagaatgctaaaaacctgatgcctctctttgacggatattgtttttgaaaatgcgaatttgtgaagatccatgataatttaatggg

SEQ ID NO: 24312 - DNA, 337 bp, Arabidopsis thaliana columbia
gatgaagtaacaagggaaagcaaaagaagaagagtcttctttattagaaaggaatatatacattcctattctaatattcttgtatggtctgaccttgatctttatatttccggtaaagttccgtcagctgggtgtaattggactccgtgaatccgctgttccccaaattgtttgttaacaaaaaatttagaatcaagaaataataattaactagagagaagatgatcgagaggatctgacggaccatttagacgcgacgttgactacgagcagtacattcgcttgaaacactgcttaggtcaacctccttgccggagctagcctaatttccgataga

SEQ ID NO: 24313 - DNA, 993 bp, Arabidopsis thaliana
aaaactcctttgttaaagtgttacatacatcgatcgacttgttagttcaaagaatcagtttaactccactgagccatcatgggtcgatctcaagaacagggacagggacagggtccggttcacagcattcggctatctaccgtaggtgcgacccggccgacagagacgggtacgacccacgaaccaaccggtttagacctagccatgaagctccactacctcaaggcggcatacatttactcagccgagacagcacgtgacttaaccgtgagacacctgaaggaggccatgttcatgttgttcgaccagatcgcttggaccacaggcaggttctcaaggagagactcgggccgtccgtacatcaagtgcaacgactgcggcacacgtttcgtggaaggtcaatgcaatctcactgtggaggagtggctcagtaaaccggaccggtcagttgatgagtttctggtttatcatcatcctattggaccggaattgacgttctctcctttgatctacgttcaggtataatctgactacaccaattttatcttcttaatttagtttgctatattccttatatagttcacacatgcataatattgctcactgtctaaatatcatacacaaatttaatattggtactgagacaaatttgaatatacaaaagttctaaaaatggttatatatacatgatatggtattggtatgcattattcaatcttgaaccctgtaccaaaaagagaattattcaatctttaatatatatttgacagaaaaaaggacacaccatgttgatggggtctgatttatagagtcggaaaaaaggcaaattattagctaaactaggttagaaatctatattgggtttcacttgtctttcgaaccatatgccctaatcaagaaagacaaagaacatattaaacatttaatgcatgttcagtcacatcaaaatttaatacacgaaagatcctgttcgtacgattaacttggtaagca

SEQ ID NO: 24314 - DNA, 1800 bp, Arabidopsis thaliana
ctcgtcgctcttgcaggaacaagaaacaaaaagaagtcgaggcgtcgtcgtcacctgttgagttagagagtgttagtgaatgggaggatgtgaggtgtgtgatttgtatggagcctcctcacaatgctgtcctcttgcaatgctcttctttctccaaaggatgtcgtgcttacatgtgtgatacaagcgctcgtcactccaattgtttcaagcagtaccgcagaagcaacagctcaagccgttgtagtggcaagactctacattgtccctactgcagaggagaggttcaggggactatgaagtcgacttgtgctcggagattcatgaatgctagaccgaggtgttgtactgttgacaagtgcgatttctcagggacctatgcgcagctgaaaaatcacttgaaaactgagcatcctggttttacaccgccaaagttagacccttgggagcaacacatgtgggagcagttggagagagaggcggagtacattgaaatgctcaacgctcgtcagagatgggatgcagaacagagattgttggcgacttctctccatcagcttccatatcgtcatcccatgattgatctcaactttgatgcgttggtgcataatctgtttcttggtgcgtccatggagagccgtgcaagcaccgacaattacccggctcacataccccgtctggagttccatgcccccatgtatcccagatggacgccatgaagattctgagtgccagagtctatgaggaattcttccaaaagttttgatgtctctttgatttttatcataatgtaatgttcttgtagcgacatcagttcttgttctaggcataaatttaatattgtttgtatgttagcttctgttagtgaagtcttcatagctaggatcatcttttgcctattcaaaaatctctgcttaaatcaaattattcacattcttcgtactttttatggttgcctgcaaactgtttaatttctttgctccattttgtattcagatgttagaaactcatatatcaaaatctcaaaatttgtttaaccgaaaaaggaagatgaaaatttccggtgatacataatgcagaaaacataatcaatgattgtttggaacagaacacaagtagcgaagcgtgtactcattggaagaacacatatctgccagatcctgatgggctctggtgatcgccttctgcaacgatctcagtgcaggcaatagagttctgtagttccgctgaatggagcttccgtgagccttgcagatttcctgcacataaaaagacaacacaaagtttgattaagttgagagcatttgagcagagatttatcaaaaaagagaagaaaacgagacattacctgacaccagtgaagtatgaactccagatgaggacagttctcaagcagatccaccaaagcttccataagcctttctaagtatttctggcggacagagatggcaacagcttttatgtctgcaggggctacagcgaagatgcattttttgataaggctatcttcgttcaaacgcatacttagagcaagtgctctgctaacttcatcctcttctatggcagcctcaacagcctacacaaacaacaccttagctttacatttcaaaaccaataatcagaactataaccaccatcagcgatttacaaaaggctcacctctggagtaacatctatatctagatcggtcggatcaaagatgaaggtatcgtcaattgaaaagatgaggactccttctgttgttgcagcagaaagctccttccagttggggcaatgctgaggctttttgtccggataatg

SEQ ID NO: 24315 - DNA, 915 bp, Arabidopsis thaliana columbia
aataccaagtctcacacgcaaacactcctctctctggtcatctaaaagactagagtcatcgtactctacaaactgaaatgagcgattatactgacactctaacacaatgttgctgcactctgtatccatctctatcgtgcgtcgtggtggccatgcaattctctattatccacaatgtttcgtccctaaatcagaccaattcgtatctgcaacacatatgcatcaacagtgaacggaaaatacaaggcaaagaattcatacgagagcagactcaatgatcatctcgacagtatgtctaacattctagactacggtatcatccacggtgttggtggtgcggattctagtacctactacatcaaggcccaatgtcggggagatgcctccgaatccaagtgccgctcttgcctctttaccgccttctctggggtaacgtcattacaatattatcggttagctgtcccatatacttacatatatatatatataaatgcatgcatacattagttttagttatatcttagcatttcttaggaaatatgtcccaacatatttatatatattgtaaatatgtgacagattcttaggagatgtccgaacaacagagggagaataatatggtacgacaactgttttctctacatttccgagatatatacctacgagaagattgatttcaagcactatttgtatttgcacaatgccaaagatgtgagcggcaataaaaagttgttcaacaagaacacaaaggctctcctagataagctcaaggagaaagcaattcgtaaagaacaagagccttacacaagagactacatgtatgcagcgggggaggaaagtctcgggacgacgaaattgtatgggatgatgcagtgtcacaagacttatcagttaaaattgcagtgtgtgtttgga

SEQ ID NO: 24316 - DNA, 568 bp, Arabidopsis thaliana
gtcttttcaatataaaaattaataatttgacttgatatcaatcggaaattacaagagagtatgggaagtcgtggtaccggagagagtgcggctcttcctatggcttggaatgcagcaagttctgatgacgaatgctgagaggaggaggaggcatctaagtgattcggacatttgccaaatctgtaaaggagctgaaaaaacaatcatacatattcttcgtgattgtcctgctatggaaggcatttggatccgcttagttcctgcgggtaagcgccgagagttctttacacaatcgttattggagtggttgtttgctaatctgggtgataggcggaagacttgtgagagtacttggtcaactttatttgctttgtctatttggtgggcctggaaatggcggtgtggcaacatttttggtgttcaagacaaatgtcgagatcgggtgcgtttcttaaaggatctggctagggagacgtccatggctcatgtgatagtcaggacactgagtgggggtcatggagaacgggtggaaagactgatcgcgtggtcgaaacccgaggaaggttgg

SEQ ID NO: 24317 - DNA, 543 bp, Arabidopsis thaliana
gccagtgtgctctaaagcgcagtattcaaagctgacggtggtgacaaaggcaaaaccgaacagtttatgacccagttcctgaaaaacgttgaagtgttcgatactggcggtcgtggcgcgtccaccacttttgccgagcgcggcctgggcgatgtgctgattagcttcgaatcggaagtgaacaacatccgtaaacagtatgaagcgcagggctttgaagtggtgattccgaaaaccaacattctggcggaattcccggtggcgtgggttgataaaaacgtgcaggccaacggtacggaaaaagccgccaaagcctatctgaactggctctatagcccgcaggcgcaaaccatcatcaccgactattactaccgcgtgaataacccggaggtgatggacaaactgaaagacaaattcccgcagaccgagctgttccgcgtggaagacaaatttggctcctggccggaagtgatgaaaaccacttcaccagcggcggcgagttagacaagctgttagcggcggggcgtaactgatgtttgctgt

SEQ ID NO: 24318 - DNA, 581 bp, Arabidopsis thaliana columbia
tgtcctttacaacaacaccatcagaatcaaaagtgaagcaacaaggatagtctttggtgagctttgacacagataacagtgatttagcaatatcagggcaaactaaaacatcctttaaaggaagcatacctgacgtggatggaagttttgcagagccaatgtgagtgattggtaagaagttaccatcactagccattacagtatctgttccatagtagggctgagattgactgagacgttgagcattgttggtaatgtgagctgttgctcctgtatccggaaaccagccggcatcatctgttacctcactaatgtgtaaagcattgaacgcagctgctgcaacatcggactcctcttggtaactgtcatcgaaacggtgccaacattgcagagcaggatgacctcttttaccacaaatttgacacatgggtttctcagtgttgggatctccagaagatgaaccagagaactgttgatgaaaaccgcgtcctcttgtggagaagtttccactacacggcctctgtttcttcctcccttccagaggactgggcacgaccacggttagaagactgaaagtgttg

SEQ ID NO: 24319 - DNA, 528 bp, Arabidopsis thaliana columbia
taagagaacataggcatgatgtatcagtctcatccttgctcttcagaacaaaagcatctttgcatcgcaacgaacatatagtacaaaacggtcgagatgtatggttattggaaaccacttggaactcacgactacataaaagaaaactgtgccctggcctcatgtaaggtgatttaccgagtacgcagtcgatatgaagagtcgaacaacatttgtcacatgagtaaaaccacttccttggatcggttggtttttcgcatatctcacaccaataattaccgtagcgatatccactgtatcgtagatagagaggatgtttgtcgttcttgttgaagacctcttttggtaaagtagcacatttgaagcacaaaaagaaatcaagtttaacacaactcagtgagccgtacaccatttggtcacacgccgagcactcccgaggaaaaagtgagaggataaataaggaatgcaaatgactatcatggttaaactcgtctgagattgtacacaacgaacatccaactttacatt

SEQ ID NO: 24320 - DNA, 583 bp, Arabidopsis thaliana columbia
ctcggatccaacccacgaaaaacccggacccgaattcctgaaatggatcaaacccgcatcacgaagcagtccaagaattcaaacactcatcaaacaactctccgtctgggaacgtgccatcatcggtgcaggagccggtggactcgccggagctttcacatacgttactcttctcccacttgacgcaatcaaaaccaagcttcaaaccaaaggcgcttctcaggtttatagtaacacatttgatgctatagtgaaaacctttcaagctaaaggtatattaggtttctatagtggtgtctccgccgtgattgttggctctacgttttcctccgccgtgtatttcggtacttgtgagtttggtaagtctctgctctctaagttccctgattttccgacggttttaatcccgcctactgctggtgctatgggaaacataatctcttcagctataatggttcctaaagagctcattacacagagaatgcaagctggagctagtgggagatcttacaagtttacttaagatacttgagaaagatggaacttggggctttacgcggttattcggtacattgttgaggaa

SEQ ID NO: 24321 - DNA, 587 bp, Arabidopsis thaliana columbia
cagtcgactctaccttcgtggccatggcttcctctcatcaacaaaaccttaaaacaatatcttccaaagcttccttcatcgttaacaaacctaaagatgtctacgaacccgagccaccaccgagaagcttctcctcctccccctcctcctcctcctactcttccttctcctctacaagccatgctatagaaaatccaccagagatagagtctatagagaatgtgattaaaggactaaaatcatcgaagagactcatctttgaacggagaggaacatcgaactctatactcgaagaagctaccaagagagacgatcatgaagaagaagaggacggtttaatgctcttgtccttggagtcaaacgatccttacactgatttcaagaactcaatggaaaagatggttgaagtacacgtgcttcatcatgactggataagcctggagaaacttctcttttggttcttgaaagtcaacgtcaaggcaagccatagatacatcttcgccgcctttgtcgatttggtcttaaacttagcagtagggccttctaaagatgttgctggagaacctaattccgacgtcgtcgtggag

SEQ ID NO: 24322 - DNA, 497 bp, Arabidopsis thaliana
tgcaatttccttatttcctccgcaccacgcagaatgattacttccaaatgcatgcgatcgcagattttctatcatattccggatggagacaagtcattgcgatattcgttgatgatgagtgtggcaggaacgggatatctgtccttggcgatgtattagccaagaaacgctcgaggatctcttacaaggctgcaattactcctggtgcagattctagctccatcagagacttgttggtttctgttaatctgatggaatctcgggtttttgttgtccatgtgaatcctgactctggtttaaacgttttttctgtggctaaatctcttggaatgatggcaagtggttatgtttggatcgcaacagactggcttcctacagctatggattccatggagcacgtggattcagacacgatggatctcttgcaaggagtggttgcttttcgccactacacaatcgagagtagtgtcaaagacagtttatggcgagatggaaga

SEQ ID NO: 24323 - DNA, 532 bp, Arabidopsis thaliana
gaaactcgtcttcttcttcttcttcttctttgcggccattaagacagaggccaagctctgtgaatgttggagctctgtttacttatgattcttttatcggaagagcggctaaacccgcggttaaagcagctatggatgatgttaatgctgaccaaagtgttcttaagggcatcaagcttaatatcatctttcaagactcaaattgcagtggatttatcggcaccatgggaggtatatatactgcttctccttcttcttctctcttactactgtggccaactttttaactcagaactagtttgtgaaaatgcccccaaagaatgagtgatgattatgtttcatcttatggtgtagctttgcagctgatggaaaacaaagtggttgcagccattggtccacaatcttcagggattgctcacatgatctcctatgtagctaatgagcttcatgtacctctcttgtcatttggagcaacggatccgactctctcctctctgcaatttccttatttcctccgcaccacgcagaatga

SEQ ID NO: 24324 - DNA, 788 bp, Arabidopsis thaliana columbia
gggtaccgagcgcatagctccggcgtttgaacaagccaccgtggatttcagagaagaggaaggagaggaagagagtttatggggttgggattgagggaattgtaactcgggtttggagtttccaccgactgagttcgaattcacgccgccgccggagaatggagagtgtgagtgaggagggggtggtgatgagagcattctaacgacggcgagggacggcggaaatctccagtggtaaaaccgtagcattggggacccaattcaagcaaagtctctgggaattcaaccaaaccggactaaaccaaaacgtaggtgtttcccgtacgagaccgattcatcatcttagccattctttttcgttttaaaaggttttcagttttcaaattttattgtttttttctttattcattttaaaatttaaactaaagagaattatatacatatgatttttaatttatgcaatatcaaatatgttacgtaagttaataaattttaatcgattaatttaaaaaagtaataatatgagatgcatataaataaaccgcaaaaataacatacaagccacaattcgatcttaattaattaagcatatatactaaaaaattgtagcaatatgagatataaatatacaaaccgcaaaaacaataaacaagacaggggagatatatatatatgtagattattaataaaataaaaagtaaatgaaataattagtatttagttataaagtagatatatattgagtcaataaatttagtgtgaacaaaaactttaatatataaattaat

SEQ ID NO: 24325 - DNA, 1550 bp, Arabidopsis thaliana
tgcctcgcctttcacccttaccagatgttgttagccgcagggctgctggctccttcgtctccttatacacccaccacaacacacaattaccaagatagatcatgacaactagtaagttaatcaaatgcaaagtgaatatggagttggggtaaaattaggtgttatgtatagaattgattaactagcctccgatgagaagatccaagcaaaactaattgaggaggctttgccaaatagaatttacgcatgtaaatgctttgtaaatagtagtcattctgtgtcaacttcaactatttattccttatcaaatatattatgtttccaaagatttttgcctcactttgaaagtcttattagttatctttgtcaatttctaatagaatttgaatgtcttttggaagtattatatcctaattacaacatagttatttgctactcctaacgcccccatctgtgttccggaaaacgttaagatcttcaaacaatttgtatggaggaacatatggcctctacggctgcctgtccactgtagccgcagtagcagcaccggatgtgcccgtggctctagcaggaaatgagtttgagacttgcaagtttctctcaaagaccatattctcattgcctccttggctccagaatgttgtgtcattactgtttacttggccaccgctccattgtggctgaggataaccgtatgaatacggttgttgctgctgcagaggccatggctgaaactgaggtcctgatggagcaaactgagtcatttttgggacttgtggttcttcttgggactgtgcccaggggacaacgtagctgttcataagaatattatcatcagcaaaaaacgatgggtgctgcgtctgcggttgcgtttgtggggagggcagagcagttgttgacagagttaggctgagaagttcaataatatcctgctctgacttggtggttgttgttgttgttgtgtcgaacaaagctagatctttgcactgtgtcttggcttctgcttctgctgttttttcattgtcgttgcctagaagcaatgtttcttcttcttcatcgctgtgtagggcatttaatagagcatgcctgcaaattcgagaatgtcgtctataaactagtttgtgactggcaaggtactagtgtgtttgagttagtgagtgaatggttaaccttttggctagctgtataaagtcatctttaacatcctccacttcatctgtttcactttcactgctcgatgatgatgaagaagactcagagtcagcagactcaagagcagcagcaccacaagtcttgagggaagagcttgtctctcttggctctggggcctgcaacaacaaaggaagagagacgccagaggcaatagcgtcgtgtctagcgagcactacctgcaaagagtcattcagctcgagaccacgtgccagaacatcctcgtccctgcaggcaagaagaaggcagaacagatgtcttattggtaagaagaacaagtaaagctgaagaagaagaagatgtagtagagaaaggtggagaagacagacgcagttgtagtg

SEQ ID NO: 24326 - DNA, 567 bp, Arabidopsis thaliana columbia
gaggttccctcgaatctgacacttcttcaaactcctatgaatcatttttaaaccagtaatttttaaataaattgtgttgacttaagttacttttcgtctttttctattaaaaatcaaaccttgtatataaatcgctaatttctgttgactttacaatgaataaaactgaagcaatatatttgtcgttaatctaaacagtaatttaggatgatttaagttaaaatatttctatcactaatttacgacgaatgaacgttgtattttatattcctcctaaatgccttgtaaaatggacataagtttacgaaaacattttgtcgtaaaatgttgatggttaatctatttttttgaagtgaaattaactttctaatgttacctagattagttttttaaatctaaatattgattaattatcttaaataactacatctaatacagcgacatggtagaaaggagtatgcttttctcatgaaacactgaaatactccttttgtgtatggctggcggttcatgataggcttgctacaggcgctaagatactaagatggaacagggacgcaacagggg

SEQ ID NO: 24327 - DNA, 476 bp, Arabidopsis thaliana columbia
tacaattatattttaacaaggaataatgtcaagaacaaaagaatcagttcacaaaattgaacgtcacatagcagacataaatttacaagacaggcactaaatatagacatgtatcaaaaggaggtaccttgtccagataaagtccaagtgcgcagtaaagaatagagtcgagcaacatcattaagaggcagacaaataagcttactccagaagatgcctgcatgaagattgaccagaacaaaagttaagaatacaaggagaatcaaccttggcctgtagccacttacataactaccatacccgccatatattgctccaacgaagtccaacatgtgcacgctcataatcagcaaagttgattgacccaagagctaatgcagtatgcgaaacaatagaagccactaccttcaataccctacaagtcagacaattaattttacattaatgtattctagaccaaaatggttgtgccacag

SEQ ID NO: 24328 - DNA, 1060 bp, Arabidopsis thaliana
gagtatctacataactacgcagtgccaccgattattcatagagatattaagtcgtctaacatcttgcttgactctaattgggtcgctagagtttcggatttcgggttatcattaatgggtccggtgctagggaaagatcataatccttatcaacgtccaacgaaagctgcggggacggtcggatatattgatccagagtattatagtcttaatgttttaacggataagagcgatgtgtatggactaggagtggtgttgttagaattgttgaccgggaaaagagcgatatttaggaacaatggtgatgtggaggaggaggaagggtgtgttccggtgcatttggtggattactcggttccggcgataacggctgatgagttgagtacaattttggatccgagagttggatcaccggagctaggtgaaggagatgcggtggagctggtggcttatacggctatgcattgtgtgaatgcggaagggagaaacaggccgacaatgacggatatagtagggaatttggagagagcattggatttgtgtggggatagtcatgggagtatctctagtggcatttgttctattgtctctgattgagagattaaattcaaacaaattgagtctcttctctttttatttttacataggaattttttttgaagatttaattgttctcttaaatatttctgcttttttagatggtttgttttttctttgtttcatttgtattttgtaaatagtttagcgtagctgcgtaggagaagttgaatattcaatagtcgtggtctaaccttttttggttgggaaatgtataatttggacagcggagagcgaatgattaaagttggaatttttggtttattgttttgtatgagaattatgatgtcgttcttttggtcaaaacgtattctttaatttatgtgtagataataatggctctgtcgtggatttttgtattaggaaaagttttaataaaaatccaaactaattttaatttagacgtttaatatctaatatttttttattagaataaaaatactttatctaattatttataatt

SEQ ID NO: 24329 - DNA, 339 bp, Arabidopsis thaliana columbia
gagctctaagcaaagtcttcgagtgtgttaccttccgaccaagtacttttcagttggcaagattatgcgagcattcacacagtcatagatccactgtggttgcacatataccctagaaaggtacaaatggccagcgcttggcttatcgatgatctacagaagtataatgtatgtacctgagactatatatctagacatgatcgtaatattactaatcaagctacatagcttacatgatgtgtaatactctcatcaccctccatgaaaggtgcaccttctacttgacatgacatcatcgcatcaaaagcagtaatctcgaattgcagggactctcttgga

SEQ ID NO: 24330 - DNA, 599 bp, Arabidopsis thaliana columbia
tatgtgactaaagtaactataggatcaaatcccttcaatcttttactttttgtcttgcttttgaatgtgaacttgaagaagactcttctattaattattttactatctttccaattttgttacagacattgtgcttgatgtgatcaagaatgtcccggcctggcctggacgacatttgctagagggaggagatgatctaagatacttcggtttgaagacggttatgcgaggtgatgttgaattcgaggtcaagagccaaagggaatatgaaatgtggacacaaggtgtctcaaggcttcttgttcttgctgctgagaggaagtttaggatgtgaataaacgttcaatggctgcttggtttaagtgtgagtttttttttaacttatgtggtcaaatttcattagtaggggttcttttaaggtaatggttttttgggttgggtataggataaaatggacctaccagtcaaggtgaggaagcatttgggtaaacaaaacttagtgggggtgatctgtaatatctatgttcttagtttttttttggttgttggtggtctttttgtataaaaaacaaagttgaagtaatagatatatagtatgt

SEQ ID NO: 24331 - DNA, 561 bp, Arabidopsis thaliana columbia
gtaaccacctaccaaaacttcaataatatcaatggcaaagtaaaaaaaaaaagaaacctaaaattctccagagtaagcagctgagtaatctccttgtaaagctcctcgttaaatgtagcgaaaactttcaagtctttggctaatatctcaacagcttttgctctgtcatttctgtaataaaaacacacaaatgtatcaaatcaacaacactagtctaaatatccgaccaaacaagaagagaaatcattaccgatctagagcttcgagatacttttgcttcctaatctcaaagaagattttcatagagtaacgattatcatcgactttagtgaaaccagaaagatacttctccacttcatcccactctccagcaagagctttctcttcaaagtacttaatgttaaagaagaagccagattcttgctctagcctacacatcaaccaattccaaattatacccaaaattacgcagagaaaccaaacaagcacacaaaaacgacaaagcacaaacttacttgtgaacagattccttgaacttctcctcatctaagaactggagaa

SEQ ID NO: 24332 - DNA, 897 bp, Arabidopsis thaliana
aacatagtcagatccctttgatgaaccatatccaaccgctgccacaccgtggtctaggtctgttccacatttaccattaaacactccctgtaaacaaacaaaaatctccaaatcggtttttgagagaatgaaagattggatacatagaacacaatttcgatatcataatcatctgttatatacccctttgtagaactggaagtctcttcctgaagcctcaatagccacactgactggctgatgagctaaagccttcaccaggctttcgtcatcattttcagggacatcttcgtagccgctgattgtcacacgttccacatcctcctgtgtaaggttcatgattgatcagtgtttataaaaaatctgtttcccagtgttaagttttgattatgtttgtgtctagtgtttgttactttctgctcttgacaaattccttcctccatgagataagggtaatcatcttctttgtggagaccaccggtcgaaattatgtactggaatgcgtagtccatgagacctccattgcagccactgttgaaagttgtgtcacagtctatgagttcttgctctgaaagcgaactcagattccctgttgtgatctggttgatcccctcgacagctgcaactgttgaaaatgcccaacagctacctgcagcaacaaaataagatcgttggatagctattcgaatctctgagttctgttctatatacctgggaccaagatggaaagagagaaatgttaccacattgaccctggtccttgacaggagccacagcgcctttctttctccagtctacggatttaggcaagtccgtgatatctctgtacctgaagttagctgagggctgtctctttctagagaattgtggctttcaagtcctagatatcttcctttg

SEQ ID NO: 24333 - DNA, 631 bp, Arabidopsis thaliana
attaattgctgctcataagtcataactgttaagactagctagttactgacgatataactccagttatgtgttgtgatcatttggcccggtcctggattttatcaaatcccatctcggttgggtcggtggcttgaagctcgtagtgaacaccatccaacactcttctcagtccgctcttcgacgtcgcgtacatcatcttctcccttatccttgaagcctccggcgacctattccaataacaaccacattatggattgattaagtttcagtggttttactagtttttcgacttaagatataaagtaaaccattttttaaccaaacagaatcaattatcttgattggttttattcggtacggttatatttgatcaaaccggccttgggttaaaaagcctgggcttaggacatccaaatgaccattttatcctttgatgatcatcgagtgagacgatagaactatatggtgggaaaagggtaaaatcgacaattcgagaaatcgaaaagacaagagatagtgacactaaccaagttatgaagaagatcttgctcatacgacagttatcgacggtgacgtaatcgaaatcaaacccggcgtaacgacagtcatcctccggcaaagaagcagcgag

SEQ ID NO: 24334 - DNA, 870 bp, Arabidopsis thaliana
gaaaatattggaagtggatatattaggccgttgctcataaagtagaaaaaatatgaaactatcaaaatataacaaacctgagcacgtttgaaggttgttttaggttctccatttgctttgtgttcattatattctaataaatatttgatgctccaaggttcccacagtcttctgcgcctctcgatctgtactgtttctccatttatgatttctcggccgatatcctgggtcagcttatgcaaccaaactcggttttctgaaatagttaccagacacttgtcaacaaggacatcaatttcaacatgtggaaagaaaccacaaccctcaagcagttgtatcacgtagttgacattttctccctggaagaaacaagctatgtccaaaaaaatgttcttttcgttgtcactgagtgtgtcataggtgcttttaaatgcatcgacaatcttaaatggaggacgtcgcttgagtttgaggaatgcagtctccatttctgagagttttttcttacctttcagctctcttccataaacactgatagctaacgggtttccattagcataatttattactctcactgacaactcctggagattctgctctcccatatcctcctttatagacgcagacagcaagaaaagttgacgagcctctttctcatttaaaccctggacctcatatatttgattgattccgcaaaggcaaaacacttgtttatctctagaggttatgatgatcaggcttccgggtcctagccagtcaaacccctcgagaaaggactcccaaccagagcattgcgcacgtcatcgagaacaacaagaactctcttactgttcaatctgtctctgagcgagctcagtttcataatggttg

SEQ ID NO: 24335 - DNA, 516 bp, Arabidopsis thaliana columbia
tctcaaaatccaaacttgacaatgactcctcaatttgacctaacttttaaaatcctctgttttttggcaggagaatgaagaaaacatcaagattgtggaaatggacattcaatcgaaaatgtactctccggctccttcggctttaaccgagatgagtcctcgcgcgtatagtagccatttcgaggattgtaactcattcaacacagctcaaagtagtccacaatgtttcagcagattcaaagagtattacaatggagatactttgtcttcttatgattaccctctcttccctaattacatggctaatactcagtcttctaaagccaaggctcggtctcaaagtgcgccgaagcagagacctcctgagatctatgagaagcagatgagtgggaggagaagatcttcgatggaagcaccgaggaataacggtgtcccgagagctgtaaggatgcagagatcttcatctcaactagggtcaaacacagccaaggaaagtcacaacatcatcatcatcag

SEQ ID NO: 24336 - DNA, 434 bp, Arabidopsis thaliana columbia
gttttaagaccagaagtacaaaaaaaaaaaagaaactcgaaatctccattaaaagagcctatcgataataaaaagaaaaacaaaacggcaaaaaagtgaagcgaaacacgacacggattcacacaatactcagatatatacaaaaaggattttagattttgattcagaaccaaaaataaaaaaaggaacttttttatttctttgtttgattttttgggttgttggttttttttttgtttgttaattttggggatcgatgtcggaaaaggaagaagctccgtcgacatcgaagtccaccggagctccgtcgcgtccgactttatctcttcctccacggccgtttagtgagatgttctttaacggtggcgttggattcagtcctggtccgatgactctggtctctaacatgttccctgattccgatgagtttaggt

SEQ ID NO: 24337 - DNA, 504 bp, Arabidopsis thaliana columbia
ggtattgctggtgttgcaagggaggaagagacttttggaggtcttggggcatttagaaacgtaggaaaaccaacaaaagatggtgtccttggaactgctagtgcaccgatccatacgatatccacagaaaggactcactttaaagaacagctatggagtacaatccgaactattggagttggttatttactcatttctggtattggagctcttatcgaggacagaggaattggcaaaggtagagtttggttgtgttttcttcagtgatccaatagctgtattgaatgactttgtgctcattaatttatgcctaatacatgttaggacttggtttgcacgaagaagtgcaacgtagtatggattcgagcaccaaattttctgatgtaaagggtgttgatgaagcaaaggctgagctagaggaaattgtgcattatcttcgcgaccccaaagtaaattcacagtgctagagtgtttgctagttaagtatacatctgtctagtgatg

SEQ ID NO: 24338 - DNA, 546 bp, Arabidopsis thaliana columbia
ttcgagatgatcatgcggtcgaatggacatgaacatagctgcatactgaagtaaccggcgttcactgttaccttcaatgctattctccgacacaggactcatcgaaccgccgatgttttcaccacgggttcttttcctacgccggcgccacgccatctgaatatttaccgctgcccacgtcctccagtttgaggaatagtatcttgcggtccgcttaagccgctcgttcgcgaatttataacggaaatgatcggtaatgtacctaagatcttcggatccgagggagaatgcctcgatgttttctaggcagacaaatgttgctgaggaagggggaagacggtccagaaacgggcgacgtaggcaccatgagagtagctcgtcgcccaagtaaccgcctggttctagtgtactagtggctaggacgcctttgcttaggctctgtatacgtttgactcgtccacgcatgatgaatatcattctctgtacaggatctccttcacggatgatctgtgacaatcaacaaaatcgaagaacctcagattttac

SEQ ID NO: 24339 - DNA, 628 bp, Arabidopsis thaliana
cgactgagcaagagcattgtagatatcggtttgaagtacggtgtagtgaaccaccgtactgagtttggctccgccggttagcaaatcagggttcaacttcaaagcagttccaccaacgtagatagattttacagtgattagataatctcctgagtcagtgcctttaatgggagttaaagtccttggaatcggattatcgctactattgaatggtgggataaagtagtgaatgccggcgatatagaaatgaccggtaccggaagaaggcaagcagagagagaatttagggatgacgttaaacgctgacgtcacttgtttcgtgaacgacgaagatccgggagaaagagccagaactccgtcgactggaggaggaaggccttggagggctttctcaccggcgcatgagaatgtgaagtggcggacggagacttgagagaggaacttgccgccgtctgtggtgtagagggaagctctgtcttggacgacacggccggttacaacggggttttgtccgagtgggtttggttgcttgtaaagacaagatttgctagcgcatccattaccggggatagacttgcatgtggagctctgcgaagtgactagctggagagatgatacagatttaagt

SEQ ID NO: 24340 - DNA, 534 bp, Arabidopsis thaliana
caatgtatcatgcatatagcataaattcttttggttgtcccaaaaaaaacataaattcttttaaacacaagataattcagaaaaaaataagagaatatgattcttttttatttcgaaaaaggaaacactttatttcattgatatatgaaacatataacaaattacaacaatagataaagatatcatcaaacgcggaatttgaaaaacaagaatgaaatatggtatatagaacctcaatttaaaatgtgtaatctctaggcacatttgaaaccagatggaaccttcttaccacaatggtttaggacaacgttcaaagaaatgggaacattaaggttgataccaagaacattagcctttagggcagtgcaaagacagaccgcggcttcaagatcaactagacctttgataagagcgcaacagttggacgttggtggtagagaaccttaaccacatccaacacgttagcacataccttaagtttaagagcgtctttacaagtgggtttaagagatggcgttgcgggcttcttgtggt

SEQ ID NO: 24341 - DNA, 846 bp, Arabidopsis thaliana
ctaaaggtagtggaaacgccttgttttatgcctgttgcacctacggcaccgtaaaagggatgacgccggaagaagttgaagccactggcgcgcaaattatcctcggcaacaccttccacctgtggctgcgccgggccaggaaatcatgaaactgcacggcgatctgcacgattttatgcagtggaaggggccgatcctcaccgactccggcggcttccaggtcttcagccttgggagtattcgtaaaatcaccgaacagggcgtgcacttccgtaacccgatcaacggcgatccgattttcctcgatcctgaaaaatcaatggagattcagtacgatcttggttcggatatcgtcatgatctttgatgagtgtacgccgtatcctgctgactgggattacgcaaaacgctccatggagatgtctctgcgttgggcgaacgtagcctgtgagcgttttgacagtctcggaaacaaaaatgcgctgtttggtatcatccagggcagcgtttacgaagatttacgtgatatttctgttaaaggtctggtagatatcggttttgatggctacgctgtcggcggtctggctgtgggtgagccgaaagcagatatgcaccgcattctggagcatgtatgcccgcaaattccggcagacaaaccgcgttacctgatgggcgttggtaaccagaagacctggttgaaggcgtacgtcgtggtatcgatatgtttgactgcgtaatgccaacccgcaacgcccgaaatggtcatttgttcgtgaccgatggcgtggtgaaaatccgcaatgcgaagtataagagcgatactggcccactcgatcctgagtgtgat

SEQ ID NO: 24342 - DNA, 562 bp, Arabidopsis thaliana
gtaacacaaacccgcttgatccatgaaagaaataagctttgacatgaataaggtctataagaccctgaaaattttcttctagaccaatgggcacttgcacagctgcactatgatgtcgaagcttagctcttgcctagtgaagtaaaaataaataaataaagaagttataacctataactgatcaaactcattcaatatctatccatggatgatagtacttttacacacttggttcaagactttccatggatctgctcccatcctatcaagcttgttaataaacgcaactctcgggacttcatatctcctcatttgcctatcaaccgtaatagactgactctgtacaccaccaacactgcacaggactagaatcgcaccgtctagtacacgtaaagccctctccacttcaatggtgaagtcaacatgaccaggagtatcaattatattaacctgttcatttcaaagctcaattcaataggattaattaagaaagatctctatctatctatctgcgtaccttgtaaccttccaagtacagtaggtagcggctgattggatggtg

SEQ ID NO: 24343 - DNA, 581 bp, Arabidopsis thaliana
caacaaccgtcaagttcctttgtagctacggtggcagaatcaccccacgttatcccgacggcaagctccgttatcaaggcggcgatacacgtgtcctctccgtcactcgcgccatatccttcaccggttagttagttaatcagttttttttttttttatcaccctacgaattctagggttagtgtagccgtctagtagcacactcaccggttatctgtttgataatattaacagagctaaagaagaagctcggtgagatttgcgggattgcggtgactagtctccgatgtcagttaccaacagatgatcttgacgcgcttgtaacggtaagatccgacgaggatctaaagaatcttatggaggaatacgatctcgctataacagcgcaagttaagattcacgtctttctttctccgcttaaatcaacgagaacaacagcaaactcgtctcctccaccttcaacgacgtcatcttcttcgtcaaaatcacgctctcgttctcctccatcgccttcaactccggaaacatgtcctagttgcgtagagagatctatacgtaacaatggatgttacgtcatagaa

SEQ ID NO: 24344 - DNA, 554 bp, Arabidopsis thaliana
tctaatgttgtacagtgaaagacttactacaggatgatgttcgtccctctcctcgcacatctcgtcatcgcattgaggaaaaactacaagtgcgagcatacagaaaggagagaacaagaagggggaccctcaagatctgtgatcctctcctatcgggagtcttgtcctcgtagcttggagcaccatgacacatcacctcctctagataacaaatttcattttttaatgtaaaacaagaattggcgactcataccgctttgacttgttttcatctcctccagcatctttcgcggacacaatcaggactttcgtccctcccggaattgccattgctccctttgacaaaatgaaggctgttaaccggaagaactatcttcgttttgccaaaaagctagcagttgatcttcggaaatattcagtttaacacgcaagtcggtgttttaaccaaaccttatgacttttaaagttaatcttggagttcactccaccttttgtagcccgaagactagctctccacaaagagagtgaaattgacgtctcaaaaggatagaaga

SEQ ID NO: 24345 - DNA, 263 bp, Arabidopsis thaliana columbia
taatagttgagatatactaaagtcatccgcaacattatgctggcaacgctttggtgtcatgagtacctggtctacttcctacagtcggcgggatggactggatcgctgtgttagatgcgcctgaatccgacccgcggaaaacctccgaactggcgcgcagtctctcctcttggtcgaaatgagtcccttgcgatatcatcgaggtaccatatcgactggtgtcatttgttgaaggcgggcaattggggatcatccccagtggc

SEQ ID NO: 24346 - DNA, 958 bp, Arabidopsis thaliana
tgaagaaccaagatggagagagcttgagtgtagcgcattcccaggcgtggttgtaccgcctccaagactagaccatgtggctgtgagcatgccgtgtggtagggtcatcatctttggagggtcgattgcagggcttcactctccttcgcaactgtttctaatagatcctgcagaagagaaaccgtcatggaggatcctgaatgtccccgggaaaccgcctaagttagcttggggacatagcacatgcgttgttggaggaactagagtattggtccttggtggtcacactggtgaggaatggatactcaatgaattacatgaactctgcttggctagccggcaagactcggatctgtaaagactctttccttcttcatttggtttgtggttttgtatctgtcacattccaaactcttacgacatgtagaagagatatatcagaagctagaagcgtgtgtacatagtaaattagtgattgttgtacgctttagatagatattcatgtaatgttaatggttttgctgtatgaagatccttctataatatacttctccttgttactcgaccatgcaggatttgatttttgacgtaccatccaaaagagagaagacactgagtttggacatatatatatatatccacaaacccaaaagtagaaataatcacacaacacctcaagtaaatagaatgaagaaaccgaaaaagtaaagtacacaaacttcaatacagagctaaaacctatacagccaaacaaactacttccataggacagaaaatgttatgcgaaaatgtcaaacatctctccctccacccttttttcttgtcgtcatcgctaagcagtgtaagccgatctaagtcagaaagcatacttatctttttcatccttaagttctatggtaattcaataaatcacagaggatgtaaaggaaagcaagagaaataaaaaagagatataaag

SEQ ID NO: 24347 - DNA, 561 bp, Arabidopsis thaliana columbia
cttcgggtctatcctttgggagtaacccaaaaacagtgatgactacactatgtttcttccggttctggcttggtttcggcattggtggtgattatccgttatccgccacgattatgtctgaatacgctaataaaaagacccgtggtgcgtttatagccgccgtttttgctatgcaagggtttggaatcttgaccggggggatttttgccatcatcgtgtctgccgctttcgaggctaaatttccagctccaacctatcaaatagatgccttggcatccacggttcctcaggcggattatgtgtggcggatcatactgatggtgggtgctttgcctgcagcgatgacgtattactcaaggtccaagatgcctgagactgcccggtacacggctcttgtggccaaggacgcgaaactagcggcttcaaacatgtctaaggttttgcaagtggagatcgaagcagagcagcagggaactgaagataagtccaattcctttggcttgtttccaaggaattcatgaaacgccatggccttcatttgctaggaactcaagcacatgg

SEQ ID NO: 24348 - DNA, 538 bp, Arabidopsis thaliana columbia
cgattgcaattgcggtggggctagcgaggactctgtacagtccgtttccacagtggagtaagcttgttggaggagtgttcttcagcttttgggtgctttgtcatctgtatccgtttgctaaaggattgatgggaagaagaggcagagttccgaccatagtgtttgtgtggtcaggtttgttgtcgattattgtgtcgttgctttgggtttatattaaccctccttcagggaaacaggactatatgcagtttcaattcccttgattcttaagagttttttttctttcgtggtacaaggcatgaaagttcttctttctaggcttcagcttcatgtttgtaatcagatattataattacgatttttcaaagtaaagtctcaatttcttactttgttgttaattaatggttcaagtcttgacgaggatagaattatttacacagtcggtatatcttcggttaagcctcatgggtggcaaaagtcaaacaacaactaatgggccctattatagaagcaacaacttcggtttagcctcatatga

SEQ ID NO: 24349 - DNA, 519 bp, Arabidopsis thaliana columbia
gggtacctgtgctaacatttagatataccaaatagacttacataaaaacatttcattttcttttggcacaaaacatcaatttcaatgaagaaaaatagactataaaacatacatattcacaataaacgaagaagcctttactaattcgtctacatatgatcttacaacttttatttttctttttagtaaatgatcttacaacttatgaatagaattggaatcaatcttgtttaacttagcgtttgatgcgtttatataggtggctttcttgcaatcacaagtcatgcaaatgaaggcacagatagctggccaccagacgtcagccgccggagatctaagacacagctcggaaagtaccaaccagtttatgacgtggcaacaaactagtgtctctccgatcggtagtgcatactcaacatcgtataacctatcatcaaccttactacggtcatgtaaccctaacaatccggtctcgccacagagctcgctagaagaatctttcagcaacacgaacagtga

SEQ ID NO: 24350 - DNA, 502 bp, Arabidopsis thaliana columbia
  unsure (1)..(502): unsure at all n locations
tggttccatcagggcaaatattcgacaggtgatctttctcaatccatacaaaaacagaacaacttgatagtctttactgattgatttttgatcctggaatcatattagctgaatgaatctactactatcaaatggtcatgttcactcaattgcagttctctggagaaaggtctaccgtatctatttcgcgttggctctggcanggtaattgtggatatcaaaaaaggatttagctttaccacaaaagtagtttctgatactttaaacaggtgatcaaaggacttgatgaaggaatcttgagtatgaaagctggtggcaaacgtagactctacatcccagggcctgtaagtgcttatcaagattatacataagtaatcgttttttgtaacagagattctaactttctctgcatttttgattctgtaaatgttacaccataagttggcgtttcaaagggtctagtttcagctccagggaggccgagagttgcgccaaacagccc

SEQ ID NO: 24351 - DNA, 625 bp, Arabidopsis thaliana
tgatatcaggaccaacagggtggtagggcagaggacttaccgggtttggaaccgtcttcgagatcgtctggtagatgaccttcttgttaaccttcgtgaatatggtcttcttgcggttgtggtcaatcaaggcaccaacggttgcaagaaagggtcgtcccaagattaatggcttatcgatctcctcctccatctctaaaacgtgaaagtcagtcgggactaagcaatcccctactattaacagaaggtcgcagactaatccgtcgggagtcttctgggatgcatctccgaagactagattaaggttggacgggataaatctcgcaatccgatcttctatgctacatttcttgacatcaagttgacaaaatcacaaagagagtcgggaaattctatgcttgtattatgcaagagcagacaaaacgtccagggtcttcggtttagggaagcttccataatggttggcattcgggtttgaccttgacttcctactcctgtttgtgggcgatgtcctgtttgggttccacgggtagaactgaggattcggctttattggcgggggtttgggtggatgcaccgtgttgcagaatcccttagggttctcatcagtcgttcatgggagtgt

SEQ ID NO: 24352 - DNA, 564 bp, Arabidopsis thaliana columbia
ctagtggatcccatcccccttcggtctcatcttgaacatgtccttcaaaagaaaacagaaccattgataccaacaaacatcaaatattaaaaacgatcaaagattgacataagaatataccttttggagagcctctaacataaagaaccatgtcagtgcattttttcactacatttggaccaacatcctcaaatagtgacacattttcaccaatttccttctccatatacacattctcctcaaatggtagaacactctcaccaacatccttctccacatttacattatcttcatatggtggatgtctctcaccatcttccttctccacattcacatcggaattcacattctcctcaaatggtagaacattctcaccatcttccttctccacattcacatcggaattcacattctcgttaaatggaggtacattctcaccaacttgtcttcttacagtggttataagcatttgattgtattctcctaacatctccacaacttgcttaaagcctgcatcaattgcttctctcaaagtgctaatgtccggacattttttgagacatg

SEQ ID NO: 24353 - DNA, 582 bp, Arabidopsis thaliana
tacaaaatggatatatattgtttgactcgctctattcatattcatacaaaatgtatatatattttccgtattaaggttcgtattgtaaagccattgtaataacttgtgaggtgtcaccatgttccaggtaccagaatgcacttggaggtgcatgggtagtgatgatgctcgttatatgctacgtcttgactcaagtatttcgggtttcaagcagcacttggttgagtgagtggactgattcaggaaccccaaagactcatggacccctattctataatattgtctatgcgcttctttcgtttggacaggtatgagttgcatttggcaaatgtttgagtcggtatcttcatgatcggataacaatatataactgaacattaaaggctgatcagttaagaatatacaccatgtttcttctgcgccaaagtatcgagcaaacaaaatggaaaataaaaggatacagagagcaaaacgtttatgctaagacgtatttcttcttggtttttcaggtctctgtgacattgatctattcatattggttgtttctgtccagtctatatgcagctaaaaagatgcatgatg

SEQ ID NO: 24354 - DNA, 1141 bp, Arabidopsis thaliana
taaatgtaaacgacatcatcgatacgcaagctttggttctatgggaagacgaatctcttatcataatttatgttgggtcgttatgtgtttggtttaatgcttgatgactgcaaattggttgttgctaaagtaaaaatggtgtttctcttctgaaagataaaaaaagcctcaggtttctcctctttttggttttgttgatgatatatatttagaaccacaaccaaaaagtttcttgcttcgatttgaaaaggtttacttcacaggtatggtacaaaaacaatattacaagtacaataaaaaaaaaatcaattcctgtttgaaaacttggattaattttgtttatttatgttccctattttggttataaaaagtaagaaaccaattagtttccataaatgcataaaagtctcgaaatgtaccatagattaatatagctgagttgagacaataaaaccgttatttcaaagtatacttagataaattatacaacctgaactgcacattagactaatatatatccctagaatcaaaccctgaaaaagttttaagcaagctctcgaaagagagtactgagaagagtttacccaaaccacttgactgatcaggtatcgtgggactgatctttctcaatgaagtccaacgcctgatcctttgagataacattcacaatactcactctgttcttatgaaatactccatatatcttatccgcgactctcacaagctcgggacggaaagttgtggtgatgaactgcgtgccataatcatcagcaagacgacgaatcaagtttcccacagcggttcggtactgtggatcaagtgctgcatcaatctcatcaaaaagatagaatggtgcaggatcacatcgctggattgcaaagattaacgcgagtgcaacaacagtcttttggcctccagacaattgtttcattaattgtgtttccccttgaccagtgaacgagacctacaaaacaagtaccaactattatcagcctgaaagctagacaaaggataatgatatacatggtttctttatatgtagtgtccacaagtcttttcttcctaccttcacttttacaccaatgtatttctcaacccttccctctgtaacagcttcacgacctccatcatcatcatcatc

SEQ ID NO: 24355 - DNA, 752 bp, Arabidopsis thaliana
aaaaaagtatggtaacatcaatcatctgtgtccttttctctttctgttacttaatctcagttatttaaatgctgcggttagaaggtacattacctgataataaagataagctccataaaacaagaccaggaggggcatgatggcccacaaggacaaagtgcttacaatgccaatcaacactacagttgaaagaagctgtgagacttgacccataaacatgtttacaaagacggccacagttcgatcaatatcacccagatcttttgcgaatcgattgattatccgtcctagcggattggtatggaagaaggacatcggggccctcagtatggaatgaagcatattgtcgtgtaacttcttagctgcataaagactggacataatcaaccaatatgaattggtcaatgtcaccaaaacctgtaagcaagaagaaagagtctcagcaaaaaaatcaattctttactaaccttttctacctccacctttggattctcaaagtaaaatcacaaaagtagaattatataagatctttctaagctggtcaggtttcagctatatatgttatatcatgaggtcaagattatatcaaatcttcacgtcatcatcaagcaaacataactcatacctgtccaaacgagagaagtgcatatatgagattgtagaaaaggggtccatgactctttggagttcctgcatcagtccactcactcaaccacgtgctgctagtaaccgaaatacttctgttaagacgt

SEQ ID NO: 24356 - DNA, 656 bp, Arabidopsis thaliana
gtcgactctatccccttattaacattattatgaacaatgtgtacttctggatgtgtggagtagggtatgttgttttaaattgaaatgagaatctgagcatgttgacactgactatgattgcctgactgtagaaaataccgtcagaagaaattcgcagggtcaatcatcctcccttctttatgcttgtgacagtagcttttgtatatacaaacgcttttggttctttttattttaaatgcttaagatcttgtcacccacttgttggactactttacttaaacacccttttatcttgaaaggtttcttttcaatgcctcagctggtcagcagaatcggggtcattggtgtgaccctcatggccgtcttatcgggttttggagctgtaaatttgccctacagttatatatcgctctttattaggtacttccctctataattgctagtagattttcttcttctaccttgtgcgttattcttattgcaaatggttttgaggattttgattcgaagtagttgaactctgaatgaagcttttcatcttctgtgatgtaaatggatctacactgatagaagagcagctggattgggaaatttgtgatctaactgcacgttttcctgtctctctttctctctggaaacatatagggagattgaag

SEQ ID NO: 24357 - DNA, 668 bp, Arabidopsis thaliana
cacccaccaaaatcaatttagggttttgacataattggatgattgaaaggggatgggaataagcatgtttagtccaaaagccaaatcgtatccgcttgtaagtggtgttgatgctgctaagaacacagacgataagtacttggctaggtaacatcattatcaccatcaacttcatttgaatatgttaagagaaactaagacattgtttgtttgatgatgtttaaggtattgtttctctgattctttggatcgaaagaaggtgaagggaaaggtaatggtgtgtagaatgggaggaggtggtgtggagtctactatcaaaagctatggaggtgctggtgccatcattgtaagtgatcaatatcttgacaatgctcagattttcatggcacctgccaccagtgttaatagctccgttggcgatattatctaccgatatatcaactccacaaggtcctctttgatattcttgggtatgatactatactacaagtgtgttcacagctaagtaactctttgtttatgcttgtctcagatcagcgtcggctgtgattcagtaatctcggcaagtgacaatccctgctccatttgttgcttctttttcatcatgaggtactaatccgggatcaagacgtcttctcaagctatatatgacttgatcaatgtcatct

SEQ ID NO: 24358 - DNA, 330 bp, Arabidopsis thaliana columbia
gggctgcgagaagtagtgctttcggggatgagttgggttgtaggggacggtcgaaaaataagattttggaaggataaatggctgtttaataagacagtgagtctgttggcgattgaggatcttcatgcgggtttgaattggtccttgcgagtgatttatggcacgaaggaagagggtgggactttgagaagatatcgccgtttataactatggtgttgctatctgtggtgtaggacaaggtaacagtagctcgagactgtatggcatgtggggaaactgttgacggtgagttctcagttagatcggctcatgctttggtgacaagagatt

SEQ ID NO: 24359 - DNA, 742 bp, Arabidopsis thaliana
aaaggatacaggtacttattgttacaatgcatttcaaaggaaaacaaaacacaaacaacacataaacatcactaattcagaattttaaaaccatgcaccttaacatcagaagggtcacttattaattattacaatgcattttcaaaccaaacctcggaataatctttgagtttctccttcatgatcatgtcgattttgctacccatttccggagttagatgattcttccagtcaccaactatccctttgcggaaatggttcttgtactctatgccattgattgactttccggtcttgttaacctccaaactgctcaggttaggcagagaacacatctccaagatcttatttagagatccgttcttttcttcttccttagaaaatggacaacccaaaaactctgcgagtttcttgagctgaccatgaggatctgtttttatctcatcatacctcatgaaaagcacttgctttggcttttccaagctagctttccagtaactcaggatatgatcccaaaacggaccaaacaagcagactccgctgcaaaaggactcaaacatagactcaagaatggttctgtcctcttctttattcagactcctgcaaacgatatgccaacgtgacaccagcgaatctttcgcgtccctgcagatgtaaaccacttgcaaggagagtccttgacagctacttgcagcgtgtggaaaggcgtgtgagtagagacaaccttggagatgatgatgag

SEQ ID NO: 24360 - DNA, 771 bp, Arabidopsis thaliana
tgtcgaaaatggtggcgagttcacggtttccagcgcagaggatattctcaaggctctctaagaaactttatcgtttcgcttgttgtattgtgaatctaaactgctgtatgtgaagaagagatttctatagcttgatttcaatcaacaagcatgtgtttgacttgcttggcataataaagtatttgataaacgttcaataacaatggcttaaaatgagtttcaagcgtatataatccataataactggatcaaatagatatacaaacacataaactgataaacgcaaagtcctcgcaagtacctcttcatttccacacaaaggcaacacacttgcttagcacacaccattcatcttcttcctctccttcacaaacttcctccatccaacaataacttccatcagaatctccttctccatcttcttctcctttacattttccgcgatcccttctattcccatcttcttagatatcttggaaggcaaggtatctagctcatgaagcaccttcgaaatatcagcaacaagtctctccgcgagtgttcttgagaaatcttccctgatgacaacacgcagaaccgtgatgtgctgtgatcggcaggcatagtgtaagctgggacgatccagccaaaacgacgtagcatctcagagatctcgaactcgttgtggaaactatggtccttgagagagaaggcgacgactggcactccttggtcctttgagactatgttgaaacgctctgttttctctataccttctttgagaaccacatg

SEQ ID NO: 24361 - DNA, 910 bp, Arabidopsis thaliana
caatcaacaagcaagtgtattgacttgcttggcataataaagtatttggttttaatgtttttctttgcgttgattcatgaaagatatgagtacttaaaatgagttgcaaccttatagaaatccacaataactggctcaaatagagatacgaacacagaaacgcaaagtcctcacaagtacctctttaatatagagtctttattaacaaacaaacacaaagtaaacttgctttgtacaaaacctttattctttctaaggcattattggctctttcttattgcaaactcgctcacctatatacttaacttatttcacacacacagagatacatcttcagcacaattttaccgcgatttggcgaatgcggtataccctcaaaacagtttccaaacatgtattttatcttgctttccaagaagacaatggtggagtctctgagtctttgtaagtaaccatgttgttgtcataccgttcacctttcacgaaatccggttgagcaatggcttcaagctcaaccatctcttcaggagtgagcttcacggataaagctccaatgttttggttgaggttttggatcttggaggttcctggaattggacatacatcatctccttgatggtgaacccacgctagagctagttgtgcaggagtgcaacttttctttgtcgccatcgcttggactttctcgtagagaatcttgttgttttcgagattctcctgttggaatcttggtaaaccctgtgacagagtagtatcaagaagcatgagatgactccaaatcttgaaatatgctttaaagaactcatatacaatgtatgtatacggaaacagagaactgaatcaatcatgcacttggctttcgataatcatcttgctctagattctcaacaatcttggtccggatgctaag

SEQ ID NO: 24362 - DNA, 492 bp, Arabidopsis thaliana columbia
ctaaaatgtcccttttagtttatttatagcttgttctagtcacccattgctaatggatgctcttcgggatgtatatttccttctcatacagatcaaaaactcacaagccaagttcatgaaattgttggacgcattaatggtcgttttgggacactgactgcagttccaatacatcatctggtctgtttttaaactctttatgcttggtcagcgagttggatattatgatttctcacgagctgtagtttctttttttttttctccaatggaaaatgatctgtgataatgttgaatgttagtactctatggcacttagcattttgtgagttgcatccttagggattgaaaatggtcttagcagaccattatttctggtatcattgatagagaaaatatcatctgcatcatgctacatattcggtgttctggatcttatagttttgaaaattcaactctgacgtaatgctgataaaattctcattccctctcagg

SEQ ID NO: 24363 - DNA, 368 bp, Arabidopsis thaliana columbia
ttttttttgaaaccgcgtctctgtttgtgttgtgtaatgggttctactagcctggtcggagttcgctcaaaatgtgtctggcgaatgggacggtttcggagcagattttacatgcgaagggcaaccgctagaactacctgaatcagtggttccagaagcctttagagaatgggaagtgaaggtgttcgattggcagacgcagtgtcccactcttgcccagcccaactcactatcctttctttacaagtccatcaaactcctccccaccgttggatgtgaagctgatgcagccacccgttacagcatcgaccagaggatcatcgggggaggcaaatcctctgcattagccttttcgtattctgtcactg

SEQ ID NO: 24364 - DNA, 417 bp, Arabidopsis thaliana
ccgcagctatccagatcgcccagctagctcttaagcatcgccaaaacaagaatcaacgccaaaggattattgtttttgctggaaggtaccgaattgctttgtttttgctgagtaacttttgtatagttttatactgatgtttttcttctgcttctactttttagtccaatcaagtacgagaagaaggccctagagatagttggaaaaaggctgaagaagaatagtgtctctcttgatattgtcaatttcggggaggatgatgatgaggaaaagcctcagaaactcgaggcgctccttacagctgtgaataacaatgacggtagccacattgttcatgttccttctggagccaatgctctctcagatgtgcttctcaggtaccaccccttttcttctttttttcgaggttatgaagat

SEQ ID NO: 24365 - DNA, 491 bp, Arabidopsis thaliana
cccctaactatattatatatcacaattgttcaaaccagtgtatatagactagacgattccttgaaccatataattccagctttactataagagtcttaaggacaggggcaagtgagtcgagaaacgaaaccgaatataagtcttgtatgatatagtcatatagttaaccgtcgtcatatattaaagaagaaaatggcaaccaccggtcggagactccgtcctccatcgcccaataataaccggagccggactataagctcttcaatctctctcccagtgtccttaaacgcctcgttatcgtcttctacttcttcatcttcttcctcttcgccttccaattcaagcaaacgagtgatgataaccagatcacagtccacaacaagatcctccagacccatcggatcatccgactctaaatccggcgagaacataatcccggcgagaaacagcgcatcaagatctcaagagataaacaacggtagaagcagaga

SEQ ID NO: 24366 - DNA, 467 bp, Arabidopsis thaliana
cacccttctcgcaactttccacttctcgatctcaggtatgttcctcgactgtaagcccgcttgcactataaagttttctttttgctttccaaaatcagatgctatccacaatgccatttctcggaccacatcatgcatcttcaccgtttcttgattctcctccatcaataagcatgaacgaactagaataccgataatttcataaccttggttctcagctttacctttgtttctatctatgaatccctcacctatccagtaatctaccaaatcatttttctcaatgttatgatcttctggaaacaaagcacagtactggaagcacaatttgagctgttcactttttaaattatcatagctgtactttagaataggtagaatctcatcttccatacctgaaaactcagctgcagatgaagtcaaaacgtcgattgctgaacgccattcttgcactgtccttttatatg

SEQ ID NO: 24367 - DNA, 510 bp, Arabidopsis thaliana
ggaaatatatcttaaatcaaaagtcaacaaaatcaaatccaacgggaaaatattggttaaaaagatgaacctgttgaagactactgccaaagtatcaaagttctctggattctccaagaaaaacttaagctccgaagctcgtctcgccgaagcgaaccgaacaacaggtgctcgggtcataccgtccttaagaacggtactggtggcgccaccagagataaacatagccttgcagcctctgttagtgctagcaaccaaacaaccttcggttgtagccataggaacagagtactcataaccatcaagcaacaatggaccagcaatcccaacaggaatctgaatgtatccaacaggcatctcacagcattgccccaaaatcgattcataatcaaatccatccaacggtaacccttcaatcgatctcccggtgactctctgcaacgcctcacgacgaatcgacgccgctcttttgcaatcaccgagacgagattcaagcgagtacgatggaat

SEQ ID NO: 24368 - DNA, 879 bp, Arabidopsis thaliana columbia
  unsure (1)..(879): unsure at all n locations
cgcgtgttactatacatgaatcattgtcattgttttcttcttgatccaaaattgtgagaatcttactttaggcgtaattcacattttttgcattaatttcaacggttacacgttttttttctttgcttcagatttgttataatttggttgttctaatattcataaccttggagttttggtattacttcaggtgttttggacacttgttgtcaagaagaaaccagttttggttctgattaatcgttggttggaaaatatactcaattccaggccatgccttcacttcaactattgcagttaactgagcggggtcggggtcttgtagcgtcaagacggtaaccatttccttgctcttcattgtattctagatggaagttttttttgttcgtttgggctcagatttcatctttctctgtttcattctttaggaaatctatactgcttgcggctgggattgtagctgctggtggaactgctgtttacctgaaatcaagggtcgcttcccggaggcctgattcttcgcgtctttgcaatggtcagagtgatgatgatgagactttggaaaagctgactgcaactgatcaaaatgcaaagataaccacgaaaaagaagaaaggaggaggattgaagtctcttcaggttctgactgctattcttctctctcagatgggaaaaatgggtgccagggatcttttggcactagtcgccaccgtggtatgcatttcctcttaattaataagtttttacttttgttttatgtttttgcccaagtcagatagattttctgtctggttgtttaagtntgatctcgtgctgttgcaaagtcctgtagatattcatgganatcacaattgcgacccgttgctttattgttatgga

SEQ ID NO: 24369 - DNA, 424 bp, Arabidopsis thaliana columbia
tcagaggatccccgaccactaaatttgattaatgcctatgactagtaattatgttcacctgtgccaggctcaatccaaggagagatgaagaaagtcggaaccctaacaccgagccggttaaactcaaaattatatggtggaggtcccaagataccatccggattaggaactccgtcgactggagtaggtacatggtcgtaaaatccaccatgctcgtcgtacgttatgataaataagatctcattccattgaggactcgatctcaatgcctcgtagacctctttcacgagctttgtgaccctcggagacatcgtcgagaagggagatggtcatatggctggagttgacaatagatcaaaccaaccgttgttcgaccacgacgtagttgggtagctttccgtcctatgcaatcttacttgaattg

SEQ ID NO: 24370 - DNA, 719 bp, Arabidopsis thaliana
caagtatacaatgtttaagtacaaaacattcttcgtattgcagtaaacaaaaaatgaccaaaaaacaggattttctttacccccaaaaacctcatcgtcaactacaaattcacatatatacaaaatgcaagatcctgaacctactaaaaaagttcacttgttagatttttacccgattcttcaagcggacaatgaagtttggaatgctgatggtttagtgagtgacaaaatggtagagaccataagctttcgatcaataggctttgtgagataagcatccattccaacctccaagcatttcgcttcatcagaagacattgcatgcgctgtcaacgccacgattggaatgtgcagctctgtgccaatctctgctctccttatcgcctttgttgcctcatatccatccatttttggcatctaccatgagaaaatgtttaataaattgtcatgtcttctttacatgtggaattgaaaaaagtaattgtacctggcagtccatgaggatcaagtcataaggcgaggaattccgtaaactagtctcccgagttgtaactttgttagcggtatcttcattcgaacgatttgtgttcttcagttggagcttgagcattgatagacttgtagttgagggaatcaactgcttgttgtccactcagactgcagttacagttgccgcattttccaagcattatggtggctactcgttgaagaacgggtgt

SEQ ID NO: 24371 - DNA, 269 bp, Arabidopsis thaliana columbia
agcaggatgttacagttctccctccggacaatcaattcccgtgttcaagagcaaaaacggaaaaagaaaaggaaagtgaagccgcaggaaaccagtgaatgcacatctaccactcctggactgagtccgtacgatgatattctctatctatatcagaatctctagttaacttatcctgattcagacttatacagtgaagcgtctcaggttatcatgaagtgcaagagctttgtaaaagaatggtcttaccaggaacaaaatcatttaac

SEQ ID NO: 24372 - DNA, 539 bp, Arabidopsis thaliana columbia
tataacctgtattgaaatcacaaaccttagcaataaccaacatatagaagtgtttagaaaagcagagacatctgagtaccaatttacctgattggtcttgagcaaaaacgagacaaacacagctcgtgattgaaatccatgaaagaaggcgtagacgtgtcattatcaccaaatgtgtttgattactttcttatggaaaatgttctctcatgcaatatatagacgaggcaagatcaaaaggacagctactacacgtacccgcttcaactccatctaagttatagtattagcatgttgggttgatatacaattacaattacagttacaatacatatataaacaaaagtcaaataaaatccttgatttggtttggtccttgaaaattatacttgcaaagttgacgactagtaaacaaaagaaatacaatcttcttttctacaggaaaccttttgtttataattttgcaaaaaaaacctttaatagttgcaaggggcagccgctacagaaaacgaatataaaatcgttgctaaaggaatttg

SEQ ID NO: 24373 - DNA, 509 bp, Arabidopsis thaliana columbia
ttcggatttaagtttcttaggatcttggcaaattttctttgcagcctagggaatcaaactatgtaatgcttgctgatggtcgatggctatgcctcgaatgtatgaattctgccgttatggattctgatgaatgccagcctttgcactttgacatgcgtgatttcttcgaaggcttaaacatgaagattgagaaagaatttccttttcttttggtggaaaaacaagcgctgaataaagctgagaaggaagagaaaattgtgagtacattagttatttgaaacttccatctttctctctctctctcactcatatgttttataaaaaatttacacaagcaggactatcagtatgaggtggtaaccagaggtatttgcctatctgaagagcagattgtcgatagtgtaagactttatcttgggtaacacttacttcagactaaaaccagattagattcatgactgtaactctggtctggtccacatatacaggtcgcccaaaggccagtcagg

SEQ ID NO: 24374 - DNA, 522 bp, Arabidopsis thaliana
cgctactccatgagtcggtacgctctgcataaccgggaaataaacacattctcggttaatccatataccttttaaaatcaaactggatcttaagaccggcataacattttttagtcacggtcgtttggacaaaacagtcataatcagaaataacacatgacttaaataaatagtattgaataaattacgaatgtttttgtgtacctcgccattggtaacgaagacgaggaggagacacgcgacgatggagccaaggcattgagcaatccagtaaaagaaaccggttattactgtgatgttgccaccgacggcgagaccgagtgtcacggcggggttaaggtgtccgccggagatgttggcggctatggaaacaccaacgaaaagggcaaaggcgtgacgacagcgacacgctcaagaccagcggggtccaaggctgcatcggatgtgagcttggcaaaagcaagatcagagcaacgccagcagacacatagagaagagttgcgataaattcagacaagtaag

SEQ ID NO: 24375 - DNA, 929 bp, Arabidopsis thaliana
ccccaataagatgtttaaaaactcctatacatgtctgatacctgttcctgttgtttctcttcgagcattgttatgcaggctggctgcaaatttctggtgtttgcacatcatcagtccatgcttgaggaattacaccagtttcttaaagtaaggcattgaactatcaacaaagcttccaaaagcccgtctatttctcattaagtatgcaaaaaaacaaaattacagaaaaagaaagtgggctgcatccggattgatggtagcaccctgcctcctctaggcaagccttggtttctgactttcaggataaggatgagataaaagcagcagtggtaagtattttcaccaaacttgaacacaaagtttcttacccttctcttactatattccactgttcaaggcaatataatttttcatattaactagattaatatttgtactgtgaaacttgcaagtcactaagagaagtaatataagaaacgaatttatacttaaatcgtatgttaagcctttctttgcaatctataaaaaatattactagtcctgattttttttttggtttacatggatttgcagctgtcaatacgagctgctggtgttgggataactttgacagccgcaagcactgttatctttgcagagttgtcatggactccgggtgacctgattcaggcagaagatcgtgcacataggattggtcaggtgagtcatgaacaatagtttagtggagttacaaatcagaatcactctcttatatctcacttatcatttgtagtgtattttttaaactctgcctgtgattttgcttcacttctacaggtttcttcagtaaacattcactaccttttagcaaatgccacggtgacggacataatcgggttctctctcattcacatttccggttgaaagttcaataatttctcaaaattatg

SEQ ID NO: 24376 - DNA, 366 bp, Arabidopsis thaliana columbia
agatgagcgaaacgaaagagaatattaaacactattctctgatggattttatgaatgtagattatagcctcctgaaatggtcaaatgatcatgttattaatcaatctgttgcaataattccagcacttccgaaagaacagctattgatgttaaaaggatctgtggatgacataacccctccattatcacctgcaacgatgaatttgctaatggcaattggtcagaatcaccaacttacgcaactgatgattcaactccagaaaatgccagaactacatagaacagaaatgttgactgcctatcatagtattaacctgccaggtttatatctggctataaattatggtaatgcggatatcgttgaga

SEQ ID NO: 24377 - DNA, 572 bp, Arabidopsis thaliana columbia
atcgattccacccgcctaaacttattagtcttatgatatatctcagtatagaaaaggataccaaagatctttatttgtctataaactcaccgtcgtccatgggcatcgtcacctatcggcaattaacttgctctacaatttttgcgaaccgttcgactagcacttcatactaccgttggttttttaaaccttccgagttttgttgatgttattccgagaattagcaaaccgtaacgaagatgttcttggcaaccatcttttgatgggagtccggctgttcgatagccggccaagggtgatgaacgaaatgtgaacccttgtctcgcctaggttggatgggcgtgcttcgttggaaagcatggatccgcctaggctgtcccgagtgtgagcgaggtgtgagtgtcgccatggcatcgacaccttgcggctaggaactggaacgagacgggtagcaaagatttcgagtagcacttcatactaccgtgggttttttaaacttccgagttttgttgatgttatctgagaattagcaacccgtacgaagatgtcttggcaacatcttttgatgggag

SEQ ID NO: 24378 - DNA, 571 bp, Arabidopsis thaliana columbia
ctacacatcaaacatctacagccgcagagtcttgaggtatgtgaatattaaatcatttgacaagtatgtttctggttttccccatttgatgcttactcacttggttgtcttggtttgtacagtggtgaattcgtagtggttaataagcatcttctccatgacctaactgatatgggactttggactccaacgctgaaaaacaaattaattaatgagaatggttctatagttaatgttgctgagatacctgatgacttgaaggcgatttacaggtatagcttccacttattttgtgttttcactctctactgtctagataaagaaatttgacttgtttcttctgtaaaacaacacagaactgtctgggaaatcaaacagagaacagtggtggacatggctgctgatcgtggatgctacatagatcaaagccaaagcttaaacatacacatggacaaacccaacttcgcaaaactcacttcgctacacttctatacttggaaaaaggtacaaaccttaatcatctaaactcttcatatgataattgtgaaataggttagagattctatagagt

SEQ ID NO: 24379 - DNA, 497 bp, Arabidopsis thaliana columbia
gggaaatgtagaaacttgactgcatgaccgagagtatgagagaagtttcttccaaaggagtcaaatatctctgtgcgtgttcacaattcttgtgcaagggctttctcgatgtctttctgttatgcagaaaacaaacatgaagtaagccataaaagagtgatatgattttataatagaatatgaagaacaagagagttagagacctggatggatagaggtggaacagttgtgccataacgatcaatgacttgaccatctttgccgaccaagaacttggtgaagttccatttgatacgacttccaagaaaagagggtttcttagatttgaggaatttgtagactggtgcagcgttttgtccatttacacgcacctacacacacacatagatgatcatgatcattcatgcttagttataaacttacaaaatcagctacctattaaaggcatatgaagaagaaaagtgtcttgtttgttgaggtacttttggaaaaaaggg

SEQ ID NO: 24380 - DNA, 606 bp, Arabidopsis thaliana columbia
atccctaatacccattgctcgaactccatagttaaggttggtatactcccgttccaatgaatccatgacatgctcactctcactgctgagaaatatgtacataatgaccttaaacgtaagcttacgcaaatgagataagaactcgatttctcccattttggaccatttttctagatcagtattaacagtttcttcaatgaactgtatgtatacagagagagcttcagggccattgacaggagcagaagtcaaacgcctgagcctcttgtgttcttcaaaggagataccaacaaaggacttcctgccaatgagtttcatggtagattttggccaacctatgtggaaggcatcatcatctgttagaactcgcctacaagtctctggtgttgttactagtacacatgggtacccaaacatgtgtgctttataaatcccggtacgcccatacctgcatcattgaggaaacggagagtatgtctaagttttcaattcatgatatggagaagcaagagagcaaaaacaaaatctcaactaaagcaaaaagtttgagaagagagagcactggtgatgtaggatttggatgaggattcaggatcagatgtttga

SEQ ID NO: 24381 - DNA, 314 bp, Arabidopsis thaliana columbia
tgttgctctgagatgcaataaccaactagtgtaaccaaatggcggtgatgaacccgagaaatgatttcaacttctgctttgaactctctctccccttggcttccaccaatctttaactgtttaactgccacttcccttccgtcagaaagaacgcctttgtatacacagccaaaccctccttcaccgagaagattcttctcggagcacccactggtaacttgagataactcatcatatgacgctcatgatccttggttgctaaccatgcctgactcagatgacgcatacatgtcatcgctatgagactggcttct

SEQ ID NO: 24382 - DNA, 349 bp, Arabidopsis thaliana columbia
tggaacaatatcagctaatggagatagggaaattggtgaactgattgcaaaggctatggaaactgtcggcaaagagggagtgatcacaattcaagtgagttgaattttatccctaaatgtcaaattattttgcttattccttaaggtgaccaatgttatcatctcttgattcaggatggcaagaccttgtttaatgagctggaagttgttgagggtatgaagattgacaggggatacatctccccgtacttcataactaacccgaaaacacaaaaatgtgtaaggattcccaccttgttactttatcaatttaaggaattgcggatttaatttgctctgaatgaatatg

SEQ ID NO: 24383 - DNA, 578 bp, Arabidopsis thaliana
  unsure (1)..(578): unsure at all n locations
tgccggataattagtactgtctcgaaagaaatatttagaaactatatatggcggctaagtgtgacttgtgacgaattaaaaccagaaaccatataactctcaatgtaattccatggatagatacatggcactaaagctgaatgttatggcacctagatattagataatatgttgtgtgtgatatttatgaagattgtgaaagataaagtacctcccaaggtaaagtgcatcgccgaggaacataacacccatagcgaccgcaatgacaatagacaacggcttgaacaaggatatgtagactggacccttaagatgcagaccccaagtgtgtataactgagccaaatgatgaaactaagcctccctgaaacagagtgttagtttctgagcttaaaatataatcattacttgaagcaacatattaggattgattctcaccgagtacatgactgaagcaagggagacacccggtttaagtataaaagaattcaagtctttttccgcaaatagacatactggtgccgagataagcgtacgnataagttatacaagaatactacagttatttcttcagggtat

SEQ ID NO: 24384 - DNA, 588 bp, Arabidopsis thaliana columbia
gctttcaacttgttcaaactgccatcagcatttattttggttctgaacacccatttacttcctaaaacattcatgtcaggtgtgtatgggactaaagaaaaagtgttggtttcaacacaagtgtcaatttcttcgcccatagcacctttccagccttcatgtttcagtgcttgtgtcacagtttttggttctggatgtgatgctttctgtgttagaaggacgtatctggggtttggtttgactactcccttctttgatcttgttaccattgggtgaacttgctgaaccggatcaactgcagcttctgtcctctgattttgatctgaagttccagctgtttctgttgactgaacaggagaacgttgagtggcactgtcttgtggactgagagcgttgtcgcctatagaagcaggatctgagcctgtcgtacgctcaatgcactctctgtccacaagagccggtgactcggcttgatttcttggtgagtttgattgaatgtctgtatctgcaggttggtcttctcgttgtactgtggactgagcagcttgaggtgtgacatttggtggtgaacttgaaccgtgtgctggt

SEQ ID NO: 24385 - DNA, 483 bp, Arabidopsis thaliana columbia
  unsure (1)..(483): unsure at all n locations
nnnnnnnnnnnnnnnnnnnnnnctaaaggatgttgcgcccgacaaccagcggtgcccaacggttggcaaaaagatgtacaaggctgtccgtgacgccaatggttgcttcgcgatcgctctgtcgacgctgctgataacggcacaatacgccgtaatcccccatgtcttctccgcgctcctgcgcctgagtcagggtttccgcaagactcatcacatctcgcatacagaggctaaacccttgcacggcaatcgtgtgcagagtttgcgccgcattgcccaccagcacggtacgattggtaatagatctggcggcgtgggttaacgccagcggataagcactgcgtttaccagcgtgggtaatttcccaagtcgccagccaaaggcagactggagttcacggcaaaacttctcgtcactccacgacaacacctcttcgcgccgttccagtggatgacactagaccagcgaacagcgtccgtcaga

SEQ ID NO: 24386 - DNA, 604 bp, Arabidopsis thaliana
gatcccccggaaaattctgaaacgtgtcattttcgaaatgaagcatgggaggttcagagagctccaggatagagcacgctctcctcactttcttctgcaatatcaaatcagaatttaactggtgggcatgtgatgagattgatgagagtatctccagtataacagtaacgtgcgatgccaacaatgactgctgatggattcggtagagatccgtcactacctgaaaacaggagaaaatacagtagtgagagacggagttagatcattattctggagcaaggcaaaattagagactataacattgctagattcaattttgtatggctttttcaatatgttatttttaacattttcatacttcacatttgttgctattagacaacttggcatctcaatgcatcgtataacattttgtacatacctgaacaacttgcagctggacggttatgtgactttttgttcttgccacaacataagacatagtttgcaggctgtcctcgtcgatgtcatcttcattactaaagtcctgatcagacaatgtatcctcatctggaatgtcatccatggttctcagtgttttcatgaaactagacaatgatcctct

SEQ ID NO: 24387 - DNA, 735 bp, Arabidopsis thaliana
gttctgtataaaggcccaaaacttcttgttgctgcatcgtttacttcattcgagtcaagttggataattggaggccttttgctcggtctgcagtttttgcttctttcagtctggtttattcttcaggtagtacatacacttggaacagattcatgaaagagatttttggatttgttggtgacgcataagattgagctaaatttgtcacttccacatgattttagactcatatcatggagatataccctgaagaaatagccgtagtcttctgctacaacttatgcgcaactctaatctcagggacagtatgtctacttgtagaaaaagacttgaattcttggcagcttaaaccaggtttctccctcgcttcagtcatatactcggtaagtaatcaaacctcataagttgagaaatcaaatctttagctcagaaactaatactctgtttcagggactctttgatacatcattgggctcagttatccacacatggggtctccatgtgaagggtccagtctacatatccttgttcaagccgctgtctatcgcaattgcagtcgccatggctgctatattcctcggcgacacacttcatcttgggaggtaccatcttattaccttcaactttataatgtctctttcttaaagaaacatagtgatgataacttagttctaggtgtttgaaatgtttagtttcatcttcaaatacataatgaataataaaatgtgaagacag

SEQ ID NO: 24388 - DNA, 552 bp, Arabidopsis thaliana columbia
  unsure (1)..(552): unsure at all n locations
nnnnnnnnnnnnnnnnnnnnnnctaaagatgcggaacgaactgggttcacgatctgcgtgaagatggctttctgacgctggggctggtggcgacagatgacgaaggtcaggtcattggctatgtggcatttagtccggttgatgtgcagggcgaagactcaatgggtcggcatggcaccgttggcggttgatgaaaaataccgtggacaggggctggcacgccaactggtctatgaaggactcgattcgcttaatgagttcggctatgccgcagtggtgacgctgggcgatccggcgctgtacagtcgtttcggctttgaactggcggcgcatcacgatctgcgttgccgctggccgggcactgaaagcgccttccaggtacatcgtttagcggatgacgcgctgaatggcgttaccggcctggttgagtatccgagcatttcaatcgcttttaatctccggggtttgcagactgcttaacagctctgcaaaccctgcgccttccgctaccagacgctctttttgcagtttggtcagttgcttaacgcgata

SEQ ID NO: 24389 - DNA, 575 bp, Arabidopsis thaliana columbia
gagttcatggtctcggattttaggtctctttctcccagtatcaacctgcacaagttgctttactggtaagtttgtatgtatatataagtccacaggagttaaaccttttttgggtgtatgtgatgaaaaattgatgcttagaggactttgagatgttttcttagggtctcaagcattgagtgcaagtcaagccatccgatggcagctgcgcttattgactacgcaagatcagtttctgttgagcctaagcctgatatagtcgagaactttcagaactttccaggagaaggagtttatgggagaatagatggtcaagatatctacattggaaacaaaagaatagcacagagagctggatgcttaacaggtctttgaacttttcaattttaactacattcgtttttcgaactgtctcgagtgttgtttttgttctgtctatctaacttttacaaaatcctttctttgtggatgttagataatgttccggatattgaagctactatgaagcgaggtaagaccattggttacatatacatgggagcaaaactgaccggaagtttcaccttttggatggt

SEQ ID NO: 24390 - DNA, 470 bp, Arabidopsis thaliana columbia
catgattttgtataagtctgacataattcatctttaacaaaaaaaaaaaaaatctgtgacataattcaataatctaatttgttttatgataatctctcactcgttagctgaataaaagttccgtacgagtaagctgtgacacgtgtccctttcaatctccgctcaacgcggtttccatcgcttctcgccgtccttatataaacttcctcggccccatttttcatttctcacctctctctttctttctctaacttcttcttcttctcctttcagaaacccagcgaccatcttcttcaccggttatggtgacttcggagggattagcaagcgttgattcttggttatatcgccaaggtttcaacgttgattcatggttgctttctgataccttctctcacgacaacgatttgctcgcaagacgtctccataccaccgtcacagcccctcatactctcactccttcctctgct

SEQ ID NO: 24391 - DNA, 403 bp, Arabidopsis thaliana columbia
tataaaaagagaaaacttacccagtactgtctcgataacctctgggctaccacctccgatgaatccctccttgaatccatccgttgatggcttcctaagctcagaagcgtcgccgctcggatctgatgcttggccggatcctcactggactgcgaattcgaagcactgatcgctagggctaactgcacttgatactcctcctcagaagacatgtaatccgcacggttcgaagcagcggttggagcaggagaggccatagaagaagtagctccggccaccggaagcgtctcagtgactgacgaaggggttgcttgaggaggattagcagaaacgtgaatccgattttgatccgatggaggagctgcatcgttggttcgattctgctgctcttgagtgcccacct

SEQ ID NO: 24392 - DNA, 700 bp, Arabidopsis thaliana
tctagaggatctccccaaagctcatgcagcaggacatcaagctcaaaatgggtgacttgcgagccaaacagcaactcgtggatgtggacgactctcaatcctgcccagtacggaaaaatgatgtgggtgcaacgagacttcatgatctacaactattgtaccgattttaagagattccctcaaggcctccccaaggagtgtaaactttgattctattatgggaattttcaagcatttttctttccgttttgtttcatcttgtgatgttactttgatttattttgttctttcttttggtgtttctgagatacgatattacatgtatacgtattcttcctgagaaaataagaagttgtattactcgataatacattttatctctcaatgtggtgtgattgtttattgggtttggcgtacaatgaaagctacatcaatgtgctttagaaaaatgcatacgaaaagaaaaacacaacaatcaaaaacccgtgaggtaactaaattatctccatttacaaatatactaacaatactactaatttattgctaagctgtcagctgtcacgaccatgataatgaaaaaaaaaatcatctctgttttcttctaaactttagagtttctcgaattttcacatataataaaaataaccaacagttatggtactctgttgggtgaagatttgctatgtggatatgtaaaatg

SEQ ID NO: 24393 - DNA, 606 bp, Arabidopsis thaliana columbia
ttatctgaccgtcgattatagtgaaacgatgtcactattcatctaattataggaacaatccacatgtgaccacacgacgttattaaatgacattttcattgtttcgattatagtgaaacgacgttgtgtagattcctatgttttcatgttttagattcttgtaatcttgaaaaagatcattgttcatgtgttgatgaagctaaggaacaataatcacattttcaaatgggttgatgaagctttgatcaatgagatagagacattgacagcaaggcatggtgaaatcgagaaggagctgaaagagcttagaacagagaggttggagtttgagaagatggtttccgagaaggtggaaatgaacatggagaaggagttgaatgagaaagttgaagaagctttgtctgaagcgaaaacaagcaataagaagatgatgattgtcgtagtgttcgggtgtatgatcatgatcggattctctaaacttgtaggatgaatgtgttaggtgtggttaatgtatgtttgatttaggtctggaaatgtgatcttggtacgtatggtcaatgtatgtttgttgtagctttgtgtttgtccgttatgtgtttaagtgaa

SEQ ID NO: 24394 - DNA, 489 bp, Arabidopsis thaliana columbia
cacaaaagtcaaacagaaatattgaaaaataccaaatcaccttgtataagtgaaaactggaggcaatccatggaaattcaagaaacaagtctgaatatgagggctcgctaaccatggcgtcgccacatatctgaacaaaaaaaattcaaaaaatcagaaatctaaatccacaattttcgcccaaaatcgaagtacacacacatacactcaccggccgtgaagaatctgacaccgagaaacaacaccgtgataaagaggagaatctggattgtaaatgagattgacgcgacatctgaaataacgaagaatcgcatctccaaggaagtgaaattcgacgaaattgtagaagaagatggtacagagaacgaagagagcgatgaggtagtgacgaatcgggatgagagttagagcttgaaagagaagatcgtatggagatggagatagaatcagatcttcttcttccattgatttgatttgtgatttgttttt

SEQ ID NO: 24395 - DNA, 524 bp, Arabidopsis thaliana
aaaatcatttcaggatcatgagtacaaatcttcaaggcctggatcccactccagaaactcctcttcggcacaagccagatcctcctaccctcaaagagatcaggaccttcgcagtagaagaattgataacaaagatctcaggaatagcaactacctaaaccgtagttcctctactcacaggactccaagctatagaagatctccccctcgatttcttgactattctaggagggaatttacaagagaacgtcacagatatcaagctcctagtcaaaactatagcctgcaatggagagagaaatcttacctacagactgtggcttacacagaccactcaacctcctctagagctaggaggccgcctctagagagaacatcttgtgcaggtgaatcttcccattaaccacttcccataccaactactgaggaagttatggacgaattaagggagatccagttcaatatactagctgcgctgatccgacagagagtttacccgcaaacagagagtcctgcaaggggaa

SEQ ID NO: 24396 - DNA, 583 bp, Arabidopsis thaliana
  unsure (1)..(583): unsure at all n locations
gtaacctccgccagtgtgctttaaagaacgactggtcagcacaaagtgatcggtaatgaacggcaacgctccggcgattacgccgatatcaagaccaaataacaatcctgcgaccgcagcagctaccgaaacaaacatattcatacgccgcgtatcccgcaaagaacgtggcgttaaagcagattccgtattgatagtaaccattttttcctgccagcagagagtaagacatagtgaaaaaatacgtgaacaactcacgcaggtgtcaggtcggaaacagcataaatatggattaaattgctgcgacatgtcgttatgtgatggatattccaattttcaaattaagttgaattattgagattattattaaccacctaattttacagcagataaaattcataaagttcattaattgataattaatatggattatttcataaccatgatatggattatgatgatctacaggtataacagaccctgccatgcggcagggtncataatagtaagaagaatggattaacgcgccagcaaccgccatccacggcaatggtataccatcacagtaatctgaagcgctgga

SEQ ID NO: 24397 - DNA, 434 bp, Arabidopsis thaliana
cttctaggttatcgaggagagcttcgaagaactttccccagaacaaatctgcctctgtttctccgactattgtcgccgcggttgcaatgtctagcggtcaaacaaaggagcgtcttgagctgaagaagatgttcgaagatgcttatgaacgatgtagaacttctcctatggaaggtgttgctttcaccgtcgacgatttcgctgctgctattgaacaatacgacttcaattccgaaatcggcactagggtttgtctattctcttttacctacttcagattctttggggaatttgaaatatagttctaaagatatgagttttattacatgacaatggtggttctgtagaaattgtgtatcatttgtggttaatgatgttgttttaggtaaaaggaacagtgttcaagactgatgcaaatggtgcattagttgaca

SEQ ID NO: 24398 - DNA, 382 bp, Arabidopsis thaliana
cgtatgacagattagagtggggttttattcaagaggttttggttcgcatgggctttcatgaaaaatgggtcagatggattatgcaatgtgtgtctacagtctcgtatgcttacctcttgaatggaacagctaaaggttttgtaaagcctgagaaagggattaggcaagggtgatcccctctccccttatttgttcatcctctgcagtgaagttttgtctggcctctgtaaatctgctcaagatcgaggaaagttattaggcattagagtggcaaaaggaagccctagagtaaaccacttactatttgcagatgataccatgttctattgtaggagtgatcctcagagttgtagagaactattaggaatcctataacaatatg

SEQ ID NO: 24399 - DNA, 405 bp, Arabidopsis thaliana
ttgtatgaagatgaatggaaagttttcgagtgtgaagaaggcgcttttgttggttacaaactgtcttcaagaaagtggtgcacctccaacatgggacgagtgtccgtttccgcagcctggttatccgcctgagtatcattctatggagtatcatcctcaatgggatcatcctcctcctaatccaatgcctgaagatgttggaccctttaatagaccggttgttgaagacgaggttgcgtccaggttgttatgcccggcttacaaagttggaagcttgattgggaaaagtggagctgtggtgcgagctctgcaaaaccgaagccgtgcgtcaatcaaggtttcggagtcaactcatgaatcagaggagcggactatcgtgatatcggcacgagaggtatgttgatt

SEQ ID NO: 24400 - DNA, 553 bp, Arabidopsis thaliana columbia
  unsure (1)..(553): unsure at all n locations
gttaatcggaaaccatttcgggaactgatcaaggatccaagagagagcgaaccagatctcgcagatgactgagataagccagagagggtatgcgtctttggctggtgtcaagatacggaaacggaagaagaaaactaagatcacaaggcgaagaacgatcacgatgcggtaaggactgattttgctcgaagagattgggacttttctccagagaggttgtcttgcttcagcatctctgtaaacaacaagaactcagttacttacgcttcaagtctttaatacttgagataaaaggaaaaacagatttttgtttattacaggtattcttcttcatcatcttctttgtcttcgtttgtttgttctcctttagtcactaaacctctcttctcttgcctcgctttccatttatctacacgttctttccactccgcatctgtgtagccatctctctcagcttcaaagtcttccccaacacttcaaatcaaatcatacagaaacaggtctcaaattttgcgtttgcacatctataggtanttacatattcacacatatt

SEQ ID NO: 24401 - DNA, 232 bp, Arabidopsis thaliana columbia
taccacagatatcagacttgctatcccctttaattcaacttgtaaagacgggatttacaaaggcagtacaacgtctggatgggatatatgcgctactgatcgtttccaaaattgctgcctgtgacatcaaagcaggttcaaaccagcagcttatgtttcacattcctcttattcagtataatctgaaggtccttcattgctttatccttattcgtatttttcttctttttga

SEQ ID NO: 24402 - DNA, 420 bp, Arabidopsis thaliana columbia
ttccccaatcttcttcttcatatccttgaaggagagagtatagagaatccgatccaaaaaccctaaaccccatttcccgcggattttctcccaagctgatacggagatcaaatgggagatccgttggagaggttgggttctcaggcatcaatggctactgagtctgtcatgaaggatgacttgtgtttagagatcgatcctcccttaactgaatccgttgccaccgctgaagattggcgtcgtgctctcggtaaggttgttcccgccgtcgttgtactccgcacaacggcttgtcgcgcctttgataccgagtccgccggtgctagctatgctactggttttatcgatgataagcgacgtgggatcatcctcaccaatcgtcatgtggttaagccaggtgcgcctgtagacttgttgaga

SEQ ID NO: 24403 - DNA, 522 bp, Arabidopsis thaliana
caaccagcagatgcacaggttgatgtaatcgcataatatcatctctcagactggtaccgccagtggtgaccataacctggatattcaaatatttggaaagctccttgcaaacttgtgatgtctgaagggccagctctcgcgttggaactagaatcatggctgcatataaaaaatagaacaagtggttcaaggacaaacacaaacagtcaactgatcacttatcaactcaacagggaaaaagaagtataccttgaataacattgttatttgggtcaattttctcgaggactggaatgcagaaggcaccagtctttcctgtaccgtttttagctctagcaagaatatcactaccagttaaagcaattggaatgctctcttcttgaattggagatggcttctcaaaacccttctcatatattccctttaacagatctcttttcagaaagtaatcttcgaattcatttccctttgtagctgtcacatcctgcagacaatatggaagacattgctcaacacgagttt

SEQ ID NO: 24404 - DNA, 525 bp, Arabidopsis thaliana columbia
atcatcatcatcggggagaggctgagctgcagcagctgcaagatcggcctcattctgctgctgagcacaatgtcaaggtgaacctctggtggagcaagagctggtgactccacaaagtgaaggttctggtctccagccagtttcctagcaaggtacaagaaaggcttctcgaagttgtagttgctctttgctgatatctcatagtactgcagattcttcttcctgtggaatgtgacttgctttgccttcacttgcctgttcttcacatcgactttgtttccacacagaacaatcgggatgttttcacacaccctgcaaagatcacgatgccatgtcggaacattcttgtatgtgagccttgctgtgacgtcaaacattattatcgcacattgaccatggatgctgcaagaaaaccgaagattagcaatatatccagatggaatatcaaacaaaccattatcattcaagtccagtcagctattcgtattgtccagggtacaatagttgcaaacatgacatgtgaga

SEQ ID NO: 24405 - DNA, 555 bp, Arabidopsis thaliana columbia
ccctaaggttcttaacatgattaagctccacgggaagcctatacgtgttaacaaggtatcgaattgtttctgtaacttacattgtttagtatcgagcggatgggttttgtgagttttgatgctgagacttgtttaatctatcttctatgagtttgctaacattttgtttgctggttaaatttgtattaggcatctcaagataagaagagcctggatgttggtgctaaccttttcattggaaaccttgaccctgtaagtatcttttgtggtagactctgattttgatactctacaaaggtcatttaatctcttagctgaccaggttttgttttcttttataggatgtggatgagaagctcttgtatgatactttcagtgcatttggtgtgattgcttctaatcctaaggtagtattttttatttcattagattgtagttcatgattcttgatctctttatctgtctcctgtcaccgattcgatagtaaattaggattcatcggtattccactgtggagaataaatgttagaaacttttcatttcagataatgagag

SEQ ID NO: 24406 - DNA, 433 bp, Arabidopsis thaliana columbia
ctctagatgaattcatctatttctgaaattgcttggactaccttatttgtacttttattaagattttgttcaaaatcatatgaactgaaatttatttataaaccaaaccgaaccaaaaaaaaaaaagtattcagttctagtttcaaagaagcaaattgtaaaatataaaaacagaactatatggtcaccttaagattgattgtatatatagagagaaagagatcacctttccgattcttgcatctctagaatctgcagttccggattgagcagagcgacgatgaacagctgagtgaacttcgacgactggtccagtacaaggatcatatacttgccaagtgtactgctcgttaccactaggacatcatgtgtcaagaatggttctggttctcacccatttttgaccatacttagcaacacaataagcgttagt

SEQ ID NO: 24407 - DNA, 559 bp, Arabidopsis thaliana columbia
tcatagaggatcactcagggggagaagaatttgaacactaattcattctcaaaatggttgcagtcactcgtccatggtccaatgacaaaagttactttttggcctatgtagttttgtcgtggattcatatttcacacatataatcatggaaaagacaaaaagaatgccaattatgcagtttgtgtgagaggcacttcagcttcgagttcaaatcaagaacatgatatctatggagtattgaaagagattttagagatccattaaccaggaccagatgatcttaattttgtggtgtttaactgtgactagtatgatttaaccgttggaggaggcatacgagcaatcaaatctgggattattgatgttaacgtcgcaaaacgttatggaaaatacgatccttttattttagcttcacaagcagatcaagtcagttatgtgccatatccatggatgactccacaaaggaatcaacaatggacatcaattatgataaaagccagagggaaagtattactcagttcaaattcagattttactacaatgcaacatggaagtgatg

SEQ ID NO: 24408 - DNA, 612 bp, Arabidopsis thaliana columbia
gaggatcacgatccccccgtatacttgcggcattggtgaaggttgttgatgatgccgtctcatcgaattacttctcaccgtagatccaaactcggagcgtgtcccgacctcggaaattgattctctatcatcatcttcttcctcttcctccgctgcgtccgaggagctcgtggtgctgtaatgatcgtgatcctcccattcactacactgtacttcctctctctccgtctccgtctcttcctccacctgatttctcattgattcgaactgcttctgcttttgcttcctcgtgtcgaagaaatcatactctgacctcactgtttccgtatcctcgtcgttgaatcgattatcggagttatgtttcttctcttgagccttcctgttgaagaattcggaatcgggaggagaaggagggtagaaattctcccagttccagacggaggaggcatgagaaggagtagcggagtaagtagagttctgataagcactgggatacaaattgggcatgaaattggatcctcacttctcggtgaagaagaaggacttgactctgagagaatatgaggcagtctaggttttggttgctgtttccggcgtcgattggaagaggtg

SEQ ID NO: 24409 - DNA, 517 bp, Arabidopsis thaliana columbia
ctcgaatattccgattgtcgtcctttgacatttccaatgacgaagaaactcgatccactattggcaacttcaagcgacgaagatgacttcgagacttccaaagatgatttctcttcatttattccatctaaattgaactggacctcctaatttcacttctgctatcagatggatggtcaaatgtaccattacagtgaaaaatgatggaggaaatatcatttctaaatggcataatgtaagtgtaatatgctcatgtaacttatccacatcttgaatatccaagacctttgaacttattttcccaaagaagcgacataactttgtaataacaaacgagactggaatatttaggaaaacaaatattgtcgcaattaattagatgagaaaaaatatatatatatatatattcccttcactagccgtcgtcttctcgcgagacctgaaaagcttctctcttctctttcgctcgaatattccgagtttctcctttgacattttcaatgacgaagaaactcga

SEQ ID NO: 24410 - DNA, 528 bp, Arabidopsis thaliana columbia
gtgactttgattatctatcatgtcgtcagtccaagaagccatgttatctaagtttctaacgcaaagcttaacagcttcctcttcggttcacctgaaccgtcaatttcgacggcgatatgttgttgcagttaaacttcaccaacccgaacaagaaaatcagtgtgatgtttgagaaagtttcggtaaaaatattgtttaccgacgaaatgattgccacacaaggtatcttgccgttttcgctaagaaacaacacgactaggctacaaacgatccatttggttgcaaagccgatcttcttgcctataaatgatatggttgagctcagaagacaagtgacgagcaacatgattgaatatgaaatcataagtagattcagagtaaaagttgttattgggtatattaactattcgtattggttaaaagggagttgtcaacttcagttgaccagtccgccagccgatgacttactgtctcggaagtatacactacagaaatatgatgaagaatgtatgatgggtgatatatata

SEQ ID NO: 24411 - DNA, 2074 bp, Arabidopsis thaliana
catatccaaacaccggaatagcttcccacaagtgcttgccggaatctcaaaccactcttgccctcttttactgcaataatatatgtagggactcggaacaaatgcctctttgtacgaccacacaactaagtagtctttggttttttcgtctacccacaaaaccgaattccccactattgcacggcttgttctgtggcgatcgtcgaagagtaggtggaatacatagttaccgggtcgctcgaactttgtgccggtgtttgaatattcaagaggtgggagacgaatgagctgtggcgtgaagggattaatgatgtagaaattgatttccttgtcaaagaccaagacccaactcccacaagacgccacgccacgacactcggcaaagcgacctaggtatactgttctgtaaaacttttcttcatcggaattaaacatgagccagtgcgtgtcttggtagagaatcaaccacggagtatgattttttctaggtgaggatgatttggaagcaaagtaccacgacgaacaaacggtcttagctcgagcaaaatctgtaaagctcaagtgcttgaaaaccaatgataagatgtctgtgacaagctccgaccaattcggagtaccatcatcatctgttgccatcgctctaattgatttcgtatgcaccggttgaggttgaatttatagacacaatcacacacctagggttttccgagaaagaggaattttgatatttctttttttgtaagaaaggaaatttaccgtcacagtctccctaaattgtaggaaatccaaccaaccagaatatatatgaatagaatagttgtcaattaaaaaagaaatcattagatgatgtgatacaaaattatcatttgatgttacatgaaatcattacatgtaaattggcattattcagttatcgtctgaatctcgatgcttattcagttatttggtttgacaaaatgtcacaactgcctgcttgcatcagatattgaaattgcggagaagatttagttattgaaaaggcccgagtagagggatagtgggagaagcaccatgttctgaggacgattgcttgggctgcttgatgaatcatttcgagcatgatctgccgattgaattgggctacttccttttggaaaatgatgcgatctcggattgggcttttattgggtctagaattgaataagatgatgagattgagagtggtgggatctcaagacttggaattacatcaatgcccttgtatgcaaagaccgaatttatcatttatagttgcaacttccaaattagtaaaatattgtttaaaaactttattatagagtgtattatactattatataacatataccaaaaatccataatttaatgttttcttctcaaatctttaatgtatatttacttttataggatttaacaaataattgcattagaatttgggtattttgctacataggatatttacccaaacatcagcaagaatttgcagctacgcatctctgaaaaagctggtggatgttcaattgttcattcaattttttagagtatgccacctaacttgtagacgtgcgtttcaacttcaaccattccatttgtgtcacacattgaagatttgatgcttgtaacttgaaagtctagtgatattacttaactatatttgtttacaaaatttactagtacagaaattacttttacgtttaggcgctctagtgaatgtgtgtttgtatgcgtttagtgaaacagtaatctagtctctggtcccatttatgtagtaattatctcaatggagtaaagtagaaagaagagtttgtgtgtgtgcaagtttcacttatcaagaattggttggatcttaagtcctctgattggttgcaatgatgatgcttctgatctcatgaccaacccggttctggctccggtcatgcagcagacatgcctgcaagtcttcttccgattggtggatgtggaggtgacaaacttggttctgacaagaaaggggaaagtgttggtagattgatcagagctggaggagaactcatgaggatcacatcaggttcagatgatcttcccaattgggaaagag

SEQ ID NO: 24412 - DNA, 578 bp, Arabidopsis thaliana
gctcaagaagaggtgagtagtctgctgacgtgagccttttagttaccaacggcaaacctagatatcgcaccggaagttgccccacatcgaaaagaaatttagccgctatctcttgtttgattattggggaaacccctgccatgtataaagtcgacttttccaaacttattctcaaacccgaacgtttacaaaactcatcaaaaacctccagtattccttcgatagatcgagtcttaccatctgagagaaccatcaaatcatctgcaaaactaaggtgtgttagtcccaaacgttgacacttcgggtggaaaccgaatttccttacacctgcagccttatccagcatcttcgaaagaacatccatgcatatgacaaacagataaggcgagagggagcagccctgccttagaccccgcttgctctggaaataacccacaagatccccattaacctgaaccgagaaagaggccgtagtaatacaaagattaatccaatgaataaacgtgggagagaaattcatggctaccaacgtgtttgtaaggaaggaccattggactgaatcaaaagctttagatatg

SEQ ID NO: 24413 - DNA, 443 bp, Arabidopsis thaliana
tgatttaattgtctgaaaaggttggtcacaaacctatttgctctgtgatcggcgaagagtatgtcgaatgaatagttaccgggtctctcgaactttgtgcctctgtttgtatattcaagaggtgggagacgaatgagctgtggcgtgaagggattaatgatgtagaaattgatttcctcgtcaaagaccaagacccaacttccacaagtcgccacgccacgacacttgacaaagcgacctaggtattgtgttctgtaaaacttttcttcatcggaattaaacatgagccagtgcgtgtcttcgtagagaatcagccacggagtatggttttttctaggtgacgaggatttggaagcaaagtaccacgacgaacaaacggtcttagctcgagcaaaatctgtaaagctaaactgcttgaaactcaatgataagatgtctgtgac

SEQ ID NO: 24414 - DNA, 545 bp, Arabidopsis thaliana columbia
tgaagaagacaaaggaacaaaacctgagtcttgtcatcagtatcaatatctgtggaagtgtcagtatgttgactgttatcagccatagctgaaaccgaatcacaccaactgctgttcacttctcctactcctcctcctactaatcttgtccctttctggtacactagttgccctgtgtccaaacactcctcttctcctccttcaagtctctccctcaagccaccaccaccaccaccaccacaatccataacctaaaaaacagagtatacatacatacatagaaagtctgagctaaaaaaacggaaacttttttctattttaaaaatttgggtttggtgaactttttaccgtatcaaacgtcgtgtagtgtaagttagctgaagcaatagtgacatctgcaggaaatcagaaaatggaacctacttgagattctttcaacaaagcttaaacctttttgcacttgtaagaaaaaaggacgagaataagaagctaacttggacttaaatcgatagctgcttcatggtgaaaccattgactggttgatg

SEQ ID NO: 24415 - DNA, 386 bp, Arabidopsis thaliana columbia
cccctcgagaacactgcgcagagtcacaactgcatcgtttgttctcttcaaaatgctgctgtcatcttcaatttcaaggctttgaagatcgttgtgcgacgaagtaagactcgcagccagagcaaactgagcggctgcagcccagcgagaagaagccagccatttcctttggccttgtaagtggtgtgagtcatctttggcacgcttgttgtcgagtactaaactacgcaagtactcagcatttgcagctccagtgctttgaaccatcttggagaaagagcttccttcatttgaaagaaggttctccggtgaactgaattcttgaacctgagtgaactgattggaatagaacaggttagctgagatacaaggagagtgtgagattg

SEQ ID NO: 24416 - DNA, 561 bp, Arabidopsis thaliana columbia
tcggattaacggtctcgttgatggtatctctggtacttggtgagtttccctgagatctcttgattgagtagccaatcagattattggaaacttgtggtgatatttttgtttgtgaatcaattaggtatgtaaagtttgatactttcactcctgcggcgtcacggggacttcctgtgactagagtaattagtagaatgactctgcagcagattctagcacgtgcggttggagaagatgtgattagaaacgagagtaatgttgttgattttgaagattctggagataaggtgatggatgattgatttttacttaaaagagactattgatataaggaaagaatccaatgtagctgtatgggtttgttggtttaggttactgtggtactcgagaatggtcaacgctatgaaggtgatctgcttgtgggtgcagatggcatttggtctaaggtaggttttaactgaatagagtatacaaacagctttcgttgttgagtatagaactgaaagattgtgccttttgatttttgtttgtaggtgagaaataatttgtttggccgtagtg

SEQ ID NO: 24417 - DNA, 460 bp, Arabidopsis thaliana columbia
tagctataaaataatgtttgaggaacaaagaagtaaagatgcttactctggtatgtgaaggagaaaattgattgaagcagaacaaaatcacacgatgagcaataacgtccttggtcaatagaagtgaaacatagcatagagtttccatgaaccgagatatttgctcttcagaacaaagactacgcatcaaaccttgtattgcatgtgttctgttatctccaacataagagagaaaaaaacaaaaaaaaacaagtcacatgaatggtattagtgagactaaatgaaatggacataagaataatgcgtacccgtgtgtatggacacaaagcctaacaaattcaaaaggttcctcaaggactatatccaaaacccgagtgatctgttcatcggtgcatttctccataagctttcgaaagactttatggccataataatcaagcatcaattcacatacatgtga

SEQ ID NO: 24418 - DNA, 462 bp, Arabidopsis thaliana columbia
gattcaaagcagagagacagagagcgaatacgaatagtgaaggaagattgtggcaattttagggttttttgctttctttaattcattacatagaaattgtcaattacgtacaacggttagatattagtaaaatggaaatcggatctaattcagatttccgttaaaaataaataaaagattttcattacagttactgaagaaaaatgaaataaatatggaaatcgaatttaacaaattcaatataaaccctaatcccaattctctgactttattttctctttgcaagaaactaaagcttctttctttcaccgtgtaaacaacaacaatggattcttcaatgtcgacgaagaagaaaaccaaattgtctgtgagacaccaaacttgtttcaagacatcgtctctttcttcttcttctactgcaaaacagaccacgaatttgtctatgagagacgagaccatgtt

SEQ ID NO: 24419 - DNA, 572 bp, Arabidopsis thaliana columbia
gaggaagaggattccccgagcttaattgtttcacattatatgattaattacattcatctaagggttcttgaaaagcctctgagcttcatgagtagagttcgcatctcctgttgtcgtcattgggttcttgaaaagcctctgagcttcatgagtagagtttgcatctcctgttgtcgggcattggtttcttgaaaaaactctcagtagagtttgcatcatcatgacgtgtgctacgtctgctagttgcttgagaattggccctcgatggttcttcttgttgcggagaaacagagactctgatgaatgtcctcccattgatcacctctgtcgatgatatattggtcatagccgaattctgaccacagtttggacaaggaaaggtcttgttaagatgattctgcgtcgaaaaatgacaacatctcgttgtgcatttattgcatactgtcgaaaaggtcatgctcactgtcgaaaaggtcatgtccacggtttcgacgaagaagaagaagcaggctctgcaggcttattacacgaagcagatggttcgctcttttcttgttttggtttctcttttg

SEQ ID NO: 24420 - DNA, 532 bp, Arabidopsis thaliana columbia
agcttcgtgtctttgtggtgtatgattaggtgaagatctacactggagaaggatggaatatggactttcctttagatcactttgaccgatactctcctcctgatttctacgcaaaggcaagtgttcattcatatgtagaaaacgcaataagaacatggtttaatatccctatgaagaagctaataaaccctaattaggtttcttggctatcaagtcattggatatatctcaaatgtagttgttttcctttcaggtcggaatcgcaggggttccattggacacagcaagttacagaacagaaatagataaagacgaatggtttccaatttgggacaaggagtttgagtcccattacgtgttcctgagttatctcttctgtgtatcacagtcaaagattacgacagtaacactcagaacgatttcgctggccagacatgttttccgttgtcggaggtaaggccaggtattcgtgccgttcggtccacgatcgtgccggagaggtctcaagcacgtgagactgctcatgcggttt

SEQ ID NO: 24421 - DNA, 567 bp, Arabidopsis thaliana columbia
gggtacgagctcgaattcgaatacgtaaaccacaatgccaagaaacgtaatgagcaaagcaggaccaacaaaagaccatccccaaccaaacttcaaaagccccgtagcgattaaagtcccaatgatattccctaatgatgtatgagcactccaaacacccataatgactcctctcatcttcttatcaaaccagtttcccaaaaccgcaaccacgcaaggccatccaatagactggaaccaccctgccaatgtctgaatcgcaaggaaatagtagatagcatggatattggcccaaaaagcgactccaaacagagcagtacacactcctgtcccgagcatacctattgttagaaacgtcctgaggtccaaacgatcacccaaatgaccagccacaaacattccaaccgcgtatacagagaggaaagccaaatcgatttgtccaagcagagctgttccatctggaccatcgaaaggagcccatcgactttatctgcacccttgaaatgtcgggttggttgtcagagagtgttctttgacgatgctgttagctttcgtgttgcgtggaag

SEQ ID NO: 24422 - DNA, 543 bp, Arabidopsis thaliana columbia
cgcctcgtcggatagttcttccaccaccgctgctgctgctccggcgaaagttccggccgctaaggtaaacctcctccaattggcccaaagagaggatccaaggtacttattcatacataatctttgatgcatgtttatacttcaaaattttgagtttattgatgatagccaagtttggattacaataaagtttctggactatttagaataattttgtaagtatggggtcaatgtgaaacttatatgaagtttttggacctctagatcaggattaaaaggaactaacccttgtggtagaagaaaattcaagcttaattagatgctagtagagaagattggactaatatttgagctaaactgggtatcatcaataagttctgggtctatttagtatacatattaagagttatagggctactgtgaaatttataaacaattttgaggacttacaggtcaagattctaaggaaagaatcatactggtacaaagacgttggatcagttgtggccgttgatcaggtaatgcatttacttttgaagttac

SEQ ID NO: 24423 - DNA, 539 bp, Arabidopsis thaliana columbia
  unsure (1)..(539): unsure at all n locations
ctcatgtcaagctctaaagcctctgcttcaagccacttctctctcagatcatcaaggagattcccttggtctgtggtcatcatggcacctggtgcacttggaacagtggttcgaagtgaagagtctcctgatggtggaggcaatgttaataacattgccctgaactcgtgggtttcaacaaatgcctcaaaattacaagcaaccaagtccaggcagtactctcttatcttcaacactccgtacctataccattgaagttttaaactaaacctgtcagctcatatatcatccatcaatgtgttactaacagaaacattcttagcaccgcattctacaatccaccggaatcaaagacatcaattagaaaacaggtttagataagaagaaaaccatacatatctgacaaaaccagccattgacagagttctgcaggtgtggcagtttccaagtgaggcaacaaggcgtcacacnagctacgtttaagcggaaacagcaagtagcgagatgcaacatcaaagatctcctcagcctgctaagta

SEQ ID NO: 24424 - DNA, 540 bp, Arabidopsis thaliana
  unsure (1)..(540): unsure at all n locations
cagcatcctaaaccgcataccaacagagacgcgagtgtgataaaccgctttcacatacttagccaggggtataacaaactctgatggactcgccctgcagaaaaaccgaatccgtttgatgcaaaacgaagagaatcaacacataagtgcattcataaggtacttaagacgatacctcgggttatagaagatggtgaatcggctgtttgtagcggcacattgagctgctgcagcaagaaggcctaaatgcatactgtcacttgacaaaacagatgaaggcatgacagtttgtggtcggttggctcgtcttataccaagaagtaattgattcttatcgttcctagcattacaaatacttgagtcagtttcatgatttgaatgtaacacttaaacaaaaaccccnaatttgaaagatgtttctaaccagatgaaaagaacagagtcaccagcaacaagccttttagcactcacaaatacgctcctaacccgtggtaaggagatgtctctttggttggcctataacgcagaaacaaatacaga

SEQ ID NO: 24425 - DNA, 530 bp, Arabidopsis thaliana
  unsure (1)..(530): unsure at all n locations
gagtagtaccggccgccagtgtgctctaaaggtatgcaggcggggggacgctggcgtaaatattcccgcaaagccacaatgcccggctggcgtaacggcgcgctcaacatttgccaggcatcaggcgacacggcacaacgctgcttaagcggttgcgggtagctaacagcagctcgccatcggcactgcgttttgctgcttgtgaaacaatttgcccgcccgccagtgcgccacnctgaaaactaaacagccgacgcgtactgccggtgagttttcctgttcacttcgcggccaactgcgcgaaaggtgcaaaatactgccggtgtcgggatcggtaaaccagatgcgtaaaccataatgctcaatatcctgccagcaacgcatacctaaagacaccagccgcagatgatcaagctttgcttctccggcaatgccagagccaacgaccgtgcgccacggcacaggaggaacttcaccaatactgtcgcgccgggccatctcttgtgcgcaatttaatcgactgtttaatg

SEQ ID NO: 24426 - DNA, 536 bp, Arabidopsis thaliana
agaggatcccctgcaatggattggttctgaggtgaaggaagagagacagagtagtgattggattgctgagacggcggaaggcggtaagaaagttgagaagaagaagagtagtaagagattagaatggtggctttcgttggatgaagagaaggagaaggggaagaagaagaagcggagaatggtgagagagtggtggaaagatgagtataggaaagagcttgctaagagaatgaagaagaagaagaagaagaaaactttggagtctgagttttatagtgatgatgtgagtggaagtgtggatcaaaggcggcacggggatggagaagtgtataggaagaaaagaagaggtgttagtagtaacagtataggtagtagcatagactggtggttagatgggctaagcggtgaacaatggagagcacggcgtagaaacagtcaagattcagttaagagtttcggagtcagtagcacgccgagcatgaggagggcgatgttctattgtgctcctgagtgttgtggtataccatagatgatgt

SEQ ID NO: 24427 - DNA, 539 bp, Arabidopsis thaliana
tctagtaacctcgccagtgtgctctaaaggatgaccagttaaaacaaagtgcacttgatttccatgaatttccagttccagggaaaatccaggtttctccaaccaagcctctggcaacacagcgcgatctggcgctggcctactcaccaggcgttgccgcaccttgtcttgaaatcgaaaaagacccgttaaaagcctacaaatataccgcccgaggtaacctggtggcggtgatctctaacggtacggcggtgctggggttaggcaacattggcgcgctggcaggcaaaccggtgatggaaggcaagggcgttctgtttaagaaattcgccgggattgatgtatttgacattgaagttgacgaactcgacccggacaaatttattgaagttgtcgccgcgctcgaaccaaccttcggcggcatcaacctcgaagacattaaagcgccagaatgtttctatattgaacagaaactgcgcgacgggatgaatattccggtattcccgacgatcagcacggcacggcaattatcagcactg

SEQ ID NO: 24428 - DNA, 341 bp, Arabidopsis thaliana columbia
cgattttggagtcttgccacggcgccaatatctcccaattcctgtcacattgcacattttcaatacttgtttcttgtaacaacaaagactggagataaagtgagagagggaagtgaacaacttacatatccatggatctgtagtaattcaaagggccagtgaatccagatctttgaaacttttccgcatacacttgaatctcttcttctggtatccaatctggaatcgtcgacggtatctcaagatgatctatgatctctgtgtcaggaggagccactaagtagtctgttcctgttaactagcaagaacttcttcattaccgataaacaatcatgcttggc

SEQ ID NO: 24429 - DNA, 893 bp, Arabidopsis thaliana
gtgttttatttcggtgcagtgcgatgacgacgactgtggaggacaatcgcgaggtcctcgaggctgttttgaaagaagcggtcgatctggtacatattttctttagtaaatttgtgaaactttgtaagggaaaatggtctgagattgtgtttaaatttccaggaaaatgtgccaattgaagaagtatttgagaatctgagatgtagcaaggaaggtctcactacacaagctgctgatgaaagacttgctctctttggccataacaaactcgaagagaaaaaggttactaagtttgattttgctgatattctgaaagtttgggtttttgctactgaatgtgttttatgtattgtgctgaagtagacaaccgctatttttatcttttttgaaggaaagcaaattccttaagtttttaggctttatgtggaaccctctttcctgggtgatggaagctgctgctattatggctattgcgcttgctaatggaggagtaagctattttcttaactcttactttgtacttgttttgatatctttttttagtttttgttcttgataatgtttgtatcagggaaaacctcctgattggcaagactttgttggtattatcactctgcttgtgattaactccaccatcagtttcattgaggagaacaatgcaggaaacgctgcagctgctctcatggcccgtctagccccgaaagcaaaggttctatatgcttattttcaattgtttcttataaccgagtttttttatgttttttgtttgtttatgtgttttgctttgttggatactctctttaactcatttggttgaccatttgatttttccttatgttaaatgtatatgtgaaggttcttcgagatggaaggtggggtgacaggatctgcga

SEQ ID NO: 24430 - DNA, 291 bp, Arabidopsis thaliana
gggtaccgttcaaagtgttgcgcctaacattgatctagacctccgggaagtttacttattgatgctccacttactttcatctgggccgtgcagaaaacttatgcactgttgaggcatgaacttcttgaacatgagcttcttcctagaagatatcatgcttggtactcgaagagtggattgcctagtggggatgagaatgatgatggcaattcctctcctttgaactgtactgagttggctacgaggtaactatcagtgtcacgctcaccgtatgtagtactagtgtggatt

SEQ ID NO: 24431 - DNA, 481 bp, Arabidopsis thaliana columbia
taattctattcacttcctctagtttaaactacttttattgaacttttcctttgctggttattggtttaattaggatgactatgctgccgatgatgaccagtatgaagagaaattgaagaaggaaactttggcatttttctgtgttgctacgtaagaactctccagtctgattatgatttcgttttctttataccctttcatagtttgttggattcatttatttgagaacatgtttagttatggagatggagagcctactgacaatgcagccagattttacaaatggtttacggaggtttgttgcctcagtgttgttatccatagatttgatatgctctgtgtagctttacgtcaatactctgtgttttatgtttctaggaaaatgaacgggatatagagcttcaacaactagcatatggtgtgtttgctcttggtaatcgccaatatgaacattttaataaggtagtatgatgagaaattg

SEQ ID NO: 24432 - DNA, 551 bp, Arabidopsis thaliana columbia
tactccataaaggtagcattcacaatcccatcataaacagtacacttagacttcaattcatcaaagaactcaacagccttatcgaaatcaccaaggtccaaatatcccctaatcagattgttgtacaccgtggaatccgcagcttgacctttgctcaacatctcccttaataaactcgcagcatctccgatccttccagcttgaaccaaacctttggtcaaatgtctataagtaactgaggatggagcaaaaggagcattagccaatatgtgtctgtacacttcaagggcttcgtcgacattcccttcatcacaatgagcgttgatgatctgattgtatgagactacattggggacgatgttagactgcttaaagaaatactgaaatagagaaatcgattcactgtaacgcttggctcggtacatagcggcgatgatggcgttacaggtgaagacagtaggtcgagtattggaaaacacagactggcgagcgagctttgatgcagcgtcgagatctgatgctctgatcagtgattggactctgttgtgaag

SEQ ID NO: 24433 - DNA, 434 bp, Arabidopsis thaliana columbia
gaggacccgtgtgttttttttttcttcgttttttttccacaaatatcatcgtctatgtattcacgtcacatacggtatttataccacatcacttacgtcactgtagactcacgcgaaacccaacaaaagtccataaaagaaaaaataaaaaaaataaaatagctattatcacattcagcagcgcagtaagatacccagagagacataagaaagaaagagagagagagatactttggtcatttcagggttgtcgtttctctctcttgttcttgagattttggatagagagagatatgggaagaggtagggttcagctgaagaggatagagaacaggatcaataggcaagttactttctcgtagagaaggtctggtttgctcaagaaagctcatgagatctctgttctctgcggatgctgaggttgctctcatcgt

SEQ ID NO: 24434 - DNA, 500 bp, Arabidopsis thaliana
ttttttgaaaaatgatgatggttattatatcaacaatattcacttatctttttcatatcaactattaagataattccacaatcagtcgtgttggagatattgcgatatagaggtatgtgatttgttttgaagtgattttcagtatcatacgagtgaaaaatatatatacatcaaccatgcgttctttgcggtgaactagatgaaactcgtgaccacctattcttttgcgtgccctttctccttcgcagtttggtcctcactagcaggaaagctgcttcgacatcgtttaactccggattggggtgacacagtaacgacaattcaatgtcgtacgtgtgataacctccgagatattttgcttcgtctttgcttccaagttgctatttacttgctgtggcgagagaggaattcacggatccatggcaacgactccactacatcggctcaactaatccggaatggcgagaaattcattcgcaacagaatttcatcacttgact

SEQ ID NO: 24435 - DNA, 581 bp, Arabidopsis thaliana columbia
ttcttttttatatgaacctcaagatcaaaaaactcctcttccatctacttcatttggacaatattagttttaaaacagtttcaaactacaacaccctgtaaaacgtttcagcgcatcgtcgtcgactgaattaggtgaagacttttggaacttataaagttttctttttatcttttgagccccaaataattagaactgtcttactaagaccccaaaactttacacagcaatatcgaaatatcacccaaacggccaaaagtacacaaaattgcgttttttccccagacaactttaaactctcgtaatgaaaaatcaacattaacacaaaacaagatgcaaatctctctttattgagctgagatttaagcttgttggatatatggacaaatcattcacctgagacacaagagaacaatctatggcttctattcctcacaagttgtcctcgccgcgacggagaaaaaccgatatcgtcgccgtcgacaccagatctttttccttccgacaagacatggatgagaaatctccactgtacatcacggtggtgacgttgttgacatcaacgttattcactctatatg

SEQ ID NO: 24436 - DNA, 799 bp, Arabidopsis thaliana
gtcaccaacaagagccacacgttttgacacatagtcttttgcgtgccttaaagacaaagggaacatcattctctctgaagaaagcttcacaaccttgggaggagtttcaaacctctctttggcagatatggtcgcatctcctgtaagccaagagagactatcccgtgaacttgtagtctctggattaggaccatatccagaatccagagcatcatttacagctttgatgaagtcatcctcgttcatcaattttcgatctgatgcctcttttgggtccatggtccatactatgttgctaaacttgtcaccaatgggaagaagtgcgattgggccattgggtaaaaaccgttgccatgctgtgtagttttcggctgtatgctcaacagtacaaattatagcgttctgtgagtagttccatccagtcgttttgatcccagccaactcccttactcgcgacttagacccatcagcgcctacctgcacaaagattgttagacatcctaaaattgatgagattcaggagtcgttccactcaaatctagcaaatggagaacgaaaacttaccaccagttttgcgtagacgcgatttccatcgcttagctccagcttagcaaggcgtcctcgcatgaacaagtctgttgtggatggtacttcaccaagacctgtcaacgaagagctaggtagcatatccatcgcatttaacctcgcgggataaacagtcttctggagatctgattcctgcaaatatcgcgccctcccatttaaaaaacagaaaacatgccaaactgatgaagtcaga

SEQ ID NO: 24437 - DNA, 512 bp, Arabidopsis thaliana columbia
tcaacagaagaagaagtagaactgacctcaagggaatcgggagacaagtgaagggttgtaatgttgagttacacccgcaagtagatttgtaacatcaccaaaaataggctcctttcgttcatcatcaacataagaataacagtaagaacgaccctcatcatcatcagaataataatcaccactttcgtcatcatactcgtaatcataattgtaatcataataatcccatatcttgagactcagcctggcttcgacaagcgaatccaaaccaacaatctgataagtctcgtagacataactagaatagtcaaggtacacaagacttggtgcttcaaaataagcataatcgtgactgtctctcttgtttggaagattaaccaaaaccacaagtcgcttgatggatgcacttttcacgactgaatcgcaacatggcggacaatcatgatcagcatcacgtatgaataactcttccaaagcagggcagccatcaaggagccgacaatggttgtcat

SEQ ID NO: 24438 - DNA, 590 bp, Arabidopsis thaliana columbia
ccttggaaacccttttctctgtggattttcttcaaacccttgcaacggttcccaaaaccaatctcaatctcagctacttaaccagaacaacgcaagatcccgaggtgaaatctccgcaaaattcaagttgttcttcgggttaggcctactagggtttttcttggtgttcgtcgttttagctgtggtcaagaataggagaatgagaaagaacaacccgaatttatggaagcttatagggtttcagaagctcggtttcagaagcgaacacatattagaatgtgttaaagagaaccatgtgattgggaaaggcggacgagggattgtctacaaaggggtaatgccaaacggagaagaagttgcagtcaagaagctcttaaccataaccaaaggatcatctcatgacaacggtttagccgcagagattcagacattaggtagaatcagacacagaaacatagtgagattgctcgctttttgttcaacaaagacgtgaatctccttgtttacgagtatatgcctaatggtagcctcggagaagtcttgcacgggaaagctggagtgtctttgaaatgggaaacacggttgcaaat

SEQ ID NO: 24439 - DNA, 441 bp, Arabidopsis thaliana columbia
catcacgtacataacgagattaacggtcgagattagttacctattcttttgccgggatgttgaacagcgatcttcttgtagacttgtctccagttaggtttagcgaagtgggacttgacacgtgtacccgacacaacatccacaccgttcttagcgtgttgcaacgactgaagcatggcaatgagagccactcttgcatcaccttcctcgtacacactcgtgcaataattgtgaagctcgatgattccttcctcgtctaactccgaaatctcgtccattattcccttgaaccactcgaatgatccttgttccctagtcacccagtagaaataagctttccttgtcttaaaccctttactattgttgttactgttattgttctcaatgtcgctgtcgcggtcaggacctttcatgttgttgatgatgtccttaaggatactg

SEQ ID NO: 24440 - DNA, 576 bp, Arabidopsis thaliana columbia
gtaacataaaatgtctaattccgttatttaactttcaataaacttagtaaatctaggcttcaatgctaagatgagagggccatccatattcctccaagaatgctaagataactccatttgaccatccgaatccggtctgcattttttggaaacatgaagtcaacattacaagaaacttttaatttggacccctaaaactcatgaaatcaaaagaaagttgaagaagaaaagttgacctgtggcatatattctcctccaccaccatattcaccaagctctgtaactttgagcttctcatgtatagtcccacttttcttgtagacaagatagttgcttttgatccatctccttgcaatatcctctgccatctctttagcttcttttacactcgatcttccgagccctgtgacgatcatctcttgttgcggtgccatccattcggagaatccctgttccagtgcaccacatatgtatcaagataatatgcttagtgaagtaaatttcaagattccaaatgaaacttgaactgcaagcttcatttaccattgttgtcatgagtttgcaaagaagttagga

SEQ ID NO: 24441 - DNA, 340 bp, Arabidopsis thaliana columbia
ccaacagatatcccaacattgtttgtaaaaccttgcagtcaatccatctggacccggggctttgtcatctcccatttggcaaatagcctcatagatttcattatcaataaaatctttcgtgagttctagattagccgtttgtgtgactgttttgttgaaatccgcaaagttcagtggagaaacttgaataccattagagctgaatatgtaagtgaaaaaatcttgtgcatgttctccaatctctttatcacccgtaaacatatgttcgtggtcatcccttattgaactcattctgttttgtgaatatcttttttttgcacacgcatgaaagaagcccgtg

SEQ ID NO: 24442 - DNA, 592 bp, Arabidopsis thaliana
ccaaccgtgattcacgccgttctgtgcaatagtgaaactgcaatacgccacgcgcacgttgtgacgaaaacagccatttgcagtatactcccgccctaatttctttaactggtgcgggcaatttttgctcgcttcatcaatgtaaggtattccggtgaatattcaggctcttctctcagaaaaagtccgtcaggccatgattgcggcaggcgcgcctgcggattgcgaaccgcaggttcgtcagtcagcaaaagttcagttcggcgactatcaggctaacggcatgatggcagttgctaaaaaactgggtatggcaccgcgacaattagcagagcaggtgctgactcatctggatcttaacggtatcgccagcaaagttgagatcgccggtccaggctttatcaacattttccttgatccggcattcctggctgaacatgttcagcaggcgctggcgtccgatcgtctcggtgttgtacgccagaaaaacagaccattgtggttgactactctgcgccaaacgtggcgaaagagatgcatgtcggtcacctgcgctctaccattattggtgacgcacagtcgtactctggag

SEQ ID NO: 24443 - DNA, 1352 bp, Arabidopsis thaliana
gttaaaacagttttagtgaatattatcagttaaaaagtcaacataagctgagagatcaaaagaactttaaatgtatggttatgcgaaagtttgtataattcagattcggtttccttgggttgtaagcgaatgagtgatctaagtccaacactaagatttggtcttcaaatgtgtcagtctcaaatcccacttcaaaccactccagacagctacaagtaaggagttaagtccttttccttgatcttataccactacctgattcatcctctgtaatcgttgcaccaaagaccaaacttattgtctttatatataaatccaccacacttaagacaaaggatccataacttgtctttgaatggctctctctataacatttcctgtccttatctcagttcttctttatcatttctctttagtatcaacagcaaaacatagccttcaccaccacacaagtcactccacaaaccctaaacagcatcttcagcaagcgtaccgtgcacttaaagcatggaagaaggtaatctattctgatccaaagaacttaactgcagattgggtcggtccctcagtctgcagctacactggcatcttctgtgccccatccccttccaatccaaacactctagttgttgccggaatcgatctcaatcatggtgacattgctggtttcctgcctgaagccattggccttctctctgacctcgctctcatccatctcaatagcaatcgcttctgtggcatacttcctcgttcgtttgccaatctatccttactctatgaacttgacctcagcaacaaccgctttgtaggtccttttccggatgtcgtccttgcactcccttctctaaagtaccttgaccttcgttacaatgagtttgaaggccccttgcctccaaaactcttcagcaatcccctcgatgccatttttgtgaacaacaaccggttaacaagcctcatcccccgagatttcacaggaacaaccgcctctgttgtcgtctttgccaacaatgattttagcggttgtctgcctccaaccatagcccgctttgcagataccttagaagagcttctcctaatcaactcaagcttatctgggtgtctaccccccgaagtcgggtatctctacaagctaagagtcctggacatgagctacaacagtttagttggtcctgtaccttacagtctcgctgggctaggccatctcgagcagctaaatctggaacacaacatgttcactggcactgtccctcttggagtctgcgttttgccagcttgctgaacgttaccgtctcttacaactatttcagtgaagaagaaggtatctgcaggaacctgacttccagaggaatagc

SEQ ID NO: 24444 - DNA, 396 bp, Arabidopsis thaliana columbia
  unsure (1)..(396): unsure at all n locations
ctcgaaaacatccgatttgtaactaggcaacgaatgaacatagatagaataaagaccctcatgtcctttacagaacttcgcccaaagtggagcaaatggtaaaggacctttggcaagaaacatgaaagccaatttagggacacgtctaaacggataaccatttctttgcggctctatagaagcacgccaaagcaattcactatcattcattgtgtgccaaacattggaaggaggtctaataaagctatctaaagtaacactctcatgattatacgtagagagcaaagtaattggagctacaggatctanacgttgaatcttcaaaacttgatcatgtgtatactccaacagagatccaagagtcaaacaagaactaatacagaatctgaagcagac

SEQ ID NO: 24445 - DNA, 567 bp, Arabidopsis thaliana columbia
agggatgggccttgttccacatcacaaagctcttggcaagtatgttcactatttttgttaagtctagtttctctggaaatgacattggtctaagaatgtggaaatgtaaatatataaacttgaatacttaatgcagaagcaagaaaactaatccaaacaaactgacacttcatattatgttgaatctcgtttttaatcacacaagtgtttgcagtctaaactgttgttcttgtatttcctcaatacagggcttttcatgtctcgtgcctgcatattcctgtacttgatcgaactccatttgaaggtaataaaaagatagcgatatatacatttggttatgaagattttatacagtagctgtccctttaagatcatagaatagttcttcgctggcttgtgttttctcttttagatgcatgtgctgtgtataaatacatttctacaagtatatatgtacatacaacaatacttagattacttgcactcagttcattgtctttgacatcaaatagaagatttttacaaatgaatattgacttccaaatggatagaaatatctaactagtg

SEQ ID NO: 24446 - DNA, 403 bp, Arabidopsis thaliana columbia
aaaggatattcaaaatggaattaggaaacaataaaaaaaaaagtagcaccaaatgtaggaactgcactcaacacccatttggttagcgcgagtccaaatcctctcatatcgtaattaaagtttgcccccggttgggctgtgtacctctcaccctcccccgcctgttgccctcttgctccccgtctctcctctctgtcccccggtgtcccccgccgtctttccctccctccccctgccccccgccactcctctccctcctcttcccccgcctcttcgccttccttcggtcttgtcaccccacgctcttcccggtccacccgcgtctttcctccttcgcttgcccgaccgtccggctctctttccgtatccttgccctttcgtcgcagttccctctgacccggtt

SEQ ID NO: 24447 - DNA, 502 bp, Arabidopsis thaliana
cgaactccgtatcgttgcaccggagaaccccaacaagacatcttcacccgccggagaaccttgacttcactaataacattcacggtcatcggcggtgctacgtcatcagcattagcacaggagaaatgggggacaaggtcattcataaaggagaaatattttatgccgggactatcacctgaggatgcggcggcgcgtataaaacagacggctgaaggattaagagacatgagggagatgttggaccacatgtcgtggaggtacgttatattctacataagattgaaacaggcttatctgtctcaggatctcaccaacgccatgaacatcttgccggagagtcgccggaatgattacgttcaggcggcaaacgagcttgtcgaaaacatgagtgaggtatacgttatataattagtgaacaaattaaaaacagaattagtaatttttaatgctaatttaaggtttgattgttaatacactgaatgttgcgttttgtacacat

SEQ ID NO: 24448 - DNA, 525 bp, Arabidopsis thaliana columbia
  unsure (1)..(525): unsure at all n locations
taatggaagggttagatcgagcccaccttcgcttcttcttctccctccttctcctcgccgccctaacctcaccttaatccgccgtatcccagctcatcctcgcctcggaaactcgaccagcttgctttcttcttcgtcaccggtaattcggaaaattctggttcgtagcactctccgggaagaccaacccatcgcctctgactccgagagtagtcctactctactgatcggtgaagattctgctgcttttgaattagggaaacagaagcttgtttcctgggtttatttcggtgttgtccttggagttgttctctttatcctcaatgttgtttggatcgataattccaccggtttcggaaaatcattcatcgacgccgtctctaacatctccggctcaccggaggtatagatcaatttaacagtaactgaaccagtttcaatttcagttatttgattgtaaaaaccacttgtttatgcaggttgctatgttaatgcntatccttatatttgcaattgtacatagtg

SEQ ID NO: 24449 - DNA, 524 bp, Arabidopsis thaliana columbia
atcagcattggattgatttcaaaaccatgtaagttttagtgtttggggattaacctgaagtgcacgacgaagaggcctgacgggtcctttagcagtgtgagaaccaagccaaggagtatgtcgccaaacaagcttcccattacagccagcacgaactttactaccaccaacagagagctcaacgtaccacatatcaggattcatctgccagagaacaaacccaccagtttccgactttgtagagtttcggtttctaacagttcctgtaggagtttcaagctctgaagttatcatctttaacttacccatagcataagcgttcttaatggcgttatgtaacttgtggccaccacaagccgccgtgtactgttgcaaaatgtactgtgcagatgatgtttcctgcaaacaacatatcaccagagagaaacaaaatttacacaataatagaaacaaaaatcgaattttgtttgagtaactaatctctgagtattacatgaatcaaaccccaccagataatgacaata

SEQ ID NO: 24450 - DNA, 519 bp, Arabidopsis thaliana columbia
caaaaactctatatcaaacactcagttggcttatacacatattataaacatccactatcagattcatgagattcccaacaatataatgtgctcttaccaagcgtaggctagcaagagactttccactacactagtaccaaatctgaaatggctgattgctaatatttgaagagttcttctctctcactatattcttgaattttcgactaaatctagttaacttttgtaagaatgtacttacttcaccaccagccaagtgcagaagaaacttgtcttcaaactcacggcaaagctccaaagctatagcccttgtaccttcagcactgttaactagttgttcaccaagcctcgctagctcatcctgcactatttgagacttaccctggagcctgtacaaagaatttgaaagccatatgcgttcaagcaaccaatgtcatatgccaacaccataataaaaatcgatgaagaaagcacatatatggagagaagcaatacccagacaggacacttggaagcctg

SEQ ID NO: 24451 - DNA, 472 bp, Arabidopsis thaliana
tgcaaacgccaacatagataaacggttacattttacgatttgatttctagaatttaaaatcttgacgcagatggaaaagatcatactactgaataagcgcgaaacaatccgtatcaaaccgaaaaaaatacaagcacactgtgtcaacattcatgtatattcccttaaatctaaatgcaataagcaaccaccagatacaacacattcatacacagaacctaatcagcccatacaatatcaatcaaatatatacatcatctatttacctaaacaattttgcatcagctagtagttaccatgtttcgagtgtatttaaatctacaatcctattatgttctacataagactctataaacagatgactcttagttaacaaagaaagagcaaaaactgacattttcatgatccatgtgacgaagcagcttgatctcacggagagtcctcttagcatcaatcttattgtcaaaagcgt

SEQ ID NO: 24452 - DNA, 560 bp, Arabidopsis thaliana columbia
ggaaccgacaaccaaaggtctcgagaaaactacctgagataaagctggattagcagtaccagagaacaacttgagcttagtattgtttctactaaccgatttctccaaccgtgaagaatcaaagaacttaggaattgtcgtctcattaataattggaacacgagcgttcccgtttagtgccttaggcaaattgcatttctatcaaacacaatgacaaggaattgtgaaaccaaattcaaaatgttagacacaaaatttaaccaacacacgatctctcttacatctctctacaaacataagaataaccaaacattcatgaacagtattcaacacacaagattccaaagctgaaagttccaaattccaaattctacagtcacatacatggacaaagtcaagccaagagcgacgacaacacacaaattctcacaaaattagcctgtaaacgaactgctaatagcatctactaaatccagaaaaatctcacagatcatcaaagcatagattcatcaaaaacaatttgaattttcttatacaaatacatgaaacgcaatgtgaat

SEQ ID NO: 24453 - DNA, 519 bp, Arabidopsis thaliana
ccagtgtgctctaaagatgtaccagatacgatctgcgcctgcgtctttcagttcgcgacggattttggttaacgcttccgggtcatccaggctcactttcgggtcgaatccagtcgcaccgacttccaggccgcgcagcctttttgcagggattcctgctgcgtgcgaccaatcgccatcacttcgccaaccgatttcatctgagtggtcagacggtcgttagcaccggcgaatttttcgaagttgaagcgaggaattttagtaaccacatagtcgatggacggctcgaaggaggccggagtacgtccgccagtgatgtcgttcatcagttcgtcgagggtgtaaccaccgccagtttcgccgccactttagcaatcgggaaaccggtcgctttcgacgccagcgccgaagaacgggacacgcgtgggttcatttcgataacaatcagacgaccgtttttcgggttcacgcaaactgaacgttggaacaccggtttcacgccgctttagacacactggc

SEQ ID NO: 24454 - DNA, 536 bp, Arabidopsis thaliana columbia
tcgcctcctagtgaccaggatgtaatcaaaagtgtcgcgttcatactcggccgtgtccggttcacctcgaagtagtccatagccgaccgcatgaagccgtccgtaaccagctccaccagtctcttgaccaaacccaccgagtgagaaagagggttcccaactaattctcccgatgatgtcaccaaaccggttaacacaatcccgttcccgcaatatccttgcgggagacgtgggatgaatcttgaccgtccatccgccgcaaacagaagcttaacccgttggtccggtttaaaccgtagagcttcgcatcttgatttccaaagaaacccggttaaggcttgaaatgttgataccttattattgttattttcttcaatcgccatgatcttgagcttctcaagcttttcgggttcgaaaagacatgatttgtagatgagtttttcttcatcgtagatttttccggtgtcggaaatatcttcaatttcgtcgaattcattgtgtgggaactcgattttgggagggtttcgtgaccggag

SEQ ID NO: 24455 - DNA, 592 bp, Arabidopsis thaliana columbia
ctcatccccttcttctttttctgtataaaagaatgtaactcattggagaggctcaaatactttcagaaatgtttctgatgatacatataatgaaatttcatgactccaaaatataataagaaaaaacaaaattaatggtatttgatctaatgtgatcgtcaaaaactttcccagcaaaagctattgtaaggaagaagatcaaaactggttttcttctttcctttcgtaatggaaacaaaataatttctcattcttgtgagaagatccgttcatagaacaagatatacgcttcagaatgcagaaccttttccaatgaaacctgacgaacatatgcatcgcttacgttataccacgcagtgagtgaggaatcagtctctttaacccgctgacctcctctaacatacgccacataatgacctcctctcatcgtccctgaatgctccaccaatccagccagtctgtaaacgggcgggtcttctccgctacacctgaatgaaccaaaagattgaagaatcgctttcatggagattaagatataagacagatcaaaatgtggttatatagaaggagatgagagatgatgataccttga

SEQ ID NO: 24456 - DNA, 538 bp, Arabidopsis thaliana
cccccttaaatcaccctaccaatcattttatcaaccctagaaacagcagtcgtaacccgaggatcatcaggaccatagttatgacccgattggtctggctcatcgaaatacaacatcagtaaatcaggaacttcgtcctcaaggtgatcaaaatggctcaagaccgaatcaaccctttcttctaaaggaactgaaagattgaaatgtggacaatatccttcagggcaagtccaagaactttttagaacttcagagcctggccaaaagtaggtcacagccttgagaccttggtttactgcggttacccacagcggctcacctaaccaccattttggttgtaagcctttgttgaacacctctcccgtaaccggatcggtaaacttgttcatgattataccgtggtaagcagggtagagtccggttgcgatagagtagtggtttgggaatgtcatggtggggaaaaccgggattaaaccgtgtttggcctcagttccccggatatgagaaggtcgatgtttggtgtgccgttttaaattgg

SEQ ID NO: 24457 - DNA, 562 bp, Arabidopsis thaliana
gttggatagagcaatgtccaatggtgcttgggctgaagcttatccagcaagcacatgtgtatacctttgcttcgaaggatctgatcatagaccgcttcttaccgattttgatatgtcaaaaaagaaaaagaaaggcattttcagatatgatcgacgccttaaagaaagtgaagaagtgagtcacctaatagaagaagcttggaattatgataatcaggaagatgtggaggaaaagatcaatagatgccgtagagatatcatcatttggacaagagagaagcaccaaaatagtcaaaagctgataaaggaatataaacaaaaactggaggaagcaatgacaagtcaagaaccaaacttacagctcatctcatcaattaacaacaatctactcttggcttataaggctgaagaagcgttctggaaacaaagaagtagacaaatatggttagcattgtggagacaaaattcgggctattttcatgctataacaagaggaagaacagtgataaacaagttttctgtgatagaagatagcgagggagtacgtcttttgaggaggagg

SEQ ID NO: 24458 - DNA, 507 bp, Arabidopsis thaliana
cgacacgttgtcttgtttaaggtctctggctctgctttatcttgactctgaatctgttgaatctgtctttacctattttgatgtgtgctttgatttgttttagcggttcttgacctgatatgtaacattgtgcagggatcatatggaatgacacatcagcaagctctagctcaagtcactgctcaagcagtttcaagccaatgccaatatgcaaccacaaacagagtaccctcctccctctcaagttcaatcattttcatcgggtcaagcgcagatcccgacctcggctccactaccagctcaaagagaaacctcagatgtaaccatcatagagcacaggtcacaacagcctctaaatgttgacaaaccagctgatgatggctataactggcgaaaatatgggcaaaagcaagttaaaggtagcgagtttccacgaagctattacaagtgtactaatccaggatgtcctgtcaagaagaaggttgagagatctcttgatggacaagt

SEQ ID NO: 24459 - DNA, 538 bp, Arabidopsis thaliana columbia
tgtactgtctctgctatgactgtcaaattctgttcgagttccttgaggaaaggatcgattctagaggaagagaggtctccgatgtataacccgtcccataacgtgtggcttaggtcgtggaagacgaccttataagccagagactcagaaagctgttgaacgccttctatgcaagccgctggtgtgagctcaaactttttttctaagccgttggaaaagtcatcggtgtgagctgactcacagttcctcaaatgtgtgatcactcttttttccacaacatcaagctcactgcggattttgtgcaagctgtttattctgacacatatttgcgtgaccccaaaagaattctcaccgttcataaccgaaacctgagattctctcttctgagtggtaggtgtcttttctttcttcttccattggaattttgatcccgttgtacatctggtgagtgcaggcattgtaggcatgtacgtagtccgagagcctgagcatcatcatataaaaatatgtaaaatgtgaggaattaatagtttaagac

SEQ ID NO: 24460 - DNA, 1464 bp, Arabidopsis thaliana
acaaataatttccaatcgtttttacccttgtctgatgatgcagatcaccttggagaaagcgattcggatgtggaagaagatggtttcgggaggaaaatcacggtgtcttatatatccctaaagaaactcaatataagatgtcactgctactcgaagagctcgggatagaggaccgagtactggagcttttctcatctttacttccgtctatcactagcaaaagagactctggcctgtcgaaagagaagcaggtcaatctcgggaaagacaaagttctttcatttgacacggatcttttgcagctgaaaaaagcatataaaagtgggtcattggacttaaaaataaaggctgattatactaattcaaaggaccttaaatctcttttagccaatggttcccttgtcaagtctctcctgagtgttagtgttcggggtcgccttgcagttggagaaggtgataaagttgctatatttgatgttggacagctaataggacaagccacaattgcacccataaatgcagacaaggccaacgttaaaccactttcaaggaatattgttcgttttgagattgtgcatctttcattcaacccagttgtggagaattatcttgctgtcgcaggccttgaagattgccagatacttactttgaatcatcgaggtgaagtcatcgacaggcttgctgttgagcttgccctgcaaggtgcattcatcaggcgtatagactgggttcctggttcacaggttcagttaatggtcgttacgaacaaattcgtgaagatttatgatctatcccaggatagcatcagtccaacacagtacttcactttgccaaacgacatgattgtggatgctactctttttgttgcttctcgtgggagggtttccttcttgttctttcagaacaagggaatttgtataggttcgaactatcttggggcggcaatgcaggcgcaacaccgcttaaggaaatcgttcagattatgggaaaggatgttacgggaaagggttcatctgtctatttctctccaacatatcgactgcttttcatatcctatcatgatggaagttcttttatgggtcgactcagctcagatgcaacatccttaactgatacatctggcatgtttgaggaagaatcagattgtaaacaaagggtggctggattgcatcgttggaaagagttgttggctggcagtggattatttatttgcttctccagcgtgaagtcaaatgctgtcttagctgtgtccttgaggggcgatggggtatgtgcacagaatctccgtcatccgacaggatcatcttcccctatggttggaataaccgcatacaaacctttgtcaaaagacaatgttcactgtctagttctgcatgatgatggcagccttcagatttattctcatgttcgtagtggagttgatactgactcaaatttcacagcgtgaaaagttaaaaagttggg

SEQ ID NO: 24461 - DNA, 484 bp, Arabidopsis thaliana columbia
gccaattttgatcaaaattccttatgtgtgttgattgtgttcctttcggtgttaatttgtcaggagttgggacaacaattggagcaggagtgtatattcttgtgggaacggtagctagagagcacacaggacctgctcttgctgtatcattcttcattgctggagtagctgctgctctctctgcctgttgttatgctgagcttgcttctcgttgtccatctgctgggagtgcttatcattatgcgtacatttgtcttggagaagggtatatatatatggattttaataggattgaccttgttgttcgtcttaaagctgatactcatggattttcttatttcataggattgcttggttggttggttgggcactggtgttggattatacaattggtggatcagccattgcccgtgcataactccaaatctggtatttgcctttgagttatatgtgtatggttcagtcaagaagttaatcacttagc

SEQ ID NO: 24462 - DNA, 581 bp, Arabidopsis thaliana columbia
gtaccttcttgagactcaggcatgtatttcgcaattctatacttctgatgagatttaaaagccaaattttatttaataaaatcttctttggaaaaaaaaatgaaaagagagaggaagtaaccgtaacctgtaagtggcttttaacgtgaaatattgtgagtccatcagaatccatccgcttcaatatcgccttggcgtcgcctctgcatagttttccaccacttacacttatcagtgacccaccaaagaaacaagttactatatccttacaacaattacgtaattacttttactgaaagatgtatacatctatccaaattaaataatgcaacataattttctcaaaagaggaaattattaatccacatgtgcgtaagatgacttttgatctcatgcaattatattctattcacctattattcatgaccaatcatgattcatatgcatatctaacaactttttttgggtaacaagaagttctaagttttagtgagttcttcagaccgaagaccaaagcaagttaaattggtcccctttgtagcatgtactaggtaatatgactttatatatacaaagtgact

SEQ ID NO: 24463 - DNA, 356 bp, Arabidopsis thaliana columbia
gtgccgctaacaaaggactgaggtccctagtcgagtccctaacatcttccagagaagaaacaaaggagcatacagcttcagttttagctgatctcttcagctcaagacaagatatttgtggtcatcttgcgacggatgacattattaatccctggatcaagctgcttacaaacaacactcagaatgtggcaaaacaggtggctagggctttggacgcactgtcccgcccagttaagaacaataataataaaaagaagtcttacattgccgaaggagatattaagtcactcataaaattggctaagaactcttccattgagtctgcagaaaatgcggtatctgccctcgcaaatctt

SEQ ID NO: 24464 - DNA, 575 bp, Arabidopsis thaliana columbia
gacaagccattgcaggtaaaaactcgttaaaccatctgcttgattcttctttcgacattctctacaccaaaccaatacatttttcactgaatcagtccacaaaaaacggaaaaggatgaaataaaatgttgattttttttgttacctcgtcgaagaagagagcgtagcttgaagtgctgaagaagaaagatgagaagtcaaagagagagcttgtctcataagagagatggaatcagagagagtttgtcccgaatagactcggctgtgacttggtccattggtcatagcttctaaaacctccaccaagtgtgttgatggccaagacagagacgaatcttgaatctttaacggcaagtaaggtaaaattgtatcaagatcttctcttttctccattgctctgttctcttgcttctcaagttgagattgcaggtttctttctgaagaatgaaatacaaaacatagatatatagatacctaacgaacacagttgactttcatgttcttatatctgactatagagattagaatattataccattccttggagaccaagaaacgtggaaaggattattcag

SEQ ID NO: 24465 - DNA, 610 bp, Arabidopsis thaliana columbia
taatttgactgaaaatctcatagggtttctagggggttggaacattggatttatgttaggtttttacagaagcatggatgattttatgagttttgatgtatgcttaatccttctatgggaagaataaggagatgtagttagtgatacgataattgattcataccattcttagagttcctaatgttctcatgatcatgtatcttcttgggatgtatattttctccatcaatggctgttgttgatatgattgtgttggatagtttccacgttttattgttttgcatcatgagcctcaatgtttcctttctctgtggaccattttatatataggtttgcaggctgatcacaccgttcatatggttcgaggttttgtgccttcttctccttctgctcccgctgcaaatgctggaaaccaaaccactgctcctcaagcggttggttcaaatgatagctcaaacctcggaggaggtgaatctttgtccctggccttggatttaacctttgggtggtggaatgctatggctggattatttggatctggtcttcctgatcttgagcaggcacagcaacaactagctcagaaccctaacatgattagagagatgatgaa

SEQ ID NO: 24466 - DNA, 469 bp, Arabidopsis thaliana columbia
aagtactagaagctggtgatgagacatactttcctgctttgcgtgtgggattgcagaagacatcatctgtagtgagtgaaactgttctttcaagcatatacaatcttgaaattttcaggtttttcgtaatcctttctgatagatacgttcttacttgtgcagtcattttggtttgactaccaaactggtcacagttcttcgaagaagtctgttccagtggaaagtagcactactcctctttataaccgtggatttacaattggtttagattcaggttcaaataacgtggaagggtacacaaatctagatttgtagattctgactgttgcagtttctagttttgtctttcaatctgatttcgttttaccttgtgacagtgaatgtgttattgatactttattatctgccttgtgcattcttttgaatttttgttgtcttcattgttccagaggcttggagattattgatg

SEQ ID NO: 24467 - DNA, 558 bp, Arabidopsis thaliana columbia
tatgtacaatattaaaatgattgtagtcgaatccagttagttagcaacgaacctgcatgccgtatgcagaaggctcacattctgtttcatcaagtcgatattcgtgcatgacccaaccagttcttatgccatgtggcgcgcgcccacggtagtaaaccaatgtcttcttggttcctatggctcggtctctccaactaactcggcggtctttacctgtagccttccaataaccgcctttagttgcccggtttgtccttgagccgttgggatacttccggtctcgtgggctgaagaagtaccattcttggtctttgctcggaagcaaggacttccctattattgaattcataattgattactttaagtaacgtaatttatcagcagatattggatgacgtaaattaaaattatgattcaattaagctggcattcatgttttcatgagttacaattttatatttaaacatttttaaagattattttgacattttaattccctaaagatttggtgaaaatgatgaataaataataaaatagttgtttcagaactagtatgtg

SEQ ID NO: 24468 - DNA, 534 bp, Arabidopsis thaliana
gtccagcaaggttcttgaaccaaacagagtatctagtggagttcaaggcagcgggtaacaaactacgattcgatatggggaagctaacgtttgcaaagacgctgacaactttagatatatcaaggaacttggtatttgggaaggtgccggcaatggtggctggactaaagacattgaacgtgagtcacaaccatctttgtggaaagcttccagtaacaaagttcccggccagtgcgtttgtgggtaatgactgtctttgcggctctcctctttctccttgtaaagcttaagcggcaagaaagctacaactggtagttggatatttaccgtgaccaataaagtttagctccaaataaaatttgtattaaaaagattacaacaaataaagtagttttatgttatgaagaagcttcattctaacaatatgtattagtgaaagtactcaaagtagtatttaagttctcaactatttatgcattttttatatagcagctaaaatattactttaacatgatagaaaaatgattttaaaaa

SEQ ID NO: 24469 - DNA, 761 bp, Arabidopsis thaliana
caagttggtcatgtgttgatatgtgagagactcgtagtgcaccggcatcacattgtcgcgaataacatgatagtccaatgctagatgcttcattcttgaatggaaaaccggatttgcagagagatatgtggcaccaacattgtcacaatatatcacaggcatctttggtaatgtgatgcctaactcagtaagaagagagcatacccatctaatttctgaagttgtgtttgcaacagccctgtactcggcctcggtggaagaacgtgcgactcccttttgtttcttcgagctccaagctatgggtgtagagccaagatacacaatatatgcattggtggaaacaaaatcgtcattgtccccagcccaatcagcatcggagaatgcatgaagcgagagaggagagtttgagcgaagtaatataccatgagtagcagttcccgcaagatatcgaaggacgcgttttgcagcctgccaatgaatgtctgtgggacgatgcataaattgtgataatcgattcacagcatacgcaatatccggtcgtgtaaacgccaagtattgcaagctgccgatcactgtcctgtattctccgggttcgtctagagcaatgccagagtagagtgaaagtttaggatgtgtcgccattggtgtggacaccggtttggcatctaacatcttcatcctagacaacaagtcataaacatatttatgctgcatcaaatgaagaccttgtgaggttcttgttgcctctatacaagaaaata

SEQ ID NO: 24470 - DNA, 522 bp, Arabidopsis thaliana columbia
tcgatgtttactcgtttgggattgtaatgtgggaactactcactggtgaagaaccatacgcagacatgcattgtgcttccataattggtaactacacctgtcttgcttatcttttgtatgtatacctgtgaatgatatagagttatggtactaagacatgtagattgatgtttctatgacaggaggtatagtgaacaacgcattgcgtccaaaaatcccacagtggtgtgatccagagtggaagggattgatggaaagttgctggacgtctgagccaacagagagaccatcctttactgaaatatcacagaagctcaggacaatggctgctgctatgaatttgaaataacttaataaatagactcaaaaaaggaagaataaagatgatgatgaagaaaaagaagatggtgatggtgtttacttggagattaaaggcttctatttactttgttttttttataaaaaagtattagttagcctatttttggttacacttggtttgcgtttggacgcgaaaactag

SEQ ID NO: 24471 - DNA, 582 bp, Arabidopsis thaliana
ctacttctggagggagcactaccttatctttgaagattttattgttccttgctgtccagatcgaaccaatcacccaagggaagatcggacctttgcctaaaccagtcaggtgtagacagaggagccgcttgactacatccaatccttgtctgaaagtactgatttggtttccgaatagctgactctgtaaaggtagaagctgccacacatttgctgcagaagaacacgagaagaacagatgtgacaccgactcattctccccacagaaaggggaaatagccaaaggattgatatgtctaagtttaaggttctctcccactggcaagacattcctagtagccttccaaaggaggattttcatcttgggggagctcttaagattccaaatctcttctttccatttgaaaccaactagggaagggtcaggctcattaaacaattcgtcccctgcacaagaagtatagtaaccagatctcgtactatactcccccgacgcattaggtaaccacatccacttacccaatcctcctcttttactgatctttagcttaaggatatcagtttccatgtcaagaatgattg

SEQ ID NO: 24472 - DNA, 755 bp, Arabidopsis thaliana
aattgaaagtgggttgatgaataacatgaacggacagtacggccacaccacaaacattgctgctcattttatggagatattcaacgtgctcctacttatctatgctattatcaccttcgtattaatacgtacggtgcatcgccgtattaacattagtatatttcttccaccattaatcatttaatatgttgaatgatttctacaaactacgtgaaattattgatacgtaggtcggctatatatagcttgtaggaacttgtgcatatatcacaaccctcttatcttatgtatactcttttattagagacaattgatagatttgtttttcagtgtcacttggcctaaaagctcacaatgtctctcgttctctctctttgcttggtcttcctttgttctcttgttcatggttctcatagcttaccagcacaacggactcctcatcttgatggtaagacagtaagactatacgttagttaagtactgcaaaaattatcatataatggtcgatgttatatatatttgaattatttagtatgttatgttaattgagctatccatataaaagttatgatagcagaagaagaaaatagtttcccagttttggaattgacgtgctgtcaaattaattgggaacatgaataaataattaaatagcgttattttaaatttcagtaagaaaaattatttcgcatttcataaggccagtgtgttcataattctaaattaatttcagtaacacatgtcacatgaagggt

SEQ ID NO: 24473 - DNA, 356 bp, Arabidopsis thaliana
tgaaatcaatctctccagattaaaaatcaacatcttcagtgtaactcacactaatggagatatcaacaagcctaggaagcttatacagcaaagttgtagcaactacaatggaataaggctcttgtggcatgtttattaccttaataaagagtatctttttcaatcaaaagactctagtttatcaattacctctagttaattagctggagttttcgagctccgaaacccttttttaagctcagtaactctcttcatacaagctgctttcgacttcccaggtactgcagctgcaatcttctcccatctcatagctgcctccttaggaaaagcttttaaagcattgagcaatgcaatgt

SEQ ID NO: 24474 - DNA, 492 bp, Arabidopsis thaliana columbia
aaccgagtttataacttatgtcaatggaaaaacatacgtttaatcaagaacaacaaacttaaaaatgaaaccaagtaagattagaaaaactcaccatttaattagatactgaaccttgccctacaaatacaaaaaaaaaaacagtaccaaaatgcagaatcagaatcattcaatcaatcaaatccaagaagatatcaaacattaaagatcattttcttcctacaacatataacaaccacagaatcaaaactttggttcgttataaactactctgttacgatgattactaactactaaagcagccactttctcacaccaatgtgtaacctacgtttgatacttatcttaaacctagaaaacctaaaacctcaactaattatggttaacaaaaacaaaccacatttgctgagtgaagacgaaaaaaggagcttacttttcgaactctcttacgacgaatagcttcaatttcataaaacccttcatcaagctttg

SEQ ID NO: 24475 - DNA, 529 bp, Arabidopsis thaliana
acatcaacctcaaagccaaaggaatgtttgataaaacctttaataccctactataaaagtttctcaaacagagcttttaaaacatagaaagatgaaacaccacctatagtaaaataacaacaaaagagaaaaggtaacaagatgatcagtaaatttagaacctcttgaaatcatcatccttatttcgattttccttcgcctttttcgacaaatcttccaagcccttatcaacatcatccctagccttatccgcctcctcaccggacccaaccacagcctcagtcaccttctgagccgtgctcttcgccgtctcccacacatctttcacagtatccatagtcttctccccaatatcttgagccttttccttaaacccatgagccatgtcctctgctttctcctttgagtcctctgcatagtcctttgctttatcttttgtctcttcagctttatccgcagctctactcgctccttcattcactttatcttttgtttgtccgcataattctttgtcttctcttcacatcat

SEQ ID NO: 24476 - DNA, 1083 bp, Arabidopsis thaliana
acttaaataggattaaaatcttaatgcattatatatacatagctatttctctcctcccttgttagtagtggatttggtacgcatatatatatatacatatataagttttagcaataatgcaggattagattgtttttaaaaaaagagaaaaatgttgccaaaggaaaattgtgacgcacaaaaaaaggaacgatcctgaaattgtcagaagtagacagaaacaagaaaacttgtggagaacaataaaatatcggattcagaacagagattaaaaaaaaatattaaaaaaatagaaatcgataagtaataataatattatctcttcttctctgcttccattttgggtatcgataaaccaccacatccttccctgaaaccctaaccacaacaatcgccgccgtctctagaaatatccatccacctacttcggctttgtttatcaggttcgatatatctatcaccaccgccttcttatctcaatttctgtgtttgatttttgctttgttggtgtttgattttaccgcagattttgatgaaaccagatcgggtcttcctctagatccgttctaggttttctatttccaccgtcttatcattatcatcatcatcaattcatcatcatcatcaataatccagatgctcaccaaattcgtcattcatagacatgtctctgtttctgaaagacgattcgattcaaattcgcgaagtctggaacgataaccttcaagaagaaatggatctgatccgagatgtcgtcgacgacttcccttacgtcgccatggacactgagttccccggcatcgtcgtccgacctgtcggaactttcaaatccaacgctgattaccactacgaaaccttgaagacgaacgtcaacatcctcaagatgatccagcttggcctcactttctccaatgaacaaggcaacctccctacctgtggcactgacaagtattgcatctggcaattcaatttccgagaattcgatctcgattccgatatcttcgctctcgattccatcgagcttctcaagcaatcaggcatcgaccttgccaaaaacacgctagacgggatcgatccaagaga

SEQ ID NO: 24477 - DNA, 524 bp, Arabidopsis thaliana columbia
tccactccggattgcaagcgacgtatctgttttatttattgatagagcatggtgttcagcgatcagaactcacatctaagagtataaaggacaatgacacatgacatacctgaacaagtgcatcaggccgggattcaaaaacaatcagaagaacacctattggtgatgaggtcttctctaaaataagatcatctgcaacctgttacattataaatgtcaaggataatatgaattagacaaaaaatgtcatattaagaggaggaggttttacatcatatgaggatatctcttccctgtatttaaaatctagtttggaatttggtggtaaagtattgtcgtcagattacctgagttttctttaatacacggcctattggatcttccatttcggctagctggcgaacggaagctgcaaggcttgagatctatcaagcacaaaacagtgtaaaaagagaaataaatacaccatatgaagacaagaaaaatggtacaataaattaaatcacgcagtgaatatactgtct

SEQ ID NO: 24478 - DNA, 449 bp, Arabidopsis thaliana
  unsure (1)..(449): unsure at all n locations
agatgatgatgaattcaggtattctcacaaggcaacgttcccaaacagcaggaactaccacaagagcagtttagcttgtcgtctctgttctctccggccacacttacgtctccataactgaaacttaactcctcctctgcgattatgtcctttgctgcaaagaaacagagccgaggaagcaacgctcctgagcttctcaacagaacagtggagagatttccaccgtcacaagaatggttgatgaatctagcaacgttcccaattcttgtggcgtcgatgtttatccttaaacaagcttgtcctgaagggaggtgttcgcgtacgaccaaaagagctgaagcgaaggattgtgttgatctgagtttgtcgtaaatgttttgacgtctacgtgcttcatctgttgtcaatagctcacctataagaagagacgacaanatcaagtttatgac

SEQ ID NO: 24479 - DNA, 459 bp, Arabidopsis thaliana columbia
ggtattattctgtgtggagttattcttgacgaatatttctcgtgttcttcgaaaaataacagttacagtttctatctaggagggaagatatcgccgtggggaccgtatggaccgccgctgctgacggagtcgagatcaaaggcgccgtcgccgcggagaggaagaagcgtgacgaggaagcgagatctgccaccatttttgacgacactggattgtaacggacggccgagatttcatcacaggagagtgagaagcgaaggacggttagagattgccagcgtggcagtagattcaccggagatcgttagtgttcgtgggagagaaggactaagaatcggaacagtgagaatcagtcaacaaaacgacgtagtagaagatgataatgaagataaacagaatcactgatcttcctcttagaattttgatattttcagctaattttcaggggggaaaaaacga

SEQ ID NO: 24480 - DNA, 574 bp, Arabidopsis thaliana
ttcttacgccatagaacccaaatacgaccccgtctattgtgctcatagttagtgagaatcgaccaatccttgaaaagcttaccaacaagctgcgaaaccttactctcctttactctcgtttcaaccaagcaaccaaactgaaagttattttcctctatccacttcttaataacagaatgttttgatgatttgttaagacctcgcacattccagaagaacccagacattaacgatttttggatttgtttcttttactctgatctttaggaggaatcctagttgattgagtagaaggaactgatatcactttgtgagctgttttagatacacggggcaaagactcgcgcaacaacatctctgatgtggccggctgtgtccctattgaaacttcttttgatgagattacaccaacatctctcgtatctgtcgttgaaataacatcgtcatagtctcctttctcacttaaaacagagtaagcattcgataggattgaaacttctccaaatctcagctctttgtttttatttcctggactgcggtgtgaactggaaattttctatgtcaacaaacatgt

SEQ ID NO: 24481 - DNA, 578 bp, Arabidopsis thaliana columbia
caataaagattaaaactttcatatgctttagcctctctcccacaacacctaaattagatatctttatgtcttttgctcttaaaatttcagacaaaaactttccttgcaaatgcagcttggcgttgtagttgtccacgttgcctccactataaatttccatactcttagacacgaaagctctgtctaagaaaacgctaccttggaaatgacgagagattcgactaaacagagctctagcaatggtagtctttccaataccagaaggtccccaaatcccaaacatcctcacttgtttacattccaagcacaacattaaactaatctttgcgatatgaccttcgatgccaacaaaaccctcaaagtcattagatgttgtagttaaattcagtttagccaaaacatcattggctatatcttcaaccatggttgcttcattatccctaaacaaagaaagaaagataattcataacacgaccagattatgtaaagattcatcaagtattcgtagttcgtaccagttggaagaatgaaacccgaggatgttagctacatcagtcaatgctctccgccatttttgt

SEQ ID NO: 24482 - DNA, 441 bp, Arabidopsis thaliana columbia
gaggatcccctgttttgttaaaatagcttctggattctgagaaatggcttcgtcgaatttgctacttgaggttcagttcttgcatattcctagtctgtctcaaaagcaggcgaatcctttatcttgcagaaagttttcttctttagattggaagcaagaaattgggctgaaaaaggatgttttttttagatgtcacggcttgttaagtagtgtgtgcattgacaatgtaaatgatcatgctgagagaagctcagagttccatcactatggtgtcggtactaacttgagagccagagtgaaacctatgaagcaatttggtttatcatctgatggaccaattacagagaacgacgaagagaccaacaatgagatccttcataacctgtgcagcaatgggaagttaacagatgcgtgcaacttgtcgaggtgatggcacgacat

SEQ ID NO: 24483 - DNA, 458 bp, Arabidopsis thaliana columbia
ttctcaagtgcgacacacaacataaatgtgaacaagatcttcaaattcattttggctagactttttaatttgccttggaagattgacagaaatttgaccttaggtgaacccattatcgactacgattcctaatttagtctactttaattatttatcatttttgtacataatttttttttttaaaaagaggtgaacgaatatcgtcgataaaaaaaaatatagttgaaagaaaatagcgttggttttgtgtgcattttcatgttgatagtcatatgcttggatgttcttgtttttattggacagaaaaattgaatttaaaaaacaaatagttgatatagtcaatgtttacaagattcgaaggtactatacaatttcaagagggctcgacccaaagtttaacactaatgagtgaagactcgagttaaaaaaaaactcaaaactgattgtgtagtatatat

SEQ ID NO: 24484 - DNA, 491 bp, Arabidopsis thaliana
  unsure (1)..(491): unsure at all n locations
nnnnnnnnnnnnnnnnnnnnnnnctaaagtttaacccgctgctgaaaggctttaaaccgcaacaaattgccgccacggaattgaacggcaatacccgcgatggcgtgatccatttcccgaatatccgcacctccactctctggggtcaggtgcacgatgaaaaagccttttattcgatgggcggcgtttccgggcacgcaggtttgttttccaataccggcgatattgcggtgttaatgcaaacgatgctgaacggcgggggctatggtgatgtgcagctgttcaatgcggaaacggtgaagatgttcaccaccagctctaaggaagatgccacttttggcctcggctggcgcgtgaatggtaatgccaccatgacgccgacgtttggcacgctggcaagcccgcaaacctacggtcacactggctggaccggaacgtgaccgttatcgatccggtgaatcataggacgattgtgatgttagcaacaagcc

SEQ ID NO: 24485 - DNA, 448 bp, Arabidopsis thaliana
taataaaaacttgatagtatataatgaagaagttccaccataaggcacaattaaccgtcacgagctacatgctctgtatcttcagatttcctaaatacttacaattcccattccaattctgatttggttaatccaaaacaaaaaaaaaggaaactttcttttaccctaaatctataaaaacgaaacccttcttcacaaatctttgttcttcgtaatctctcttaaaagcttttgtttcaatttcaatggagtgggttcgaggagaaacaattgggttcggaaccttctctactgtcagtacagcgacaaagtctagaaactccggcgactttcctgcacttatcgctgtgaagtcgacggatgcttatggcgccgcttcactctccaacgagaaatcggtgttggattcactcggtgattgtcctgagatcatacggtgttacggcga

SEQ ID NO: 24486 - DNA, 488 bp, Arabidopsis thaliana columbia
gggaagtcagcattcatcaatgctttgctgagtaagtcatttgttctccattgtgtttgtgtcacttgttgttgaagtttgtatctgcttgaatatggtctgggtgctgctttagcctgatctctagtatggccaatttctccacaatttataaagagagtttgaatgattgtatatgtacttcaccatacagaaacgatggccgaaagggatcctgttgcagcagcggcacaaaagtacaaaccaattcaatctgctgtccctggaaccaccttgggtccaattcagatcaacgctttcgtcggaggagaggtataaacttaaaccaagatcagattctagaactttccaaaaattgcaatagtagacattctgctaaaagaatacattattaccacagaagttgtatgacacaccgtggtgtgcacctacaccacaggcaagcagctgtcgttcattcagatgatttaccgcccttgctctcaaaa

SEQ ID NO: 24487 - DNA, 550 bp, Arabidopsis thaliana
gcatattctgaacttacgaaacaggattatgacaatgcttggtcaacaatgaaccaaccaccaccatccaacaagacagttacaaatataatccaaattttatatcaaaactataaatatattcaactctttacataaccaaaaaaattagttgtcagaaatcaatctctaaccccaaaaacaactaaaccataacacccttaacttaaatacaagtgatttaacatttctaatatattattctttgttaaaaaatcaatttttgtaaaaatcttttaactaacattgagatcattaaaacatggttaaatttttttacctgcaaaatgacggaggagatgacgtcagcatacttaacggcgagattaagcgacatacatctcgccggagccaaagcaaaacatcgaaccttattcctcggaatatcaccaatcatcgccggagtattaacaaccaaaaccgccatcaacgccgcaacaccagaacccaaagaatgaccagcaaaaaccaaatcatactctctaccattctcttccaaactctccaaaga

SEQ ID NO: 24488 - DNA, 567 bp, Arabidopsis thaliana
agtaacttccgccagtgtgctctaaagttaaagacatatccgtggctttttatgttaaccgcctgcgagttttaccttcatccctttcgcttcaagtagtgattttaataaatcacgcttatcgccctggatttcaataactccatctttaactgctccgccgcagccgcattttttcttcagttccgctgcaagttttgtcagttcggcatcatcgagatcgacaccggtaatcaggcaaacgcccttacctttacgtccactggtctgacgctgaatacgcaccacaccgtcgcctttagggcgtacaggggccgctttgggctcatcaatacgtccggtttccgttgagtagaccagacggctgttggaatcactcatcatgcactccgctgtaaagaggcgttgatcgctttcagcgtctgcgctggatctaccgattgcgttaccgggcgaccaatcaccatataatcaacaccagccgacaacgcctgttctggcgtcataatgcggcgctggtcaccagcttcactcccctgcggacgaatgcccggcgtaaccagtttg

SEQ ID NO: 24489 - DNA, 469 bp, Arabidopsis thaliana columbia
ataaatatatattaataaaatagagaaacaaattcaaatattcacccacctgtgtctggtagttccaaatacacacggttccagaatacaaacttgctagaatcctgtaacaccgtgttgtttattaagtcagtcatttgtagcagcaataaaagtacaaacatacagtactacccacagcaactgtgaaaattgttattccatcaacacatccaaaatataacatataactaagttgcaagatggcagaatcaaatttgaaattaccatggttcagtaggatgcagatcaacagatttgactctctctgatcgttgagcaaactttctctgatcaaaacataacagtagcaaattatgaccacagctataataataaaataacagaagcagaaagttgaaagataagcaataccttgatatttagtcttgagaggctgttcaacataaagaagatcgacaatagttag

SEQ ID NO: 24490 - DNA, 445 bp, Arabidopsis thaliana
  unsure (1)..(445): unsure at all n locations
nnnnnnnnnnnnnnnnnnnnnnctaaaggctgcgccgaaaaataaattagtcgcgcttcgcgcagtacgcagcaggccggatgcgccttcagaatagtcgcgaggcatctgcaccggtgcctgatcgttgctggcttcagactctgccagacgattacggaacgggtttgcttcagcagacagttccggcagcaggctgctggagctttttgccatgtgctgatacagctggcgatagtcgtgcgccatggtatccagtaattccgcgctgcgtgcaaagtggctaaccagctcttcgcgatactcgtccagttcagctttattcttttccagttcgtactgcaacgcctgttgctggcgtagtttaggattaccaaaacgcatggccacagcaccaataatgatgccgacgactaacccaattagcgcatattcccaggtcatg

SEQ ID NO: 24491 - DNA, 461 bp, Arabidopsis thaliana columbia
caggacgagatcaggaccattaggagcgaagacgttgtgtaatgcgtgtggtgtgcgttacaaatcgggtcggttactacccgaatatagacccgcttgtagcccaacattttcgagtgagcttcactcaaaccaccacagtaaagtcattgagatgcgtaggaagaaagagacttctgacggtgctgaagaaaccggtttgaaccagccggttcagacggttcaggttgtctcgagtttttgaagaaattgtggaaggtttttaaaggagcagaattaggatccgacccggttcagatttatcaccagttagtatgttaacgggttatgtatgttttaaattacaaatttgattttttgtttgttagtcgtagtaggtttttagatttagtaactggttaaaacttttaaaactcttactattatatttgttttgttcgcattaatttcagaattctttt

SEQ ID NO: 24492 - DNA, 601 bp, Arabidopsis thaliana
  unsure (1)..(601): unsure at all n locations
cgccagtgtgctctaaagcgatgtcgatcactgccgcgtattccgcatctgcatcggcttccagcagctcaggattcgccagccatttttccatgccctgaatacgacgttccagggtacgacgatcgccgtaaccttccgcgatcatccacttcagcaggacgatgttagagttcaggtattcgatgatcggttctttgttcagcttgatggtacaaccagcggcagaacgctcggcggacgcatcggttagctcaaaggcctgctcaactttcagatccggcagaccttcaatttccaggatgcggccagagaagatgtttttcttgcctttcttctcaacggtcagcagaccttgtttgatcgcatacagcggaatagcgtgtaccagatcgcgcagggtgatgcccggctgcattttgcctttgaagcgcaccagaacggattccggcatatcaagcggcattacgccagttgcggcacatacngccaccagaccatgaacccgccgggaaagagatccgatcgggaaacgggtatgggagtcaccacggtaccgacggtatccggcagcagcatacggttcagccaggagtgaatg

SEQ ID NO: 24493 - DNA, 535 bp, Arabidopsis thaliana columbia
gaacacaggatttatgaaacacaggcttcgacagatttcttcaggtcaatgtacaaagagacgggttcgtcttggtacagccgatatgggacctgtggaaaagaaaacaaacggcccctatcaaaaagatacttaggaacaaccactgctgaaagagtcgcagacactaagcccgactggatttgtcactttgagatgaccattagagaaggaaatcaccataaaaccgtagcaaagaaaaagccatttgagtgacacacacaaacaaaaatgcagcagatatagcttaaggttatacatgagctaagtaatcttaacttggagtgacatatttctattagacctaaaagtttcctcaacatgttcaactaaaaacaggcaacaccacaaaatgcagcagctaagataaaagtaaagtaagtggagggttccgaggatactcttgtgattcttcaaaccttcgtactcagtcaccagctcaggtaggagtctagcatacaagtcactccacagtttcttctgattcgcaatgtgg

SEQ ID NO: 24494 - DNA, 574 bp, Arabidopsis thaliana
ggcacatggaacgccactgctgctagcgtacaccacatcatcggtttcgtcactcgctgcgaccttagataaacacgtaacggctgaaggagagtattggtcaaaagatcaggaagcgcgtagagacaatattcagccgctgtagcggttatctccgggttttgacccatgaaaagcatgatgggtccaaggttgatccaaaggaggcttatgggcagagaggccattaagagaatcacgaccatacggtgaagagagagcgtgaggagatcccagtttttgctaccgtaggcttggctacacactggctcgagacccgaggcgagtccaaccataacagagtatcctgtgatgttggtgaatccgatggagagagctcctccggctaactcgaggctaccgagacggccgaggaagagaacagacacgacggcgcgcacgtagacaagacagttcattgctgtgattggtacaccatacccagagctcttttagctctcaatgacttgaggaagagttgggtttttatgggaagtgaatcatctgactggattttgtgtccattgcaaatggt

SEQ ID NO: 24495 - DNA, 552 bp, Arabidopsis thaliana columbia
gaacctaatggaaaaggtaagaaaactttcaacagaaaccccaaagcattggatctatacaaacacatatggccatgagagtacctagcaatctcattgaaccaatttgaaagtgtagacagtggagcaatgactagatatggaccatccaacccattccctttcagatgtgataagaaaccgatcgtttgaatcgtctttccaagtcccatttgatcagctaatattccattcaaaccattctgccacaatgatattagccatttgacacctttaagctgataagactttaactgtccaccagtgagaagaggacaaagttcattctgcagtttgatgactgtttcttcctctgtcagatctgagttgatggtctcaccatcttctttagatcttgaaatcatagcagcaaccgctctcttagccttagtctgattgaagaaaaaagcatccaagtaagttactttctcaaacaagcagaaaaaacaatatatacaagatcatgcatagtagttgaaaattatataaatggaccaacattgttgtactgag

SEQ ID NO: 24496 - DNA, 613 bp, Arabidopsis thaliana columbia
ttttagccaaaaccctcgctaaaagccaatccctcaatataaaataacaagtagaattgatctgcctatatataagattttgagacgaaataagatctaaaccacaagaaagaaagtaaacataaaagtatgggaaggtcaccgtgctgtgagaaagctcacacaaacaaaggagcatggacgaaagaagaggacgagaggctcgtcgcctacattaaagctcatggagaaggctgctggagatctctccccaaagccgccggacttcttcgctgtggcaagagctgccgtctccggtggatcaactatctccggcctgaccttaagcgtggaaacttcaccgaggaagaagacgaactcatcatcaagctccatagccttcttggcaacaagtgagtactatactctctaaatatgggcttatttaactagctagtatcgtttataccaaaaaaaaacaaaaaaaactagtatcgttttaatttatacaaaatgaaaatcttggagtttcaatctatctaaatgatgttattttttgttgatgatatatagatggtcgcttattgccgggagattactgcggaagacagataacgagataaagacctattgg

SEQ ID NO: 24497 - DNA, 530 bp, Arabidopsis thaliana columbia
cacagattgattccccaagaggtagtaatggatctattgtacagaaatctccaaggaggtatagttatgatcggcctctcttacacataactcctggtgcttctcctttgcctactcacaatcactctcctcgtgtaagataggaatcactgtaatagttatcttttgtctttgtctgttgtatgctgtttgtaaaatgtgttgtgtaatggaccaaagtttcattcttggctcaatttataaaatttggtttcagtatggtttgtttggtactgaaagatatgtaccgatccacgtaaagacagagacacgaacatagggttaaacccaaagttttttattaatcattaatgtaaatgcagagacatacataggttaaacgcaagagactcctaagaaacacaaattcataaataaaaccacaaatccgaaaagagtcaaaggattgaaacacaataatcctaagagacaaaaatccaaaaagtcaactagatagaagaaaatacattaacagaagcaaacattgggtg

SEQ ID NO: 24498 - DNA, 581 bp, Arabidopsis thaliana columbia
tgattctctcctataaacacaaaaaccctttgattctaatataaccataacccatctctcaattttcgaaatttactcagaaatgttgaagctttcgtgtaatgtaactgaccatatacacaaccttttctccaactctcgccggatttttgttccggtgcatcggcaaaccagacccatctcttgttttcagttaaagaaggaacctttacgggcaattctctctgctgatcatggaaacagcagcgtccgtgttgctgatactgtttccggtacttctccggcggatcgtctccggtttggtcgattgatggaagatgggttttcttataaggagaagttcattgttagaagctatgaagttgggattaacaaaactgccaccattgaaacaattgctaatctcttgcaggtttggggattttgtgtcttgtgtgtactcaatatactaaacactattcttgtgtgttgcaatgtttgtttagttggttatgtctttgtgtgattgatgttttgagtatggatttgtgtaggaagtggcatgtaatcatgttcagaatgttggatttctactgatggat

SEQ ID NO: 24499 - DNA, 578 bp, Arabidopsis thaliana columbia
ctcatgaatagaagtcatttgctttgttttttttttgtttaaatggactgtgtgtggcaggttctttcatgcaaaagcatcttctctggccaccagaaagtcccgcggtcacccactcctgtggttggaaaggcctccaagtttgatggagaagcaaggcgtaacgttttgtcccacgatgaaggagagcttccagtgagattgcttgctgatgttgacagtttattcgttacaatccgaggcctcactgtgcattacaagctttgttcacctggttcacctcggcagtctagctgctcaaatgttctcgaagccaattctagttacaatacgccagagataatggcaggaaggtcgaagtttgacagaaaagtgttgagtatggtcaccaaaagccatcatcatcatcaccacaggagctacaacagtgtgtttaacaattcttccttgcacgaccctcttctggatggttctcctacttctcctctgtcttttcaaagagattaaggaaggaacgggactagtggatgacatgaatgtattcaattttggagctgagggacaagacttgggtgaag

SEQ ID NO: 24500 - DNA, 367 bp, Arabidopsis thaliana columbia
  unsure (1)..(367): unsure at all n locations
ctnnnnnnnnnnnnnnnnnnnnnnnctaaagcggatatggggatctggctggtagtgatggcctttgcggtgtatgcctttttctctggcgggccgggtaatttgcagtggctctatcctaatgaactcttcccgacagatatccgcgcctctgccgtgggcgtgattatgtccttaagtcgtattggcaccattgtttcgacctgggcactaccgatctttatcaataattacggtatcagtaacacgatgctaatgggggcgggtatctcgctgtttggcttgttgatttccgtagcgtttgccccggagactcgagggatgtcactggcgcagaccagcaatatgacgatccgcgggcagagaa

SEQ ID NO: 24501 - DNA, 497 bp, Arabidopsis thaliana columbia
caagttttcaaccaaacatcaaagaacttattagtatgtgtatgggaaaattatgaagagaacaaaaaaaacacacacagaggatctctagcatttttccagtagaggacaaagagtaaatggtacacttattttaccagcgatgatggtaaattatgaagatacagtaagaaaaactcaaaaataatgaatccatcatcacctcgttctgctctctccgcctacggaatctccccgtgggcgaaccttgcgattcagtgacctttatttcagagccttagtaccggttccagtaggttctgcgtctgaatttgttgtagtctggcaaatcttggattggaccaatagctgagattgcaatgtctctgcacataatcccaaaaatcaccttaatcactcttgacgtttgtactcttgtttagcagtctaatccttggaggatagagagagcaagagggagagagaaatagaacttactttgtcatagatatatttgt

SEQ ID NO: 24502 - DNA, 592 bp, Arabidopsis thaliana columbia
caacaccggaaaaaagattggaactttaccaaaccctaacccttccaccactggagttccaaccacaatgtgtcaagaaccctcctactgactcgtgactaagtattttcacttgtggaacccaaccaacatgaaccattccacgtcccttgactcgtgttttgaacccatctggaatctttggctcgttccttaggacccaaaagaacggtgtctctgacttctctaacccaagagctagctcagttacttcctcatgacgaagactcgcttcggtgccaagtgacacgtaaacaactgaattaagccgttgcttgtcgagccacttctttatacgaacccatgtagtatcaacggcatcgtcgtcttcaataaccggaggcaaaaacccgattggaaatactggtttacggtacaggtcttttagtaaaccaaaccattccggttcaaactccggacagctacggacaaaaaccgcatcgctttcgtcaatcgagtaaccaaaccgaactgagtcagagactccggttacatcttcctctgtcttctcaacgtatctagtaacttcatgataacgaacacgatgtttgac

SEQ ID NO: 24503 - DNA, 581 bp, Arabidopsis thaliana columbia
tggagggatagacaaataaaagaggcggtttgagattcttccagcctacagaaatacaaaggataagaaccactatgtaaaagaagtagactccaattttctagtttactgatttgaagagaacaaatgttcaatacctcatgttccttgagcttcttatccaattcagtaaaatgttcctgagaatcatactgaccagaatggtaaaaacatctcttgagaaattcttccatcttttcaccacagtttgccctgaaatccaaatggaacaatgacataatactcagagttaattatcttcaaaaacccatatccaactgaattgaagcataaagacttgtcttgacaaacaaaaaccggaaacttttcagtagctacaattgctaacctcttatcaattctgcaagtgagggttttgctgaccatgtttctaagttcaacatctgtcatcttactcctagaatatccaaatattgtaaaatgctgccacacaacaaaatcaaattgtcaatcactagactttaatgtgcaaaacacacacacaggcgatcaaaatagcaaatcatagagaagaaacgatc

SEQ ID NO: 24504 - DNA, 523 bp, Arabidopsis thaliana columbia
ctgtagcttggtaaatcgatcgatatcgaaatcaagcattttaatcaaacgtttctgcttcgtctcgaaccggcttttgtaaaaaccttcaaaggaaggttcctttgaagttcggaggaagaaggcgtaaccagccatgaaatatgtcgaagttacgtagaagcatatgggttccatcacgtcccacgacagttcccaaaacgtcagcctaaaaaatccaactgtttgggccattattaggcctaatccggcccataattcttttcgaaccagatcatcggctcttttgtcgatatctgattttatgatctcaagttgttcgaactcttgtcttgtctcggcgtcgagactgggttcgagtgtcggaatcagaccagccatggcgcttgttagctgtaatcacacagaagaagaagaacaaattagatcaagaatgttaaatttgatttaagaatttgcaatgcatgtagagtttaattacctcttcgggtttaaggcagacgagttttcgaaaacgatgacg

SEQ ID NO: 24505 - DNA, 496 bp, Arabidopsis thaliana columbia
cctaaagcttactccacagagaaaacttgaaaaagacaaagcggcactacatttagcttatgataaagttatctactgatgttgaattcatctaaccagcacaagaccgtcaataagcacaaacaaaccaaacctaaactactacatttgcatcaatcaatagaataacctcaaaacaatcaaatgggtcaatccaaaatcaaacaaagtatgtaactttagactcaaatcggagagaatatgaatctgaagaatactaacaccctgaatacgcttgccggtaacgggacatttaggtccactagctctcttcttagtggtctggtacgtcaatttacctcctgcaaatcatcaatacgtcaatacatttcaaatcttatagatccatggatacagatttgtgaatttcagcatatgcgattgaagaaacagaacagacctggagttttgacgatcctgtgctggttggatttggtggcgtaactgtgtcgtgatc

SEQ ID NO: 24506 - DNA, 596 bp, Arabidopsis thaliana columbia
taacaagctgtataacaaataatcaagaagaccagctgcagctggaaaccttgattttaagccattgtgcaaactgcttagtatggtttttccataaaaatgttttattttttgcacatcgagcatcattagcttgtaattcttccaaatgcatcctagattttacattagataacagttctcagaaagaaattatactaaaaattagtagatcaaacataaagggtaacctcttactcgacataaggatccaaagatgccatgttcattagcacataacgatgtgcagtgtctctatctttatctgatagggtaacttctacacccttctgcagaggtcgaccttcaaccacgcttctatcagcctcaatatcttcattgcgattaactgtttcttgaactggtactgaatctttaaggaactctaaacaaaatgcaacgcattctccagctaaatacccctcagccatacatgcttctagccttgcatgattcttaacaaacgcctttagtgttttcatgtacgtatatctcaatcaagaaatgaatattagttgaaaatcattgcaggaaatacatatattgaaccaaatgag

SEQ ID NO: 24507 - DNA, 869 bp, Arabidopsis thaliana columbia
cttgtcctctgaaccagcagatggtaagccaaaatcatcttaacttgaattttcgaaaatgtaatatgtattatcacatccatcatatctttagctcaatcattgacttgctcttctgattttgatagttaaagtaggcataggaggttttagcatgggagcagcaatatctctctactccgcgacttgttatgctcttggacgttatggaactggccatgcgtatcctataaacctacaagctgttgtaggactcagcggctggcttcctggttggaagtattactcttcaaaacctcctgttatacaaactttgtttcttttacttaatgttacctggtctttctttcttttttattttaactgatagaaggctaatataactttgtaggagcttaaggagcaaaatagaatgttcatttgaggctgcaaggcgtgctgcatcgttaccaattatacttacacatggaacttgtatgtgtacacaagctattttgtaaaatatattttctatttatttttcctttagtaatgactgcactaagctgatcttatctgaatttttttttgtgtgtcacagccgatgatgtggttccttataggtttggagagaaatctgcgcagtctcttggcatggctggatttcgactagccatgtttaaaccatacgaagggtaatagaacttcaatgaacgcgaaaataatttgatttaattatcatttgttggaacatagttataaagagttttgggtttatgccaacgtgcagacttggtcattataccgttcccagagaaatggatgaggtcgttcactggctcacaacgatgctcggacttgagggctcgcgctaaactttacagactgcg

SEQ ID NO: 24508 - DNA, 655 bp, Arabidopsis thaliana
cagaatcaccaacctaaacacaaacaaaagcataacaacaaagagatcatatccaaatccattccattcatacagtccactgaaccctaaaccagttgcttgcgaaggagtaccttgaccgttcgggcacagcgcgggaagataaccaacttagccttgtaggttttcagcctctggacgttggtttgaaaaccctccaaagaccggttcttgcgatgatggtcaacagaaataccgattgtaggagccaacttcttggggataccagcagcctaaatttatcaacaatcagaaagaaaaaacaatttaaacgatatccaacaagaaacaaaacacaaaagctaatgaagaacagagagatattacaaacctttagctcttcaagagtgaatcctttaccggctctgactttcatgttgtacgtaagagtctgagcatgtacaacaggtcggataggtccagcagtgggacggggaaagatcttcacagccttattctgcctcgctgagtaaacattacacaccaaataatcaaattgagatgggattatggtaaaacttctaataaaaccatggcacataaaaccaaaaaaaaatatagtagtggtgacattaagatagcaaaagcagtagtagtggtgacattactactaacc

SEQ ID NO: 24509 - DNA, 1024 bp, Arabidopsis thaliana
aacgctacaatcaacggatgagatacaggcataccagtaaccttatatttctccaccgccttaaacatcgcctcgagttcaaatctccctaaaagcaccaatgtctctccaagcgagatggctcgaatcatcatcatgaaaccaaacacgtggaagagcggaagcgagaacagtccaacgcgatcgtaattaaccggatcttggagagtccgttggtgagatacggcggtcgaggcgattaggttacggtgagtgagcaaaacgcctttgacccgcccggttgttccagaggaaaagaggatagcggcagggtccgattgttgaacctgaacctgaaatggattaaccgatgaagaatccgatcgatttaaccaggagagaaactcagtcgagtccatcagaacagttccgagaggcaaagaagaggattgaagcttcttaaccgtctgcgatgtcgcgaacgcaattactggttcactgacttcgacttgatgactcacctccgattcagatccgattgggttcgccggtgaaacaacaacaccgatcgacatcaaagctaagtaaagcactggtatgtccaacgaagaaggagagaggataaaagcgacatttctggaggcaagagaaggaaatcgctcccggagagatacagcaagagaacgaactctacgaagaagctctccataagtgaggttatcaccagagctcgagttaactaggtaggttaaggcttcaatgtttttcccggcggtggcaggtggtgaggatttgagtaggagagaaagcgcgaattcggcggcggagagaggttgatctataggaggtagagaaagagagggacgaagactgtgatagattcctgtccgttgatcgaagccggagctccggtcaatcaaacggctgtcgttggttttcgtcagcattctggaagacgattagagatacagtaatcttttcgtcggcggtgaacatgcgcgcctgcgagaagatatgaactcacataaattaatgcatacgtggc

SEQ ID NO: 24510 - DNA, 377 bp, Arabidopsis thaliana columbia
gtatcccacgcatacacaatgtgattaaatacacaaagaagtgattctaaggctttgcaagacagttgaaacaacacagctgtaagtaaattctgcttaactaagaataagggaatcggagtacagtatcaatgtaaacatgaaagaaataagcaagaaaaaggtcctgaaaaaggtccaaataaaagatcaccaagaacatgtccacaaagtttagttgtaaactcacctcaaagaagatgtcaccatatcttgtgaaattaaggtctgatgactcaatacttttggcaacaagttcctaaaccaagcaaacaagcgtaatataagttaagtgcaaacacatctccagatcaaagcatgacataaaaatctagaca

SEQ ID NO: 24511 - DNA, 550 bp, Arabidopsis thaliana columbia
tttttattctatctttgaaagatagaaacgacgtcgtctggatcaaaacgcccatagcagccaccgtcgatcttggattcacgagcaaaccacacaaaacgatcatgatctcgtaccaccaccattccaaacacacggagacacagcttggtcccgcgagacgcagcaacggagcccacccgcggaaacaatcacgggtcgggtcagtccatgtaggcgcgtgaagaccactcgcccagacgtagcaaacgaggaaagcaacgacgaagatgtttgtgatggaggaagcgactgctacgccggttaaaccaagacggaggtaagagactaagaaaagattagccgggaggtgaaaaacagcgccggagagagaagctagggttacggggtgaatgatgccttgagcacgacggtagattctgattggatgaagaagagtgttggtgagaagatcaggtagggagaagatgagatatgtctgagctaacttcgcgatgcaggggtcttggtgaaggtaaccgatattttgccgcgttaaccagagaccgag

SEQ ID NO: 24512 - DNA, 498 bp, Arabidopsis thaliana
ctctagtaacgtcaagactggaggtctaggaagaagattgagatacttcagtatacgtttctcaaatgggcgcttgcttttcttattggtttagctactggacttgttggctttttgaataaccttggtgttgagaatatagctggatttaaactcttgctcatcggtaatctcatgctcaaggaaaagtaagtctagcttttgttgtttatctctgcttctacgccattttttagcactttctatcctgtttcagttactgtttattcactgattatatctaaatttcttaatggttaatactgttatgagaattaaggctcacagggatatatgtgtggatcagaatgataaatgacatcgggatgtttcccaaatactgcagatatttccaggaattttttgcatttgctggttgtaacttaattttggcaactgctgctgcttcactctgtgcttttattgctcctgcggcggcaggatctggcatacatgagg

SEQ ID NO: 24513 - DNA, 541 bp, Arabidopsis thaliana
gactcgaaccttttgtgtttcgatatatgtagtgtattcatgatcagaatcttattaagtttacaactgaaaactaaaatattaacatcataattatagattcttaagtaggttttgtttgggtggagaaaatatccaatttcgaataacattatataaaatattgaactaattttaattgtatacgcaggtatgcttcagagagtataaagttagcttgtaaatggggatacaaaggcgtcaagtctggtgaaacgttatcaggtacgttgtttgcttcttctttttctcgtacgctaacaaaaatatttaaaaataaacccgaccaaatgaagtttaattaatcggattaatgatttttaatagtcactactttttttgtgtgggatatatgactgtctaatatataattttataagaaagctaaaggatttgtttaataatttccgataaataattttgcagaagaatatttcaatacaaggttgccaatagtgatgaagagaatagttcagggaggagttagactagccatgatact

SEQ ID NO: 24514 - DNA, 233 bp, Arabidopsis thaliana columbia
gtgagtaaacccgtaagcgcaatatttcgatgtttaggttgttgactgtcgtatatgtggtgatcccaactcagtacttaggtttgctttcatcgagttcactgatgaaggtatcattagtttctctatgtaatctgtttattggataatgcctgtaagtgcttggtttatggtttgtcattttgggacttgtagtgggtgcaaggactgctctgaatttgtctgggacgatg

SEQ ID NO: 24515 - DNA, 515 bp, Arabidopsis thaliana
agttggagctggccctggattgggacttcatgtcgctcgttgataaaacattgacttttgagccggagccgaagctcatatcactcatccttgagatagtcacccttgtcttctccatgtatacacagtgggacaagcttatttccttatgtcctcgcttaaatgttagtttgaaagaggaaaagtttcatgtggagcccaaatacaagatgtggaacggcaagctggagtgtctccctttcaactggcagaaattctggttaacaagaggagaactcgcttcccattttctctgccaaggttgcaacggcaagaaccataaagaatataacaaggctccagctgagatcaaacacccttttcatcctaaacatcctcttctcctcgtctccttgcaaatgcttagtagcacgaggaaatgctattgttgcgatgaagatctcaagaatatcttttattattgcccgcttgcgagtttgctgttaattttgcttgtgtgcagaaaccaccagagt

SEQ ID NO: 24516 - DNA, 544 bp, Arabidopsis thaliana columbia
tgactggacagaagaaaccgagactaatttctttacaaagatttaaagaatatctgaatatgtatgagtgtgtcgaataaagagcatgtattaggtttaagtatcagatcttgtaagctgattaaacctccattgttgatgatctttcgtaagcatgcaaacttcaataacctgaactactactttttacaaataacctttctagtctctttttacatggcggaaacattattcatatttttaagaaaatctactagtacagattacaatatacagagtataccatgaatatgatgaaccaaaacaacatagcttgttacaaaaatagcttacaaagccttcttctttgtgtgcttaacacaaatcaaggcataaacaggaatgttgacaagtccaagagagaccaaaagccagaagaagtagtcaagatgtcctttattaaggtcgtctggacacgcaccatctttacctccaagagctgtgaaatcgccacaagagtgaggattacgagctcaggtagcttccgctgcggtattgagtagtg

SEQ ID NO: 24517 - DNA, 548 bp, Arabidopsis thaliana columbia
ctttgtgtcacaaaaacaagacatggtttacattacttgaaaacgtgtagagcatttaacgataattatacttatatgtaatcagctttgattagagatgatacttcagaacacttgatttatgtataagatgttaagctaattaagatgaacaaaagataagcaaaatgtatatagttgtgttgttatgtgaatgagattaattaattaattaaagattgtggtagagaagctcataatgtttctttttagaggtactgtgtttgtattctctctctgttctgctcccaccatgtcttaacatgcacttccccaaactgttcccggctgttgattaaaccacaaaatcatagattcctgttagtcacggtatgattatcaactttcaaaatgtatatgattagccaatgcttagtttaagatgttttgttatacctgaatctgactcgacgtacatctgataattgtctgatagtaatgtaaacaccgggctagtcctcttcaatccactcagcttgcgattcactagcattgctcatggaaggtgg

SEQ ID NO: 24518 - DNA, 617 bp, Arabidopsis thaliana columbia
gtatcttcaaaatttatggatgttgcaatgggtttagtttggtcggtctcggtcttgtggtcttgactcttgacgggttgccttagtttgattaactgacacttaattactaaatgaaaagaaaaaatgatgggtcctgctaggtctaataatagcatataaaaatgaattagggctaggaaaattttggtctactatatttttgtttataatgatttatttattgtatactttgatcgaactaatgtaatatatttgtttttgtaggtgagcttgagcccagacgagtacataacagatgttactggctactacaaaactacaggggctgaagatgctatagcagcattggcttttaagaccaacaaaactgaatatggtccttacggaaacaaaacaaggaaccaattctccattcatgctcctaaagataatcagatagctggtttcaaggaattagcagcaatgttctcaactctattgacgtccactttgctcccttaccttcctcttcgtcgtcatcgtccagtttgagtcaagccacaaagttgatgccaaggtgggaaaggaggacatcatgggacgatggtctcatgatcatgtagacgagtgtcatt

SEQ ID NO: 24519 - DNA, 500 bp, Arabidopsis thaliana columbia
gtgccggaaggtaacacaaaggaggagacatgcttcttcgtggaggctttgattcaatgcaatctcaattctttagcagatgttaccgagcgtctacaagcagaatctatggagaagaagatatgagatgtgacttgagaatcttttcattcggaaaagaaggaaaaagaccaaagaagagaaataactcttcccttttatagcaatgtctatgttttttcttcttctatttccattttctgaatgtttgtatattattggaagtttgtaacgaaatgatttcgaatagctgtcaaacgagaaatataaattcaaatttgtaagtgtttatatgaaatgcttttttatttttaacatttccacatgaaaatataaataacatatcatgacacatgcaaaatcatatttatgaaagttttttcaactctctccattttttcgacatatcagcattagatagagtgacacttatcacatcagcatatgaattacatgtctga

SEQ ID NO: 24520 - DNA, 517 bp, Arabidopsis thaliana columbia
tttaaaaaggtcctctcttttaaatcaatttttgctgaacttgcccaattcggaaactttgttgcaagtctcctcttggtctctggtaatcgttttcgcatcaatccttatattgatttgaatctgtaatcagattcgatctttgatgctaatttggtattctatagaagacaacatatctgaattgggtttcttcgttggataggataagtggttagggaatgagaaaattgtataggaagctggtttcattcagagacccatttgctagggtcaagagacatgttagttcacattcagggtttagagctttcagcgacagaaaatggttgttcccttttctagctagcttgatcatgtccattactcttctgattttgttaatttctggccaattcgacaacttctttggggaagaagatcaattaccagttgatgttgtttcagagtctaatgactactttgtagaatcagatttcaagcaatctatgaattcgacggctgatgttaatcagag

SEQ ID NO: 24521 - DNA, 512 bp, Arabidopsis thaliana
ctttatagtgtttatggtcaaagaatcattggaaatatggcgtcttgaatactacttctcagaaggtttaatcaatatgcgttgatatactttcagaacccagaagatgatagcaatttggcttattggctaacaaacacatctacactgctgttcttgcttcaaagaagcttgaaatctcatagtacaaccggtgcaagtccgaagaaacctcctcagccaacttctttttttgggaggatgacacaggtaacaaaatcctgtttatagactctaagaataccttaagcatactaatggccataaagctttaacttaagggtttccgtgtcttgtgggatttcctctaatatgacttccatatgtttagggtttccgttcacctcctcggccagcctttcaggtgatgtagtgcaacaagtagatgctcgatatcctgctttacttttcaagcagcagcttacagcctacattgagactatatatgggatatttcaagagaatgtgaagag

SEQ ID NO: 24522 - DNA, 425 bp, Arabidopsis thaliana
tcccccagacaatatgaactagtactccaacataaccttgtcaccatctccgggcagaatcttccggcggtgggtttgttcactttcggagattccaacttcgacgctggaaataaaaagttcctcacaagtgctccacttcctcaaaacttttggccttacggtaaatctcgagatgaccctaagggcaagttttctgatggcaaaattgtcccggactttattggtaagtttgtaaatttatctctattttacacttttaattttttcaaaaggaatcagattgttttattatatctttctaatcccaagtagacatatagaggacaacatatggtttgtggattgatgcttatttgtgatccttcatgttaaaattctgtcccaatacagttgttaaatatcttacttacatcaataaatga

SEQ ID NO: 24523 - DNA, 483 bp, Arabidopsis thaliana columbia
cacaatctctactggttcactgttggtgtgactggtgagtggtgacaagatggcagaggaccataaatcagcaccgttagtattcgccacgtgtacggtccaagctagtggaacaagacataaaccattgcttctcaactctttcactttcatcgtcgggtttacttctccggtgtcttcgtcgtcctgacgacacatcaactattcatcagtcacaacaccgtcaaaatagtaatcttttaagtcttaaaacagtcgtttcgaatcatggaaaaataaatatcttccggttttattgataaagacatagagtgtaacaaaaaaagaggataccaagaaaaaagtgtaacaaaaaaatgaaataagataatacaaaaggatgatggatgacttacaagagggttatgtttgaagtaaggggttgaaagaacttgaacttggtcttgtaagaattttatgtacccattgtttcatgcacactga

SEQ ID NO: 24524 - DNA, 2943 bp, Arabidopsis thaliana
atccatagtggatcctcccaaactttctcagggataggtagtggtgcagcaaccccgccggagaccgagtagatgtcttatgagtctgacacacttggcattcaaccaaaaaacgctgcacgtctttcaccaacccggtccaatgaaatgactgttgaattcgtttcattgtcataaagacaccatagtgtcctccaagcttcccctcatgaccttcagataggattagaggtatgaactgggaattgtttggaatgactaacctgttcttgtaccacaatctgttgtctttgactgcaaaaccttgtttgtaggacaaacccgacataatgatgttgatggtgcgttggagtgctgcatccaactcaatttccttatagatgtcttgaagttgaatcacgccaaggactttcaaagcaaacatggctgagtgtaccgtagctgaagaagtaggcatcattctggataaaccatctgcagctttgttgtcgatgcctggcttatagatgatgtcaaaggtatagttgaggagtttactgagccaattttgatattccagtgacacttctcgttgctccagcagaaatttcagactcttctgatcagtatgaaccacaaatcgtctccccaaaagataatgacgccatttctgaactgccatcactattgtcatgagttccctttcatagattggtttaagttgttcccttgcagtgagcccatagctaaagtatgcgataggttgatgatcttgctttagcactgcccccagtccaaaacctgatgcatcatattccacaacaaaaggtttctcaaaatttggtaatgcaagcaccagagcagaaaccattgcagtcttaagggtatcaaaagccaactgaggcgcatgtgaccactggaactgatccttgcgcaatagttccgttaatggtttggctaacaccccataccctttgacaaaatgacgatagtatcctgtcagaccgaaaatccaaacaattccttgactgatttaggagttggccagtgaatcattgcctctgttttagacggatctgtggctaccccgtgagccgagatcacatgtcccaaataatcaatctgagactgtctaagtaggcacttcttgcggttggcaaatagctgatgtttggcaagcacttccatgaccaatgtgagatgtttaacatggttagtgaggttgttgctgtagattaatatatcatcaaagaaaaccagcacgaatttcccgagaaaaggcccaaaaagctcattcatgagtgattgaaacgaagctggtgcatttgtgaggccaaaaggcatcacgaggaactcaaaatggccgtcatgagtacgaaaagctgtcttctcgatgtcatcttcccgcatccttatttgatggtaacccaaacaaagatccaacttggagaagattgttgtgccatgtaattcatccaaaagttcatcgatcatgggaatgggaaatttgtcaagaacggtgactctgttgagggctctatagtcaacacaaaacctccacgagccatctttctttttcaccagcaagacaagactggagaaagggctcttactggggcgaataataccacattgaagcatgtcacgtactagagtctccatagcgtctttgtgagcatgggggtacctgtacggtctgatgctaatggagcctgcttgtggtaagagtttgattgcatgttccctgcctctaactggtggaagtgtcgttggtgttgtaaagacctctgcataagattccaacactgaggacagttgtgccagaatgtgtgactcttgtgtctccccacttggctcgcaacgcttgtgaactgatattggaacaggcgttaatgatttgagagacaactttgtctgagctaaagttggttcaccgacaatgttatctatctgccctggtgccagaaaaaacagcttctccttatcccaattagcattactcgctcccattgtcttgtgccatgcgatgcctaaaatgagatcaacatttcccaactccaaagtgatgaaatcattgacaaattcgtgaccctgaacagtgaaatggacatctttggagacaccagaaccctgaaccatgatactcgtacccagcttaatgttaaagcctttgcccgctgagtgccggactttgttttctctgtcacttttggtgtgatgaagttgtgtgtagccccactatctaacatcaccaccatgtcgtgtttaccgatagtgccacgcatcatcattgtgtgctcagatggaagaccaacaaagtacgtgtaggataaagacatatttgtgagttgtggctcttcttcttcatacccatgaaccacagccagcacttgtaggtccttattagcacaaacatggcctttgaaatagtgagcatcacacttaaagcataaccctttgcgacgtttctcatcaagttctacatccgtgaaatgttttcgcggtcttgatataataggtgttgctctctccttggttcccgatggttctgtgatgaaaggcctagatttccaaaccagaggctggtagggtaccaacgctctgctctcggactggattttggaccctcctttgccactctgcagttctttcagtaccactcggtgaatcagactggactccatatctctcgctaccccaatcatttctggtagattctgcaggttccacatgtgtactatctcctgcattttcaaggaaagaccatttaagaatatctcttcaagtttgatgtcgtcaaggcctgagacctgagacgagagatcctcaaactggtggatgtactccacacgaagcctgtctgtttgatgcataacagactttgacttggaccacgactcttaaggttccaaaacgcagtaacaaccgaaccttgaactgcggccagcttgtaaacccttgacg

SEQ ID NO: 24525 - DNA, 540 bp, Arabidopsis thaliana columbia
ggaagatgtggtagagtgtaagcaacagcttgtagatttttgcctctcagatgttccattagctgcacaagaggctttcatttagtgatagaaaaaaactagaaccaaattataaaacatgttaagcaacacagcgataaagtaagtacgttttaatccagcagagccatttgattgaggtttcgaatcaagcgactgctttagcttgtatccaaagcgaatggacaatgtgctcaacaatgcaccccctgcaattagtatccagtttggcccttcaccacaaaatttatcacctcgctgatgcttggaaatgccatttcttcgtgtactcattgtatgagaaagtcaaaatgtatctatcatccaaacataacctacattgaacggatacaagaatcaatcatcatcaacgatcagaatgaattgggcatatgtcaacaagaaacctggtgtcactcaataaaatcaacaaatatacaattttaaaatcatcagatgcttaatcccagaaagatccagaactagaatatgaaagatatg

SEQ ID NO: 24526 - DNA, 965 bp, Arabidopsis thaliana
atccccgattgggatgacttaaagtccttaaaagtttctttctttttgtcagccaattttcttacaaaatgttcagttttagttaattcaattagtccatgagagtgagatcaagttcattgatttgatttcttcaatttgtctcattgaatccagcattacctacgttagtactacccttagtgtcaattgcataatatgaatctttgttgatgtgcagagatgttcagggtctctggaatgatgtctaaccaaggatttggtgattttgatagacttcgacacagaagtcccagccctatggcttcttctaatcttatgtctaatgtctctaataccgggttaggaggctggaacggcctctctcaggaggtatcatcatcatcatcatctactgtttcttaactcaaccatcctcttatattcagtttcaccttcattcacaccgtcttagtttttatgctagattactacaatcatttagtttagcttctgtctttcgcaatgctgattgatattacctgtgcttctgctaagcatgatgagatgagctaaaacactcagtttcttgcagagacttagtggaacacctggaatgacaatggattggcaaggtgcacctggaagccccagttcatacaccgtcaaaaggatattgcgtctggagattcctgtagataactatcctaatgtgagtacttctagtcatcttgatgtgtttgctcatcatttgctccatatttgatgataatatttctcaactttccattcttatttcctctgttttatcagttcaattttgttggacgacttctcggccctagaggcaactcgttaaaacgcgttgaagctacaccggttgccgagtattcacagagggaaagggcaatcaaggacccgaaaaggtgagagcatgaatgaaccatttgagactgtgtcaacactttcacagactgctgatgtgt

SEQ ID NO: 24527 - DNA, 615 bp, Arabidopsis thaliana columbia
  unsure (1)..(615): unsure at all n locations
aaccgccatcctcaccgccgctgtggctatcccccgcccccaaaactctttagcgacacggantgcgatggtcggctcggcaccgaccatcaccggagtctggcttgacggatacgtaaccaatcgaatgaccgtcttggaggagagagatggaacggcgccatgggtgtggtatagccttgtttaagatgtgttgtttagcttcttctaaggagttaacggagtcccaacggaggtaacgtgtgacgtcatcgtcaccggcccatttaaagacgtcttctgcatcggagagattgaacggccggaggaagattcttggtgattccatgatcatgtaaaattttgttagttttataaatctcttactataatctaataatatacacaaaaaatgcaacaaatgtaaatatttggaagtgatgattctattaggattgaaaggcccattaatgatttgggcctattcttatcggttaatgatgggtctcagatttagaacttaaatccaaattataacagagagtaacgcttttgaattttgattccctcttataggctttttcaaatgtagaaagggatggagtgtactcctatatacaggaatgagaagtgaga

SEQ ID NO: 24528 - DNA, 508 bp, Arabidopsis thaliana
caaacatcagaaacccacaatccataagacgttttccaagttgttaggttacttacttgtttggaattaaataaactttatccctttggttttgttggtttagttaaggttggtaatcacttgatattcatatactcaagacttggagcgtcgacttcaacaacaagatcctcaaactcgagatgctaagactgaaactagtgtgaagctttccaatggttgtgaacgaaatcacaaaactttgatataattgtcggataagtgatcacggttaaatcctcaagaataggacaacttaattagagagtctccaaaatggaatcgtcatcaaacttgaccttctctaaatacatagcattgacacaaggtatagaaacggattttgaatttggattatcaaatacaacacattagagagtcaaattcaccaaattcgaacatgtatagagcgagaaaggcatcataactaaggttccaaagactctaaaaaacgttagagagttaagat

SEQ ID NO: 24529 - DNA, 600 bp, Arabidopsis thaliana columbia
ccgaggttctgccgttaacataattgattgctgtcccttgatcagtggaaaaactaagcttcagatgcccatgaccaatgttaattattgactgttcgccttttaggatattggagacgtatgatttgctagaatatccatctaaatttggaaaccaaaagggccagtgatcaaggttaaaagcttgttccactagaccaaatatatatctgtattgtacctgttttcttagcagtggagatagtgtaagtagtgaagccaagaggaggcacagttactgaaaacacaagccaatactttggcacctgtgtagggctttgacctaagtatgcctctacatgatatttccttaaggccacatattcatcagtaaatggaacaagttgagactcaacttcgtgtccctcagagtcatgtaccgaaacgtctccgcccacaacctatcaacgatccgtcgtatacttgttactacataatagcggctttaacaaacattaacaaacaagaacttgattgactcacaggaagccggacaatgtcactcgcttccacctagtgggttataagcaatacgatctcagagaggaaaagaagtgtagt

SEQ ID NO: 24530 - DNA, 566 bp, Arabidopsis thaliana
gctgctgtcaagattttcacaataagtaaatcgctatgtaggtgacaagactagtaaaatctggaaacggtaaaacgactttagcaattggtgatggtgcaaatgatgttggaatgcttcaggaagcagatataggtgttggtattagcggtgtggaaggaatgcaggttcagtttagatttatttaactaaccatttgtggattttcattgtgtgtttgtttttcttggtatgggcttaatcctgatcattgttcacaggctgtaatgtccagcgacattgcgattgctcagtttagatatttggaacgtttgttgctagtccatggacactggtgttacagacggatctcgacaatggtaaatttatttctacatcttcagactaagaccaaccttctgtggcatgagtcttgacataatcagttttctctatctgacagatttgctacttcttctacaagaacattacatttggttcacactcttcttatatgaaacatacacaacattctcatcgacacctgcctacaacgactggtttctactctttataatgtctttttc

SEQ ID NO: 24531 - DNA, 506 bp, Arabidopsis thaliana columbia
tccaagctctcgcatcactttcatcgatttttcctctctgcgtcgatccttcagacatcggcgtcggagtttccgacaggtaaatgtaaaacacagtccactgttattccctgcttcttagctttccattatgattttttgttgtgatttttactgttttctacggaaatgcttttgatgggttttgtttagtttccggtgaaatttacagagaaacccacaatgctgaaaatctgaattaggctcaagttaggagattactacacaattagtgctgtgagaatgaatatacggacatgctttgttaaaaagattgaaacttttgcttcattttgatcaaaagattttaactttcgattcttttagtaaatgggtcgctctttgtttggactataatgatcagactgctcttgtcttgtgtgattaggaatctaaaaatgtcacgtggaagaggagttcctatgatggacctgaaacgaagttatgatgttgaagacagggtggtg

SEQ ID NO: 24532 - DNA, 555 bp, Arabidopsis thaliana columbia
gctgctttgtttgcaacccctggtttatacacaatatccatatcacaccccaacaatcttgtcaaccatctttgatactccatattcacctctttctgttccagcaagaacttcaaactacgttggtcagtatggaccttaaactttctaccaatcaaataatgcttccattttaacacatccataacaatagccatcaactcacgctcataagcagacttcaattgttctcttggagtcaagtcatgactaaagtatgttatacgtctcttttcttgcattaataccgctccaacaccggtaccaaaaacatcagtctccaaaaagaacactttatcaaaatcagggaatcccaaaactggagctaaaatcatagcctgcttcacctgttcaaatgcatcctgagtcattgtaagccataagaacttatccctcttcaataattcagtcaaagtcttagcaatgctcccataaccacgcacaaactttatgtaataaccagtaagaccaagaaatcctctcaactgcttcagattactcggaacttgccaattg

SEQ ID NO: 24533 - DNA, 369 bp, Arabidopsis thaliana columbia
ttttcgggtaaaagtattctcgatgaattgaatgctcagggaggatctggagggattggtgtgtatgtgccgatcttgaaggcttattgcaaagaaggcagaacatctgaagctactcagcttgttacagagatcagcagctctgggcttcaattagacgttgagacctataacactatgatcgaagcttccatgacgaaacatgatttcctatctgctcttacattgtttagggatatgagagaaacaagagtggcggatctgaaaagatgctacttaacaataatgactggtctccttgagaatcagagacctgagttaatggcagagtttgtggaggaagttatggaagatccacgcgtagaagtg

SEQ ID NO: 24534 - DNA, 1071 bp, Arabidopsis thaliana columbia
ggaaccgacggattcaaaatctcttcgctgtaagagtaaagtaaccaacaaaaatggaaaaatcaacgttcgttttcatggcaggaacaccaaaaaaatcgaagcagagtaaaacccaaaaaaagggcgaacactatctcatctcctctcaccagatttgaatgatatcgagcttatctagtttcttccggttgatcttcgcgtgcaatgtagcggccatccttaagaagaagaaaaatcaaaaacagagtttagagattttactctatgcattcactaataatcccttttccagatcaatcaatggaaatcgcagtgacgatttgaagcagtgacaagtgcttgatcgcgacaaggaagttcccagccgatttcaaaaacagatacagaaacagaggttgcaaaatcatcgtgataatcggaaaacgtttcactgatagaatttgactcaccatatctgacccaacggagcttttcgagctagaagctggtgagaataaaacatgattcagctcaagcaaaaaaaatccaaactcaggaagagaaaaaaagagaagcgagtctttgcgtggagaagaagctgaatctgagtaaatagtttttttaatgcgtttctttatgtgtaaatttgtctgtatatagatttatgaagccgccatgagagcttaagaagggaaaactcgcagtgatcgtagcgggagaggagagagtaagcatgtcaggagaaaggctaaaattaagtgacagtgacgaaagtgtcactagtagccctctcttattttgacacgtgcacagattataagtaaccacacgtgacgctaaaataaatttcgaattccgttaccgtcgctggtccccacactgttactatcaaactctccagtctcaacatttcctttctactatctgccaatttaggatgtcaaacgacacgtagttgattctccgaaatataaaaacgctttggtgtttaattacgtcccttctctctctccagtctccattgaagttcgcatcggcgagctcggataatcaaaaacacagaagctatcatgccagaaaatcaaaacg

SEQ ID NO: 24535 - DNA, 605 bp, Arabidopsis thaliana columbia
cacctcacccagcatctgtacaaacacacccaaaggtgtcacattattataatccaagcaaaaccagtctctctatttggtttttaagagattctctcaccgtcctctgttgctctggagtagcattagacagatttgaagccaaagctccaatagtcaatggcatgttgttgcccatatcatatggaggcacatcaccactaccaccacgcccttggggataccggaacatccgaccccttggatgcatctaaccaccatccaaacagaaaaaccatacgatcaactattaaaagagagccaagcaagcaaagcagcctttattgcaattaaataaggaaaagagaagaacctgttgctgcatcatgggattttgctgctgggagtgttggattccccaggacgtcttcctcctccaggacgctgctgctgtggctgaaccataggcatgaagaaactgggtacaggaccccaccaggtctcattccaggaacaagctgctgttggtatccataccaggctgtggcattcataagtacaggttaatattatccagcagtttcaaatagatttggaaggctcaagtatgagtatagcactataga

SEQ ID NO: 24536 - DNA, 575 bp, Arabidopsis thaliana columbia
gtatgcaaaatgtggtaacctaaagaaagcgtttgatgtgtttaacgatatacccaagaaggatctcgtgtcttggaacactatgcttcatggtcttggcgttcatggccacggaaaggaagcaatcgagcttttttcgagaatgagaagggaagggattcggcctgataaagtcacgtttattgctgttttgtgttcctgtaatcacgcgggtctcattgatgaaggaatagattacttctactcaatggagaaagtatatgatcttgttccacaagttgaacactatggttgtcttgttgacctattaggtcgagtagggcggttaaaggaagcgataaaggttgtccaaacaatgccaatggagcccaatgttgttatttggggtgctcttcttggagcgtgcaggatgcataacgaggtggatattgctaaggaagttctggataatctggttaaattagacccttgtgatcctggaaactattcgcttctgtcaaatatttatgcagcagcagaggattgggaaggagttgctgacataagatcaaagatgaagagtatgggagtagaga

SEQ ID NO: 24537 - DNA, 506 bp, Arabidopsis thaliana columbia
tgttaatggtgataagatcaattttcctggtggaggaacacatttccacaacggagctgacaaatacattgtttccctggctcaggttcgtaccattatcatcatttggttcctctatccttttttgagtatcaagggtagagctcgaatctttagaacaactgtgcatctttcgctttatttttgttaccaatgttgctttagccagtgaacgtcaatggtataagggtatagcagtatgcaacattattgattgacactatttgactagaagatgtatagcgttgtccatttataccaaaaattatgtgggatattctgttgctcctataccgagcatagttgttttggctctgttttttattttcaagttcttctttcagatgacaaaaaaaactgcttattgctttagatgctgaaattccctggtgacaaactcaacaatgggggaagcattcggaatgttcttgacgttggttgtggggtagctagcttcggagcctatc

SEQ ID NO: 24538 - DNA, 513 bp, Arabidopsis thaliana columbia
cagctgtcgaaatcgcaaaatcttacctttctcgtatccgtctcactgaacctcagctcaaatgcttccttcacgtatcggagaatgttctcaaagatgctcaagagattgatcaacgaatcgctaaaggtgaggaattgggtcctctcgccggagttttgatcggcgttaaggataatatatgtactcaaggtatgccttctactgctgcttcgagaatcttagagcattatcgtccaccgttcgatgcgacggcggttaagaagattaaagagttgggtgggattgttgttggtaagactaatatggatgagtttggaatgggaagtaccactgaagcttctgcttttcaggtttgtcttatgaatcttgtgatgattgttaataaatttggagcatgtttagatagatgaatatggttttgttagggagacttgtgatgatggtttaggattgaatgattcagcaatgttaataaagttggagcctttatttatggtcttattggggagc

SEQ ID NO: 24539 - DNA, 813 bp, Arabidopsis thaliana
tgtaccattaattagtcgtcacactaatccaaattgcttaaccggtaccaaattatttaaccgaagtccggtattcggcgatgcggtctagtgtgttcggatgagtcataacgaatggataatgagtgatggtggataaggatttacggcaaagaaaaacagaggcaaattcgttaccagtttaaaaatggcggctttgatccagaccatccatggtggtaaacccaacttgtaaactctcttgtgttcttattgattctttcgatttcgctatctagtggtttaaaagttttccccttttttctgattactgttgtatagacaagaaactagaattgttgaaaacgaattccggtttaggttcttattgggtaaggtagaatccctaattgcacagtttctctcttaagttcacatctcgtgttaaagtacaattttttattcagtttctcagtgtagcattagtttctctaattgattggaattgaattgggcattttggcattaaacgtatgtaatttagcaattggttctcagtttctgattcaattcatcgatatgggttgatttcttggtctgtacttggttattcatattgagcactatacaatgcaggtgtggttgttaccagaaccttgactcttgtttatccttctacctttacgtccagacacaaagctctgaaccagatgacaagtagcagtaacagcggcttgcgacggttcctgttcacatcgctcagcggctaagccaaggtatctgttactggggagcagagctaagcaacaatgtgtcatggacttacaaaacgaa

SEQ ID NO: 24540 - DNA, 482 bp, Arabidopsis thaliana columbia
cttcgtcggagcaacggaggcttctagaagctccggtggaggagctgaatgttgatgcggtggtggctcctgacggaagtgggacacacaaaaccataggagaagccttgttgtctacgtcattagcgagtagtgggggcaggaccaaaatatacctaaaagccgggacatatcatgagaacatcaacattccgacgaagcagaagaacgttatgttagttggtgacgggaagggtaaaacagtcattgtaggtagcagaagtaacagaggcggctggactacttacaaaactgcaaccgtcggtaagattctataaatcaattttcggtttggttcggttccgttattttccggttaattatattttagagttttggtttgatccggttattgatttactgaatttgaaaagccgctatgggggaagggttcatagcgcgggacatgacattcgtgaacaacgccggacccagatcggagc

SEQ ID NO: 24541 - DNA, 566 bp, Arabidopsis thaliana columbia
tgtggtactaattctcttggacgttctgagtctctaagcaaaaaaacttatttcttctcttttgcagacacttatcgcaaatggactaagagaaagagtcattttaagagtcgatggaggcttaaagagtggtgttgatgttctaatggctgcagctatgggtgctgatgaatacggattcggttccttggcaatgattgctactggttgtgttatggctcgtatttgccacactaataattgcccagtgggtgtagcaagtcaggtaagctcaaaaagactttgaatttttttataacttggcatcttattcatcttctcttgagtttcacactaatgcttgtataacactctatgaatggtctcagagagaagaattacgtgcaagattccctggtgtacctggtgatcttgtcaactacttcttatacgtagcagaagaggtcagccactttttttaatacctcaatcattaagactttttttggcctaatctcatctgaagtataatcttttcttggcaggtgagaggtacttagcacagttgggatcaacagtttagatga

SEQ ID NO: 24542 - DNA, 710 bp, Arabidopsis thaliana
ctttagacaatcttgtgcattgccctcatctgtgagattgatgtagggtacaaatgagttctaacggcagtaactttagacaattctgtgcatttccctcatatgtgagattgatttagggtttttgtcttttgtttcttcactagctggagacagcagatccggatttctacaaaattggctatgttcgaagtgtgagagcttatggagttgagtttaaagaaggtccagatggttttggtgtctatgcttctaaggatatcgaacctcgccgtcgagctagagtcagtcttcttagttaaaaagttgacaactttttgttttgttcttctctttagattattttgttttcttttctctctgcaggtgattatggagattcctcttgaactgatgataaccattagacagaagcacccttggatgtttttccctgatattgtaccaattggtcatcctattttcgatatcattaactcgactgatcctgaggtagtaacacatttgtgctatttcgatatcatcaactcgaaagttcttatctttctcaaagtcctttcacatttgtgcttacagattgattgggatatcagattagcgtgtcttctgttattctcttttgatcgagatgatcacttctggcggctctatggcgatttcctgccggctgctgatgagtgcagcagcttgcttttagctacagaggtgga

SEQ ID NO: 24543 - DNA, 847 bp, Arabidopsis thaliana
ctttatgactttaacgaatataaataagtaatagtttgtggaatttaatttgaatgagacattaattattgcaaggagcgggagagagcagaaaatttggaagttcgtgaagtggtagaggttcaagatgatcaaagtgtggtgtctcttatgtccaacgattctgaccttcagaaaaagatgatgaagaaagaggagaagaagaatggtggctggacaaacgcaatcattttgctaggtatgatatataattaatactaaaattaaagattttgtatataagttcaaataatcttacataattcatcattatctgaacagtaaatcaagggttagctacattggccttctttggtgtgggagtaaacttggtgttgttcctaacacgtgttatgggacaaggtaatgcagaagctgcgaacaatgtaagcaagtggacaggaacagtttacatgttctctctcgttggggcatttcttagtgactcctattggggtcgttacttgacttgcacgatattccaagtcatcttcgttatcggtgttggcctcctctcttttgtctcttggtttttcttgattaaacctcgaggatgtggcgatggggaccttgaatgcaaccctccctcttccctcggagttgctatcttttatctatctgtatatttggtagcttttggatacggaggccaccagccaacgctggctactttcggtgcagaccagcttgatgatgataaaaactccaaagctgcgtttttcagctacttctactttgctctcaacgtgggagctctctttttcaacaaaatccttgtttattttgaggataaagggttgtggactga

SEQ ID NO: 24544 - DNA, 302 bp, Arabidopsis thaliana columbia
tgtgcttggcggcgagatccttatagaaccgccatctctaccgtcgccaccacctttaccatcaaaatctcttgtaccgcaccgtccaacaagccaaaccctttttgatatcatacgtgaggaatacgccaaagaagggcacaaagatcggaccacgtggcagattttccgtgagaaactccgtcttaaacgaaccggttctgcttggacctcgtctcttcatatccctgcttcggatatccttatccctaatcccaaacacattggaacagcgttccggtctcaatccgccgggttaaaca

SEQ ID NO: 24545 - DNA, 518 bp, Arabidopsis thaliana
ttatttttggtaaagatttacttctaacattttaaaggatactaaaaaaaatctgacatttttgtcttgtattgtttcagtcggaggtgcaagaatgcctactgatgcttctcgtaatgtctctatctgtgtaatcttttgattaattgttcttatttgtcattatgatctatcgtttgtttattaataaaactatgtgctttgtatatgacttttggcagctaacatcattcgtggttataacccagaaggtatatgattttttatgtttctttcttcttctattattttctggttaatagatcagacttatcagttgagcttcttttagaaactagtcttcgttgttttagtatagtaaacgtatctgacatttttcatgggtttgtgttgttgatccaattgttgcagtcgcaggtggccatcctcttggtatgtataacatcaacctttgactatacctttttaccatttctttttttctttgacttgttttaaaaataaaaatcctctttttt

SEQ ID NO: 24546 - DNA, 529 bp, Arabidopsis thaliana
taacggccgccagtgtgctctaaagctgatactgcgcttaatacgtcgcccgccagatgctgacatcccgctccagtttttaaaggagtcagaaaccagagaccaggtgggaatagtggtaatggtattgtcccagttacgcactttgacggtggttaacccaatatcgatcaccgcgccatccgcgccgtatttcggcatctccagccagtcgcccagtttcagcatatcgttcgcggaaagctgaatacctgccaccagaccaagaatcggatctttaaataccaacatcagcacggcagccattgcaccaagaccgctgatcagaatcgctggcgactgaccaatcagcagcgagatcatcaaaatgccgaccagaatcgcgccgatcagtttaatcccctgaaatatccctttcagcggtaactgagatgctgccgggaatttctgcgccagattcaaaataacatccagcaacgagaagactgaaagcagcgcatacatcatgatccacaactgcgcgcaggta

SEQ ID NO: 24547 - DNA, 590 bp, Arabidopsis thaliana
agccattcagaatatgtcgatttaagacaataagcctctgattctttctgatcaaccgcgcttttgttcaattaacagaaacaactgtcgttagttgggtaggtttttgaatctagagaatcaaaggatgtctaattggatattagatatgccacgaatttggagaatttcttctcgggttagaggtgttgctctctcaaaggatcgattccaatttttcttcaaatctgaggaagatttagaagaaattatgaaaattggagtttggacagaagataaattggggtgtagtcatggatagatggattgagaatcctccaattgattatctgaattttcttccaatctggggtcgagtgaggaatatttcggtgaactattatactcaggacacaattaaagagatcacgagctgtattggggaagtgaaggaggtggtgatggactctgaaaaatcacagtttcaggactatgttcgtgttcgggttttgtttcatgtcgccaatccacttcgtaacaataaagaggtcaactgccatctggtgaagttgcacaatttcttttgactatgaccagattagaaagagatg

SEQ ID NO: 24548 - DNA, 549 bp, Arabidopsis thaliana columbia
caaatcagagcaaatcaaggctcatatactatagcaacactcatgtattgaatctctgatcatgagattgagagtggaaaacaaaaaaaaaaacctgacacatgtgttcgatagttccaagtttcctcttctccctcttcagatcccgctccgtctgttggcgcgtatttacctaattcaacgattaacaaacagacacaatcgcgtttaaacgagacgattgaagattatccagaagaattaggtgacgaaagaatcgtgtacagtttgaagaggataagtgagaagctgagcaatgatcccaccaccagctccagccaatccattgatcaaagcgtccgacatgatttctatattccaacaccaacaaaattatgagcaaaaacaagagaaatcgaaaatcgctgattctaatgccaaggaggaagagatgcagaattacctacggttcggataaggattgaagaatcgtcgtgaaatcttccgacaaacggagagaatcgcagaagcttaagaggatgttgttaatgatggcgtctgtaggaaagg

SEQ ID NO: 24549 - DNA, 538 bp, Arabidopsis thaliana columbia
gagtgttggtgggaaagtccatgggagaattatcaagggcggtgtagacgacgacgctgtgatagagacgtctctgttgtgtatgtatggtcaaactgggaatttaagtgatgcagagaaggtgttcgatggaatgcctgtgagagaccttgtggcttggagtactcttgtttctagctgtctcgagaatggtgaggtggtgaaagcattgaggatgtttaagtgtatggtggatgatggtgttgagcccgatgctgtgacgatgatcagcgttgtagaaggatgtgctgagcttggatgtttgaggatcgctagatcagttcatggccagataacgaggaaaatgtttgatttagatgaaacattatgcaattctctgcttacaatgtacagtaagtgtggggatttgcttagctcggagagaatctttgagaagatcgccaagaagaatgctgtttcgtggacagccatgatttctagttacaaccgtggcgagttctctgaaaaggcattgagaagtttcagtgagatgataaag

SEQ ID NO: 24550 - DNA, 572 bp, Arabidopsis thaliana
tgtagaataagagcagcatgatgatgtatacgaattacgaaaatatgaattgtagcaaaaattgagtccacgctcatctctgtcaaaacaaaatctcaaagcgtgcagctcgaggaatcggataggttaggctgtgggtttcttggttctgatgacgtccttaagatcagcaaacttcttcttgcattgattcatcgttttccctggaacagctgttgctactctctcccatctttggtttgtctcctttgggaacgtcttcaaagcctgtaccagagctctttcttgcacagcagaccaaccgtctgggtctgaaccagatgctgctgctggttcagagttgccgttactgttgttgttctatttggtcttaccgttctgttctgcggtctctgttttggttgagttgttgtcttcatgagctttggtcggtataattggttctccgagttcctctagtgtagagagaggagagttgattgaagcggcaggtttcctattctccagaaaagagtcaaaagctttagctgagtcgggtttctggagaagtactgttttagtagccttgagaa

SEQ ID NO: 24551 - DNA, 486 bp, Arabidopsis thaliana columbia
ttctcttcgactttactatcatccagcgcctgagttttgcatttgttgtaaaacagaagtcttcatgattttctatcattgtcttacctgcaatttgagtatgcatccagtctgtgcaatgaggaaagtacccttttttattgaccatccaaaaagccatccccagcctctcacttttttccctacacaagcttcgttagtttgccatttttgcgctttgattaagaagcttgatcccacatacatttgtaccaaatgtgtcttcgtaatccataaaggctgtatcggtttcccacatgtcataagaatatcccgtcacacccaccgctatctcttttacttcttctcttccaatttggaagcctttcttgtggagatatgcatcagcaagtggacaacgattatggtgcatattcttgcaagaaatgtgatgcttagtttgttcatcaaaatgtgcattacagagacatgtgtgggatggaaaag

SEQ ID NO: 24552 - DNA, 524 bp, Arabidopsis thaliana
cggagagtcattgtcagacttcgagatgtacatgacagatatgaatacggagctggatcaatacttggaagaaaatttgattccgaggtcagaagactttaacgttctgagctggtggagggtcaacaacaccaactacccaactctctcaaagatggctgtggatcttctctcggtccccttcagcaccgtctctcctgattccgtattcgacacagaggtgaagcagatggacaattacaggacatctcttcctggtgaaaccttggaggctctcttgtgcaccaaggactggttaaaaaatggaactttatgaaaaattgaaaaggttccaattctttctggtttttttttagcttagtgtaatcatcattaaacagtattgaaattagttaataaaaaactttcacattactaagaaggcttgtttgtgtctcctaatctctcaaatctcaattttgcccacgcacgcttggtactctctacaaagggaatacttgagggaggaattaaagtgtaaaatg

SEQ ID NO: 24553 - DNA, 556 bp, Arabidopsis thaliana
cctattcaataacacttacacaggttgtcatatttgattgaaaatggaagggataacaacaaatagtcaaagagtgaaagcgagcattcatagctttcaagtttcaagtaacactaacgacagccaagcatggacccaagttgagctaaagcgtatgaaaaaatggaacctttatagctctccaatgatccaagcaatcacgatgtacatactttgatgttcctttgcatttgcatggggcaatgaaatccctacctgaccatgatcaataaatgagcttgaatcaaccaagtaagttagaacaaaagctctctcactatatcacggttttaaatcactagtcttttataaaaaaagagtttatcactaacactaatctaaatcacatcagaaccattaacgatctagccaattcgaatttcataatccgaattcttgaactgaagttagacatatctatgagcacatgaaaatgttcaacaatcactagcaagaagcaaagagtctatttaaggaagaagcgaatctaaatggttttagaagacattaccatcag

SEQ ID NO: 24554 - DNA, 548 bp, Arabidopsis thaliana
tacacgcgtttaatcatctagtgtaacttagaacctaaaccttcacaggttaaaatgttcccaccacttttggtggagtaattatatatcctagattatctacctgctttaagtactgaaaagggcaatcttatgtgttatgtaaacaaaatcctaaacttaaataactctaaatcgaaatctaaatttcatccggtccggtcagaccagaaagcatgagcagctaaaaccctatcaagaaggtcttgaggcacaggttcgcctctcctttgccttgctgatatctttgccgtgtgaaccaacgttttccatttatcctgtttttggttatacacatataattttattttaaaattctcagtaaaaattctgatttcatacatggcatttactactaaaaggtaccttgaggtcaacgtaggtacgatgatttacatggttaaatgcatgagacttcacgtcgcgccacctaaatagaaacaatgtatatataagacacaactcagtattttaacaaaccagattattcaaaaagaagtaaatgagag

SEQ ID NO: 24555 - DNA, 542 bp, Arabidopsis thaliana
cgtgaagcctggttcatcttggataagcttctccttcaatggagagaagatatatgttcgggccaacgatcatcatatgactcgacctatttgctctcattgcaagaagcgttgtccacacaaaatagttttggagtcgtctggttcaaaattttgttccacatcttgtgttggttattttttgtctacaaaggtgaacacagctggtcatcgcgaatatctacaacggagaggctacggaaattatgagttctcagcactgacgtagagattagtgttctctgatgtgtctctgtttttgtgttactatcggtttagttgcgtcgggttctgtcggatcaatctttttataaaagctcgattgataaaacatgcaaggagaaaaaactatttagcaatcaacatgttacagtgttatctttccctagaactacagttagttgactaaacaatgtggtttactatcggttcaattaaaagaatacattggactttatcggtacatttcgttgtagatacatttgtaattaggacgacactca

SEQ ID NO: 24556 - DNA, 528 bp, Arabidopsis thaliana
aaccagaacattctcaggcttcaagtctctgtaaacaacaccgagcatgtggagatactctagtgctagcaacacctctgcagcgtaaaatctgtcaaaaacacatccaaagaaagtgagataacgacgaataaatatagctttgaaaacattgtaagcgagagagaaaacataccgagcagcgtactccgagaaatgcttcccgggttgacgttgccttagagtgtgcagatcacctccaggacagtattccatgaccaaacacgagaatctgtcagtctcaaaatgagtgtacaatgtcggtagaaacggatgatccaatagttgtagaatatccctctcggtctgagctcgattcaacttcttccggtcctcaagagacgctttatccatgactttcacagcaaaatggcatcgagttccgcttaattcagccagatagacactcccaatatcaccacaacctaatcgtttcagcaacttgaagtggctcatcccaaaatccatctcgggttcggatagcaagat

SEQ ID NO: 24557 - DNA, 566 bp, Arabidopsis thaliana columbia
tacaggtgcttcagggactatatagatatatatggccaggccttttgctctgagtcttaaaaaattgtctcaccttcgatttgcaggacaagttcggtgtgaggtcaatcagggacaataacgatgaactaatgggtgctgtgtatctacaagttagtatcatcagtcaagctctaatctttgtcaccaggtcaaggagttggtcatttgtcgaacgtcctggggcgcttctgatgattgcattcgtcattgcacaactggtaaggacatcaagcacacatattttctgaacttcgattaggttaaagaaacccactgaattcattcactccttccaaatgcaggttgcaactttgatcgcagtgtatgccgactggacatttgcaaaggtgaagggtatcggttggggatgggcaggtgtgatttggatttacagtatcgtaacatacttcccacaggacattttgaagtgtgccattcggtatatcttgagtggaaaggcttgggccagcttgtttgacaacagggtacatacaagtctatctacactatagagactcttttac

SEQ ID NO: 24558 - DNA, 583 bp, Arabidopsis thaliana columbia
cgttttggtggtgggaactgataaccgaaaatgaagagagtttaaaactttaatctccatacttagtacctgaaaaaatagtgtattgtattttttgttaatcttttattaagaatgaatcatcttagctgagaactgatagagatggagtctgcatgttaattacttctagtcttgtgtatgtattgtctgtaatgaagcaaaactcctccaaccgcggtgcactaatctcttcgtatttgcttcaacaaggaggaataccttagttacttgagaagtactaatctgtaattattaatttaagtatatattccagagtaaaacttgctctaagtatgcaatgagagcaaacatgtgttcctctgtgtccactgattgttcagttttactttcattgcattgtgaatgaggaaacagtaaaagtggtaactcacgaggctattaacatgcaagtgataccaagtagctggagcttctgcttttcaatgtaattatgagacatgaaccgatcaattagattcacggtaaggtaaagtgtatctgaaaccgacttgtactcttcagagacctgaaagaaaagaga

SEQ ID NO: 24559 - DNA, 625 bp, Arabidopsis thaliana
gttatggttatctcatcttggcgcatcttcagcgtaaattccgagacagaggtagtagagtatcttcttcttaaaggagatcgagatcgctctcgccattcattcaccctccgtggagtcgctcttattttgagcggaggaagttgatcaccgaggaaaccagagatggcgtcttcgagattccagtcgaatccttcaaggtagtagaatgctgcatctttacacgcagacgttgccttgcagaacctagtgacgttagtatcttcttccttcatggtggtgttagggacttttctcaaagattaagtacgttgtttacttatgacaatcactaagaattgtttcacttagatctaatataaaagcttctaacaaacagagagatatttagggaagtagttgcgaccttgtcatgacagtatcaacaaacaactgatgatacggtctccttttgtttacaccgaaataattctttattactactgttcgttttctcatgagtgaagaaatttcaagcccaagttaaatagaaaatcaaacaattaagaatgctatctctgaaaatttgagtcggtttgttttggatcattgtgagagacaatagagtccacaaaagagaaagatt

SEQ ID NO: 24560 - DNA, 291 bp, Arabidopsis thaliana
catcaagaaatgtgataacaaggagcgaagaagtagcaaatacattcagtactcaaactccttagatacaatttgggatgctgtgggagacgaatacaacttcttcaactaggagtaggactaccgtgcccacatcgaccacaaacgtgccttcgtctaactcatctagggttttgcagacgtcaatatcgacacgaggtatcttcccaatgtccgcgtcgacctaggatgagtgtgcattcgtcaatgttggcaccaggaagcgtatcatcgtcaatgtcaaccgtagag

SEQ ID NO: 24561 - DNA, 645 bp, Arabidopsis thaliana
catctccacatcctcttcttggaacggatctctaaaatatttctgatctcggcttgtgtgtaaggctgtgttgtgtaataagaagacggtcaagaaaatcgattggatcccatgtgctgatatctggtttgttcctcggattgttgtcattcctctgtttgtagccacgaccaggattggtgacatatcgttttcgagagctctattcaggaaagagaagcattcgatatcaagcatatggacttcatcaatgaagagaacaccaggtactatttcagctttcccttcttctctccactctgccactttagtatcgctttgctctcgggtttctgaacgaatctcgcctgtatcacctgtgaagagggctagatacccttgagtcctgcaaacaacagaaagaaaacaagaatccaaataagaacttgaaaaagcatcaatacgtgaaaaagaagcaatctttttaacctaaacctaaaactaagcaattgacaaatacagaacaagatcaagaaacaaacctgctattaataacatcaatctcatgaagtgtgacagaatgcaaaacctccttcctcttctcaagctcaccttcagggcattgcacaaacttagtctttgacccataacatcaaaatctctaga

SEQ ID NO: 24562 - DNA, 462 bp, Arabidopsis thaliana columbia
gagtctgctcctccgctgtgtggtcgcttctgaggtcaagatttcccccgtgctatacacctcgggacgccaggcctcacctgttgccctgctgctcgccgcatctgagtcattcttccataagactggcttaacatgcttccatggctcttcagctatagagttggagtcccatccttctgcccctggttccatgggtcttcttcctaaatctctccaaaagcttgtcgttatagagcgtcctcgacttttgactcttcctgagttaggatacgtgtctcgagctagtttgcatttcgtcgctcataattggcaaactgtggaggagtattgttgtagatgtctagacgagcaaatctattatttcgtatgttcggtatttcttgagagaatggaaaacggggaggcacgtattgaggtggatctgaatggttaaatggtggaggctaaagttgttattta

SEQ ID NO: 24563 - DNA, 536 bp, Arabidopsis thaliana
caaacacttatttatgaatcacaatcacaaacacttatttatcatcttacaacaatttaataaaatacactcatgcatatttttttagttcgtgaggaacatactgtattaaggaaaaaaaaaccataattagaattttgtttgactaaatcaaatcatttgtttagtcctaaactaacgacatgttggataaatccatctaaatcattcactgagctcccacgttcttgaatcgcatccaacgctgctttcctcagctccacggctttgatcctctccgtttgatttccggtcacggaatcagcgaaaactcgagctaactcgtccgggtcaggcaccgtgtcaggtccttcgcaagcacgcacacctactttcaactcatcaaccaccagagacgcgtcagtgtactggtcagctctcatcggccacgtcagcatcaaaacgccggcgacaaccgcctccaccacagagttccaaccacagtgcgttaaaaacgcgccaacgcgtcggtgacgtagcacagctacttgtggagc

SEQ ID NO: 24564 - DNA, 514 bp, Arabidopsis thaliana columbia
atctcttcgcagataatgtgtggtgaactattagctctcatgactctgtagtaataaatatagatgatgtaagacatgaaatacgtgtaggagccatcacagtagctaatgcttccattatataacggaatcttagatcagatatctcaacggtattgttgacgcacactaacatttagttctcatagattaaaacatatcaagacatacaataataccaaatactgtagaataaattaaatttaaggtgttaaaagttttcataatagtcaaaggaaacatattactcgagacaacaagtttattcaagtctcttgcaagggttttacttcttagttgatgcggcgtctgacagcatcaagacttatatcggtcagctcagttgcgtgacactccacttgccttccatctagttctctcttgccactatccttagtgctcgagtaacacatcttccttctcatcttggcagtggatggagaccttatagcacaaaaccacacacattgatgat

SEQ ID NO: 24565 - DNA, 608 bp, Arabidopsis thaliana columbia
atgttaaaaattctaggacggtcaatcactaactggaagtggatgtcgtcttcaccccaaacgtgtgcagtactacaagcatggcttttgagattcgagtatgaactcacgtagttgcagttcgatacagggcaagaacatcggacaaacttgcaaaccttctcatggcttgactgattacaatacgtggtggtttctttacacccgtgtttcgcatttggacacgggactatagatgcttcgataaccttctccatcgctctgcatcgtatatccccgatgttacatctacagaacgagcatttcttgttcaatttttggcagcatgacgaacaagctagatgcccattactacactgtgcacacaataaaaacaccatagacttagccataaatcatcaaccaccaaaacagtcttactacacaacaaccaccagagagttagccaaaacctttaacaccaattagctaaatatattataagctgtgacctaaatgttcttattctgcaattccattaacctaataagctatgaatctacaaattgattatacaaatatgaagattatgaacaaagaagaaacctgatagattggtccttgagtgg

SEQ ID NO: 24566 - DNA, 900 bp, Arabidopsis thaliana
gtgttggtagagttaataggaggaagaaagaactatgatccatcagaaacttcggagaaatgccattttccttcttttgctttcaagaagatggaagaagggaagcttatggatattgtcgatgggaagatgaagaatgttgatgtgactgacgaaagggttcaaagggctatgaaaaccgcactttggtgtatacaagaagatatgcaaacgagaccctcgatgagcaaagttgttcaaatgcttgaaggtgtttttccggtggtccagccacctagttcttccactatgggatcgagactttactcaagcttctttaagtccatcagcgaggacggcggtgctactacgtcatctggaccgtccgattgtaacagtgagaattatctctccgccgtgagactctccggtccgagatagcaatctttttagccaatttttagtatcttatataataggtttttggctcaccatgttttgttgtatattgtttttgtgttacatcttaaaagaatagccatcactcagttttgtaacgttccgagatcaattatttcatagattacccgtcgtttttcttaactgtcacagaactccatgtcgttttacattcggaatgcgtgccgtggtcttccttctctctatcctacgttcctattggctataatgttttgcttactgtacgcttgtgggtagacaatgaaactcccggttcataaatttgagctagggtctcggagactctcgtcccaccgttaaagatgacgacgacgactgcttctctggttaagacttttatgtttcggtgcgactcgttttcatctttcaaattcaaatgcaaattcgaatctccgcgaaaacgcgattgctctctccggcgaccgagaaacatgttgtcag

SEQ ID NO: 24567 - DNA, 514 bp, Arabidopsis thaliana columbia
tcacagcaagagaaagagagattttaccttgactgtgaagaatgtggcgagaatcacgacccaagaaagcgcgtagactatgatatttgtgttgctttgggtaatgtcaaggtgatataccaaaccatactgatacacaaagaacctgagggacaaaattatctccaaacagcgagctccaacaccagagccacgtagatgggcttgctcgtcgttccaccaagattgccagctcttgtcttgctgaatccctattccaccttgctctttgatccacctgttccagtctctccagtcaccgactattatttcccaggtaaagcctgaagggttgaagagaaacggggcgcataaccaagtaaaagacatgaaccacactgagaaagtgatgaatgagtaagccatgttgctttgagatgtatgcttgaacaactcgtagacgaccagaagaatcatgagctcaaaacctttgatgaaatggcttcgagaatataatctgtaattttcactgaag

SEQ ID NO: 24568 - DNA, 564 bp, Arabidopsis thaliana columbia
ccccaagaaaccggcgggtcgtaagaagtttcgtgagactcgtcacccaatatacagaggagttcgtcggagaaactccggtaagtgggtttgtgaggttagagaaccaaacaagaaaacaaggatttggctcggaacatttcaaaccgctgagatggcagctcgagctcacgacgttgccgctttagcccttcgtggccgatcagcctgtctcaatttcgctgactcggcttggagactccgaatcccggaatcaacttgcgctaaggacatccaaaaggcggcggctgaagctgcgttggcgtttcaggatgagatgtgtgatgcgacgacggatcatggcttcgacatggaggagacgttggtggaggctatttacacggcggaacagagcgaaaatgcgttttatatgcacgatgaggcgatgtttgagatgccgagtttgttggctaatatggcagaagggatgcttttgccgcttccgtccgtacagtggaatcataatcatgaagtcgacggcgatgatgacgacgtatcgttatggagttattaaaactcagatta

SEQ ID NO: 24569 - DNA, 365 bp, Arabidopsis thaliana columbia
tatatatccactgataaaagccccataggtgaaagcattaggctttaatccgttctcgaccatttcaaccagaaaagaccttgcttcgtccattcttttagcttttgaaaggccaattataagggaattgtagcaaaatatgtctggtgcgattccttgttctttcatttcttttaacaccctcattgcatctccaaacctactattctggagaaaggttttgatcaatgtggtatatataaccacattgggtctgcaaccacttgcaatcatttccttcacaatgttataagctccatcgagatccccagaagagcacatgcctttcaccactgtaccataagtatatggagatatgacaatgt

SEQ ID NO: 24570 - DNA, 570 bp, Arabidopsis thaliana columbia
caatttccttccccattgcatgcaatagatcatgcatctcaatcctatcgtaagaaatggttacaaggcacttctcctcaagttctctcatcacatctttagcatcaatgtcgtctgatttcagaatgcttgaaacaaaatctgctttctctgacctgaaaaaacatgctatgtccagaaatacgctcttctgatcatcatcaagtgctttataactcgatttcagctctttctgaagctccttgtctggatttacctgtaaaaactccaatttcttcttccagtagtttatatcatgggttaatagacccttacctaacaacttcaaagctaacggaagccctttagcataacaaacaaaatcgtttgatagatccacaaattcttccgtgggatagtggttgccaaatacctgaaggcagaataactccatagcttccctgtcatttaatctgggaacacatatgtagcatcagcgtttttctgcagcagtctcttgtctcttgttattataacaatcctacttccttgcctgtacacattcttctttccgataagatatcgtatttg

SEQ ID NO: 24571 - DNA, 579 bp, Arabidopsis thaliana columbia
ccaataaggagagatttgcgtttgcggaggggaagattgtacatggagtgtttcctgggaagaaacggtctacggggcagccgtatgaggatccgtttttgcttgaggggcaacagcgagttgcgatgaactggttgcttagagaagctggtgtatcggatggagatgcggtgataatgtcagatgcagacgagattccgagtcctcatactgtgaagtttctacagtggtgtgatgggataccagatgtaatgcatttggagatgagggaatacatgtactcctttgagtttccggttgattacagtagctggagagcctctgttcatatatatagtaggaagtggactcaataccggcactcacgacaaacggacttgatattatccgacgcagggtggcattgcagcttctgtttcagacgactcaacgagtttgttttcaagatgaaaggttatagtcatgcagatagagtcaaacgcaaggagtttttggattatcagaggatacaaaaacatatttgcaaaggttatgacatctttgacatgcttcctgaaaaatacagcttccaagagttga

SEQ ID NO: 24572 - DNA, 972 bp, Arabidopsis thaliana
aaaatatcaaaaggagatatttgattagtaattaattacatccacgtaattagggaaccataggagatttctgaaaaaaaattcctcttacttagccaaaaacataggagatttttctttttctcatctactaaagaaaacattaattattttccggcaatgtaaaatacaaattatgaaaagaagaaaaaaatctaaacgtccaccaccggtggagctaggttaagatccaggtttagttctcttctcggttcaacttttacggtttctcgaataccaatactcaactcgatattaaccggatcaaaccgaaccggacaaacccgagaaagctctgctcttaacgaagcagctcttgacggatcgaagaaaaaaccagcagaagcataaccaccgacgactttacgctcccggtgacatgcaaacggaaatctctgacgcgtcatctcacgcgccgtcgtcaccgtcgtacggttgacgtaagaatcgttctcgccaccgtcgttaaccgtagtagactctccgggaagagggaaattagtctttgctttggagccacgaaactctctagcggcggtgtcgtaagctcttgcagcttcctccgccgtgtcgaatgtcccgagccaaacccgggttttctttcccgggtcacggatctccgccgcgtatctaccccatggacgcttcctcacacctctaaagtgcacttccttccgcatcgtcgtcatcgtcatcgtcttccctccgccgccttcactcacggcaatgcttctaccgttcgcctgtcttggagccattgcttataaaagaagagatatattctcgtttagatagagaagtgacgttgtttttggtttaatttataaaggaaaaggtttttggtttagagaaagagaaagagacggtcaacgagggtttgactgaaaagcgccgcccaaaaaacagacaatgtgagaggttttaatgtttttg

SEQ ID NO: 24573 - DNA, 461 bp, Arabidopsis thaliana columbia
  unsure (1)..(461): unsure at all n locations
nnnnnnnnnnnnnnnnnnnnnnctaaagaacctcgcggctgcccgcgtggcgcaagttactcctggtatctttacagcgctaaccgcctgaaatacccgctcattcgtaaacgactgattgaactgtggcgcgaagcctcaagcaacacagcgatccggtactggcgtgggcatcgattatgaacgatccgcaaaagtgcctgagctacaaacaagtgcgtgggcgcggcgggtttatccgctccaactggcaggaactaaaccagctgattgccgccgctaacgtctggaccatcaaaacctacggcccggatcgcgttgccggtttctcgccgatcccggcgatgtcgatggtttcttacgccgccggaacgcgttatctgtcgctgcttggcggcacctgtttaagttctacgactggtattgcgacctgccgccngcntcgcngatgacctggggcg

SEQ ID NO: 24574 - DNA, 493 bp, Arabidopsis thaliana
ctctgtgtaaattcttgcatgtagctttgcttttgtaacagaggtagttcatggtgtaggtgatcgtagagagagctgaaagaagtgatgttcccaatatcgacaagaagaagtgagtaatgagtagtgatattctgttcctgctgttctttcttgttggcaacttatgagttctacacatcttttgtttacttgataatctaacaagaaagagtgtgccttgctttgaacattatcttgaagaactttatctatgtgtagtattacggaatgagattgatcttctattgaagactaaaagagtcttatatcagggaaatgtgttgatctgtgactctttggttgttggattcaggtaccttgttccagctgatctaactgttgggcaatttgtgtatgttgtccgtaaaagaatcaagctgagtgccgaaaaggctatcttcgtctttgtgaagacacattgcctcaactggtaacaccaacttcttagcat

SEQ ID NO: 24575 - DNA, 677 bp, Arabidopsis thaliana
gatgcaaatatgataagatacggcttgagaaccaccttgcgacagaagagggggcggaagaggttgaatggcgagtccaagaaagcagctcggcccaagttagcagctgccgatgagatggcgaaagtcttcgaaaaacctgagtccaaattgacgcagcaaactcgcaagtcaaaagaagatggtcccgtgattccggtagagtagagcaaagacaacaactagcatcagaaataactccccatgaaagcaggcgttgcctagtcgggaggcgattaagagtagtaagccacatgttgaaagcatgttttgggactgcacccttaaaccaaacagagcttgcccaccgtttaatctcctccctaggcctcagcgattcccaagtcttggaagaggaaagatccaaacactcagaatcgtcaacaacccaagcatagttatccttctcaagggttgagcttggaaggttaatagtgatcagatgagagtggaagattagagcattgtctgatcttggaggcgggataatccaacctatatcaccacaagcatcactaacctttgaagcagctgggatacacaaagaggaaggcccgcttttcctaagaacttgattcattgaacacaaggggtccagttgtcgtaccaaaaggaaatcatttgaccattttcaactc

SEQ ID NO: 24576 - DNA, 969 bp, Arabidopsis thaliana
  unsure (1)..(969): unsure at all n locations
caacaattaccctcttgttcttggttgtagcgtgaagaagaacatggttccggttcttgattatctcgggaaactaggcgtcaggaaatcgactttcactgagtttcttagaagatacccgcaggttcttcactctagcgttgttatagatcttgcaccggtggttaagtatcttcaaggactggatattaaaccgagtgatgtacctcgggtgcttgagaggtatccagaagttttggggtttaagctggaagggactatgagcacatcagtcgcttatttggttggtataggtgtagctaggagggagattgggggtattttaacacggtaccctgagattttgggaatgcgggtagctcggataattaagcctctcgtggagtatctcgaggttcttggtattccgagactggctgcagctaggttgatagagaagcggcctcacatactcgggtttgaattggatgatacggtgaaaccaaacgtgcaaatcctgcaagatttcaatgtcagagaaacatctcttccttctataattgcgcagtatcctgaaatcatcggaatcgaccttaaacctaagctcgacacacagaggaagctactttgttcagccattcatctaaatccagaggatcttggctctttgatcgagagaatgccgcagtttgttagtctcagcgagtctcctatgttaaagcacattgatttccttaccaagtgtggattttcgatagaccaaacaagggaaatggtaatcgggtgtcctcaggttctggctttgaacctcggaataatgaaactcagctttgagtacttccaaaagganatgaaaagacctcttcaagaccttgtggattccccgcattctttacgtatgggcttgagtcacggtaaaccgagacacaagaagataatcaagaagggaacaaatgttcatggcttggatggtaaactgtcagatgagaa

SEQ ID NO: 24577 - DNA, 585 bp, Arabidopsis thaliana
tgaggtagaagctaatatctgttgaacttttctattccacgatataaaggagatttcaccttgcgtagagtaaccactaccctgcaaaagaccctcgcataaagttactcatgggtttataccaaagcaataatgagagtaaaaggtaatacaaaaaccaaggttgttgactagtaagaagtggtggtataccttgagcagtggaaaatgagaaggctctgaaggctttaataagtcccaaatgcaaatttcaccatcatcagccccagaagcaagtagatttgagctgatagcattaaactcaagaccacgaacctaagaaaaaaagaagcacgcacacatgaaaatgaggagtgataaaaacaaaacagcgttaagcaacaaaataatgcagagagacacaactcacagggcctttgtgaactgaaagatggccaacgagtgcattttcgctgggctgggaactgaaaattgtgacagttgttcgagttagactcgttcagatgaaaattggatccacatacataactctattaatgcggattataaaaaacaacagagtgaaaatggcgattcaatagcagc

SEQ ID NO: 24578 - DNA, 504 bp, Arabidopsis thaliana columbia
tggttgcggctctatgtactacgaaagggttcttctttatcaattcaagagacttcaacactacgttcgtggatggatgtggaaaaagcttctcaaatattgtggtttagcttctgattttgtgaggtataaggtgcaaaatggaaagagcattttattttggtatgataattggtttccacttgatcaattaattgagatcaccggttagagaggttgtatagacatggggcttggcattcgagctacggtgcctgaagcgttacgtacgccatagacgagcgtcataggactactcacttaaatcgactggagatcgacaatgctagaagaattttgccataaagggctgctagaaattgaagatatagtgctttggaaagaaaaaaggagatcagtttaaagtagattttagcacaaagggaacttgagagacaacacgcatgtcaaagccaaagatggaatgatacaaaggttttatagttttcacacgccacgcctaaa

SEQ ID NO: 24579 - DNA, 313 bp, Arabidopsis thaliana
tgctgttgattgccactaacccgctcaccgttcgaatgaggtggtattgtaaggctaaatgcagtgggctgaaacccaacacgtttagcttcaaagcatgagacggcttaagagtcattagttccatggcgaaatgagtttgccctctttcagctgcaatgtgtagtagcgtcgcacataacgatacgtgatcaaaatggtctaaaatgtcaggatctgccgctatcaactcgtagagtctagcgatatctccaacttgagccacctgcttcaatctgtgccaagatatgttcatcgtgagtgctcggaccca

SEQ ID NO: 24580 - DNA, 549 bp, Arabidopsis thaliana columbia
tctaacaattagtttttttcgttaaattacggaacaaaagaatcaataaaaatgaatggtagtatacatagttacataccagaaccatcaagtagaaaacataatttcaccaaaaatagtcacggattaatgggtttgcatctttcatgtctatagtcattaatcttataaaatcggaaaatgatttcgcatattttgctattaggtacattatcagttggattaaatctagctacacttctcttggatccacaaagagcgaagaccgcgatttcgatctctcactcaaatcaaacttatttttctcacatttcaacggcttgatacaccacatatcatcgtcacacgaaagcattttccaatgcggaatacacctttgcaaagaatcatcgccgttacttcctttgtcgacctccaccaccacgactttacatgcgcaaccatcatttaacgcagccatgttatgaacgtgctcacacaaagccctaactagttcccacaatgtggaccttccgagtgaacccgtaaaggaaatagacccaaacggag

SEQ ID NO: 24581 - DNA, 499 bp, Arabidopsis thaliana
cctccaccatagctggatctgccgtggagaatgcttcctactatggtgtagcttccgggactgcaaagggaggttcacaaaacgctagaatcgctatgtacaaagtatgcaatccagggggatgcactggctcctctatcttagctgctttcgatgatgcaatcgcagatggagttgatgttctatctctgtctcttggagctccagcatacgctcgcatcgacttgaacactgatcctattgccattggagcgtttcacgcggtggagcaaggaatcttggtgatctgctctgcgggtaatgatggacctgatggcggtacagttactaatactgcaccttggataatgaccgttgctgccaacactattgatagagactttgagtctgatgttgtactaggcggcaataaagtcatcaaggtaaatgatattttcatacacataatacaccaaaataactttcaggcttgctaataagaccttcactgatggtcagg

SEQ ID NO: 24582 - DNA, 537 bp, Arabidopsis thaliana
ctcattgtttatttttggataggcatagtacttggtttatttgaagatggtaggtataagtctgaatcaaagaaaccatctttgaaagctgttgatattattggatttggaactggggctgaggtagaaaagaagctgaagtatgctgaagatgtttcttacggtgtaattttcgggagagagctcattaattctcctgccaatgtgcttactcctggtatgaattgttgtcatttatgaaatcaaatattttcgtgtttgtgtggtgttcgctgagttttcctaaactgctttgatttttgtatcgtttcagctgtactagctgaggaagcagcaaaggtggcttctacgtacagtgatgtcttcactgcaaacatcttgaacgaagagcaatgcaaagagttgaagatgggttcttacctagctgttgctgctgcgtcggctaatcctcctcacttcatccaccttgtctataaacctccgaatggctctgttaaaccaaacttgctcttgttggaaaaggattgacctttgaca

SEQ ID NO: 24583 - DNA, 511 bp, Arabidopsis thaliana columbia
tcttgagtgataatttcagttattgatctgtgcgttcatcaatggaggtttcttctttctccactgtacccagatactgtaactcacgctcctttgttccaggtttcacaattctctgtttttccttatcggattatgattaagagcttgctacagatattaattaatctccccttttcgcgattcatattgcagaattgtctcgtttcaggggattcaaagttcacttatgggaccaatctcttgttcctcttcatttcagcattcgaaaacgaaagaacacccctcgttatttggtgggttttcgaaatcaaacaattttaaattcatattgactctctcttctgtttgcttaatctcttctgtgttcaacttgaaattaatcgactcttgcagatttcttgcagtcagaagaaagatgtcactgttgttgatggaaggtaaaatctcatatgtggttttgtcacttctcttctcattgcttctaccaaagtattgatgcattcttttt

SEQ ID NO: 24584 - DNA, 631 bp, Arabidopsis thaliana columbia
  unsure (1)..(631): unsure at all n locations
tgcaatatcaatctttttacgagaatcttgagggttctgaatcacgccacgaaagacaccaccaaagccaccttcaccgatcatcaaggagcggctgaagttcttggtagcggttttaaggtcatcgaggacaaatactttgagattattactgtgtgtctctgagaggacgtgcaaggaagaagtaatggaagtagcagtacttgtatctgaattaaactcagaccctgatcctcctctagccatcgtagctgaaccaaactttctagtcttagcttcatcatcctgagttttgtctttgctgaagtagaaacatttcattgccttagatgaaaccagcctcttcactatccaaaccaggtccacattccaagtcaacacaaacagaaacacgatcagagatgaattaacagagataatcaccaatcattcaatccataccagatatcaagttatcaacacaaaaatcatcacatttcaactagattccctgacatttggaagaatgtagaacaaaaatcgatatacaacacaaaagtagaaatgtggtaagagtgttgagaatcagaaaggganagagaagaacctgatgtagaattatcatgaggatgaatggaatgctgtgatgggg

SEQ ID NO: 24585 - DNA, 741 bp, Arabidopsis thaliana
taaagaatcaatacaagcgtggaacaatttaatattgttcacatcaagaaatatctgaacaacgatacatggtgattacagtttgctccattttggctgtgttttttccgttttttttgtttgggtgacgttttcggtatgttttttattacattacaatgtcacagtccaagcttcttaggcctgaggaaagtggtgccctttttcaagccagggcctgaaatctgttgctgctgctttgcccttttttttctctctctctctttgcttctcagctctgactccacctgatctcttctcagtttctccatctcttcctccattcctgatttctcttccttctgcttttttttatgctccaacatcgatgtatccgagtccttgaccgagaagaacataggccctaactcagccagccaatgcggctcaaccgatgtcgcacactgcatgtactcctttgtggtcaagatcagttcatggtacaccacatagtccggtgtgtatcccagaccgtacagtgcactgctagggtgcaaatggcaaggcatcccggttctgcagttcacatactccccaacaccttttaatctagctgagttgtggaaatacgctgaacagatggcttttctcacaatatccaatccggtccacacgacctgagttcaattttcagttgcttgaggatatcagaagctgggatcttactctctagcttttctaaactttcacttgtaggtaatg

SEQ ID NO: 24586 - DNA, 1288 bp, Arabidopsis thaliana columbia
tatacatatgatttgctaatgagggaactctaattacggtttaatcagaagaagaaaatccgcagccgacaaaagaagctaaaggcgtatgatctcaccaacctgtcggagtttcttcccgagttcaatgctctgcagaaatcagctcttcctgcacccgagctgaaaatgaactgtaaaaggcgacaaaagctcgtgtaagtctccgtttcctttgttgttgtttcttgcgattttcatctgaaaggattgtgtctttgtgtgttgtttagattgacagaaggggagagattgaataaggttctagaccatccagcttttcaagctgatccagttggttcgatatttcagcacttgctgagtcaacagccaccggtggaagagaaaccgaagaagaagactaacactaatggaagcaagaaaaggaataagaaaaaaggaaagactgattccatggatttctgatcttgtcctataagtttacttatgttttgtttttgttgttttgttatagtaacatgattttggaaatgaagaatcttcaaatttgattgttattattgttcaaattacacaagttttgatctgtaacaaactcgtttacagctttcctttaagaacacagtctcgcctgtgagatctctctatgcagatttatgtgatacaggtctcatgcttgagattgatgagtagtaatctagaaaagatgatgttctagattcattgcttcgatgagtaataaacgacgtcgttttagacacgttataaaccaggtgttcgcaaacaaataaatttaggtacaaatttgtctgggtatgaaaatacactcagaatatagtacggtatgaaaatacccttctcccgattatagagtgtaagtttttttttttctttctctaaagattattcatctgaagaaaagacaaagggaagcaagaaaagaaatcggaacaagtgaacggctcaatccatggattcctgattttgtcgtatagagacataagttcctaacaaatgaaggaccttcaaatttatgatctattttgtcgtatagagacataatgatctattttgttgttttgttatagtattaacaaatgaaggaccttcaaatttatgattcttcttattgtgcaaatgacacaaatttcttataaacctataaaatgtgctcgaatcacaaacacaaatcatcatcaaatcacaccatataagagagaaacctaaatttgtaaacttatttcatgggctcaagctaaatcatcagtggacacaaatgatcacgaga

SEQ ID NO: 24587 - DNA, 440 bp, Arabidopsis thaliana columbia
ggctgtttcgtcttgcttctcgtgcttttcttgatcgtgttctgtctctgtagaaagaagaagaaagagcaagtcgtccaatcgagaagcatcgaagcagctcctgttccgacctcatcagcagccgtggctaaggaatcgaatggtcctcctgcggtggtggctaatggtgcatctgaaaatggtgtatcaaagaaccctgctgcagtgagtaaagatctgacatttttcgtgaaatctttcggcgagtttgatcttgatggattgctgaaagcttctgcggaagtacttggtaaaggaacgttcggatcttcgtacaaggccagtttcgatcacggattagtggtggctgtgaaacgattgagagatgtcgtggttcctgagaaagagttcagagagaaattgcaggttcttggatccataagccatgccaatcttgt

SEQ ID NO: 24588 - DNA, 557 bp, Arabidopsis thaliana
  unsure (1)..(557): unsure at all n locations
tttcatttgttttcatctttgatctctctgtttctatatcatgttgcaccagggttcattaaaaaaatacaaggactgagaattctcttacgtactttcttttgtagtaaaccgggccctgctgcgtgctagagctcagtctccagcagatgttgcaaaccatcctctcatgaaggtcaaattccacttatatctcttcatagcaaactaagaactcttatgttcatttatatgtagtttttgtagcaatctctccttgtcatgttatctggagacaacatttctctaaatgcttttcccccaatgtattggcataaacaggaaccatatgacattccacgcgatagagagcgcaagtnngcattgtccatggtcctatcccagagtagacatcaggagaagacagatgctgaggttattttctatataactctcaatgtacttgcagccgaagaaatgtgattcagtctttgtcttctcttacctatccttctcccacaactgcagatacttgctgaggcaaaagaatacagagatgcgattggccgacgtgtaag

SEQ ID NO: 24589 - DNA, 596 bp, Arabidopsis thaliana
gctattgcaacgagatcgatggtgaaattcgaaaatgggtatagtgtagagactgtgtttgatggaagtaaacttggtattgaaccgtattctattgaagtcttaccaaacggagagttacttattcttgattctgagaacagtaacatctacaagatctcatcttctctttcattatgtaagtacaaattttgtggtttattgattcttgaagagattgtgatgatgttgagaccacgattgtgcttttgtcatcacttcaaactgaatgcacatggggactatagtacaaaaagatgctgcatatggaaaaattgatggaattttttggtacttcaaattgaaaattctaaagtctgagctttattactattttatggagattttgctgtatctttgtcgtttctgcagtgagtttgtcggggatgatatcagtatacgggtatagtttagtagtacatttgtatgctgaatctgactttttcaaagatgagatctaaaacaaaagtgtttgtttcaaatggttcagaatagaacaaaagcttataatggtttgcaaaagtgttctttctactatttggttgagtttattatat

SEQ ID NO: 24590 - DNA, 338 bp, Arabidopsis thaliana columbia
actacttctaatacttatattttcaaaagcttcaagttcaggattggcatctggtttccttcctgtcatatctgcttcctctggaaagatcatgagatttgagttatgctgatcattggtcatgtgatcattctcggtgtcgacataaactgtcttctccaaagattgaaccattgctttttgggtagagtaactcctgagacgtcctgcttatgtttctagtatgattgctcaacctgttagctctcaggttctcggtttccctacgagtctcagggaaacccgcaatggtgtaaaggagaaccgttacctgtactgcgaaatggtgacatacagcg

SEQ ID NO: 24591 - DNA, 564 bp, Arabidopsis thaliana columbia
cgccatgacagtctgggaggtaagagttttaactcttttttgtttcctgttgggtcatttcatatttttcttgttcgcttggttcggtttcaggcgctacagtttgtagccattactgctttgttttcttaatctttattacatgggtttttacatcttgctactgcctctcttaaggcaatgaccaatcatatctgcatcataacctttgctgcagaactttggtggggaagaagatacgatcttttgcggtgtatttgacggtcacggtcccatgggtcacaagatttctcgtcacgtatgtgaaaatttaccttcgagggtccattcaaaaattagatcttccaaatctgccggcgatgaaaacatagagaataatagttcacagagtcaggaggaactcttccgtgaattcgaggacattctagtgacattcttcaagcaaatagacagtgaacttggtctcgactctccttatgatagtttttgcagcggtacaactgctgtaactgtctttaacaggtaaatcacagtctctaagctttatgagttttttagacagtt

SEQ ID NO: 24592 - DNA, 565 bp, Arabidopsis thaliana
gtgtgctctaaagggtaatgaaatcgctccgttactggaggtggaagggatgaaggtcggtctgatgacctgttatgacttacgctttccagagctggcgctggcacaggcattacagggagctgaaatcctggtacttcctgccgcctgggttcgcgggccgctcaaagagcatcactggtcaacgttgcttgccgctcgtgcgctggataccacctgttatatggtggcggcgggggagtgcgggaacaaaaatatcggtcaaagccggattatagatccctttggcgtcaccattgcggcacgtcagaaatgcctgcactcattatggcggaagtgacgcccgaacgtgtgcgtcaggtgcgcgcgcaactgcccgtcttaaacaaccgtcgctttgcgccgccgcaattattatgatgtttttttactcggcgcttgattcaccttgttacagattgctattgtgtgcgcgcgtcgaatgaccgttaatattctctggtttttaaggcgcgttctgttccaggttatatgtcaagaaggtatctatgggtgagattagtat

SEQ ID NO: 24593 - DNA, 451 bp, Arabidopsis thaliana
cacaaacccaccggttgcttggtggtcaagtatcagcacctgtggtgccatcctcttattatcatacctttccctttcaccctctcttcgaacccttctggtaaccattcttctctatcatctgttcacaccaaatcttgtgtcagattaaaatcaaagctacccaaattacagctatataatataggcttcaaacgtcaatttcaatacctttggttttcctaacaacccaaatgaaacttgtaccggaagcttctaaccctgcagcgatctcgaataactgttcattcttgaagaaagccacgctcccaaaggaaacataaatgactgaatttggtttcttggagtcaagccatttgaggcattcagcctcatcaatgttcgctttctttcctctctcagccttctcctcaaatccccctgttgtaaaccgatagcggaccgatatgcc

SEQ ID NO: 24594 - DNA, 568 bp, Arabidopsis thaliana columbia
tagtaacttccggaggatccctgaatgttgtgtttgatgtctttcatattccttgttctcttttggctgttgcagggagaggaagatgacgtgtatttagatacatacgaagacgagggagaagatgatgaagaaggtgggattcaggccaacggttcactatctgaaacagatgttgaatttggttcagatgaatcagacacagattttggcgataattctgcatcctctacaacaccagaaacaacctttgtagaactgcagaatgaggaacttgatgtacaaccataagtggtaataaagaacggcttgtgtgcacactgcagtgaattgatgcagtagataagttttgacatcttgttcttggttgagcaatcaatgagagatacgaagtgcatcacatgcaaagaatttaagcttttagaagctatgtagattcatatagtttataaaatacatatctcactatcctgtggtacaagatagaactcaaataacttatgactccatagtttaaagctactactctccatggttcaccccaaaaacacatgccttctcagaggag

SEQ ID NO: 24595 - DNA, 831 bp, Arabidopsis thaliana
acagcaagattatacgatgtttttcagttttttctaatcgcccttttcaggaaaattgtcccaatattatttcttctacttaccaaacgattcattcatcttgtacaaaccattcattcaactccattcaactccctgttctttttcctccgccttctctcttctaactcttctaatcatgcgctcgtttatctggtttatgttacagagtccagttattttgttatttgccatgatttttggtataactatcttagtgttggttgttatatgtcttaggataatatttccatcacttgatgatgttcatcgagttgatgacaacacatatgtacaagttgttgttgactccgatgatgaacatcatcaagaagggctcatacccgttccagtagagaatttcgtatttaggtatcccgaaaggattgtagtatttgtctagacacttttgaaagtaatgttccattggctaatacagtgtgcggacacgcgttccactttcactgtttaagtcaatggaacaagacttgtcctatctgtagggcaattctattctagttagtattagtatttaggaaatttttaactaggtgggtagtgttttagtttgtatttagcaaaatgggtagtttttcttatgcactatcttcaatttcaaatgtaacttatgcactcctgcccgtaccctcatgcactatctacaagtccgactattccctggcacgattgtaaacggcttagctgcattctcccgtagcttaagtaagtgtttgaaagtccatgttttagtctgacttggtttatgtccagaatttttcgctttgatgacat

SEQ ID NO: 24596 - DNA, 505 bp, Arabidopsis thaliana columbia
acggtgccgtaggataatagattaatagtttcttcatgctttcatggccctaatgatgttttgcttattcaggtagtggtaagacatttacaatgaaaccattacctatacgagcagttgaagatcttatgaggttgttgcgtcaaccagtatacagcaatcagaggtttaaattgtggctcagctattttgagatatatggtggaaagctgttcgatcttctcagtgagagaaagttagtgttctttctttttctcatttcttataaatgtcgtctttgttgaggggttttatgttttccttttcttttggcatatactttgttcaggcatatactagcttataattgttatttcgatgtcagtatatcgtaaacattggcacttattcatcctatcagtgtcaatactttccattgttgtctactactatcgcaaatgcatgtttaccattgtctaaatcattcagttattgccgagtaggaaactttgcatgcgagaagatg

SEQ ID NO: 24597 - DNA, 540 bp, Arabidopsis thaliana columbia
gatgaccaggcactagctccaagaaattccggaagttgatattgtcaatgactttttgctgcaaaattagactaagttatagaccaagtgttggagaaaaatggcagagttaaaagaaatgctaaataggatacatgccttcaattctgatcgatcaaagcttgccagggcacagagtccaccataggtggcaatatcttgaggagcaatgacttcattataggaatttccaagttctgggttaacatctaagaactgcacaagacaatattcaagttcaatgattagatttcagttaggatatgaataggatccataaacacatgagcaaatatgggaaaacaacagaccttacgagcagctagcttgtacttcttcaactccaaatgagccaatccagatgcacatcgcagttttgcattaaccataggttcaagggtttcaggattctgctctgccttgttcacatagcttgtaacatgagtaaactgacccatttcgatgctgacaagaatcgcattcatacacatgtgaatgatg

SEQ ID NO: 24598 - DNA, 447 bp, Arabidopsis thaliana columbia
tgcctctcctcgagctgctccgccgcggcttctctcacaagcatagatggctcacgcatcacgcgtccgctactagcacgactaagaaacctcgcagcttctctcaacccttgtctcctgacagatctccgttccccacctcctcctccgttgtttccttcattatcgtcgccgttaaaaagcaacggagctggatcgattgcgtcggaggatgacgatgatgatgatgctggaattaacgaggaatttcccgtggtagtctccgttgacattgtttctatctttgtgtttgattcttcaaaaaaaaaaaaaaaaaccctaaatcgttgaaattcgtgtaacgttacgccataaaaagatgaggattctattagaggaaacgaaattgaaattgctagggtttcaacgtgtaaagaacgaggaacgaggagaagagagagagatgat

SEQ ID NO: 24599 - DNA, 1290 bp, Arabidopsis thaliana
gggtatcaacgtctctaggagctggtatgtcagaaacctaggtagaaggttaagaccatgtaggatcttggggtatactcatgaattatgaaagacttaaaaacttgttatgaatcagtcttagctatgcatctgttacaaaataagacccacgagagagaccccagaaaaaagtttaaatgagttccaacatacttgcggggtgagatggaacttgaacgagagcgaccaggcctacgaattggggatcggctacgcctacggattggagatcttctgggaggactgcgtagtctccttggaggtggagacctgaaacacgccgaatacaaaacatatataaaactgacacatttttcccggtctaatttactgagtaatatagtctataaagctgtgattcctaaacttcgattactaagggtgtaattcaggtaccaaatagacataccttcgtcttagaggaagaggagaccttcttcgaacaggactgccacgaattcttctaggggagcccctgctgacagataaaaggtgagctatcgaatctgaaacacaccagacaaaacagatggtgccataactaaccttggaggagatctatatcgtcttggagggggagaagatggagaacggcctctagatggtgatgctggcctacgtctaggaggtgtatcaccgcgacggcgtataggagagcccggcctccggcgagtggggagaatcaggtgatcgccttctaggtgataagcctctcctaggtagaggtgatcgccttctcggagaaagccctgttttccgttgaggagatgctaagcacatattgatgatactaattaacacaacataaagcatatactacaacaattataaataaccaaaatataaggatttgacatactctctcttgggcgcctgggaccaccatctttctcagcgtcagcagcagcattatcagattttggagcatctctttttggtgcagctgagacaggtttagggggtgaagatactttctgacgaggtggtagtgtgaacgttgctttaacgacctttccatcaatttgggcctgtgttcagtgaacaaaacacaaacatgcataaatcttctctgtcaatatgtcaagtacagtgcatttcataattggaaagagacatacaccatccatgtagagctgagctttctcagcatcagctcttgccttgaactcaacataaccatgtcctcttggaagattaacctgttaataatattcaaaggaattatgagcagatttcaacaagtggggg

SEQ ID NO: 24600 - DNA, 546 bp, Arabidopsis thaliana
caacaacattataagccaaaaggtcacctaatttacattgtaggatctctatctcctaaagatatatggaagtggaaggaagagtagtatacagctgagatatcgtcggagtcgtcgacaatgcattcgtcattggggctatagataccgaagatagaacccattagagacggcagcgtcaatgttggaggaaccatcaagagggtcaaacacgacgacgtagttgccggagtaactctcctccaccgcaactggcacgtcctcttcctccgaggctatgattcccgttcttccacttgatctcaaacagttggaaaacacctgcactcaccaccactcaatctttattatacatccacccattcccatgaatcaactatgtggtctacactaatttatcacaaattcaaccaacaaaagcagagcatgtgtaaaaagaatgagacctcattagagatgacgtcaagcttcttctgatcctctccctgaatattaacggcgccttgaactccggtcaggttagagatccggcacgttgaacaagtg

SEQ ID NO: 24601 - DNA, 453 bp, Arabidopsis thaliana
tttcatccctttcttcgaaaagatattccggaacacaaatgccaaattcgatatcattgcccccataaaccctacaaaaaaaattccacaaagtttcacataagaccataaatcaaagaaatgtcaccatgtgaaaccaatattctaggattgtgagttttaccagtgatgttgaagttaagctcggtgatggccgcgagacggagcctaccgatgattggtaagagagagagatagacaggaagagggaaagtctctcccatgaagaatcttgagactaagacactgaaagctggttcaccacttttaatgatgtgtgtgaaggaaactgctacttttgacatactcactgttgctgcaacgtgtcctatcgtgtgtgctacagcgaccttgaagaataagaaaaaacgggaacatcgatcaaaacacactctttcattatcagacaacaac

SEQ ID NO: 24602 - DNA, 176 bp, Arabidopsis thaliana
aaggtaacaatggtgctagtaatcatatgactgggaatcgtgattggttttgcaaactcgatgagatggtcactggaaaggttaagttccccgctcattcacgaattgacataagaggcaaaggatcgatattgtttttgaccaaaaatggagagccaaagacactagcaaatgtc

SEQ ID NO: 24603 - DNA, 358 bp, Arabidopsis thaliana columbia
atccccctatccccgcgtattagagattgatttttgagtttgatttgaatgcaggaaacggataagttagtttcagaggtgattagattcatactgttcaagtttcaccaaagctcaggaactccaattagaagagaagatttgactcagattgttactaagaactatcgtcaacgaaatctcgctacacacgtgattaacgaagcgaagaagaagctctctaatgtcttaggttatgatttgaaagaacttcaacgtgctcgtacttcttctactggtcaatctaggcttcctcagtcacagagtaagattttggcatttgtctattaagaagcggctgcaccgcgtctcggcgata

SEQ ID NO: 24604 - DNA, 512 bp, Arabidopsis thaliana
actgatctatgtcccttaagctgcaccatcttctccttagcagcttctttaataaactcagcttccaactccgatttctccaacgtaaaaggaacattcatcaaagacctcacagacttctcaacaggacacctgaaaaaccctctactctcatcaatcgcattgtacaacaactcaggctttcctctggttcttcttctccacttccttcaaaccaccttgctccaacaaatcatcaaacacaagaccacacatataaatcccgaaacacggtggcgtgttatacaacgagctgttctcatcatgaatcttgtaatcaagcatcaccggagttatatctctagcattcccaatcaaatcctttcgaatgatcacaatggtgacaccagaaggaccaacattcttctgagcaccagcgtaaatcacaccgaacttcgatacatccaccggcttagaacagaaattcgaagacatatcagcaataagaacaccatcagggttttcaacaagag

SEQ ID NO: 24605 - DNA, 514 bp, Arabidopsis thaliana
agctaatgataatcctgagaagctatctccattacttagaaacgataagcatattatatgcatgtgtacatacacacacacacacatatatatagagagagaggaagagatttagagagcgaggaaggaacattgttttcgggcgtggtcaggtataagcttggacaacaactctaaacttgctccttttagctctacatatttaacaagaagcacacacttttagtctttgttaaaacggagcattgggaaacaaacaaaagcatatttggaggagacagaccttgaggtttaaagttgaagagaggaggcaaggcacgaccattaggaagacgtgtattgggatcacgtagctcatcgaagaacgggtgaactatcgcctccatctacaataacaagtaagtttgaatcaaccaaccagatatatcaaacataatgttattatggtaatcacttcattgacttacagcggttgatctgaggtttggagaatactggagaagtcttgagacaa

SEQ ID NO: 24606 - DNA, 914 bp, Arabidopsis thaliana
cttgttgactttccttcttactctgtcgttgactctctttgcgacttcttcttctcttttcttcatcttcttctccctgattcctttttcttttgttgcaggactaaaatcccaacacctccctcctgagttctttgattaaatccccaatttcaattttagggttttgattcccattgtttcttttgatttatcttcattccggaaattgctccggtgaaacagcagccaccgccacatctttctccttctccggcaagcaacttcattccggattttcgtctgagacttcattcttgtctccctcttcgaccaaactgacacttattccgacaaaaccctctgattagaccgtcggaatggaatcacgggttttgttctctagtcaattcaacttcccggtgaattcaccgtttaagacccgtgaaacctcgattgctccgctcacaccttcccggaatgttctctccttctctttccgtagtcccgcagagagatgtgcgatgaggattgtaccgcttgtaaaagctgcttcgtctactccacagatagtagcggaggtcgatggttcgtctcacgaaccaagaaggaagaagcttgctgtgtttgtgtcgggaggtggttcaaatttcaggaagattcatgagggatgcagtgatggttctgttaatggtgatgttgttttgttggtcactaacaaaaaaggtatcacctttcttcttcttcttcttcaagttatttgattttggtcttctaagttgcaattatagtttctatgttgtggttcttagagttaatgaatcagaaaagaactgctaatatatgattgattagttagtggaatttgaatagcttacttgcttaatttcatcaatttagattgtggaggtgctgagtatgcaagaagtaatgga

SEQ ID NO: 24607 - DNA, 509 bp, Arabidopsis thaliana
ccgtaccgagcttccgttaacgaacgagacctcatccaaggcggttaaggatttgaaaccgtcttcgctgcggagtgctgctaatcaggaggggctaagaaagagagatctgatacggagattgcccggacagcctcccgttagtttcgatcagtacggcggctatgttaccgtcaacgaatccgccgggcgttcctttttctactatttcgtggaagcctctaagtctaaagattcttctcctctgcttctctggctcaacggcggtacgtttccactgtccacacgcatacgtatatatatttcttttattttggtttgcatctttagttaggggcactgcattatgggtttatatctgtacatcttatatctgagtacaaagatgaacaagaatgttagtttgatcgatcgaggctgtctttttctcagtgcttattaatctatcatatgctatatgattttcagaatttaataattgtgaggacataccatatttatgccttata

SEQ ID NO: 24608 - DNA, 467 bp, Arabidopsis thaliana columbia
tcatgatattcttaatgtaatgacgattaagagtatatgcagttattataaactttagcaatcatgtcttgcatgcatataaagtttataaaccaataaagacaggtccaaaatatgctaaaactactaattaactcaccggagcaaggagggtaagcgacttgaattaagccgccatgtctagcggctaggctaagcgccaaaatgcatcccaaagagtgagccacgatgtggaaagacttcacattgtatttgtgtaagacagatttctcgatcatctctacgtgttctctcaacgtgtagagtgaatcagctggctttggactctttccgaatcctagaagatccacggcgaagagtctatgagtcgaggaggaggctgacaggcttggaaacaccgtctccgtccaaaacgctgatgaagatatgaaaccatgtatgaaaagaacatcctctttcgctgttac

SEQ ID NO: 24609 - DNA, 577 bp, Arabidopsis thaliana columbia
gttcatcctgaatttagcattgatgtctttgttcatctctgtggccttttctgatacgaaatatttcgtattggtagatctttggctctatatttggagttgctgccggatttgtagttggaaaagaagggcctatggttcatactggtgcttgcattgctaatttacttggacaaggtggttccaaaaagtaccggttgacttggaagtggctcagattcttcaaaaacgatagagacagaagagacctgatcacttgcggggctgctgctggtgtagcagctgccttccgtgctccagttggaggagtgcttttcgcccttgaagaagctgcttcatggtattttctgtttctctctaactccttataactaatccaaggagtgataccttatgcaagtctagtcattgtagtagacagactctgaaaggggaagcttctccccagctagaagtcttaatgcaaaagtgcaagaaggtcccatgtttgtctagttgaaacataatgtatccacatgacttctttatgcaaatggaagttagtgagcgaggaaatctaagtgatacatagtgtaga

SEQ ID NO: 24610 - DNA, 564 bp, Arabidopsis thaliana columbia
tgattcagttgtgttttgcataaaaagagaagtttaagcagttgataagaatggcttccaaggctttagttctgtttggtctatttgcagttcttctcgtcgtcacagaagttgccgctgcatccggtacgtaaatattaatgttgaaaccttattatatgtaagagaccatctcaactatttttatagcatgttttatatagagtattttcaatgttgtcaatattatttttaaaagtcaaaattaatttacattcgtatttttcatagttggtttaagagaagaaatagttttgaaatttgggagagtaatatcttatgaaattatgtgttgttttggataggtacagtgaagtcagagagtggggaaaccgtgcaacctgatcaatataatggcggtcacggcggcaatggaggctacaacggaggaggaggttacaacggaggaggaggtcacaacggaggaggttcaacggaggaggaggatcaatggaggaggcacggaggaagacatggttactgtcgctatggctgttctacagaggttacatggctgtcaaggtg

SEQ ID NO: 24611 - DNA, 515 bp, Arabidopsis thaliana columbia
aaattgttgattctttatgccttgttgtttgtttcactgtgagttataaaaaagcagcgagttataggtttacctctcgagcaatgtgaatagccatatcagtgcttagattcaagtgtgcatcacgcagatgcgaaagtatccaaccaggtagtttggaccgcttatcatgacggctgtatctgcaagttttaccatcaattgcagtgtattgttagaccatagaaatgtgacattataaaccaacataagcatatatctgtgtctctcttctgtcctacgaatattttcccattcctaaggaacagtgtgaactctgttacaatcttctattctcgaggtgatctcagatacttgcgcatatacttattatcatactagatagattatagagagaatcccatttagtaaaatagcaagaatctaaatgaccagactcagagagagaaaacttaaggcgggcatgtaccttttgtctgcaaatatcatcatcccataatcagcctttgaccgga

SEQ ID NO: 24612 - DNA, 738 bp, Arabidopsis thaliana
tgtatggtggatttgttttgtcggtcaggtcatttgaaagatgctcacgagttcatcaatcagatgccgataaagccaaacacagtgatatggagaacactgctaggcgcttgcagtcttcacgggaatgttgagctcggagaagaagttcagagacggatctttgagttagatcgtgatcatgtcggagattatgttgcgttgtcaaatatctacgcttcaaaaggaatgtgggatgagaaatcaaagatgagggatcgtgtgaggaagagaagaatgcctggtaaaagctggattgaactcggaagcattatcaatgagtttgtctcaggacctgataataacgatgagcagctgatgatgggagagattagtgaggttttgagatgtttagtttcttgtatgacaagttttgattgtgtaatagggaaaaaaatgtagaccaaaagagtctagtggaagttaatcaaagcccacttgtaggagcctgtggcccaacaaattaaatcaaaattgataacttaaataattttaagttttcacttttatcaaaaaggggcctgggaaaaaaacaaatatcaaagaaagcccaaaaaagacggagaaatcagatttttttgaatttaagaaattaaaaaaaaaaaaggagagctccgtcttcgttgctttttcgagcggtgcctagtctcaacttccatggctgacatcttaccttcaaattttctcaaaccaaccaaa

SEQ ID NO: 24613 - DNA, 997 bp, Arabidopsis thaliana
caaaaaaaagaaggatggtaattggatgatttaaggaaaggtcaaaaaagtcaattccattgtggagccgtatgcaatgcacaaaaaaagcctgtacggttattcaaatttatctatttttttttttttgttatcccgtctcattctgcgaaatagaaaaaccttttctattatatcattagggtaatgatccatcaacccgctagttcgttttatgaggcacaaacgggagaatttatcttggaagcggaagaattacttaaacttcgcgaaaccatcacaagggtttatgtacaaagaacgggcaaacctatatgggttatatccgaagacatggaacgggatgtttttatgtcagcaacagaagcccaagctcatggaattgttgatcttgtagcggttcaataaaaaataggagcgatttcatgcaaatctacaatttagaattttatatctttttagattaaaggtttagtttaatattctcttcaatataaaaataaaaaaatattgaagagaatcttgaagagaagtaattcagaattagccggttagaactaatctaaaccagcccattatttatatgattccgtatgccaaccattaaacaacttattagaaatacaagacagccaatccgaaacgtcacgaaatccccagcgcttcggggatgccctcagcgacgaggaacatgtactcgggtgtatgtgcgactcgtttagatcatagactgagacataaaaaggaaattctttttgaaatatcacggatcagtacctatgaataaaatagaatggacgaactcgattcattatttacaaaatatagatcgttcatatactctattgtgtctgaaacttatggtttacattggtgcaaatccaatcaactccattttttagaaaacccccaatgataacaaatgagtatccattaagcgggggaaattcattttttagaaaaagattcactcttgaaagaaaagaacggactacag

SEQ ID NO: 24614 - DNA, 526 bp, Arabidopsis thaliana columbia
  unsure (1)..(526): unsure at all n locations
ccttcacgaatgccaaattactgaatattacaaattgaccccactatttagtcttataatcgtaaacagaccccataaattcgtaaattttcagccacatccataaacttgactcgaatgaagattgacaacgactgtttttcaaacacttgttttgaatttccgtatattcagtctggaagtaaaaacacagtaagaagacaaagagaagcagccatttttcttggttcttttcttggtttaagcatcagatggtttctctgcggtttttccttccttgttaatgtgaaagccttcaatcttacgagcaacctcatccacactctgcttcggctttgactcgctgatctcttcaggattcaccggtccagtttgccaaattctgattgtaccatcttcagaccctgaagcataagactcacctgttggtgcaaatctcacacagtgaaccggaccatgatgtcncttgttgcatcctaaagttcagacaaaaagaaacccatcaaaaccaaaggctttatgtgac

SEQ ID NO: 24615 - DNA, 624 bp, Arabidopsis thaliana
gttttaacttgggtgagagggacactcaaagttgtttgatgaaaaaattcgcgttttatacgtgagtcccatgcacacgccgtgatcaatccatcttgaaggctgtctagacacgatcctgacgacatcatacggttttggcttccaacgacaggataaccagtgaatataatgcctattgaaacatagaggtggggaagcgagagtgatctctgtacgtaaagtcgtgaggacgtgtaagtaaaatgaaaagaaataattaccattgttggtcaaaccgtatgagggagcaaacagtgtagatgaaattattgtggctcccacacacttcccattcgcatctctgaacctctcttgcgtctcctcttgattattattataaacgaaaacaaattaaagttacgtgtagaattctgtatatcaacattttgttttcctgataatctcttatttaaatatcggtagttgcctagttggatccaagagttataattttatatacaaattcaaaaataacctgattattttgttattggttaactaatggttctattaagggttatggaccaactacttctaataaggccactgacaatttatcttgtgtttttggttaactaatgg

SEQ ID NO: 24616 - DNA, 600 bp, Arabidopsis thaliana
catgtacataagttatgttatgattggtttaggtcacaattgtttctttatgctttcgtttccataagaaaaatattacaaatattaactagaacaacataacatgcaaacgagtaatacaaaattcattattatgatcaaaacaatcatgaattagttggacttatttgttaaattccgaaaatctcactaaaataaagtgaacttcatctacatggctttagacgcaaaatctttaagggtatctacacaagtttggaatgaataatttcttgcgatggtagtgtagaaggatctagaagatccacaagatcattagtgtatcttctagatccttttacattgagaagtgaggagatatttgttgtattagaaagaattatagtgaagtaaattttttaactatgtacgatcatttatatacgatacttttattaaggatcttgtggatcttctagatgcttttggtagtggcgcggtacgccggcaccgcagagcaaagatggaccggcgttagagaaatggtgtggacagaaatgtgaagggagatgcaaagaagcggggatgaaagatcggtgtttgaagtattgtgggatatgt

SEQ ID NO: 24617 - DNA, 549 bp, Arabidopsis thaliana
tggtattgtccatatgggtcttgttgcaggtggtcgagttgtgttagtagttttgctgttgaaggatccatcggctggaaatttgggctgctattgttaatatcttctccaaaaccatttgcaaaatggtcaaatgccgcagtaggtacttttgcaaaagttggagctccagtatctatgggaaggaaatcattagatgttggccattgagcagtggctgctggtgcaccggttgaatatacaacaggatagttatctatggagaaaaaagaacgaacgagtgattcatacaaatgattcaatgtaaaagggtttaaaatatgagagataaaggttgagtgtttctttacacgcatgatcagtatatggcaaccattgactattagcttctggtggaacggcaggagctccaagattggtacctatggagaaagaaagtagtgtaattcataaaaatgctcaagtagaagtgttaaacaaatgatagattaagagagaaagactgagtcttctttacacgcaggatcactataaggaaaccagtgatca

SEQ ID NO: 24618 - DNA, 572 bp, Arabidopsis thaliana columbia
taacagttgggtttagcctctattgaaggagagagcactttaccctctgagtgggaacatggagtggttggaatgacgggaatacaagcccacccatgaccagaacgtgggggataaactgggggaacacatgctgatatcacttcatgaacaaaatcagcagacataacctcagcaacttttgcagctgcatctgtgctacttcgatcaaaaaccagacgcgtcaatagctgcaacatgcaccaacagtaagaggttactcaagatctgtgcctaagaagagtattttgaggcatgaccaatttgtataaaattggccgcacagtggttcattaatcaccacacagaggcagagagtattaaccctaatatcaaaatcttaagaggccactcatcgtactcactaagtttatattgtttatgaatataaattgctagagttcacagaataaaggaaagcaaaacccagtagtatatctccaaataaaagcagattaagaggataatccacaagcatgaatgacaaggaagagagtttatatgaaaaatatcccctgagacatcaaaaaaga

SEQ ID NO: 24619 - DNA, 509 bp, Arabidopsis thaliana
gactctactacatatcccagagtaaagaaaaagcacaggcgagcgtattcttgattacacgaatgaagtcaagtgcatcatgtttggcttgatcttaccggtatccaccaccataggattgttgagggttgtaaccaccttgacccatcatcggattgtagttattgccaggcatgtttgggctaggtaccatccctgggttttgtggttgcatcggatagccttggccatatcctcccatgttcatgttcatgttcatgccgggtcccattcccatacccatcggttggttttggttcattccggcccccatacccatacccatgggttggttctggttcatacctccgtagctaccaacacccattcctccgcccatgggcatgccagagcctgtcattggattaggtggaggtctcatagcagttgcaccagaacgccctaagccagtgcctgatcccatggctttacccatattgatagtcgatgttgctggtgtgtttgtttgt

SEQ ID NO: 24620 - DNA, 493 bp, Arabidopsis thaliana
aaaagacaaaattaaataaacgtgacaaagattaatccattttattaatcttaattcagataaaatcccacaaaattctcaaattttatccaattctcttgagtgacaatcaaacaagtaaaatcgaattccaaataaatcataaagcaagaaactttcacagatgacattatccaaaaagaaacaaaatcggataaacgtgggaacgatttatccaattcaggtttcttaaatctgaattcagataaaatcgctcaaaaatctaaactttatccatttttaaaaatccaaaatcacaaaattaataaggaagaagaagaagaagaagagaaaaatacccagaaggaagattatcaactgtagctaataagcatcttaagcttgctgccaccttcagaagcaagaccagcatgcatctcaacagtcatagcatcagccacttgtctcaatttggcaattggcgttgcacaatcttcttcaaaggctttcaata

SEQ ID NO: 24621 - DNA, 584 bp, Arabidopsis thaliana columbia
  unsure (1)..(584): unsure at all n locations
tcgtcttaatatatatgacccaagggccatgaaactgcaactgctgacactggaccatggctcattacactcgatgctcctagttatcttcccgttatgcaacatgccaaaaaccgagctctgcgcgaggaagtctaccgtgcttacttatcccgtgcctcttcgggtgatttagataatacagcaattatcgaccaaatcttgaagcttcgactggaaaaggctaagcttcttggttacagaaattatgctgaggtattatagtctactaagtcaacttactctcctttactcatgggcttaaatttaatatcattctccttgtccaggtaagcatggccacgaaaatggctactgtggagaaagcagatgagctactagaaaagcttcgcagtgcttcatgggatccggctgttcaaggtaacttctagtgagaaaaatacttaaatcaacatatagttctttaactagtgagctgttactgcatttctctatccaataaagtatgtaacggtttcctcatagcttttttgtatcggctttcaaccanaatcatgattataattaattttacatgtgttatg

SEQ ID NO: 24622 - DNA, 620 bp, Arabidopsis thaliana
taaagttcaataatgtttttgaaaattgggtttattttgtttgataactctttgcattatgtagctgataggtcagagatgagtccttcaagcttggcaacgttggcattggatgatacacatggtctaacaagtcataaaaacacatatggtactagattcatgctcgaaaactcgatttcttgcacttttgacatctaagaatttccttgtgtttttctccttcgtagtaaacaagttgcagattcctaatgatcagcaaaatcaatttcattcttatcaatggtctactacaactaatcatataccttgtaaagaacagactcaaaccattctctcttctgaatattgagtttgttttgtttgatatctattgcattgtacagcaggtcatgattgcagctggcaaaacttggtttctttcacttttgacttctaaagcttcctttggtttctctgtcttgtagtaaaccagttgccgattccaattggtcagcaaaatcatcttcctcaaaaccaatggtctacaccaaatcatcaagcttctaaagaagagattcaatctttctctcttaatctatcatttgtttatcacttttacttgagcattttttatgaat

SEQ ID NO: 24623 - DNA, 623 bp, Arabidopsis thaliana columbia
  unsure (1)..(623): unsure at all n locations
ctccgtgcttacacgaaatctacgggagatttgactttatctgagacaccagagtgtcagaggggaatgaggcttatactctctctttgcttatccgaagttttgatactttccctacgcttctttgtgctgacggttgttctatggttgataggagaatggtaagaactaccttttagtgaacgagcaaaaatcttatatgattcatcacactaaaaccaaatcttgatttgtttatttattagggtgtttatggatatccaatagagattcaagctctgtttttcatggcattgagatgcgccttgtcgatgcttaaaccagacgaggaaggtcgagatttcatagaaaggattgtgaagagacttcacgcgctgagtttccatatgcgcagttacttttggcttgactttcaacaactcaacgatatctataggttagtaagcaaccttaaaatgttcttgtatatggataaaatatgatttgacgtgactaagattgtaaaacttttgttaaggtacaagacagaggagtcncacacaccgcggtgaacaagttcaacgtgatgctggactcgataccagactgggttttcgactttatgcgctccgtggaggatattt

SEQ ID NO: 24624 - DNA, 592 bp, Arabidopsis thaliana
attgataatcttgaagagcaatcttggctgtgtcttcgttaacactttaatgttggcatgtctttctaccattgtaacctccacgtcagcaaccacctctagtcgcttgtgatggtggtggctcgaggaggatgaggaggcagtggcggtggcagtggcagtggcggtggagtattgagggaacatgaagaagtcggaaaatatatttggtgattgattgagtttagtagcttttaattgggcttcgagagattggagacgttgttctagcttcttcagatagctaatggtcccttctatgattgatgcttggtcattctattataggaaaaacccaaaaatttatcaattcgcaattttatttagtaattgattcaaaaacaaatatactaaattactattatttaattaacggcttacttttaataaggaaccttaacactctttgtctaaactaaattttaaccgaacatatcaaattatcaacattgcttagcctgcttatatcctataagctagattaaagatagaaagaactcacaggttgagaataagagagaggcatcatagacttgaggatagccagaaatga

SEQ ID NO: 24625 - DNA, 521 bp, Arabidopsis thaliana
tgtgtggtactttctagctcatgccaaattgtcattcggatcagatcctcacagtctttggcaattaacagaaacaaaccattcattgcataaacaaacaacaaagtacaactttatttgtaatttacagttttgatattaagccacatgatggcgtcctcaccgcaaccgcctccatttgcaccttactgttcaccacattttcgcattctctactaggtcaccaccacaactaccagattatgctgctttcaccatgtttccgcattcaccgttacaaccaccgccacagccgctagcatttactgatttcaccatgtctccgcaaccaccgccgcagccaccaccgcaaccacccccgcaaccgctagctttagctgctttgcatctagccccataaccaccaccactagcgttagtgcgtttcaccatatttccacattcaccgctacaaccactaccgcagccgctagcatttgctgctgatttcacatgtctccgcattctccactacaactact

SEQ ID NO: 24626 - DNA, 637 bp, Arabidopsis thaliana
  unsure (1)..(637): unsure at all n locations
tgtaatggtccaagtttgcagatttagatgaagttgagaggaagttatggatactgcacatgcattcaaacttttacctgtatattaatccagagtagaagtcaacatttggatacagctttctcttaacaaagtaatcgtcagagagagctgccttctcaagtgcaacagcaacctgcagacatcagaatcaaacacattggctttaaggaaacatgaaaaattacactaaatcgaaaaggtgggcatcaagttgtagtataagcttgaacttcgtggacatagcgtacctcaattagaggatcctttccaacaatggaaaatacttcatcagccaggttcttgatgactttagctcgagggtcatagtttttgtacacacggtgtccaaaaccagacatcttcctcttcctaagatgtcaaagggatgagaattttaatgaaaagacttgtcacaaacctcggaaacggaagcatatagtttcaagaattgatttacctgttcttcacacctcaatgaactctggaatatttcaacagtccaatctctgacaacatcttaagcacagcctaatggaacanagacatgaattcaaagaccatggagcatgaaaatcatcagaagatgtacatatga

SEQ ID NO: 24627 - DNA, 502 bp, Arabidopsis thaliana columbia
taagaactcacagcaacaggaccttcgattctgagtaaaggaactttaggaaaaacaactgatccttccgaaatggcatacacttcaatgtcagaacaatcaagccctcgaagataatcacagaaagcttcctgatttttaaaagagttaaaaaacaatgccaaaaatcgaatcttttggcaagagagattgtgttatacctcacatccaggtaacgaatcacgaacgaaatcgatctcttcatcagtcaaattgaaattagcgagaaatttgatgcattcttctaaaccagcaaagatagtgtattctccaccaaaaggattcttacgaaaatacagatcaaacctgaaaacaaagatgagattttacagtgtggattcaaaggatcgaacttttttgtaaattttgaagaatactaacacagatcgctcagattgtttgccagctttccaataagcataagccatggtgaattggtaaagatcgttgagcagaggtgtga

SEQ ID NO: 24628 - DNA, 1046 bp, Arabidopsis thaliana
ctttgatgtgattctgtgcttgtttataaagaatttgatttttgatttttttattagtatgggagcagcttcagaaagagagtccagagtttttcaagaagtactacttccactgtgaattagcgcgtcagatagaaatgtttaacatttttcttggaaagcaagttagtctgatggtcgagaatggagatcttgatattggtactgcaccatgtacgtataacacaaggactaaaatcttcttatggattatttactgcccgattttatgaactgcttcaattatttttttgtgtctttgtgtatctacagtcaagaattttctcggtcaagatcctgaaggagctcatctcttggtgaaactagcgaatacaccttgtaaatctctctactgatatctctaaagttcaataatgtttttgaaaattgggtttgttttgtttgataactctttgcattatgtagctgataggtcagagatgagtccttcaagcttggcaacgttggcattggatgatacacctggtctaacaggtaaagtcataaatacacatatggtactagattcatgctcgatttcttgcacttttgacatctaagaatttccttgtgtttctctcctttgtagtaaacaagttgcagattcctaatgatcatcaaaatcaatttcattcttatcaatggtctactacaactaatcatataccttgtaaagaacaaactcaaacctttctctcttctgaatattgagttggttttgtttgatatctattgcattgtacagcaggtcatgattgcagctggcaaaacttggtttctttcacttttgacttctaaagcttccttttgtttctctgtcttgtagtaaaccaattgccgattccaaatggtcaacaaaatcatcttcatcaaaaccaatggtctacaccaaatcatcaagcttgtaaagaagagattcaatctttctctatcatttgtttaacacttttacttgagcattttttaagaatggctcaactttcattctccataggtactcttggagc

SEQ ID NO: 24629 - DNA, 657 bp, Arabidopsis thaliana
atcaccccaacggttctacgcgcaatcccgccaaacctttcctctgtgaattcaaccgtttctccatgttagacaatcttgcttctatctctttctcaatatcaatcccagtttcatcatcttcttcttgcttaccctcacttttacgtgcttcacgtgccatcattctgatctctgcaatcttctcattcatttcaacatcctctagcaaaaccaaattgttaccctcactatcacttgaaacttccggcgttttctcggatttcgttgagtctcccagaaacaaaacagcacaaacagtttgaaaagcgaatattccgatcaaccacaatccatacttcgctactaacttcggagagatcttagttgatataccatttacctcatttgacacaaccgagctacttaagacctgaatctcctctacatcagaaactacgtcgcttgaaggatcattttccggcgtttcgattccgattatgactgtctcttgaggctttggatttagggttctaaggattttgggtcgcaggtaatttttcctttttgatgacttcgacgagaacggaatcgaagccgaagaacaccgggataacttttacagaaactctccttccggtggagtacgacggaaggaacaccgaggagataaaagac

SEQ ID NO: 24630 - DNA, 870 bp, Arabidopsis thaliana
aacggactgcaaggaggactaacacaacccgagaagccactacaagacctatatggagaatgctaacagaatttctcagtagaagatctgctaactcttgaatatgaagcaaacaataacggcctgctaggagtaataccgcaacaacatcgttatcatcaggaaaaagagacgatctgacgcgctaattcacagaggaagtagtacttcttgaaaaactctggactctctttctgaagctgctgccatactaataaagaaacaaaatcaaattccttataaacaagcacagaatcacatcaaagcagagattataaaatacaaacttggtttggtgagatggtgactaatcttgtgattgtcctccacatatgtctccgtttcttccaaactcatgtacttgtaaatgcatgtctcaattaagttcttaacctgaaacagaacaaacaacaatcgcatgatataagacagagtaggtaacacaaaaaacttcacagattcatgaacgttttagagatttggtgtagaaagtatcaatacgttgtctatggtctcagaaacattactaccggcgatctcgctcccaccggcagcgaccagcgcaattcagatcctctattcgccgcctcagaccaaccgtaccttctccatcctctacccaaacgagcctcaactagggtttcagttattgagccttttcccatccttgagcccattacctttctaccggcccactcccaattgcaatggcccaactttctcttttgattggcccaggtctgttctttattcccctttaccaatttcagtctgattgttgctctgtttctctgttctgtgtggccaaggcgtccaccagagaggtgtagc

SEQ ID NO: 24631 - DNA, 1216 bp, Arabidopsis thaliana
tgtaagcaaagactcaaacctttctctctttctgaatattgagtttgtaggtcatgattgcagctgggcaaaaactcgattatatatttcacttttgatttctaaagcttcctttggtttctctgtcttgtagtaaaccagttgccgattcctaatggtcagcaaaatcatatatggtctacaccaaataatcatgcttgtaaagaagagactcaatctttctctcttaatctatcatttgtttaacacttctagtacttgaccatttttttatgaataactcaactttctttctccataggtaccaatcttggagcttctaccattccaccagcagctaatgatcaatggtttccttataaggatcctgcgtgtaaagaaaacactcaacctttctcccttaatctctcatatgtttatcacttgtacttcaacattattatgaatgactcaactttatttctccataggttcccatcttggagctcctatcggtccaccagaagcttatggtcaattgttgccatatactgatcctgcgtgtaaagaaaacactcaacctttatcgctcatagtttaaacccttttcacatcaaagattttgaatgaatcactctttcttttttgctccatagattactatccagtactatattcaaccgctgcaccagcagctactattcaatggccgacatctactgattttgcttgtaaataatatactttattaatcttcctttctcattatattgttttgtaactcttctacttaagcatttgtatgattcattctcctttctctttcccttagatactggaggtccaactctttcaaaagcacctactgcggcatttgatcattttagagatggtttcggagaagatattgacaatagcagcccaaatttccagatcctttagcagccgcactacaaacgctacccgatgacatgctacaagagctatatcaacaatgccaacggcaatcgcagcttcaacagaacttctcactagaagagcagcaaagacttcaaagtaaagtaaacaacaacgggcttcaaggagtagtaaggccacccgaaaagccgccacaagacctatatggacaatgtcaaccgcaatcgcagctgcaacagaacctctcagtagaagagctgcaaagacttgaagttaaatatcgagcaaacagcaacgagctgcaaggagtaataccgca

SEQ ID NO: 24632 - DNA, 1067 bp, Arabidopsis thaliana
ttttctgtgctctaaaggctgatcaagtaatcgtggagctcctaccgttcaaccagcagctaatgatcaaacctttttctccataggtacccatctaggagctcctaccgttccaccaggagctaatgatcactggtttccttatagtgatcctgcgtgtaaaaaagacttagtctttctctcttaatctatcatttgtttaacacttctacttgagcattttaatgaattacactactttctgtctccataggtaccaattctggagcttctgccgttccacagcagataatggtcaatggttgccatatacagatcctacgtggtaaagaaacactcaacctttatccctcatagttaaacccttttacattgaattactctttctttcttttttctccatagataactatactgttgtatattcaaccggtgcaccagcagccactgctcaatggccaacatctaatgatttccttcccatagatactcgagctccaacttttgcaaaagcacctactgcggcatttgaccattttgcaaatggttttggagaagatattaataatagcagcccaaatttccagccgatggatccttcaacagcaaaactactaacacaactcgaccacctgcaacaagacccatatggacaataccaactgccactgcaggttctaaaaaaaccctcactagaagagctgcgaaaacttccatatgaagtaaacaacgtgctgcgatatgatggaaacaacaacgggatgcaaggagtactaatgaaacccgaaaagccgccacaagacctatatggacaatgccaaccgcaaccacagatccaacgaaacttttcagtacaagagctgcaaaaacttcaatatgaagcaaacaacaacgggttgcaatatgatgcacacaacaacgggctgcaaggaggactaacgcaacccgagaagccactacaagacctatatggaaaatgccaacagaatctctcagtagaagatctgctacctcttgaatatgaagcaaacaacaacggactgcaaggaggactaccacaacccgag

SEQ ID NO: 24633 - DNA, 466 bp, Arabidopsis thaliana columbia
catcaccccgttgctgatctgctttcatgataacatgctggcaaacatagttcattttttcaacacctttactctttgtttgaggcttattggcatatatacggcatgttctgtctgaactaagagaggctacatactttgctaagggatcccaggcaacaccttgaacataatgacaatgggcatccagtatctgatggacagaaccttttagcaaatacaaaattgtgagaagcaggaaagctggagccaacaaaaaaataaaactatctacactttgactttttcacctttgttaacgtcccatataatgcaagagttgtccactgagccagaaataagatatgcatcatcaggagaccactgaagatccaggacatcctttcgatgaaatctagcagggcaaacaaaagtcaaaatatatctcttagcctacattcgattgggtcacagttgcaattttggt

SEQ ID NO: 24634 - DNA, 527 bp, Arabidopsis thaliana
attgcacatgatgctattcttggtaaagacctaatctcctaaaatatattttcctgttggttcacttcagaatgaagcttccactgacaagtattttatggaacaggacatagtcaatgggagtcctggatagaagattggcaaagaccaatacttgaagacaaaagactgcctgcataggtaaggcttgttgttcagcttctataagacatatcagttctcataaagttatcacaaacgtgtttggtgtttggtgtttttaggtaccctgtcactctcttcaacgagctttattaccttaattcaggaggaactctttggacaggtagatttggacaaatttcttatgatactatttactttcgtcatgacattatgacgccatgttctcatgttagtccatattgttttacagatggatcatcccagtacatagcttggcaggagtcagagaaaagaagttctcacttgataaacccaactcggtctaaagaacgatatcgatgtactgcatcagaatgatacag

SEQ ID NO: 24635 - DNA, 479 bp, Arabidopsis thaliana columbia
acactcatccactaaagagcatcataagtttgatatccagagcgagacaaaaacccattagtaaccacgtcatctatccaacgcattagtcaaccaattaaaattgactttgaggatctccacgtcagccttctatttcaaaaattccaaaattgaataccaaaaccaaataaccgtcttttgaataattaaaaaaccgctataacatgagagacactatataagtgaaatctctagtacattgtacccattactctcgcaaacaaaagaaactgtcgcaagttattgacggttatcatcatcatcatcgttctctcgaagaaatggcacgtacgaagcaaactgcgaggaaatctactggtggaaaaggtccaaggaaggaactcgctaccaaggttctttatatatctttgattttctaacttttgtatcagtgatattaagattatgttacgttgttgaatattttgagaatgggt

SEQ ID NO: 24636 - DNA, 557 bp, Arabidopsis thaliana columbia
  unsure (1)..(557): unsure at all n locations
ccgcggctttgcaacgtttaggaagctgtatgggaagattgagacagacctacacgcgggtgataccataacggtcttgttgcagaacaactacaacacttacagcttcaatgggcagaagaagctagtgctgtcaacaactagctggctcggcggaaggaatgatttcctcgggattgcttatctgactgtaggcagtatttgcttgttcttggctgttacatttgccgtattgtatctagttaagccaaggtacgtcactctcagggtcatgcatgcttcattttgttaagacattattacacttttcagattttggaacgtgtacagtgaaatgatcttctgtattaatggtttcaggcaactcggagacccctcgtacctttcgtggaacagaagtgctggaggtttacagtaatagagcccttcgagcatcaggcgttgatcctccatcgtcaaacggcgtagttttggcttagctaacaaaagagaaaaaacganaataagtatatagttcgtttataattttgatattgttgaaaacaacgtttgtgttt

SEQ ID NO: 24637 - DNA, 320 bp, Arabidopsis thaliana columbia
  unsure (1)..(320): unsure at all n locations
gcaggtcgactatncccaatgaccgtttcaatggatccagagaagattgaggctatcagagactggcctagaccgacgaatgacactgagatcaagagtttacttgagagtaccacacggtataatactccatacaagtcaaccaagtacgtccaaggttataacatggagcatatagactctcataagacttcgaacaatgagttaagatccgtacattacaacactacgatgtgtctacagcaactcttacgaactatactagagactagatttgaactatcaagtaatcggtacgaagtggatattgatgcctcaag

SEQ ID NO: 24638 - DNA, 455 bp, Arabidopsis thaliana
ttcgcatcatcatcctcctcttccaattcactgagtcctgccccttcatcttctccctcatgagcctttgcccattcaggctcctcgtaattcatagctctctccaatctctccttctccatcttcttcttcctttccctctcctcttccttcttcttctccatctctgcattcttcttcaccaacatgtcaatcactctcttatccctcttcttcacaaactctgccaaacccctcacagtatcattatactctctcttcgccttctttctcgactttttattctcctcctccatcatccttctcgactttcgattcggtccacccatcacatcatactcatccacccagcagaaatccataacagtgcaaaaacctaaccagtaattataaaacgccgtcacctgagcataaggagactctagattccccataatcggagcttcctcacagaa

SEQ ID NO: 24639 - DNA, 932 bp, Arabidopsis thaliana
gaatagtagtaattcagtgactaaggctcagcctcatcttctgattcagcatactcgtcgtctgactcatcaggccaaacatagtcgacaacatcgagaggatgcctgtgcaacaaattcaagagctgttcaaggtttctcagctgactttggcccgcctctgcatccatgtcctgcccggcctctgcatccatctcctccatttttttcggatcattgtaactcaacaccttcaatccaaactttccattgtcatccacattctcaactcgaaatgattttgctagagatcttccctccactttgacatgtgacacgctgcaaaaaaaatcagcaaaaactccattcacattgcagaagttgagaagtttttaaggaaaatctagagcagtagggagagaagatggtaccatatatagtattggccatccatttcttgtgtctgaactcgacctagaaactcgactagcagatacccaccaatgcaaagaacaggttctggaagctgaaagctctgcaatcgattttcctactcaaagaaaccatcatttgttatcaacagttcaggaacaagttttctgttatgctaaagaagaagacaatgatttgtaacacacctgagccatcgaaaactcttgtgaagtgtaagtccatacatagttgctttcaattgaactctttcctggctcaccttttttatcctgtgaattgttgtagtgaggtgaattgtccttttcgtgacccaaccggaaacgaacataatgtgaagagtatatcggatgaccgcgctgaaaataagctacagaaaatggaaaactgtaagcaataaaactcagttaaagacgcaaaaaaaaacaaaaaaattaacacaaggatcgcattggtaccttggaaaggatggatgctgacttcagtaatgagacacaaatcac

SEQ ID NO: 24640 - DNA, 569 bp, Arabidopsis thaliana columbia
tgtgtactagcaactacaccttggtggtaacaaggataagagtactgattaaccgagtcaagctctcctttctcttctctggtgaagtgcacattcctttggtagttcctttgttaaatcatcctctactaaaatctgagcctcatcaaaactgacgcatgcatctgttctaggatgaagacggatcggtttaccatctacacttgctagaaactccaagcccttgtccgtaaacatcattgttggaacatttgtgagagtgacccataatggtattgatttcattgccgggtgagcttcctctgtaaatggagtccactttgagactatcatagggatatccgtaatgttccacaatcctctattcaagattcgctgcctcataccctcgtttcttatatgaaacttcactgtggtttcattaacttcaaatacatcgataagggaagaccgatctcccaacctccaaatcttattcactatcatatgaattttcccacatgtggagccttggtgtttatgaactttcctatcaagaaatctcccacaatagttttgccctacaaaca

SEQ ID NO: 24641 - DNA, 556 bp, Arabidopsis thaliana columbia
tccaacctgataaactgtcattagtagctgaagaggtgaaataacacttgaaaacctatattaatcagaggttttatagcgtaaatgttactcgggttttataacggggaaatcttacaggaaactggagatctgcggaagaatggaagtgaggcgtttctagaagatattgcaaagcttgtgaaagatactctagcctctgaggaatcgtacaccagctctcctctatccacagatgatgtgttaaatgctatagactgcggtaaatcagaaggcggttgcaaaggttcccactgggttcttgatcctatagatggaaccagagggtgacaatctctctaatctctatgctttctctatacttaatcttttcagccacttaaaaacatggttgctaaacttctctgcttgtttagatttgtaagaggagagcaatacgcggtggggttagccttgcttgtggaaggcaaagtggtgcttggtgtcatggcttgccaaatcttcctttggcttctgcggtttgcgcgactgataattctcccaggaagatgttggc

SEQ ID NO: 24642 - DNA, 527 bp, Arabidopsis thaliana
ggactcgttatttgactaacaacagaaaacgtgttgtaaggcttctctgaacaggtaacaaaggacttctgaattccatcttctacttggatggcatgtttggtctttctttcatgtcctatctcttcatcatcactttgatctgaatgcactacaaaggacttctcaattccatcttctgcttggatggaatgttttgtctttcttttatgtcctatctcttcatcatcactttgatctgaatgcattacataggacttctcaattccatcttctgcttggatgcaatgttttgtctttctttcatgttctatctcttcatcatcactctgatctgaatgcccatcttctgattcgatggaaagttttgtctttctttcatgtcccaactcttcatcatcactttgttctgaatgcaatacagaggacttatcaagtccatcttctgattcaatagaaagttttgcctttcgtccatgtccactctctgcatcatcactttgctctgaatgcagtacaaaggacat

SEQ ID NO: 24643 - DNA, 801 bp, Arabidopsis thaliana columbia
cgttagcccgaaagctatctcaagagttaaagattgtcacatcctttatatattacccaaagatcttaatcctaaccaatatagaacattttaataggcttttccgagatgcgtgtgagaaacggtccaagcctagaaatacaacaagacctatcacttgtgtggccatataggtaaaaaaccatttttgtaggaatttgtttgttggaccaaccataagctctgataccatattagaaacgtagtctaacttagcccaaaatctagcttaagagttaagaattgttacatttttatatattgtgcaaagatctaaatccaaatcgatataggatattttaataatttattttgacctaaatcaaaccctatataaacagcatccactgatacaccttctcttcattttagaaaaaataaacaaacaaacaaaccaaaacaccatggagcttaaaaatacaatctttctagtcatacttctatcaataaccattctccaatcttcatctgcaaccccaaaccggtcggaatcagaccagtttattgtgtcttcatgccaaaccacccaatatccatcactatgcgtgcacacactctctgttacgccaccaagatccgccacaacaatgaccaagatctcgcccagactgctctcatcatcagcttggctcgagccaaatccgttactatcttcgtcgccaaactaaccaaagagtacgcttttccctaacattttttttttgtgaaccacacacttaaaaccaggcagtactctctgtttgcagcccaaaccggtgttta

SEQ ID NO: 24644 - DNA, 569 bp, Arabidopsis thaliana
cgcataaggaacacagctgagagttgccactacataatacagaataagggacgaagaggatacaaggaatttggtacctcgagatttgctccaagttctcggtgcttctcaatggagtcttgcccaccactaaacgcatatctgtttatctgcatatgaaaccataccaagtttaaatgctggacgaaagtgtctgagttcattattaggactggtatttaatgttctgtaacgtgtttcagatgccgttacaccagcaaaagaaaaaaacgagtggaaggactcgagtagcaaccaatctagacgatgaatgtgtgtgaaagcctacaaggttgatgtggaaaccagaatggcttgttataatagatggaaagaacaaaaagaattacagaatttaccttgtttttaatgtcctttgcggaatcagtcacatagatagcagaatttggatcactagcagacatttttccattctctccctgcgtaaagtgaccaaggcaattagttgtgtaaatcaggaatgtgtagtgtacttaagaaactacttgcctgcaacgcagaaaaaatgt

SEQ ID NO: 24645 - DNA, 522 bp, Arabidopsis thaliana
aacgcagcaaaactaagaagatggccaaatagcagtcactcaaagagagaataaggctgaacctaaaagatatttaaagagttttttaaccgagaagccacaaggctacgaagaatggtcaagtgagaagttgggacatctaatggagtttaaatgtgaagaaaatgataaggcaatgctcacacaaaaaagtctcggagggaaaagtgaagaaagtattgttctcaatgccaagcaacaaatctccgagtccaaataggtcagtagtgggaaaagactttgtggtggcatttcaattcttttctaagactgttttttttgcctaaaggggccaactcaaccatcttagctttgattccaaagaaaaaagaagctattgtaatgaaggactatgcacaaatatcatgctgcaacgttcttaacaaagtcatatcgaagcttctggcaaaccgaatcaagactattctaccacgattcatttctccaaatcaataagcatctataaaggatatgttgatgatg

SEQ ID NO: 24646 - DNA, 1041 bp, Arabidopsis thaliana
cattctcttcaccagcctcatcattcttgtagtgccagcttcatccaggtttgctctcagatcctccctctcaccatatcacaaacacccaatagtccacacatacataaaacaaagccttaaatttggtttgctgtcgtaatattgcacatgttcttccctcttggcccgacttctgttgccgtatacggaggattcagtgccttggtattctgcggatacatagtctatgataccgacaacctcatcaatcgtttcacatatgacgaatacatcctagcatcagtagctctctacttggacatcctcaatctcttcttgaccatattgcgtatactgaggcaaggcgacaactgaaaggcataaaacgatgcttcagtgatgtgatccagtttataactataagagaatccaaaagcctttatgtgtgtatatctgatttctgtttggagaattaagtatatgatgctatgtggttaaacgattgatataaacaaaatcaagcaatgtcgattttcaacttcaaataaatttgttaattttggcggaattttgatgccttttgtcgtatccatttcgatattctgattgcttaagagcaaaagcaaacattgataccaaacgtttgaagatttatttaccatcatcgataaattgtttttactttgctctcctttttttttaaactcaaccatacacaaaaaaagcgacctcatcttacccaccgatccgccattacagacgaagaagaatttcaactgcaatctctctctgaaccatgagaggtcacgatcggattaacaattgtttgccggagaacttatcctcgagatattccggcgacttgaatcgaaaccgaatcgcgacgcatgctccctcgtctgcaagcgatggttatctctcgagcgatttagccgcaccacgcttcgtatcggcgcttcgttttctcccgacgacttcatctccctcctatctcgtcgctttctctatatcacctctatccatgtcgacgaacgtatctccgtctcccttccttccctc

SEQ ID NO: 24647 - DNA, 555 bp, Arabidopsis thaliana columbia
ctgtcactgtgaatcctgataaggtagtgaatcttttgctgcagatgtatatatttgtcattgatgcttgttgtttatgattgtttgtaccaatgtgtgcattaataagctaattctttcctttttgatctgctttaacagccaaggcgtggttgctttgagattcgagaggaaggcggcgagacattcatcagtcttttggtaagtttttcactctcatacttgaatgtagtatgccagttagtcgcacttatgtgagtgacttgttccagttggattgatgtttctcgtcgtgtctgtatctattcgcataacatagtttctttgatggtatactttaaaaagtgaaaatcaactttattttcttaagctcacacgaaattgaggctatttttgctgagtcaactgatcaccaatgaggttttgttagagcattcataaaatggcctttggttgtttgctttttaactgaatcaagttgagtgctaagttgtttgaaataagaacaacctagcagatctgattgttagtgactaggtgtcaataagaaatgtt

SEQ ID NO: 24648 - DNA, 428 bp, Arabidopsis thaliana
ttccataacccagcgtacgcagtgcatcagcatatggaccttgaaggttcaaattcccaatggcattggtcaaagcacgaccttggagatactccattgacaagtaataagtttgttttggatcaactttgttaaaatgaacataagtctcattccacagctgcaacacaacccaaattttatatcactctcacataaacacaaagaacacattcacacacacatatagattagctcctacaactgcaaattgagatggatataaccacggaaaaccataaatttctataccagcatatcttcatcaaacggaacttatgaaacagtccagaaattacttggttacctgaatgagacgatcgcgaagactctctgcggtacggtagatagcttgctcaggcccgaacttcaatggagagaaatgtgga

SEQ ID NO: 24649 - DNA, 344 bp, Arabidopsis thaliana
tttccagtaatcacattttgcgctatcgtgtcctccagtgggattggatcaactcgcattacgttctccgggataacattctcaccatcaactttagcaagaacctcaaaatgcattctcattgtctcaggctttgttcgccactctggaaagcttaaaccttcaacatctgcttccttgagcttcttttctatgccaaaaccaatcttcataaaggtttgagcagcgactttcgcttttaacaccttaaaggaacctttctcctgagctttcggacccaaaacagaggtcaatagtttctcaaagccaagtaagttagcatttgagccattgattgaagtgat

SEQ ID NO: 24650 - DNA, 317 bp, Arabidopsis thaliana columbia
cgtaatttcgcacattctccggctacgtacagccattccgtccgaccactcttcccatcccgtcttcccgcggttgtgctcatagtccggcctggagtagtagccatcccttctgcatcatcatatccaaaagatttggtatttttccaaaagaaaatgaaaaagatcttaaccggagataaagtaatatattccatggatcatacaatttatatatacctgaaattagaagagcaatgtataagaagagaaagaggtaaatgagcttcacggccattcttgtcttagtcaagtgctctctcttcactctttaattt

SEQ ID NO: 24651 - DNA, 446 bp, Arabidopsis thaliana
ctattttaagttcagcaacagcagcagtgatcgcttccttgcttgctttggcagctttcagttccgctacaacattacctctctcaatgacaatgagcctcgcagcttcaacatcagcctcagtaggcggagggttatcaatgagatcctgctccaacctctcagtgtaattgatcaaagttgttgcttggaacatttcaccagcaccttcacaatcacttgtcgtgatgataggagtgtgaatgtaaaggaaactatgctcttgaaagaaactgtgagtcggcaaaagcaagagcattacgaattcttgcaacagctgagatctgaaatcacaggcaaatatcaccataaatcaactattctttgattcaaacctaggaacaatcaaaacacaactcagtgaaagagataagaagtaataccgagttagttctagaacgaagatg

SEQ ID NO: 24652 - DNA, 744 bp, Arabidopsis thaliana
ggtaaaatctattcaaggcatctgcttcagtccgcatgccagccctattcaattctgcgatcattatcgtgtatgctttaaaatcgggctccactcttttgaacttgagtttatagaacaaatcatatgcttctttcaccatacaagccttgcacatcccatgaatcatgatagtatatgtaataatatcaagatcatttctagtcttttgcatatgctcgaatctgctcaatgctttctctacctccccattagcaaatagaccagctaacacaatgttgtagctcctaatattgggaatcagaccattagaagtcatatatccaaaaactcctagagcgagatctatcttgcctgcttgaaaatagcccttgataagagtgttgcaagagactgtgtttgcagccacgcctctttgaggcatgtcgtctaaaagtttaatcccatcatctaccctcgacgacttgaaaaatccatttgcaagagtactgtaagtgactacatttggggtgcaccccttgcttatcatcaagtcaagcattttaatggcctcgtctacacgattgtgcatgcaaagcccgtagataggtgaactgtaagtgaaaacattaggatctatagacatttggatcatcatcttgtacacactatcaaccttcgacagtttcccacgttttgcatatgcatcgattaatgcactgaaagtgataacattagggttgattttcttggagtccatttcgt

SEQ ID NO: 24653 - DNA, 702 bp, Arabidopsis thaliana
ctcttttagtctgattgatctaatacaagtggtctctgctgttaatgtttggtttggtttcctttttctgccatcatcttgtttagaatgcaattatcaatcaactcactgactggtactatctacttgtgatgacttaatgcaggtgtagatgttagcatgaacactcatttaaaagctgtgaaactcactctgaaagggaagaatccagttacattagaccacttaagtgtcaggggaaacaacattcgctattatattcttccggacagtttgaatctggagactttgctggttgaagacactccaagaatcaaacccaaaaagccaactgcaggtaacaaaacatttcttttttctgaactatgcctttgtttttgtttttgtttttgcttagactcatctttctattgttctctttggtatcaggtaagattccagcaggtcggggacgtggtcgtggaagaggtcgtggacgtggccgtggtggtcgttaagcattttgcagtaatcaaaagtctggtcctttttggtttgtaacagcaggattgtaaaagatctatcttgtagtgagatttggtgtcactaagacaaattcttgttatctctttaagttttcatgaatttgagatttgaaacgttattgccaaacatacatcactctaatatgttttattattgacttgatcactttattacata

SEQ ID NO: 24654 - DNA, 559 bp, Arabidopsis thaliana
tcagacatcattagatatatgcaagattcagtacaataaggtaaaaactgaagaatagagtgtctcattgaatttgatagtacactatagtaattacttaaaaagtgttgtgctttttggtttgcaggatgttggaaaagctgtgttggagagctactcaagagtacttgaaggtttagcttttaacatagttgcttggattgatgatgttctctatgtagacaaaaccatgagaggtagtgaataaagttgtacgtactagacttttgacaagagttctatgtttctgtttccctctcttgtaaagtaaaatcaaatgtaagatccttgaaaagatatacatagctaagagcaaaaagagagactaaagtgttcatcaatataaaaattcaggggaatgataacagtgaatttagtggataaataataatggaacaagaaactgagacaattaatttcgaattccctatatatacaacagggttccgaaccagtatgggtccgggggatatgccaaaaaagcaaaaagggttagtaattaaaatacaaagatctgaag

SEQ ID NO: 24655 - DNA, 804 bp, Arabidopsis thaliana columbia
agcttgacgttgattccggtttggacttaaagtggtgaatgttaggtttattaccaaattggtgaacattgtttttcattgaataataaaacagaatcgtcactaacagttcttaatcttaccaaactggatcacgaatcgattttgttacaatcattgtccaactacggaccaacttaacttcacgacagaaccattacaacaaaatcgaatcacatttgatattaaatctacttttaatcagctccgattacagtaattaaaaattctcatcaccctctattattacagaacacaactgttgctaacagtctggcttatggataccaacaaattttattgccagcattgaacatcacatctgacttaccaatcaacaaactccaaatacacaaactccaaaaccaaactctaataatttgtagtcaattatttggattctggaagaggtctcttagtgaaactcatcttctcgtagtatcgaattgagagaagagaaagagtgagtttaagctcgtccttaccgaacctagcacgcggattgggtttagagagaggccagaggtaaagagagtggagtcttcggaagcctccaagcgccaacacaacagatctgagctggttctgcccgcagccgatgttagtccagtgacgagtacagatcagctcccaaagccgctcgtcttgtgccgtgatgtgccagatcttgctcacgcaagatgacatagctaaggtctttgcgtcgacgtgtttcaacacctcgtacactagattctcgtctaaattggagaatgcgatttcttc

SEQ ID NO: 24656 - DNA, 559 bp, Arabidopsis thaliana
  unsure (1)..(559): unsure at all n locations
tgagagagatcttagatcggtcagttgaccaggtttcagtttcgggaagactgtgaaaaaataggatgtcatcaagtagtccagaacagcatccccaagaaactccaatctctgaggacccccaattagagaaatttggttaccatagatggatattatcgagagaaatgaaaaataagaaggaaacacaaaaatacctggtagcagcctcctccatgcctgttgtaagatggatggataaaggcttgtacaagtagacctttgtggaggaacttatagtcaagctggttttcaagggtctccaaattattgcgagtagtgaggggcaagtagcgcctgcttgcaatacaagcatcttgtacttgcaaggattcaaaatcaacatttacaccaatccacttcagaaatttcacagcacctttgaagccactgtcaactaagaaagctccacaagagcctcaaccacatcagcaattgttttcttgtaaaccaatgatggcctttgtacatctgattcaccagtatttgcnccaagatccaagatcctattaaggaatga

SEQ ID NO: 24657 - DNA, 887 bp, Arabidopsis thaliana
atccccctctttatttttcaactctgcacaactcgacagcaacaatcttgatttctctgcagtagcttcaacaatctccttggccattgtaaataatagatcatgcatctcaactcgaccatcacacacgccaatcaagaatttgtctgcgaagtctctaaattcttgaccagattccgcggattcagggtcataagaatcaagtaaacttctaacgtagctctcatcttgtgacctaaagaaataagctatatcaagaaacgcatccttctgctgctcgtttagttcatcataagagcttcttagcttctctctgatcgttggattggaatgctgtgccagtgtcccaagtcttgtttcccagtgagcctcgtctttcccgcgaagctccttaccgaattcctcgagagctaaggggttgcctcgtgcaaaatccacaaactttctagatagctccatgaaatttcttcaatattacaacagacttgagccctaaagagctctaagccgtctctctcattcaacccagggacttcataaagatcagtgactaatccctcagtcaatgacttgtcccgtgtcgtgatgacgatcatgctccccttcttaatccagtcgcagatacccttaagtggttcggatatctgttttttgtcactcacatcatcgaaaacaatcacgactttcttgtcgattaagctatccttccaaacctcaagtgcatttgtatcggtgcaatcttgaatatccagcaaaccttccacaagtctcttctgtagccactctgatccttgctccgctgacatctcacgcttgaactcgatgaacacacaatggttgatcttcttcttaagcttggcgaagagtttcttggcgagataggtttt

SEQ ID NO: 24658 - DNA, 604 bp, Arabidopsis thaliana
gtgaacatccatctgagggacctccaatctttatcagcagcaacactaaaagagaataaattgttgtcaactttgcgagtggagcaaaagtttctttaaaatcaataccctccttttgatgattttccataaccactagacgagccttgtgaagcttaagtgaactgtccgatttgaatttgagtttataaacccatttgctactgatcactttgtcccatgtggtaactctataatatctcaagtatgatttgcttcaaaagcatcaatttctttttacatagcttcacatcatttttaataaagaattgcatccttaaaaagtttgggttccttgctatcaagaacatccaccaaaaatgctatgtggtctactacaaatccacaatctattaaataatttgaaaggagatataggaccttaccataaaccaaagttgaggaagttgagttgggaaaagtaagagatagaccgtgagaagaagaatgtcttggagggataatataatctttaagtaatattaacaacattttctttctcagacctttgtccaatagttcaggaagcccgaagaggcggatttgacctggccacatattgagg

SEQ ID NO: 24659 - DNA, 1271 bp, Arabidopsis thaliana columbia
tatatttattatattgtggttatctacaatctacttagaaatatataaatcgagattatgatgatggtatttttttttttgttacatatacactcaactaaaagatttacacaaatgcataagctacatcatattttattaagaaataaaattgacaacaaaatagaaaactatattatcgtaagcaaaccctaattataagtacctactaactaagaaaaaaaagaagtagaaaattagaatctgaacccatcaaatgacttttggtaacatgcatgtacctatgagactgtaaattatcattaacgttgtatcacacatggagttaatttcatgtggagttcattcccaaaacgccaaaagagacttcatgtggttgaagacttgaaggtttagtacagagaacaccaatagacaaaaagactacaacacctcgattttgtttagcttagtctggttcaaaaatagacagtaatgccaaagaccaaaccaatcacataaccggacgaaagccagtggttatacttatactactctacgtttcgagatttggaactggattagtgaaagaaaaagataaaccttggggcttcatcttgcaagcgtattttacaggaacaatggcaccggtatggctacaaaggctcacaatagcaggggcatgcccataataactccgcccttcgtcaacaagaaccactgggtcctgaggcctccggtgccacaccattttctcgggtaccaaatcattcacaccggctttttcccagtaatgagtgccgcgccagctctcatatttgaacacaccacataaccgagctttatgaccactcggacccacatgaacctccttacatcgtttgcaaacttttgaaggataaacaagcaatagtttcttcacaccagctctcactttctcccacgccataagagcgtttgccccaacatatttgagatctccagcgggtaaactcctgatatcttcctcagagatttgcgggttatcgtgaatttccgaatattgaaggatttcttcaggatggatggctcctgcttgacaacatagttccaagattgcgggaacacgatcataatcaaacctctcttggtgtctgataacaccttgagagatgttgtgtaagtgataggattcaactggcacaagtatatcgtttatggaacctggaacccattcgtgtagcctattgttaccacgccgtatataactacgacatgtctcaatcaaatgtccttctttgccaacaaacagg

SEQ ID NO: 24660 - DNA, 591 bp, Arabidopsis thaliana
catagcttcattcttggcacttctcatcttcgtggccaacttcttgtacgaacacaagcacacgctctttgatgactccgaaaattctttccgtggaaagctaaaatttttggttagaaactttgatgagaaagacataaagtcgcatatgttcaaggagaatgccgttcataatgtgagttcacctattactcaaggaagttcaagccctttgaccgatcagagcactccattgccgcgaagtccggaacagtatagggaattagagctaagaagagtgtcttccatctcgagcggtgaacttttcactacgcaatcagaacaagttgaagatgaggaatctgctataattcaatgtgaaggtgaatgatagagagaagttgctaaagtgcataacaagttagccagtgtggttaatgctttcttttaggagtactttcttttctcaacacttgtattcctatgtttgtttcaaactcaatgtcatagttagatttctgaatttggattctaatcttcttcctttttgagttatataaaaattagggagattatgaaaataacgcaaaattttataatctgcaaaataac

SEQ ID NO: 24661 - DNA, 600 bp, Arabidopsis thaliana
tgatctatgtgatctgtaacatttctagttggtgtgtctttgattgccaggggtcaagcagagaaggaattcaaagtagaagtggaagtcattgggcgagtacgacacaagaatcttgttaggcttttagggtattgcgtggaaggtgcatacaggtatatataccgctgctcgtatctcttttccggtgttacaaaagcgatgtcgtgacctaatgctgggttcgttactataggatgctcgtgtatgactttgtcgacaatggtaatttggagcaatggattcacggtgatgttggcgatgtcagcccgctaacttgggatatacgtatgaatattatactggggatggccaaagggtaagtctggaatagcttttgagttgtcctctatgtttataagctattgttgtgtgtaaacctttgttatatctgtagattggcgtatctacacgagggtcttgagccaaaagttgttcatcgggatattaaatcaagcaatatcttacttgatcgccaatggaatgctaaggtttcggattttggacttgctaagctcttggggtctgagagcagttatgtgactactcgtgtgatgggac

SEQ ID NO: 24662 - DNA, 687 bp, Arabidopsis thaliana
cttctcagccattcctgctccaggagcatcactatcaaacgcaaacgatttgcggctcaagtacatgtcctgaagctgtttctcatcgttccatgacgagttttcaacagcaagactgatgttggctgagtatgaccctgaagcgtttgagaaaactcttgtcgctgcctctctaatatcaatgccaagcgcctctgcttgttccaacgcgtgtttccttacaaaattttgctctacaggctcatctagctccgccaccatcttgatagctcggtcaagaaggttcatctgtcaagataattcaaggaagaaacaccatgagagaccaaccaacaagaatctaaatgaaagaagagagaaagcttttatctggttacctggttgataaagagatcacggaagacccctgagcagttaacaactacatcgatcctcggccttcctagttcttctaagctcacaggctcgacacggttcactcttccaaaagtatcagcaattggtctcacaccaatcatccaaagaacctgcccaagagactccccatatgttttgatgttgtcagttccccaaagaacaagcgcgattgtctcgggatatttcccttcgttttcgagcttctgtctctctaccaacctctcaaccacaatcttggcacttgccattgctgctgttgtgggaatagcc

SEQ ID NO: 24663 - DNA, 760 bp, Arabidopsis thaliana
  unsure (1)..(760): unsure at all n locations
ctacagttatctcaatgggaagatgattcggattacttactcttctcgtgactcttctgcccgtagaagtggggttgggaatttgtttgtaaaggtatattctttgtttgatgtctcttatctagcagcttctctttttgtttgattgcctaattatgtattctttctttatgtgaagaatttggataagtcagttgacaacaaaactctgcacgaggcgttttccgggtgtgggactattgtgtcctgtaaggttgctactgatcacatgggtcagtctagaggatatgggtttgtgcagtttgacactgaggattcagctaagaatgctattgagaagctgaatgggaaagtgttgaatgacaaacagatttttgttggaccttttcttcgtaaggaggaaagagagtctgctgctgataagatgaagtttactaatgtttatgtgaagaatctttcggaggcgactactgacgatgagttgaagactacttttggtcagtatggtagtatctcgagcgctgtagttatgagggatggagatgggaaatccaggtgttttggatttgtcactttgagaacctgaagatgcagctcgtgctgttgaactctcaatggaaagaagtttgatgataaggagtggtatgtgggtaaactcagaagaaatctgagagggacttgagttgagnggagatatgacaaggccaagtgatggtggaaacaatttgatgggttgaatttatatgtaagaccctgatga

SEQ ID NO: 24664 - DNA, 716 bp, Arabidopsis thaliana
ccctagagacatttaaaactcctatttttgggatatttttaactttactattatttttcgtgaaagatatttgtgaaaaattgttgaatgaggatggtcaaatagatatacccagttatccacttacattattttcatgtttctttttatttgtattttcattttttttgtggtttcatttcttaccttccaaaacttccgaaattattcgaaattacgccactactctcggtcaacctcacgacgatgtcgttccttttgtacttggcccaaaccgaatggatccagtccactggcagttccaagccacatgttcaatatgcctacccggctactccgaattctggatctatttctgttgtcggataaccccaaaagcctttccacaaaaatttagtagttttcctaaaatttagacgttaacccagtaatataggattccacacgtggtggcatcgatcgacaactataaagtaatcaccgtttttactccaaacgatgcctgcgaatgctatgttgcttagaacttggaagagtggtcaattgtttcgtagttgggtcatacttcattagtctaccgattctgtctccactcatcgtactatccctcaattaatcaattaaattaacaattacgagctaatccatcatataaacatgctccttttattaatataaagtataaacatgttctttgtttaagataatataagata

SEQ ID NO: 24665 - DNA, 501 bp, Arabidopsis thaliana
gtagaatttgggacaacaaatagatggtgggtcaggacaaaatctcaagaactacaagtttatttctcaaaccaaaaaaaatggtgtaacaaggatttgaattaggacgaggttcttcccactgaattggcaaagtctataaaaagacccaaaaataatacaatgaaaaggagaaaagacagaagcaaatattggagatcactaagatgcgcatgttgatcactgctgggcacattgcacacgctgagcaccgcctgggtgatcttcctcatcgtcatcataagcctctctttgagcttgcgccttccttttcatctcatcctcaatgttcacatcatgcagagtcgtctcttcgcagtcgtctatttccatatcgcttatagctgccttggttggctttggcaaaactgcttcaatggcctttgtctgatccgggctcagcgattccgggaattcaaccgtgaagtgaatgtatagcttacccttcatgaacggcctttg

SEQ ID NO: 24666 - DNA, 1032 bp, Arabidopsis thaliana
taacaactatatcatgatctattcaagatttttacagaaaactcgtatcgattattataagaaattccatagtaaaaaatgaaatatagtctaacattgtgtgttcatgttataattattcaatttaagtccataataattgttgatatattatattcttcgtataaaaaccctattgctacataaatgataaatccaatatttagaaatttaccgggttgttagctgcaactccaccatcaataagattgtattctttagcgtttccgtttaaatcttcaactttgaagaaatgggcaggcaagtatgtaggggcagctgaagttgagatggcaatgtctgcgagggttgcgtccttgagaggatggttttttacctataaaatagtcatatatatattaaaccaaagttttgttaattattatattgtaatttcacaaatagaacaagctataaacaaacctcataactactaaagatagtaggttgaagatgcttgatatcgaacgttggaatgacaacgttggtaagtgtttgactcaactttgtatcacccaacttagcgtggataagctgatgaaggtatttaccgtcatatttaggaccagtcaaggacttcacgagttttttggcggctgagaatgggaaatgatcttgagggaagatcttcggacattgctcaagatagaaatctttaatttcagacgctgcaaataagggtcggccttccttattaggcgcggtgagcatggctgtcactagaccaccggtgcttgttcccgctattacatcaaagtagtctgcaagccttgcttcttctccatccaatttctatgcatccatgtatatatatgagttaagaaaatataattttacaaacataatatttgtatagttaggtagcacatatatacctggagttcggactcgagaaaaccaaggataacggcagggattagcctctaatgccaccacgtcgatgctgaggattgtaactaagtttcataggtcgggggctggagaggagatttg

SEQ ID NO: 24667 - DNA, 510 bp, Arabidopsis thaliana
cgtatttgaagactcggatgcatacgttgatccatcatccatagtttccatcgatcaggtttgtctcataacattaaacaattccaatcatttatatttatattttatggttgtcttattaaaatatgttttgtattttcatatagggttcccttatgctcactaatagagtagatctttctgatgtggatttgttgtaacgcccgtgaaccggaaaatcggttagggtttgtttttaaatcatccggtttaattggttggcttaattggaaaccctagagtgtgcctataaaagaaggaaactcgaaattagggctttagttagccacttttcattttgtaaaggagaaaaagagagaaaagaagaaggagcagaatcgttagggtttgagagaaatcagtttcgtcatatcaaattgtggtaaaaggtaacgaaatttggtagagttatcccaagtcctttatcgttattctccagttaacaaattggatttggattaaattggttga

SEQ ID NO: 24668 - DNA, 616 bp, Arabidopsis thaliana
tatgaaaatacaaaaaatattttaataagacaaccataaaatataaatataaatgattggaattgtttaatgttattagacaaacctgatcgatagaaactatggatgatggatcaacgtatgcatcagagtcttcctgtatgatttcatcagcaatgttaccggtgtagactctggcaacaatgaatgaatcatatccaccaaatatgttttgcctttgaatacacaatagaaactgaaaagtcatccctttcaaaccattgatcacatcaggcaaaacagttgggtcttcgatctacagaaaaaatctactctattataacatgaacgtagtcattttaatgaaagagtttatttttaaaaaagcgatatacctcatcaaatgaaccatcaagcaatttaggggcagtagtgccaagaatatccattgcatgactatcgaataacatgcatctaacttccctagtttgttccataatatggagatgtaaccaaaacctaagagttaaataggattattatctcttaaacaccgaattataattcatagatcattcaatataaaggttcacaaaagactcacttggcatcacagattttgcaaaccattgcatat

SEQ ID NO: 24669 - DNA, 650 bp, Arabidopsis thaliana
atttgcaaagaagcttgaagtgcagttgactgagacatataatgagatcgatgaactgcagaagcaaatggagactgcgaaagcatcggatatagattccgtaaatggtgtgagtttggagttgaatgaagctaaaggtttattcgagaaacttgtggaagaagagaagtctttgcaagagttagtggaatctcttaaagcagaattaaagaatgtgaagatggagcatgatgaagttgaagcgaaggaagctgaaattgaatctgtggctggagatcttcatctgaagcttagcagaagtaagagtgagctagaacaatgtgttacagaggaatctaaagcaaaggctgctttggaagatatgatgttaaccatcaatcagatatcttctgagactgaagctgctcgacgagaagctgagggaatgagaaacaaagctaaggagttaatgaaggaagcagaatctgcgcatctggctcttgaagactcagagctacatctaagggtcgcgttagatgaagccgaagaagcgaaagtgtccgagacaaaggcgcttgaacagataaagtcaatgtctgaaaaaaccaacgctgcacgtaattcgacttcatctgagtctggatctcagagcatccactgtctcaagagga

SEQ ID NO: 24670 - DNA, 1383 bp, Arabidopsis thaliana
gacattttcgatttcaaatcataacaaaacaaaacaaaggttatgtactccttgcatttgctcgtcgcattcgttgttgttactcaatcaagaatcaagaatcaaacaaaagcaattctcatttctcaaatgatcaaaagaagagaaatgtaacgaagacaaagttactgtatatctttcatctgctctgatctaaactgatgtatagtcttcctctattttctaatataattagatgtttcttaacatacaaactctataaactcttgttttatttttactggtcaaggccgcaataatcagaactctctataaactcttgttttcttttttatgctatacaaaccagttaaagagcctctgttcttccagtcttgtaccggatctcctccagtctaaagtttgattagcttatttacatcctgcaaagtaactaaagcccaaatcatctgacgagataaatatcggtattcgttcatcagttatcaagattctggctgatgagatctcatgaccagtgtaggcctcactgatccctgcctccccatttcaaagttcccagagttgctgcactgatcctcgtatctaagcagctgtacggttccatgtgacattgggaaaaacctcatctgaatagcagagaagatgaagtaaggcatcattgtcgatagcactacaaagagagtggtgatccagtacgaaggcgcaggtgcaagagcttcaaggaagaccatataggcatctgtagacattcttattggaagggatccgtacaccatcaggaaaaggtaccatataacaacggatccccaaacgacaacatgttggatcaatgtgaagtaactgatcgtcaagaccatctgcaaactcacaacccacaccacacatgtgtacatcgttccccctagaatatctctccctgcggttttcccttcgtggttgaaagcttgagattcaagagaggttttgcacagaaagaaaatgattattgcgctgcagaagccatggaacatccagcttagtatccggcgccaactaaataggagattctgtacaccttcttggtacaatacggggaactgtgacagcaaacaaagcaaaactttggttaagaaattcacttgaccgctgaaagattaagcagctgttttgatttgataaatatataccttgagacaaaacggtgcagatacatcctggtcgaagatgcccaaacaaattacaggaagagacgtgaaaaagacactatatagagatagatccagtcattgtaagccggtgtcgctgaaaatgatgtgtatgcccatataagaacagagtgaaaccaaatgtgatgttcttgtagaagaaataccaaatctgcatgtaagacacagatattga

SEQ ID NO: 24671 - DNA, 540 bp, Arabidopsis thaliana
ttaattccgttatatatgtctgtgagtctgtgacatgtaattaaactagtctcgatcctcttgatgcttcaggatctgcatcgttacacttttggacgaagacatcggtttgtagggattcaaattcccccaaataaccaaataaagatgttgcgtatcatgcagtaccaaggaagtgcaaccgtgttgaaacacattagccatttcttaatgaatatggagtgtcttgaagttgtgaaagtttatgttgcacctacaatggatgacctcaaaaagatgcagctcacagaggatctgttgaagcttcccgcagcttcattagaactgaagatccaagtcgtgtgatcatcatcatccaaaagttatttataggtcttcaaagtaaggttttttgttttagtgatagtgatttattatttcttatcatgcaaatcataaaaactagaaaaaaaatagaaaaaaaaaacttggtttgggtttataaagcttaggatcttcaaagtacgttgttatgatttgctgaacaatggtctttaaagt

SEQ ID NO: 24672 - DNA, 775 bp, Arabidopsis thaliana
acatcatcgccgccgtaatctcatcagttcgtactctccgccgtcatttctcagttttgccgccgcgaatccagaaatgtctcgtccctctcaccacagctctctcgaagttatcggcggaggaagtgatcgtttcttaccgtcgttaaaggactcactcgctaaaccgtacaatgcgtttcctctaatcggatttaaccgccacgtggagacaatctacgcatctttctttcgttctgttcctttcgttagactccgccgtgaatgtctccgaactaaagacaacggctctgttgctttggattgggtcgccggcgaagataggcactttcctcctgattcaccaatcctcattttgttggtaacactcaacatttcaaaaattcgattttgattttgtattgagtttaaaaatcagaactttaaaaaaatgtgtagccaggtttaacaggaggaagtcaagattcgtatgttagacatatgttgttaagagctcaaagtaaaaaatggcgttgtgttgtgtttaatagccgtggttgtggagatagtcctgtgaccactcctcaggttttgatctttctctgctctttcttggttcatcttagattcataaagtagcttcctttttgtactgtgtcatggtctggtgatgatagatgaatagtgccaattagcttcattttgttactgaagtattatgatactgctaatgcagttctactcggcttcgtttttaggagacattggtgaagtgattgatcatgttgttgataaa

SEQ ID NO: 24673 - DNA, 553 bp, Arabidopsis thaliana
tgcagaatgtctttttctttagaatctctgtttattaaaaagaagtgggtccgttcagaaagaagaaagagttactttttataaacaacttgtctatttctggtaaaggtttcaaaattccttcaaatcaacccaacacaatgaatacaagatggggccaataggaatagtaaaacaagtggtcaagttagtaactcaaaatgcaaattacactctccctaaccaaacttaagacaatgatgatcagacagagaaactctacttgaaacaaacatgcagtatagtggatgaagaaagagtacctgtttcgccatgctacaagctttctctgaagagttgagaatctcgtagtaaaacactgagaagttaagagccaaaccaagcctgatcggatgtgtaggtgctagatcagcaactgcaacgtccttcaatacaaaaacccacgaatgagcaaaaatacatattttcagaacaattatatattactaagacatattagggaagcaattgatcttaagcccaaatagtaaaagttgactacttctaacgatag

SEQ ID NO: 24674 - DNA, 674 bp, Arabidopsis thaliana columbia
ttttgtttacacagctcaacgtagagaatctttaaatgctcgagaagacagagttgagccatgtcatctaagctcttctctttactacggtggtcaagacgtatacgctcgatccaccaccaacctaacttaccctccagtgagtcttcttaacttatgcaatgatttgctaatcacttccaaaatcagaggacttgactgattagaaaaaacatctttcaggttaagaatgaccgtagaagaagcggagaagacgacgctaatggacagaacccgcaagatgtttcaagaggaaactggtggcaaggttctctttattactaaagaaccacttcctttagtttctttgtaaatctctccaggaacacctgaagctcaagccaagtactaatatctacttaaccaagactttgtatagataagtttatgcagacaaaacaagttattaggagatttctaggtaaagtagtaatatcgaagaattctcctagtagtagtgtcttaaatagacttcactagtacttgtgataatcacctgtaacaatatttactctgtttttctctgactcgtggcaacaaagtgatgagatccttaggctctattacgatacgcagaaacgtgctgaaatcctacaatcaagtccttgattagactgaactatagcagtgttata

SEQ ID NO: 24675 - DNA, 639 bp, Arabidopsis thaliana
tggaagattacgagcgaataaactcaaactctccaacacatgaagaagattctgatgtacggaaaggtccatggaccgaggaagaagatgcaatcctagtcaacttcgtctctatccatggcgatgctcgttggaaccacatcgctcgttcctctggtatcatcaaaacatcaatctctaaatatacatatacacaaaggctttatatatagataaacttatatatattttactcatatatgtgcagggctaaagcgaactggtaagagttgtagattaagatggcttaattacttacgtccagatgttagaagaggcaacatcactctcgaagaacaatttatgatcctcaaactccattctctttggggcaataggtacacactatatatctcaaatgttaatattttgctattctatatgttactagttaagtatgttattaatatatgtcatttttttcaattgaatatataaggtggtcgaagattgcgcaatatctaccgggaagaacagataatgaaataaagaattattggagaactcgagtccacaagcaagccgaacacctaagatgcgatgttaacagaatcttttcaaggagactatgagaaatgtttggatgctgagattagtgga

SEQ ID NO: 24676 - DNA, 508 bp, Arabidopsis thaliana columbia
cacaatcaagaggaaccaagtaaattgcatagcttaaaagaaaagaagaaagaaaattctcttagcatatgataagtaataaatccccttttatcatatgacaagggcaagttaccaagccctaatgtttaaaccggccatagcatatgataaataataaatccccttttatcaaaattcaagaaaagaaaaagaaaaaaatctttcgttacttcgagactaatacatatccacacatttcatatatgtatcctatcttacacgtatgtatatatataagaatatatatatatatatatatatatatatacacatatatattcgttatgattacccaatccaatagactatgtatgtatcgtatctctatatacatcgatcattgatgatgatgttgatgattaattgatgatcatttgggagataagacatcaacgagacactgcatgaccttgacctgcatactaaggcacttgatgtcatgagccgtctcttccatcagctttga

SEQ ID NO: 24677 - DNA, 1350 bp, Arabidopsis thaliana columbia
cacgacaattgttatggccaatcgagaaagagatcgagagcttctgattcccgtcgctgatttcggcgacaaagacgatggttcttcttcgaagccttcttcttcttcctctgcttcttcttcgcatcaatccggccacgaggtctagtttttgtcacctgatctaaaaacgtgttcttcgttttctcatttcaagattcatgcgaaactaacagtagaattggatgatagttattcatagatttggtcgattctgtctccccttagttcaaaatcttggaacttgttttgccctagattcagtatatcacaagaacacttgcttagataagtttggtagttgtgattgagtagagtatgaatttgcattccaagttgttgtggttggaatcattcagattcttgagtctctatgtcatgctaattcatgttttcaagcatatataacacataggagcattgtgatctgatgctttatctatttttctgcagactttaagcttgttcattaggggctgggcgtcaaagaagttcatgacaggctggtaaggaagagtttactgaaattttggcttgatgaaacttgtcacatattcaagatttgtgctgatagtttcaaatctcaattgctttttgtagtgttatcctacttcctattgcaattactttctatataacatggtggtttattcactttgtcgatggattcttctctccaatatatgcacaacttggaatcaacgtatttggtaagaatttgagtggcccttctttatcgaatgaacaatttgatatcgttccgtttcccacaataagtttgattatggttttttgtaggtttcggttttttgacttccattgcattcatcttcttggttggggtgttcatgtcttcgtggttgggggcatcggttctgaacttgggagagtggtttatcaagcggatgccgtttgttcgtcacatctacaacgcctccaagcaaatcagcactgccatatcgcctggtctagcttgcttataaaaatcttgttttgcttctcaacattaagttgatctcctatctcatcttgttcttatccatttctcatcacagatcaaaatacacaagctttcaaggaagttgcaatcatcaggcatccccgtgtaggtgaatacgcatttggcttcattacatcaactgttgttctccaggtgagtgaaattgctttgctcaacgattttggtaaaggatacgaaggcagatacaatctcgaggcatggtttactataattacatcatttgtttatccaatgtaataatgtccttcggtccttgcagaactatccaaccgaggaggaactttgctgtg

SEQ ID NO: 24678 - DNA, 349 bp, Arabidopsis thaliana
gcttagatctatctattcaatggtggaaaataatgagcaatgcttgaagtagaaccatcacctttgcttttaccggtgttaaactgcttattggtgcgtaggaaactcctgagttctcgttgaatctcaaccggtaattcatcgaaaactgactgatcgatttcatcagtcttatatccccaatctgtttctctactctcttctacctcttgattcacttgactattatggctgctgctacttaactttgctcttttactggctgatgacactgtggaatcttcttgagtctcttgttttgatggaggtgttgcattgtaattcttaaagatatcgacaattgaaggca

SEQ ID NO: 24679 - DNA, 574 bp, Arabidopsis thaliana
  unsure (1)..(574): unsure at all n locations
gaagaaagaagaagagatcgatgaagaagctttgaaggagaggaaaagagaagagcagttagagaaagctcggttagtgatggaaaggaagaggaagctgcaagagaaagctgctgctaaagctgctataagagctcaaaaggaagctgaaaagaaactcaaggcaattatattatcttgttcccattttttcaatgtatcattagtttgtttcttatttctttgtttggttttcaggagtgtgagaaaaaggcgaagaagaaagctgctgcaaattctacttctccttcagaatcagaccaagtaatcaatgatgaaaaggttaggacattagcagtttcagggaaagagaaacaccaaaaggagagattgttgtttcaaagcagagaagttttaggtacaaacaccgcggaagannaccgaagctctccctaaggccatcctaaaccgtagaaaggctcgtcgatattgggtttggggactttcttctgctgcacttgcggtctcgctcgtccttgtggttttcttctaaggtaaacttggaaatgaaagagagacattagaaaggttttga

SEQ ID NO: 24680 - DNA, 631 bp, Arabidopsis thaliana
tctcataactgtaaactctatgatcgattatgagcattcttttaatgtctttaatagttgcaaattgtgttgattaatggtaatgtgcgtccccattgatgattgattatggtgaatgtgcatgcaggggtccacttccaatagagaacatcgttggaagatctgtgttccggtactggccaccgagcaaagtatcagacaccatataccacgaccaagctatcacaaggggacctgttgcagtttcatgacaaaagaaagttggatttttcttaggattaaagcacaagattgtgcaaaaccagtctggtcagaattgggtagacttggaattgaaactcaaaaccgttatgatatctgcagatacatactgtatcatcgttatggatcgcatctggttcttagctgatggtcgggaagccggagatgttacgtgtacaaaaggaatggaagatgcaaagaaaaggaaacgatttactgtgattgttatgtgtgaaaaccctggacaagatactgtagtaaagccataaaggcaactgttaaacaaaagtgtgattttttgttgttatgagtttgtactatagaatcgtgtaaacctcctttgtgttgttgtatgtaaattgggatattg

SEQ ID NO: 24681 - DNA, 574 bp, Arabidopsis thaliana
tggactagtttctccaatgcttctacgaacttattaagataaccactcattagtccatgacgaagcagagactccttccactttacgtggttcctcctcgcccaattcccgagctcgctatctctgtccatcacagacctgaccgcaccgctcaagctctccttcgaaaaccatcccgtttcctctcttttcacctctaccgagaccttgagttcctcgctcatcagtcttgtgttcaatatttgctcacccaaatgtggaataaacactatttggcagtcattcactagagcctcccacattgacccgaaaccacaatggctcacaaagcagcctattgatggatgagctaatatcaatggttgctgcacccatcctccccaaaccactccacgtgctttaacctctcttcaaacccttttggtaaggcttcttggattgtcgatgaaccttttggtggctttaccgctacaagaaatggtaaacctgtcagctccattcctaaacagagttcttggaattgatccttttcaagaatgatttggctgccaatgcacaatatattactgatccg

SEQ ID NO: 24682 - DNA, 395 bp, Arabidopsis thaliana columbia
agcgaatgtgagttgaaattgtgtttagatgtaacaggctccaattttgctataatatgcttaacatcgtctaaaactgcaggaccatacatatcagagctctcagactcaacagtaggtgacgcattaggaacctattaagaggcaatcaaaacgactagagagcaataaaagttcgtgaggcagttggaatctatgatcagatgacaaacttgataagacggggtccgtagcagttttgtcttggccaaagtccacagagtatatgtaaccgtgttagaggtaccttgtgtgtgctagtctctgagacaaaaacctggactaaggggaatgttaaaggccgatgcatcaacctttgtatgcatatccttaacccatttcatcacctccatgtg

SEQ ID NO: 24683 - DNA, 613 bp, Arabidopsis thaliana columbia
  unsure (1)..(613): unsure at all n locations
ttaacatatttcccttaacccaataatcaatgaagtcttctctgcaaagaagttggcaaaagcataatatataacatgtgttaaacaattcataggtatttatattatgatctctgaactttatatacatttcgtttcactaatcaaactctgtagctaaacatgaaaaaatttgcaaaccttttcacaaaaccagtgttattggtatcaactttcttgaaaatggaggtggaaaaaaatgatggaactttgcatatttcagtagtgactaatttaaattctgagaaacaaaagaggaaattagtcattataaatgagatatgaagatatatctaattaaaagagaaattaattaccaaccttggagttgcaaaccatcctcgtggccatagaaaagactattgatcttagctatgcactgctcttttagatcatttggtggtggccgccatcttcaaagtaaaactatacattacatgaatacataatagaatcactttagtacaacaaaaaattgccgagagagactatatacgataataaaatcaaaggtggatcacaatgttagacctgaggaatgagttctttacatgatcaganactctttgagagg

SEQ ID NO: 24684 - DNA, 588 bp, Arabidopsis thaliana
catggagaattcacaatcgattttaaacatttttcaacaagtaacaaatcatatataggttagtgccatgactactagttactaactagtacctctggtgatgggttatttcactcgtcgttttatttttggatttgagtttgggaaactaaaagtgaataataccaaactcgcatccgaacctccaaagtcattaccatatatgataaatccccaaaaagacactgcaaaatgcttaaacacatgtgaaagattttatgattctcttcaagtatcgtcgaaatcaattaagctttcattcctccaaaaacttcttaagatgtttcaaccataccacgtactttcgcgtgcctgtcgtcatgtacttgtacaaggcaaattttgggctataatcaaatatcatacgcaaataactgtgtctgtaatccacgtttctgcaaaaggccatgaaagaaagaaagacagaaagaaagaaagaaaacaagattaattataacatttctgctgtgctcatgcctatctgactatatatcaaacattatggtgtttcttatcacaaagctacttggaattagcaacaaacacacg

SEQ ID NO: 24685 - DNA, 555 bp, Arabidopsis thaliana
  unsure (1)..(555): unsure at all n locations
ctctaganaccctagagcgatgaactcgaagccacaatttcaatgtactcgactagtttactcgactggtatactcggccggtttagtatttgcgcttattgaaactaacatattgacgtttagtttgagttgtatttttttcaggaaatcaatatgagtaactacagtggcgagtcctctatggatgcggattacaacgtcgaggaagctgagtcttggtcaactagaccggagagagagcaacaagcttatgagagtttcagagctgacacccaacgctcagtagctcgacgcaatgaaaggagggctgagattgctagaggaaaaagtgcaatgaccagtagatatgcattgatcgacgaagatattgacgtcgagtatgagcctgagtcatggcccagagagacgaagctgttgaacaggcctgatgaagttacagtggaggagtacatcagaattttcgatctgaacgacttctggggaatgaggtacccctgttatcagactttagccagctggggctactggaggacgtcaacacttatttgagaagt

SEQ ID NO: 24686 - DNA, 1064 bp, Arabidopsis thaliana
tgaaaatatggggaagaagcagggtcaagtgaagatggaggcgccaaagaagcgagagtggataagaaaatcaaaaaaaggattctctttttctctctttcttctcacttctctctgtagttagtgtgtctctctcgccggccgatatggcgcctccgtagcaaactgctgcttctccgtcctcaatgcctccgttaaaattcaatcttcgtccatctcctcaccgtggtgtttcgtgtccgcatcgtcgttgactccccgagcttcctccaatattaagaggaaatcgtcgaggtctgattcaccatctcctatattaaacccagaggtacattccccacctcataaactcttcaatcaattcccccttcgttttttcttcttcttacatggttggaattattcgttgcagaagaattacccaggtagagttcgagatgaaagttccaatcctcctcaaaaaatggctttcaaggcttttgggtcacccaaaaaggagaaaaaagagtctctttctgattttagtcgagaccaacaggtttgcttccttctcctagtcgggcatttgtatttcctgtggtctaatgccatttccttgtgcagactgatcctgccaagattcacgatgcatcctttctcaacgctgttgtcaaggtttcgaaatcaaattcgctttcttccttaaaattcactctgcttgcttttgaacccacccgtgcttctttccaggtttattgcactcatactgctcctgattactccctcccatggcagaagcaaaggcaatttactagtactggaaggcaagcttttttttttttaatcacatgttccactttttctcgcttttaggttgtttcatgactccatcacatcttcttcaactgcagtgcttttatgattggagatggcaagctcttgaccaatgcccattgtgtcgaacacgatacacaggtttactttccttctcggacttcattttcttattatctgtttttctcttctcattttgttaacttttgatcacatatctcttcatcaggttaaagttaagagaagggggg

SEQ ID NO: 24687 - DNA, 824 bp, Arabidopsis thaliana
ttcgtttttatttattaagtgttgtttttttttttatcaaatatatattttgaaagcaaactcaattatttctcctttgtggccttctaaaagttaggaccagttttggacaatggtaataataccttgtaaacttcgccgaaaccaccttgaccaagtttgttagtctcacaaaacttatttgttgctgcctcaattgctttaaaatcaaactgaagtgagcccgcagtggtaatatcatcactttctgtaaaacatagagaacattcttcgtgaagaaagaaaataaaaaggagatagtttatcatttggtgtcttaatatgtataccttcggtaagtggttccctctcataattcgtccttgttttcttagcccggagactaaagaaagctacgaacagaagcaggagagcaatgattggaacaacaacaacgatgattacagaggagttccggccttttcctgtattccatcagattacatgtatgaaccacttttttaaaacaaatcttgagtgtctcaaaagaaacgttgcagttatgtccatcataccacgttctgaaatcagcggtgggggagctaacttcagctgctgttgaggagtagagcgaggcggaagagacggtggtgatgatgatctagtggcggtttcattgtagaacgagtaattctcgtaccttgaattacaactagggtaaaaaaatcttcctccaattctgtaaagagacattcccttgatggatttttgtaggcaacgtaaacagtcttgtcttgtaagatcaggtgtgcactgaactaacaagtacaaaggctggggtgtga

SEQ ID NO: 24688 - DNA, 580 bp, Arabidopsis thaliana
caatgttaaacattcgagaatcggacaaccagataaaatcttagcagattcatcaggtaacccacaataactcaaggaaaacttcttcaaggatgtccaagacacaccgtgtcggggaatcacatcatgcaaatctaacctatggctgagtgacttgacagaggaattgatctcgtagaaacgaggaatcttgttagaacgaaaacggacatcaagggacatattctctacgttgcgggacatggcaaattcggtccacttcttgatgtgatgaagactgttattcttgttgattttgagatgaaaattcatcatcttgggagctgtgtattgacttagggctttgtttatggcatcagcttcctttataattatattattaaaggagagagaaggtatgttgcaccatacatgcctccatcgttttgacaagacggaagttctgatggcgtatttcgtctgaaaagagaagagaatatgttgaaggatcacatcgggtaaagagctaattatgtcaacttctcctttgattttccggcgactgttgcggtcctagggactcttacacgggtggccgagt

SEQ ID NO: 24689 - DNA, 927 bp, Arabidopsis thaliana
tctctttctcactaactctgatatcatattatcaatttttccttttcaacacccaaaatcacaatctttcagctttattctgtttttccttgcttgagaattgtgttcgattcatgtctacgaactgaaatcacaaattttgccaacgttttatgattcctggttccgtatttttttttttgtaatcaatagttagctcatttcgaataatcaaactcaattttattgttcatgatttgttatctgggataaaagagagtaatgtgctaattatgtatactcaggtattgcttggtgtggggaagattagatagtgtgaagaatggcagtagctacacattgtttcacttcaccttgtcatgaccgtattcgatttttctcaagtgatgatggtattggtaggcttggcattacaagaaagaggatcaatggcactttcttgctcaagattttacctccaatccaaagtgctgatctcagaacaactggtgggagatcctcacgtcctttatctgcattcaggtcaggattctctaaggtaatcaatcatactagtcttgtgtttcaatacaaaatttggtatttcgatgatctcattgcttttgatcatgtcaggggatatttgacattgtgccattaccatcaaagaatgagctgaaagagctgaccgctccgctgttgctaaaactcgtgggtgttttagcttgcgcgttccttattgttccatctgcagatgcagttgatgcacttaaaacttgtgcatgcttattgaagggatgcaggtaactttccttcgtttggattctgcatatatagtgtcccccaccaaaaccggttttattttgattgtgattgtgatgctataagtgttttgaattgtatagctccatactcttcaattgttgagaatgttaaagctagatgaag

SEQ ID NO: 24690 - DNA, 836 bp, Arabidopsis thaliana
tgaagccaatgaacgagatcgtgacaaacacatgcctaaaacaacagtcgaatcctccttctcctgctactcctgtggaaaggaaggcaagaccggagaaagaccaggctttgaactgtccaagatgcaactccttaaacaccaagttctgttactacaacaactacagcctgacgcagcccaggtacttttgtaaagactgcaggaggtattggaccgcaggtggttccctcaggaacatccccgtcggtggcggcgtccgcaagaacaagagatcttcttccaattcctcttcctcttcaccctcttcgtcttcttcttcaaagaaacctctttttgccaacaacaacacgcctacgcctcctcttcctcatcttaaccctaagattggtgaagcagccgctactaaagttcaagacttgacgttttctcaagggtttgggaacgcccacgaggttaaagatctcaacttggcgttttctcaagggtttgggatcggtcacaatcatcacagtagtatcccagagtttctgcaagtagtacccagcagcagtatgaagaacaacccactggtctcaacttcctcgtctttggagcttttagggatctctagttcctctgcttcctctaactcacgccctgctttcatgtcttatccaaatgttcatgattcatcggtctacacagcatccgggtttggtctgagttacccacagtttcaagagttcatgagaccagctttgggattctctcttgatggtggggatcctctacgtcaagaagaggggtccagtggcactaataatggaaggccgttgctgccatttgagagcctc

SEQ ID NO: 24691 - DNA, 1746 bp, Arabidopsis thaliana
acaagtgaccgaaatttcttcagttgattaaattgagactcgaaatatgtattaattgttgcttgaatatatatgtctcggtaaaaagaagcatatgcaccatcacgtagtcggtctaatattaaattgtattgattaggtttaaaagggttaggagtagttgttgacttattggcttggtgtgtggtcgtggtacaatgatgcttatccacattacgacgttttatttgggtggttttactgtaaagttgtaccaatctcaaatttgtatcagtctttattaaaaaagttggcaaagtgttttggaccaaaatggttaaagagagcaatagcgatatctgtgggcatattctcaccttgtcccaccacacaacaaactgcgtccactgactagtcgttgtacttgtatgtctgatcttctgatgtgactttcgtatatatgcatgtatatggacttcttcttcttttttttttttgtctaaatgcttaatgaaccggtagtgtattaaccggatattaagttcgtctgattatggtccagctagtatgtctattttatacactaggtcatgtgtaaaatttacataatgaaatttattatcataaatcaaataatgatgggttggtaacattgtatcatagcaaaaaaaattctaaaattgtttccatgtaataaaaaatgaattgatgtttttcttctaatttgcacaccaattgtgtgactcacaagggtccatccttcggtgatgtaaatttagcggattaagattctttgtggtataaatataaaccggcttaaacactccggtttgttttagttatgtctatataaaaccagatttatttcaatatttgaaacaaaatgttagaataatgactccaacaagtacaacatttagtggacctagctaatgatgtgatgggaaacaaaaacaagtcatagacgcatgcacattctgatttgcgtacatacaacacagtacatagagatctagaatctaacggtggtgggaccaaagcagctaagacccatagctttctcaaaggatgtctcaaagggtgtggtggacaaaggtttggatctgatggaagtagccgaagatgaagacgtaggaggagagggacgagatgggactgtaatggtacggacgcgagccattgcttctttgtggagtaagcggaaaaggtagttccaccgagcaacgccttggtcttttagcacttccacggctgcgatcgccgtcgccaccgcccacgaagcttgctttccggcattcatcttctttttttctttttcttttcaaattcttcttaaaacagtgtgtattgatctttggacaatgtgtttggagtttcgtggaggatttggtttataaagtgtggagtcgagaaagtggtacataaacgaaacaagaggctaaagaagccgcaggaaatttgggagctcgtggttttcattttctcattttagttatttactttctttttggtcataaattaattatctaactacgaggttaaaatagagataaaaaatggattatttatgtggtcagatgtttaattgctcgttttgctagttcagatgtttactttaggtgttcaaaataaaaaaacacaaacatattttcattaattatatcttccgaccatcaaccccacttttgcttatactacaagacctaaaatcctgataacatccatcatcatcattattcagatactaatacgttttattaattttta

SEQ ID NO: 24692 - DNA, 437 bp, Arabidopsis thaliana
aaagttgctgcagaaaaggataagagatgtagtaaaaccaacaaggacagatgatgaaaggaccctaccgcttagcgatagatgcctcatctcgctgccaaaaccgattaacaagcttccattattaacacctcatggaaacacgaatggattaggcttaaaacaaaattttgatattaccttgagctaccaagaagtagataaaaagcagtagtagcaaatggaccaaatgctgcaaagcatagaggctctcctaatccttggtaacttaaccgaaatggcggacactagtcacaaagtattactctaagttagaaatctcctagattagtatcaaattgtcatctaggaagtaacgttcacctggtatacgtagccacagagtattgctgaggctagcaatagtattgcacggatattacttgcatttaacgatg

SEQ ID NO: 24693 - DNA, 790 bp, Arabidopsis thaliana
caagttgtcataaaaagacgatcaagcgagtagaaccacccaattactgtcgtaatcaacaagatgcccataaacacacgaaatatttacaatcaaatatatagcataagaacacagttgtctttcacaacattgacacacaagagtcaaaatgcttactacccgtttcagacattttgattacacaattacatttagcccttagtagcaaacacatacataaactaaatccacgatcaccggcattcccattaccgttgatcgcaaaccttaaaaaacccaaagtgaaatgctgctgatccaaaagagattttcggatacttgtggcagcatcattcactgttctacacaacaatggaaacatcaaaagagaaataaatacctcttttttcttcttttttttaatggttttttcaggttcattgatgatatatctcaagaagagcaatcaggacaacgtatcaatccattctcattgcattcaggacatctcttgaccctatcttcatcctcatcaaacagtttcttgctgccactacaattggaacacggaacaaatcgaatgtccccacagcaatggcaaacaaaccctggttgtctcattggaaactctttaagaatcttagcaagctcaccaatctcaaacaaactcttgatcacatcagcaccaccaacatacttgcccataatgaaaacttgaggcaaagacacagacttctctcccattgcaatctgcaactctttcctataagcgatatccatggagacgtcgcgctcatcgatccaaacc

SEQ ID NO: 24694 - DNA, 943 bp, Arabidopsis thaliana
gatctactacagttgctcattggcattcgctcgcgatacatcctggtggaattttccaagcgtgggagagactgggtggcgagtcactgattggacaagatggtatacaaagggttttaccaataggagataagctgtgggatttttctaacaaaactcatgtgatgggtatacttaatcttacacctgacagctttagtgatggagggaaatttcaatcaatagattctgcagtttctcgggttcgctcaatgatctctgagggtgcagatataattgatattggagcacagtccacacgcccaatggcctcaagaatttctagtcaagaagagttagatagactactaccagttttagaggctgttcgtggtatgccagagatggaggaaaagctcatatctgtggacactttcaactctgaggttgcttcagaagcaataagcaatggagctgacattctaaatgatgtatctgcgggaaccttagacccgaatatgcataaggttgttgcagaatctggggttccttatatggccatgcacatgagaggagatccatgtacaatgcagaacaaagagaatttgcagtatgatgatgtctgcaaggatgttgcttctgaactctacttgagagtaagagatgcagaactctctgggattccagcttggagggttatgatcgatccagggattgggttttccaagagcgtagatcataatctagatattattatggatcttccaaaaatccgagaagagatggctaagagaagtatagcagtttctcatgcgcctatactcgtaggaccttcaaggaaaagatttctgggagatatttgtgggcgacctgaggccactgacagagatgctgcaactgttgcttctgtcactgcaggcattctaggaggtccaatatcatcagagttcataatgttagacat

SEQ ID NO: 24695 - DNA, 718 bp, Arabidopsis thaliana
ctaaagaatacggttgataacatcagcatcgccgaccactgcaccaacaccctctggcccaaatagcttgaagcaggaaaatgtcgagacattcgcgccgcattcacagccgattcgagccaccttcatcaccgcatagttgtcatcggttaacgctggaacacctgccgcgcgcaacgttgccagcacatctgccagcacgtagctgtcctgcggctgctggcgcgtatgctgcaccagcgccgcatccggttgttgctcgtcgacgacctgcttcagtgccgacaggtcattgaaatcaacagtaataagcgtcagctccatctgctcaataataacccgtgtcgtcgggtaaacaggcgcgtcatgcaccagaagacgctgccccggtttgagcaaagccgccagcccggcgcgaatcgcgcagtccccgcgccctgcaccagcgccgcagcctgtgcgtgaaatgcatcagccagcacctgttccacacgctgggtaacgcgcggttgattcagtcctggcgttaacgtaaatcaccgccagtaagaaactcgctgccggggaaatggcgacaaatgctatccaccagcgcaaactgcttttgctgcgcctcaataatcgtcaggctttgcagaggaaacgtcttcataggtgccttccttaagccggaacgaacaggccaagcgagtaaagaacattcagcagaatacgggtg

SEQ ID NO: 24696 - DNA, 696 bp, Arabidopsis thaliana
aggcgacggcggcgatagagcatcggtccttcgctcggatcggatttctcggaaacccgagcgatgtatacttcgggcgaaccatatcattgaccatcggaaacttctgggcatccgtgaagctggagccatcggagcatctcgaatatcaagcctcatccattccatgatctcgtccagttcacctctctcgaccatctcgtacgttctctttccatttcttctcattctcctctctggatctctatttatcctccaacattgttgttattctcctctctttgtttggatgcattttcaatattaatattatgatttcactgaatttcaggctcatcttttttcattagattccaaatcatttgtttattagtttgaattgtgtaaaacatttttcacgcttcatggctctaattctgagattttgtgtagctgaatcgtttgcaaaatgaaggatactacggtggggtaaggttgctaatggcgatatgtaaagtattccgtaactattgcaaagagaatgacattcaacttcaccaagccaacttctctctttcttatgataccaatatccctaggcaggtactgatcattttccttcccctttctctctatgtttttttcttttctctgccaccaacgcttatcttttcaactttgatgctccttccagacagggctttcgggttctagtgc

SEQ ID NO: 24697 - DNA, 875 bp, Arabidopsis thaliana
tgaagatctaaaactaacacttgaaggcaaaaagtgcgatgtgattttacctgttaactgtaattaagagggaatgattgaaatcagttatgtgacaaaatcatacctcaaaccgtaaattctcccctcttcgcatggcactcaacacctgccgtatctgccaataaacaagagagtaccaactgagtgactgacattactagtatcagcaaataccatcaacaaataattgacttccactgagacagatgccacatcagctaaaactgctaaagagttcatacagacctcggaaatcagccggttccttccatcattatcagcagctaagcttcttcctaagtgacgcaaatggagatgatcattttgcctttccagtaataatcccgatcttctttgtcgagagcgatgactacgactactagatccagacggcgctgcagcttcattcgaggaaacagaaggccctgtgggtagtaatggaagagaagcaccatgagtagcagattcagattcgatactaggaaataaagaccacggagcaacttctgatattcttgattgattatggggagtaacccaagtgggattcggctgcaaaccatggatccctgaactcgatcctgctcgaggaacaaagggagaatctccagatgtactagggtttccacgagtgaaactccaacaaaactgatcctgcactggatttctcgtttcatttgcaggtgtagtaaagactggctgctctgagtttattcttggcgcgtcccatggtgacaatccctcttcaggcatactgtttgctctcgaactagacgaagcactccaagcaaattggtgtatatttcttgtcaatgcaggaaggtggatcatac

SEQ ID NO: 24698 - DNA, 1009 bp, Arabidopsis thaliana columbia
ttttcgtttttgataccgactcaaataacataccttctctccggctctccatggtgcattttattggtgacatttacccatatactgcttttattttgtgccctttacaattctgctaacttgaaagttcgacttcgtgctatcatctcaagatgttgtaagtaaagctcattggtcattgctacaaaatgaaaaatgtgttatatgggaagtacggtttaacaatacaaaaatcaaaatcagaagatagggaacatcatccagaaatgaacgcatgcgaaatagagattatcaataaacaagcaacgtttcacaaaattaacaaagggaaagtaagtatatagaaacaaaccaaacaagatactagccagccaacgtcttataacttgccacttttgtaagatagaaactaccaccatgtagatgtattttctggacacaaaaggcatttcatttatttgaaatcaacccttaatagtacaccagccaaagtcttatatataactgccccacttttgttttctccagccaaaactccaatcaccttatcgcctgtaccgaagtcgtttaaagttgaagtatctcagcgtttatttcttcaagcaagcctttgctttatatctattgaggcgtttaagaaccgcttccctatactctaccactttggctgctccagagcgcagctgcgattcgatgtcaaactgcagttgtacaagctccgcgtgagtcttcccatcaagaagttctctcacaccagcttcaacaccagcgtgtagtgctctttcttgagaagcaagcaattcctcatctcttctacgagctttagttaactcccattctctgatcctcttagtttaacagagaattcatctagagatgctccatgatgaacatctttttcaatcttcttccgccacacgaatgtctcggctatgttggaacccaaaagggtttgaatcattggagtaccaataactgactgtctcttcagtttctttgaagcacttag

SEQ ID NO: 24699 - DNA, 1277 bp, Arabidopsis thaliana
gaccaagattagcgtatgtggcgtttgcgtctgtccataacgcaaagtactgaatcttgaacaagtttccttttcgatgaggaaacgcggtggcatcagcaggaatcttgtccatcactccaccgtaagggttccattgcatccacatattgttgaacttcaacattgctttccagatcttctccatttcttcctttgggatcggtttcttgacgtaatccgatttactcttgtagaatgctcctgcgggacccgatggtctatccaataaaacgcttgtcgatgttcccacaggatagttctgccaaaacgttgtcgtattaatccagctcatttcgtagcaatcttcacgttttagccctaattcaggcaaattcttgttcataatcgccatgagcctccttgctgagcctaaaaactgagcgtagaacacaactgcgatggttttctcgctaggtaccacgccatttaccggtttaggcattgctctcaagaaaaggtcttgaggcaatttgctcgacacaagctgccatttgtagagaacatcagtaactccttgctccaaggttttgttaaccttaaaaacagtcacggtctttggaacatcgacgaggttgattttccacgagaggataacgccaaagctagcgcccccaccgcctcgaatagcccacaatagatcacgtcccaaggtagctcctgtcaagatattgccgttgacatcaactattcgagcatcaaccacatgatcgaccgagattccgtactttcttatcagatttccgtatcctccgccactgatgtgtcctccagctcctaatgtagggcaaacgccacccgcaaatgctagggttttgctagccgctgcgatcttggtgtagagctctcccatggtcgcaccagcatcaacccaagcttgctttctgaacacgtcaatggttatagaccggagatcgtgcatgtcaaggataacaaacggaacggaggaggtgaaagaaagtccctcgtagtcgtgaccgccgcttcggatacggatctggattccgtttgactttgcgcaaaccacagttgcttgaacatgagattcatgttttgcagcaacaatggcgattagttttgtgtcgttagggtttaaacaccgtttgttattcgtgtaggacacgtaagaagacgcgaaggtggagttctcatgagtatagatggcttcggcgatcggattcttcggattggtccgattacgaaggcatcggaggaagttttcaatatttggtttcgtt

SEQ ID NO: 24700 - DNA, 789 bp, Arabidopsis thaliana columbia
  unsure (1)..(789): unsure at all n locations
atcggccaggatcagctagattaccggtggagaaaccgattgggagacagctccgggatactcaatcggagattgctgattacggatatggtcggaggtcgtgcgataccgaccctcgattctctctagacgccggaagattctctcttgacgccggtagattctccgttgacatcggtaggatctcgcttgatgatcctcgttattcgtttgacgagccgagagcttcttgggacgggtctttgattggacggacaatgtttcctcccgccgcgagagctcctccgccgccgtcaatgctctcggtggtggaggatgcgccgccgccggtgcaccgtcacgtaacccgagcggatatgcagtttccggtggaagaaccggcgccaccaccaccggtggttaaccaaaccaacggtgtgtcagacccggttatcatacccggcggatcaatccaaacccgagactactatactgactcatctgtcaaggaggcggaaaagtctcgacaggtctagtagctccatgaggaaaacggctgcagcgnttgtggcggatatggacgagccaaagctttcagtgtcgtcggctatatcaattgacgcttactcaggatcactgagagatacaacaactacgccgtggagacggcagataacggatctttccgggaaccgctgatgatgatcggcgataggaaagtgaatagtacgataatacaagaagtgagacggtgggggaagtggagcatttaggacttattacaggaagagtgttacaagtatgaggaag

SEQ ID NO: 24701 - DNA, 794 bp, Arabidopsis thaliana
taatatggttacgttgttcctcaaatagcttaacaaaaaaagaatggcattacactagctactcttatccaagaggttctctcagtaatccccatgaaccaaagcgtgtaaattagtcccctttttgtgatgagattcgaacctggatctaaaggagcattacattatgataaaatagatgtcagccaaaacatctttcaaacataaccatataaattaattaacactaagagtctaaaaccttaaattttaacaaaaatgatagtctctgcataaaaaagggacaaacactagaccctagtatttaagaacatcagtctttgagagaaaattaaccaattctacggatcctgacaatcttgtttttcattgaccataactcattggtctgccgaagttacgaagccttgatctagtctctggtccggatgtctcagcacggatctttctggtatcaaactggtcgttatctttcattctcatatatatgatcttcttgtgcaaatttgaatgcacggttgggatgaaggtcgggcttgctgctggacggtattctaaaacaagacggcccgatctaaagcggattccacaagcattgcaaagggttttagcccattaggtccttcctccactgcggggtagtggttgctcgcaatgagtgcatttcaagcgacgactcttgttcttcttgcgtttcttcaaggcggaaatctcagaaagatcagattcatccggagcaaactgctgtgacatctctaatagaaatgatttgaggaatgtactctcagtagtgt

SEQ ID NO: 24702 - DNA, 823 bp, Arabidopsis thaliana
atactctgagcaatacttagccatgaaaagcttgatataagcgacctcatcgaacgcagcatcaatcccgccattgctgctcttgtgaagaaaaagttcacgcatctcttcaggagaattatatgtctttaacctcgattcatcgaaacgcatttgtttcagcctttcgaatgtaaacgaaccagtttgatatccaatgttcactccgctcttcctcaaatcatccatgtgtctcactgttggtcgaagctcttgaactgtcagcatcgatgtcagtgttgctgtgtagctctgagtcagaattagcaacacaaagcaccaaaccacaacaagaacccttgtaaaaaagctctctgatggcctccctataaagaaaatgtttgtagatcagttttcttgtttcaaagattttcaagtaaattggtaatggttagtagctgaagttgtgtgtgacagagattaactcactgtgtgcgaaaaagagagtcgaaaacgagaagtagaacacactagatattttatcaattatcatctgttccctgaactcctcatctgcttggtactcaaaaatccaaaccatgattccaatgtagagaaaagaagcagcagtgaccaaccatagctcctttgttaaaggctttaagaagacccattctcctttttctttcccatccttgactggtacaaggaatacaattccggtctccgagtatggcaacgcgaaatcagcataatgcgaccgattagccaaaattgttgtatccctacagctcatcaaactctgtaacatcatttgtaaaaagatattacatttagccaatat

SEQ ID NO: 24703 - DNA, 675 bp, Arabidopsis thaliana
gactgatccccgttcatgaagctcaaggttcgtagattcttgattgcagctaatggttcaaggtcaagcttcccggttaagcccattccttcgagttgtaggccccaaacattaccggtaacacagagaacaccgaaccaattctctgagtttcgcttacacggggagatggaaggatcccaactgctaatgaacgatgcattaaccaaagtatctttaaatctcaagaggcaatctgcgtctgaggctggcagtggcaaaacatccgcctgcgctgagacatgaccattgtgaccggacataacacaatgatgagaaaggtggtaatgaaggctagctttttggttgaggcggtgttgcttgcaagcataactggggtctcccaagttagcattgaagctaacacgctctatagaatcgattcttcaagaacaatcttacctcttttcgatcccaatgaacttttctttttcttttttttttttcgctaaataacttttctttttctctttcctgccttccagagaagagaaaaaaaaaacgtatgaacagaaagagagagaacaaaacccaccaagaatagacaaaacccaacaatgtgtcaatatgcaagatttggtttttgtttgcctatgtgttgtctcaaattgtttagattttagagagacttagggt

SEQ ID NO: 24704 - DNA, 757 bp, Arabidopsis thaliana columbia
aaacccccttaggattataattttaaaaggtttaaaagcctgctcaagcaaacactctatttggaataaaaagcctccttaggcaacgacatacttatctaaatttaatttcaagtttttaaaatgtttgggacaatccccagttaaggtagacgcatccactaagaatctgtagccatctcgggttcaacaacagctgcctcggtttcggttggttcagcggcagggagttgctcagaaggggttcccgactcaagcctagcgtccttttcatcatccgggatgaccacattctcgttgttcacggccggtggagcttctagcaaaataggggctgactcaggaatctctaccggtgtggcaggcacctcgggtgcggtagtatcaaccggctcactagagcctgaagcgaacagttcaagtcaataaaaatcatttatagcagactgtgaacaataaaatttcaggtaaaaaagttttccatcccaatctaaacccgattcactcaaagggggtgattcattgaaaaactcctcgaagtgttgaggattcaaggatgaagtaggaaggacagcaaggcgacctctttttcagctaaaacggcttccagttcggacctttcttgttcctcagagaagtcatcttcggtgtttggtccagcaaaagcaagttgcttttgtgctccttgatatctgattctagctttgatctggtcttctcagtttgaataaaaagaatagccccatgaataagttcc

SEQ ID NO: 24705 - DNA, 1086 bp, Arabidopsis thaliana
ttaaagcacaggtgtttgtggagtgatcactctgaatgagccatatgaaactttggttccatcgtctctctacaaagtgagttatttaatgtggccgttctgtcttttggtttcttctatgtactgacccggcccatttaattttcttactcttatggaagtcttactgcattgaccacctggtgattgctacaagagattattgttttgctccttccatggaagcaatatgccaagctgtagaatttatccatagtaagtgtaccttctcattttattcttttacgttttttgccactgaccattattaaaaagcttactgttgtccgaacccgcgttcatttgatctcaaattctattttgtctccttgaaggaaatgcttcgcttggaaagacgacttatgttcactgcaaagcgggtcggggtcgcagcacaactattgtcatatgctacttggtttgtattgcaataaatcccagaaaaacattttgagcagagacactttttctccttttctctgatcataccttttcaacacaggttcaacacaaaaacatgacacctgaagcagcatattcctacgtgagatcaatcaggcccagggttcttttagcagcagcccaatggaaggtatctgacaggggtcccattcttcatcaccgatgaaccagagtttagtcatttattcttcttcttctgattgttgatgtatttgcaggccgttgttgagtacgtaccatgtcaaggtgctgaatactcagagttgcttaactgatgcaacttcagctttgatcccgagaaatgtgaagcaggtttgttctgggaatgtagtggtgtttgatgatgggtcaatggttgtagtcacccactcggatctagagggctataatgatgatgactcacggtcacggaggtcagtgaaagttaatgggaatgagctatgggcggcagctgcagatctgagcatggtgtacagggtgaaagtggtggggcaggctgcgatggcgaggatatcgtgtctgtggctgggcttgcgtgaggaccaaaagctttctgggaaaaatctttccatgggaggcataagc

SEQ ID NO: 24706 - DNA, 1212 bp, Arabidopsis thaliana
ctgagcagtttggaaggaaaaaagttgaaatgtttgagtacatagtcaaacgtgtgaaagaaagaacagagggatggtctaacaagtttctttcccctgctggaaaggaaattcttataaaatcgattgcgctagcttgcctgtatattccatgaactgtttcatgttgccgcactcaatttgtgatgaaattcaaagtgttctaactacattttggtggggtaaagagaaaggaaagcgaaaaataccgtggattgcttggaagcgaatgacattaccaaagaaagaaggaggacttggtttcaaagatctccatcatttcaatagagctttgctggcgaacgaggcttggagaattttgagaaatcctcagagtcttttggcccgtctttataaaggtatgtatcatcctcaaacctcttatttggaagcggtgacaggaacctatacatcttttggatgacgttctatacaacatggaaaagagttactttgtcaagaattacgagtttgtttaggaaatggtcaagatacaagggtatgggaggacccatggttgcctacgataccaccaagaccagcttatggaccggctgtgattcctaatctgacggtgtcagatctttggaaggaaggtttacgagaatggaatccagtgatctttgaaggtgttctaaacccggaggaccaacagctagccgagagcctttatctctcaaagtatgcagtacaagattcctatgaatgggcatacacaaagaatgctcagtacagtgttagatcaggatattgggttgcgactcatgtccatttcgatgaagaagatgctattcttcctccaccaggttctattgccttaaagaaggaaatctggaaattacctattactcccaaaatatgtcatttcctgtggcgatgcttatctggtgccttggcaactgctactcagctccgaacaaggatgatccctgcagatcctatatgtcaaaaatgttgtcaggcggatgaaacggtgaaccatattctctttacttgtcctttcgctgatgtagtgtggaagcacgccaatagtattgtgggccacaacagattctcggatagcttagaatataactttggtctcatgattcagttcgctcatatccctccctgcctcatttcaacgtttattgccgttttggattgtgtggagactatggaagtccgaaatga

SEQ ID NO: 24707 - DNA, 506 bp, Arabidopsis thaliana
ctattatcttaaacctcgttaatctcaaacaagtcgacgtcattgagttctaaaccagctgccttgactgcagcaggaatggcaacggctggcccaacccccatgatggctgggtccacaccaactgcagaaaatgtcctgtaatgtgtccaagagtgctgttactaaatgaagcaaagaaaggtcaatatagagtatcaactatcaagcccacctgaatacaccaagaatgggaaggcctttctgcattgcgacatttctcctcataaggagaacagctccagcaccgtcacttaattggctagaattccctgtttgacacaaaggaaacaagggatttgggaaaaagatggatcaaacaaacatttttctctgaaaatgaccaattaatctggggaaagtaccagcagttgtggttccgtcttccttaaacactggcttcagctttgcaagtccggaaagggttgtgttaggtcgaatccatcatccacagaaactgttatggg

SEQ ID NO: 24708 - DNA, 1320 bp, Arabidopsis thaliana
tgttgtttttgttgactcaggaaaacggcattgatgcttgctctttgtagattcttgagggacaaatatagtcttgctgctgtgagtattattatcagtggcaaacacaagattgttttctcgatctcactcatgtgactaaataagattttgatattgtaaacgttgtaggtgacaaatgatatattcacgaaagaggatggtgagtttctgctggatcatgatgcgctgcaccaggaaaggattagacctgttgaaacacgtggacgtccacacgctgctatccgtgaagatatcagtatcaatttgggtcctcttgaggagttatctaacttattcaaggctgatttgcttctttgtgaatccggtggaggtgaggtttcatttctagctagttcttgatagttaatctgcacgatatatagatttctgtttctcaaggaaccaatgagatatgaataggcttagtgttgtgtgttgcagataatttagctgctaatttcagtagagaactagctgactatatcatctacatcatcgatgtatcggctggtgataaaataccccgtaaaggcggccctggaatcactcaagctgatcttctggtgcgcttatgctgccttaactcttcacttactccttttgatcaagtctatagtagtgtgaaagaatctcttgtggatttttccaactgcaggtgataaacaagactgaccttgcagcagctgttggggctgacttatcggtcatggaaagggattcactacgcatgcgtgatggagggccatttgtctttgctcaggttcgccatcttcagaaatatgtttcatcacttatataaccaatgaccttagtacttacaaaagagtcttctttgattactaaacattggcaggtgaagcatgggcttggagtcgaggaaatcgtgaaccatgtcatgcactcatgggaacatgcgaccgggaagaagcgccagtgatgatggggttcttaagacccaaaatggataagatatgaaactgaatggaactctttcaatacttatcttgaactcaatttatgcgcaaaagtctatgtaatctgtttgttgtactcaagacataagagaaataaaaggtttgagcatgagactcattacattctagtttattgtcctttaacagaggcaaatagatctttgtaggaacgttttggagcttcggcacgagcaactatctccacaaccttgaaagatgattcctcttgaagtaaagcttccactgcaacttctgcgaccaggtctctcgatatactcccttcatatagagtatcctacaaaaa

SEQ ID NO: 24709 - DNA, 727 bp, Arabidopsis thaliana columbia
ccgtcggtagttttgaataactcccgacaaactcacataatgaaactaatttcgtcgttattccgtctgttttatgtcagtaaaaaccgacggatatgagttcgttactaaatctgttggttttgccagtgttttcttgtagtgtaatagaatggtaaaagggggcgtagagtcatttacctcgggatgatctgccccatttcttctggaagagttactcaagcatttcattgctctgtccacttcgagaagaggatcgacgagagtcacgccgaggtgaccagtgtctttgtggagagtggcctccatggtgctcacgacggggcatcggcttgtaagcgtctccggatttggcaccctcagtgctgccatcgtcgactaaaagggtctggctgtagtctttcttgtcaacagcatttgcaagaaactctttattttcttcacatgcctcaaccattggcttggacaggatcctacgcttggcgataatggcccgggctgacatgcctatggttgagggaggcagggtggagatgatggaattgttcggggggactcatcataagcttgtgattggcttcgatgaatcgatcaagggtgaaggagttccagagggtctccctttcgattactatcttgaagaattcaacaaattcttcggtcgggaaagtttaagccggaggagttgcgaaatgaaataacatctggagttagtacaaaaaagtgg

SEQ ID NO: 24710 - DNA, 1283 bp, Arabidopsis thaliana
tcggagattcgaagtaatctatccataccttgcagagcctgagattaaaagagggattctaagattaacagagggattcttgaatgaatttgagagaaatgcaaaaaaaatggcgaaacgcgaatggccagaaaagccactgcctctgtatttatatacgttcacgtgtgtgttacgcccaatttgagaatgggtcaaggcccaatttgtttttatttatttttgttaaatgataattcaatttaaagtttaaaaaaaaatgttttaaagagctaaaagcccagttttggaagcccaaaatacaaaaataaaaagctattacgaaacttgaaccaaaactataaccaatagttgtaattgaacatagttagaccgtgtatcgttgccgaccaggatcgtagtggagtgattgagcaacgacgagcgatgagattcaaatcgtccaactaaaagggcagtcaaaaaggagacgatcacgactttcatctgcagtagcacaaagcaaacacttcggatctacttgcaaaccccacttgttcaatcggtcgcgctttggacacctattcaacacgaatagccaagtaagaaacttatgtttgggattcctcctgaacaccaaacaatcttataccacagtacagtgagtaatttctcctttaaagctaagcatattttccctgtcgtgtgcttgtccttgaactgatcatcaatccaccaacggtaagaatcaggtacttcttctgagagattaattgtggatagttcaatgtgatagctcacttgtgcttctgatcttgcaggaggaagtctccagctccctcgcctccacaaatctgctagtagagtgcctttcggaatacctgtctcataacaaatagtgaaagaccgtaccgtatccggttatcgtggagaccaacattagcctcaagaccgcgttttgaaacgctcatattgtgtggaaaatgcgcgagtagtgattggagctgacgccgggagagatcaagatgattcgcggcagaggctcgtggtccggattatcgacccggttgaagctttacaggacccgacgtttctgcacaaaaggagagaataaactcgagaagacggaatctagcgttgctcatcacagcgagactgaatctagtgtttctcgctacgatgagacctataagaaactcgataagctcgatttcgtgaccgctgcgaagatcttgttcactgaaccacccaagaagaacaaatttgggtaatttctatcggagatttggggtttaaagagggtt

SEQ ID NO: 24711 - DNA, 736 bp, Arabidopsis thaliana
acataataaatgtgagctgtatatatatataattaacattattacttacgtcattttcacagagaaaatagtgaaaagtatttagtagttagatcggggcacacacaaaaataattgaaataggtgtttttaacttaatggataaaagagagagaaagaaataatctgacccgtccgatggattcccacaaggaggcattgaaagaagcaacggtggtgatgacttgagggaaactggtggctgcagggtaaaccccaccgaacttagtaccgggtcccacatttgaaacgccgtgtaaagcctccgaccaccactcgtaccctttgattcctagacgtggtatcgccgccgcagtgttccctaacaagctcactttctcggccaatgtcaaccgtccgatcaaatctctgactctctccggtataggaactgaaagctggcagaatctcagtgtagctgttgctgcgtcctttgtatcgcaagcaaacgtttcacggctatgaacgcaaacgctgctgctgcttatcaagaagaagagaataacggccaagaacgccattttgtggagaatcatttctttaaaacaaatattatttactcctcttcctagtttctttatgggttttatgggaagagagaaaatggaaatgtgatgaaagccttgtgagagtgaagtttgcgtggtaaggttatatagagaggcaatgataatggtatgataaagataatgagtag

SEQ ID NO: 24712 - DNA, 519 bp, Arabidopsis thaliana
gaaaacttgagtttgttaggctggttaggacttctgatccgacagcaattgtggtaatgttggtcgcagggtaatatgcagctacatttctagtcacccaattggctgcggttgcatttgattggctgataccgagaagctggtcgttaggtactgagattataacttgaaccccggtgtgagcaaacgcgagaagcattgagcggtctgcgtcatagaggcggtcgcggttgatgttctgtgatttgaggagtgctactacttgtgttggacttggcatgtttgtcacttcagtaccaatattcacaccgatcaaagaatctgaaataacatatttaaaacgaaacaattcacatgaaaatccgtcaactggtcggtccaattctcaataagcattaaaaccaaatgcaaatgcaaagagtcaataggactaatctagaatctaagtatgtggaaacacaaaaagagaaccattgcttagtgcgcaaagtcgaaatgccttagaatgagtgtatggta

SEQ ID NO: 24713 - DNA, 1027 bp, Arabidopsis thaliana
ctttgttttcaatattggcgtttcattattttggtgaaagattcccaacttataaaaaaaaaaaacgaatttttaattttcgtcctaatcatttatttcctaaccaaagaaaaaggcaaatcgcgacccgtctctctctctctctctctccttgaaatcgaaagatcaaaaaagcgacactgaaaatggaaaatcggtcagaaatgggtaaccggaggcagcagaatctcttcgtcatagcttctcccgacgagattgctaagatccatcgagccgaaacttccaaacaaggtctcttcttctttctccgtctctctctctcttttttcccctaaaaaaaatcttttaaattgatgactttggattatgttacagccggagctattgccggagctaaggccgccgccgttgccgccgtcgccagtgcgattcccacagtaatcatataatctcacttatctaaattttttaaattgagatcttaaatgaattaaatgtaagagttatgtttctttgttgttgaattttaagacaaaagtgactcaccaatctcatgttctgtaataatcaagagtttcaattttgttacctattcattttgtgatttctgaatacaccaagtagagtcacattctttttgatgtgtatataagatatgaatttggtacataagcatgccttgttttcgtaacaggtagctgccgttcgtatgttcccgtgggctaaggcaaacctcaactacactgctcaagcactcattatttcttcaggttagctctatcagcaatatgccttaaatcattactatatgttcttcctggaactaagtagaaaaaagatactagctttaacattgttgtagaaacctcgaacttcccttttgaacctagttgagtttggggtttttaagtattcgtacattcatttctccacaattttcttctgatttctatcttgtgattatggtgatcattggaacagcttctatcgctgcgttcttcataaccgcggataaaacgattctaca

SEQ ID NO: 24714 - DNA, 1072 bp, Arabidopsis thaliana
atttgttaaaaatgagggaatataaaaatgatattgaaataaactgttgttaggaagtcttgttgttgcaagaatatccgctggttgattagttgatctcgaggtccaagtgaaagtaacttccgagaatcgattttgccaagcctttccttcacgaatccaattaaaactcccaaagctgatagttttgttgttcataagctcttccacacgtttacagtctccttcaaaaatgactcgacgatacccttgactccacgtatgttgcatagccattatcaaagcctgaaattcactttccaaagcactattggttgaaacccccactgcttgtcctgcacctctgtaggttccttcatcatctctaagtacccaacccgcctttgatgcttgcgtgagaggattataagacccatcataattgcattttacccatccggttggtggtctcacccactcagcttgtgtttgattccttgtattatgtgtttcctgccccccgtattgttgaaagctcttgatataatcttgcgcactattccaaccttcgacgtcatgcttagctctctccaaagtattcagccaagccaagtgcttttgttcaaagacaagcaggctcctgctcttccatagtcgctagagaatccagagagctaagtgaaagagttgcagattgtttttgcctagattacccaatagaatagcctccaattttgattccatcgacccactagcggtgattaccgcatgattaggaatccctgatgctctccaaacctgttgagcataataacaatcaaaaaacagatgtgtagttgattcttcctcctggcagcactggtggcagattgactgatcattaatatgtcgtcgtcgcagattggcacccgtagccaaagccccagaacagaatttccatatgtagtgtttaatcttaggagcagtgtctagtttccagatttttgctttgatcgcattgtctcttggtggcggctgaatggtgtgatctagggtcaattgatttgctacctatatgcagatttactgaatatagtcgactttggtataatgc

SEQ ID NO: 24715 - DNA, 783 bp, Arabidopsis thaliana
actattatatctaacacaatgtaaataaaaatccacaattttgtgccattcgtgcaaatttgttattaatgaaattttaaaacaaaaatattgactagaacaaaaaaaattaaacattaaacttataatcacacgccgagtaaatctgacaaatattaaagccgttcgccctaaaatcaaaatttctagattgcaaagccctaaattttcaatttctgatatcggttgttcgaatctctcaatcgttgagcgattacgtgggagtcgatatagtaagatctggaatctttgtttttttgcttaggctctaagtatcgatctttcacggtgcaatcatggattctgtttctaaagatatgatcaacgttttgccggacgcacttctttgtcacatcttgtcattcctcactacaaaagaagctgcttcaacctcacttctctcgagaagatggcgttatctacttgcttttgttccaaaccttgaatttgatgactctgtctatctgcatcgcgataaaagggtaaagaatactttacatgagaaaggttttgttggtttcgtgcttttggttaacaataaaaggaagaaactttcgacaagctttcctgatttcgtagataggatccttgctttgcaaggcaattctcctctagacaaattctctctaaagatggttgatggccatgatcctgttgatccagatagtgtcgttccttggatacacaaggtgttggtacgtggtgtatcggatctccatctggtcgtagacatgaatgaatgga

SEQ ID NO: 24716 - DNA, 783 bp, Arabidopsis thaliana
acagatgcctcgtgcccctttttttgaaattgtgatttgattttttcagagaagatggtggagcttccccaatatggacttgaaaaggcacctgcttctcgtgattctggtacaaacagtactcattttaccttaaagatatgaaatcctattattcaatgatgctttaaaacacctgagagcgaaatttggtccacctcttcacctctacatgctacgctaaactacttgcttgttctgcatgatatacgaccatgaaattctgttaatttaactattgttctttttgttggtcttttctgaagatgttgagggtcaggcgaacagaaaagtatcgttgcaaagatatcttgaaaagcggaaagacaggtagttgttgctattatgctgtgtgcttgcttattccaaatcgatgaatactgatacctttctttctgagcagaagattttctaagaccaagaaggctccaggagttgcgtcctctagcttggagatgtttctgaattgtcagccacggatgaaagctgcatattcgcaaaacctaggctgcaccggatctccactgcatagccagtcacctgaaagccagacaaaaagtcccaatctttcagttgatctaaacagtgaaggtaagaagagaatcatatataaagctttgttaaatcagtggtttggatgatttccctcataactctcctcgcttggtctccaggcatttaacaagataccggaacgtggagatgctataagctgtgaataagcgttgaaacagttgcttgctt

SEQ ID NO: 24717 - DNA, 1366 bp, Arabidopsis thaliana
ggcttcgattacgtttgacaatgataacgagctcgtcttttggacagcgatatgcatcactggctgtggcgctgggtctaccagaatcagggcgtcatgttgcctgtgataaagatcgtaacgctcttgaagttgctaagaggtacaacgagtttgccggagtgtacgacaaggtgagactgaagtcttcgccatgcttgtaaaatagtttctcaatattgttgatctcattacaaacaactggttgattctacgatttgtttactctacttaggtcactgtgaaacatggtcttgcagcagaatctttgatgtctatgattcagaacggtgaagagtccaggtaaatacacagtaagcctctttcatataattgctgaaatgattcgacccatttcaagctttacttatttgcagctatgattttgcatttcttgatgctgataaggcgatgtatcaggagtacttcgaatcgctacttcgactcgtaagaccaagatcatagttatgctagtcttcttgccataagggtcaagtttagctttagctgttatatctactgttgcaggtcagggttggtggagtcattgtgattgataatgttctttggcatggatgggttgcggattctacggtatgtatcttacgaacaatcatgctctaaaaagcttatcgaatgaccataatttcatatcgataaattcaacaggtgaatgatgagaggaccatcagcctaagaaatttcaacaaaaaattaatggatgatcaacgtgtaagcattagtatggtgagttttttggattctatcactccctcttcctaaacacaaaaagctcttccaagctcataattgatttttttccgcctttcttttgctcataaggtatcaatcggcgatggtatgaccatatgccgcaagaggtaatcatccgtaaaaaccactcagctcgcagtgaacctgtttcaagatagaagaagtctttaaacataaaaggattgatgaagccaagatatccagtctcacaaacactaaagactcatcaacttttcccttttcagtcaaaaataagttgaataattgataaaccaatgtgtgggcctattgggctttgatatgtactgttttctatgtccgtttgaggccttttataaaatcgtcttacgacccaataaaaaaaaaattgataaaccaaaaacccaggtttgctgaacatgcatcaatacgccgtagaaatacacgacatgacgtttagttgtttaagtatgaacgacatgacgtttgatggtttaacaaataactgcgcgtagtttctgtggtttgctttactcggtgcgtgaaccagctgtacaccaattcaacaacacgg

SEQ ID NO: 24718 - DNA, 1012 bp, Arabidopsis thaliana
gtcggtgagtccgcagttgtggatccagtagcttgaatatgggatgcatagcgctcaattgcctgtgtgcagctaatataaatggctccaagcatgcatgtgtccgtaacctttacaaacaaatataacaaaacatgtcaatatataactctatattcactacttgttacataaatgtgtattaacatgtataagtactaaccagtgattgacaagctgatggacaccagcatcgttagaactaacgtgggctttagcgagctgccacatccaattagaggttgcatcgactggaggtgtaagcacacgcttggaccgatgttttggaccatggggaaggaggcttagctcaatggctaccggcttaagtgtgcctagacgagtcaagaagaagatagttcgagtagcataggctttgcgtccgtctagcgcattaatccggtctaggaacggtaagaatatgtcatggtaatccaacatatacaatctattctcttccaacgcctgaaaaaaaatagaaaagactatttaatttaatcattttttgattagtttagttaatccattgtaaggggaattatatagataaacgtacttgttgtacggagaatccgtcgaggtgaccaatgatatggtcgtcagtaagagcggagtgttgtggaccgtagatcttggggtcaagattgctgaccggtggaaaagtcttgactctctcaatgttcactggattgattccagctatggcttgacgtgcgaattcgtcatctcttaaccatgcgtttttatcctctgcattatttatagtcgtcagaaatcaattgactaattaatatttccaaagattaataactaaaaagcaagttacggctatgaatgagttaagtaaaagcaaacgcgcttttgttaccgcaaaacgaattaagagaatcacgtggaacatatgttgttgttttagtactctagtaatgcgtttcgtctgctttttgaaactaatgggtcccaataccaacga

SEQ ID NO: 24719 - DNA, 476 bp, Arabidopsis thaliana
atttcctaagagttttttctgtacaatgtgatacaggtgaggaccgcgaatgaatgtggaacggttttgtcagtggcggatagtcggatgggacaatgttcgcccgataaagtgaagaagttggcggaattagctttatggtgttgtgaagatagaccagagacgagaccaccaatgtcaaaagtggtgaaagaacttgaaggtatttgccaatctgtgcgagaacccgaaatgttctcagaaacaacgaaattactctgctccaaaacatcgccgtcatcttcttctgtaccctcgccattgtctttacttcctggaagtaacttggacagtggctttttccacgctgtaaaacctcgttgacaaatatttgtgtgagataggctaacatcagactaatgagagttgtgttattatacttaggagatattatgataccagttatgttgtcctgattcctaaccatataagctaat

SEQ ID NO: 24720 - DNA, 596 bp, Arabidopsis thaliana
cttcgtatttcgatccccatgaacaaaccacttctctcttgatttctgcatccaaactacctcctcctgctccagaacaacgtcaaaatcctttaacaactcctcttctttttttaaaagatcatcggattggtggagatcaagcagctcctgcactctcttaatgtcccccaacagtttctctttttttttccagatatctccgaagacttccttattccattgctataaggtttgctgcaaacctttaagcgcctcaggagtagagatatccttattccacgatgtaagcagtagctccttaaagcccggatgcgaaagccaggctgcttcaaagcgaaacggcctccttcccctattaccgcttacctccggagtcaactgcacgtagagaggggcatggtctgatgcaaggaaaggcaaatgcaacacactcgcttcctgccacttcaaacgagcgtgagcacagcacaggaccctatccaatcgttttgccacaaagaaacgttcttctctacctcttttccaagtaaacttgttccctttaaaacccaaatcaatcagagagtgatcattaatccattcgccaaatgcca

SEQ ID NO: 24721 - DNA, 547 bp, Arabidopsis thaliana
caaaaatcagatgaaaagaacaatgttagtgtgtcccagtcaaaagtatcaaaattccagtatgaaaaatgacaagcaaaaaaaaaaagaagaagaagtaacctttgcagcttctgactgaagcccttctcgccatgatttcgcaagttctagaagaaggcgaatacctccatctttcataactgcttcagctcttccacagtctatactagcattctcatcatcaacaactacaaaagttgcaagcccagtagctgatctctcctggacatcttcctgtgagctttgcattaaattaagcagcaatgcggctccttcattcagccagaaatcatccaatccttctggattacactctgcagttcgtagaagcgtatgagagataatccattcgatccaatgtataaagtcattaattgttttatccttggttgttttcatcaattctctccaataggcaaagatatcctttggtttctttgtattatcggcgaatatagaagcaagtccatcaaaaacattagtaaacagagcaagtaagactttt

SEQ ID NO: 24722 - DNA, 903 bp, Arabidopsis thaliana columbia
acttatatttttcttatcttgtaataaaaaaagaggtatgatatgcattatcaaaggatctcctaaacttgtctataaaagatctcacgaggcggtctctgatcaaaacatcgtacaacccatctctttttttttttttaacttgtcttctctctttccttaactttgatgcactgtcccttctctcctacaacgctccgacctctgtctcggcaaacctcctcttcgttgtctttcctcctcttcctcctccgtatccgacgccatcgctgccctcaaatcctctgaagacactttcctctccgtctggaattgcaatcacgacgatgacaataacacagagtgcgagtgcttggggaaaatatcaatggctgacgtcatctgccacttgtccaaagaccatgaccacagtctctgtgccttaaactcatccgtctctgttcttctccccaaaactcgttccattgtcctccatgttcaaccatcctgcaggttctttattcttccaaactctctctgttttgagggtctacataaaaattcaacctttagttgtgcttactctgtttctatgctctgtttttttgtaatgttctttaaattaatggtttttgtggggttactctggtttgactaatcagcttaatagaagccattgatctgataatcaaaggagcacagaatctgattgtcccgatacatacaaagccctacactaagaaaaagcagcacaacgacaacgtttcggtcaccaccaccacccactcgaacggacaacgattctgctggatcacacaagaagacatcattcagtttctcctcggattcatcgccgcattctctcctttgccagcgatgtcctctctgatctcggtgtcataacagcacacacacagttgttgc

SEQ ID NO: 24723 - DNA, 750 bp, Arabidopsis thaliana
ttgtgaagagcagatcctgtttggctctgctcagtttctgaggaatcttgattggaacaagctggaagagtaaagcactctggtgcttcttctaccgcttggctgctcgaaaacgagttttctccattctgtttgcgaagcacaacgtcatgaatctgcaaaacagactccaagctccatgacacttctcccatcattggcctgttcttcccttcatccgctaagcacttctctgctatctccccatacttctccaacgattcaggactgtagtttcccctcagatttgagtcgatgatggactcgaggtttctctgtttttgccagcttaaagcccattccgcaaggttgatctggtctttaggcaaagttgggtttataacagctcgagcacaaacagcttcgaacaacacaacaccaaaagagtaaacatctgacttctctgttaactgttgccttctaaagtattcaggatcaagataaccaaaacttcctttcacagctgtactcacatgagtatggtccatggacggtccagctttcgacagcccaaaatcagacatctttgccacaaagttctcgtctaatagtatgtttgttgttttgacatctctgtgaatgattcctctctctgaccctgtgtgaaggtaatgcaatcctctcgcagagcctatacaagcttcaagccagttgcttccatgataatggcggaaggttcttccaaagagatgactcctgagagttccattt

SEQ ID NO: 24724 - DNA, 975 bp, Arabidopsis thaliana
actttatttccgctctactctagttctactatgctctgtttatgctctagtatgttgctttaccgtaacagtactgggattggcttgatcaatctcgtaccgaatcttaatcttggttaccaaatcctcatacaaggtagactgttgtaaattgtgacaacattttcctcctaatatgatgtccataggcaactcagaaaggtgaaattggtattgccttaaacacagcatggcactacccttattcagattcatatgctgaccggttagctgcgactcgagcgactgccttcaccttcgactacttcatggagccaatcgtgtacggtagatatccaattgaaatggtcagccacgttaaagacggtcgtcttcctaccttcacaccagaagagtccgaaatgctcaaaggatcatatgatttcataggcgttaactattactcatctctttacgcaaaagacgtgccgtgtgcaactgaaaacatcaccatgaccaccgattcttgcgtcacctcgtaggtccgtcaaccatatggctttttcttaacctataatttaacctttttctcttagacattcgtcaactaattaattgttattaattgtattaggtgaacgaaatggagtgcctatcggtccagcggtacgattatttattctattcagctttgtttagttaagaattagatcaatctcctgatcatatcaaagttatcattgatagactgatagtttaggtaaaattgtgatagaatttgattttgtacgcagtttttttctctctgttttagtagtacttgaagtagaattttacaagttaaaaatgcatgatttatccgaaataattgttaacattgtgtgatgcgtatattataatctatgattcgtttcactaattcaggctggatcggattggcttttgatatacccaagggtattcgtgactcctactacatgcaaattcagatcaatg

SEQ ID NO: 24725 - DNA, 1445 bp, Arabidopsis thaliana
tgtaggtggtgtggatcattcgtgattgctcttattagaatgatcgactcaactaacggatcatattctttcgtccactgcatctgataacttatagtaaaccttgtacgcattttcataaggtaattttttttcttttgaaatattttgatgaaattcaaatttaatacatataatttttctgtttaaataaggtagtaatgttttcttgtgatgcaagtatcggaaataaagaagaactatcatttcagcaaaaacccatcttcagaagaaaataaagataaagacttgtaatgtttagatctttagtattatgaaacgttaaagatctataatcacatcaactggagaattgcctttgtcaacaacaaagttcgtcacatacttactctctgatgtgacaacttccactgtgtaactcccatgataacctctaaactccaatcctcctccatcctcaatctctccgtccacaaaactcaaccactcgcgtttgatctccagaaacctcttcccagcttcgttaacctcaccatctgcattcaccaaatgtgagtgttctctgctcataaacagctcccagaatccccaaagcatcactccttcaactgccggatgagcaaaggcttcccatagcatcacctctagatcatcccctcttatatgttcgttagtcgaggacacatcaagttctgtgaaccagatcggtaatccgagtgtgcttagcttgtctaaagcagaacgaacgatgtgaccgacggggctggttatatgtccttgaatcccgattcctcccacgggtgcaccctttttttgcagcttgtgtacgagttttatgtacttctcgggtgatgacctcgagtcaaatccgtcttctatgtggtattcattcagaaacagagttgctaatgggtctaactcgtgtgcagtcttgaacatgtttgctcttgcatcagagtctagtcgatctcgatagaacgatccgtggagcatctcattgttcacatcatagtgtctaaatttcccattgtaacgggtaagaagatctgttacgcggttctcaactgctgcttccagcttggaacctgtcagctgttggacccacggttgaatagcggactctacctcccagaatatgcaatggcctcgggtttttatgttgtatctctcacagaattcgatcatctcgtttgcgtcccggtaattgaagtttccttgctctggctctgtccagtaccatttcagctcataaccaaacactgcccaatcgaaattgttaagaaagaaatcgacaaagtcttcattatctatattgctccgactgatgcatgacccgagtgggaaactgttacgtgtctgtctgatcttcaccgttgcaccagacaattcgctaggatctaaacctgagaacttgaggcaaacattgcgtttacgaacctgcataa

SEQ ID NO: 24726 - DNA, 1109 bp, Arabidopsis thaliana
tctcaactaattaacagaacccagaaatcagaaatgattaagaatgagtttctgatgaaatgaaccagaaatttaaacactttctcatttccaaaacgaattttgaatctcagattaaaaacaaaaggattcaactttcagctcaatatgattgatactttgtaaattaagaagaaatgacaactaattaacaaaaccagaaagagattaaaagaaagagttagtgaagaaacgaaccagaatatctaggggaagatcttcaagctctcgactctgaccctctgcaaccgaagtagttttgtcatcgcagagcttttttccaacaggtgaagtgaaaatcgaatcctccatctcatcaccagatgaaatgagaatcctctttctcccaaatcctctcttgtactgtacaaactctaaccctaaccctaatcctccattatccacatcacgacgttgcctcaaattcggcttctgggtaacgattcttttcttccccaatgccatttttatcaatctgcaacagcaaaagtacaaaaaatcagatctttccccaaatttcagagaatccccaaaacagaggaattggataaagagaaaatgaaaagtgaacctaagagcaagaaacaaacttacaaataaataagatttttccgaagattttccgagatttgttgatgtgagtcttgaaagtatatgtttgtgggaaatgaacaaaagctgagagaaaaatgagtaatttttcttttttggtgttaatattatgacaaagaaaaatgaactactacttcttctctacttatagtagattaattatctttctttttctttttaagtcaatttattattatttaaatgaaaacgagtaaagtagaaaatgctggaaatttcctaagcaaaaaaaaatatctaaattttttaaattttgttgttctcctctcttccttactttttgctggtaacaaaagacggcttacaaaaaaactagccgttggggaaagacacgtggtgaactttgagccggagaggaaccaacgtgggtggttcgtgtgctgacgtggcgacaaagttgtcgtttgacggtttagtcgcgcacacggttttgttttgtc

SEQ ID NO: 24727 - DNA, 464 bp, Arabidopsis thaliana
ttcctcacgacaggaaccctaggcggacaggccgaatccaaaggccatcgtctaaggtcgatcgacctaaaaagaagaaagctcccaagaagaagcaaagcttgccgatgacagccaacgacttggtcgaccttcggaggaggtaccgagttccggcgggggtaactatgatactcccgagttcgctgctctcacccgagaatgtcctggaaggatggtgttgcgcctacgccaacttctttgggaagtacaggctgttcttccagattctggcgtgcatcctcgagatgctctactgtcttgccttcgcctttcctcaaatgtgcccaaattttgtctgtcatgtgctggcgttgtacactcgagcccgagaagtgaacatagagttcggctaccacgaattgttacagctctgccaagtgaagactaatgccaggagccaccaggggacatactatatcagt

SEQ ID NO: 24728 - DNA, 649 bp, Arabidopsis thaliana
tgcagaatcaaaagcataaatccgccgtcaaaagtacggttttaacgagcttgctaaggagaaaggcaagcctttatggcatcttgtattggaacaattcgacgatacgcttgtgaagattcttctcggtgctgcgtttatctctttcgttttagcctttttaggtgaggaacacggctcaggttcagggttcgaggcctttgttgagccttttgtgattgttttgattctgattttaaacgctgtggttggtgtgtggcaagagagtaatgctgagaaagcacttgaggctcttaaagagatgcaatgtgaatctgcaaaggttttgagagatgggaatgtgttgcctaatttgcctgctagagagcttgttccaggggatattgtggagttaaatgtaggagataaagtccctgctgatatgagagtttccggtttgaaaacatccactttaagagtcgagcaaagctcgttaaccggtgaagcaatgccggttttgaaaggagcgaatcttgtagtcatggatgattgtgaactgcaagggaaagaaaatatggttttcgctggaacaacggttgttaacggaagctgcgtttgcattgtgacaagtataggtatggatacggagatcgggataatcagagacaga

SEQ ID NO: 24729 - DNA, 712 bp, Arabidopsis thaliana
atcatccatcagcactgccacacatacgatcacttctttaactactagaatttataagatgttaatacagaacaggaagagttagttaccggcagctcggtatctgtagggataagttcgcagagggtcgagtgttgtggccatgtcaagatcttctttggctttttcacgttcacagtactcagaccgtttctcgtaggctgctgctttgctacacgacttctcgatcagctttgtcatctcctcacaagcttctttacgttggttcttcaaaaaataaactcgcgccagcccttggcgtgcacgagtgtgtttgatctctatagcgttcttatatgcggtttcagcttgatctagcatccccaaattgatgtagatgctcccaaggttgttcagagcctgcagaaacataacaaaacgactaatcagattacagtgtgaataagagaaagagaaaggcgagacatcaaaatgccaacctgtcctttgcgtagcccatctgaaggacacttgagggcttcctctagaacctgaaccacacaagagatctcgtctgcatcgagattcttgtcagctagagcatatgctttgaggaaaaatgcttcaaaggatcgctgaatagagattgcctcctcagctttagtaagagtttcttccacataacccatgtcgtataaaagccacccttcgtagaccaacctttctgcctcag

SEQ ID NO: 24730 - DNA, 1703 bp, Arabidopsis thaliana
ctggtcaaagatacgcagttagctgaaactgttctcaaagagctcatcgctttggagccatggaatgcaggaaactatgttcaattatccaacatatactctgttggtggcagatgggacgaagctgctgaagtaagggacatgatgaacaagaaaggtatgaagaagatcccgggatatagttggatcgagttggaagggaaggtccatgagtttctagcagatgataaatctcatcctctaagcgacaagatatatgcaaagctagaagatttgggtaatgaaatgaggcttatgggttttgttccaacgacagaatttgttttcttcgatgttgaagaggaagaaaaagaaagggtcttggggtatcacagcgagaagcttgcggttgcgttagggctgatcagtacggatcatggccaagtgattcgggtggtgaagaatctaagggtatgtggagattgtcatgaagtgatgaagttgatatcgaagatcacaagacgagagatcgttgttagagacaacaataggtttcattgttttacaaacggctcttgttcttgcaatgactactggtgagctcgctatggtaaaacaaactgatgtgaaaacgtaattgttttgtagctttgacatttttggaagaaataaacatatttttggtgttacatggtttttaagaaaagttggcagagacagaaatataccttttttgacatgtcacatgtctaaacatactagataaatagtacatattgatgaacaaaatcaaagtatgaattttaaacttgttgcatatagatttaagtccggtttgtggagtagtacataactcaatactacaagaagacatatcaaacaaatcaatgtccattggtccatctcaaacatgtatgatcaaaatgttgcaattatagtaacggcccaaaaagcccaagcaactctataaatagtagtaatattgccgccacaacaaaatatatccacaaatccctaaattacattccctggttgatcaacggcgattcaactccgtcaatgtcttacccggaaagaaagaggaagaggagtcggtggtcaaagccgcattcgacccaaaacccgtcaccgtcacttcgcgatgatgtgctattgagcatcttcgcacgcgtcccaagattgtactatccgactctctcactcgtttccaagagctttcgatccctcctagcttcaccggagctttacaaggccagcaggtcattcttgggtcacaccgagcgttgtctctatgtgtgcttacggtgctgtcctggttatcgctggttcaccctgtgtcggaagccagatcaaaccctatccaatgacaccactgaaaagaagtcaagtgggtatgttttggcaacagtccccattcctagttttcataaaccgcgcttttcgagtctcgtggtggttggttctgatatctactacatccacgggccctcctctaacgtctcgattctggattgccggtctcacacgtggcgccaggttcaaagctcgattctagattgtcggtctcacaggcggcgcaaggctccaatcttgccggtggaacattcgtcacttactgctagcgtccttggtgaaaagatatatgtagcaggatgttacagcgatatgcatttaggttctctttctttgaggtgtcgacacgaaaacggaagtttgggttagtg

SEQ ID NO: 24731 - DNA, 559 bp, Arabidopsis thaliana
ctagtaacggtcgccagtgtgcactagggcgtttgcctgccgacggtaaactgctctcaccgtttgccagttttgatgaaagcgccctgaccggcgaatccattccggtggagcgcgcaacgggcgataaagtccctgctggtgccaccagcgtagaccgtctggtgacgttggaagtgctgtcagaaccgggagccagcgccattgaccggattctgaaactgatcgaagaagccgaagagcgtcgcgctcccattgagcggtttatcgaccgtttcagccgtatctatacgcccgcgattatggccgtcgctctgcttgtgacgctggtgccaccgctgctgtttgccgccagctggcaggagtggatttataaagggctgacgctgctgctgattggctgcccgtgtgcgttagttatctcaacgcctgcgggaattacctccgggctggcggcggcacgcgtccgtggggcgttgattaaaggcggacggcgctggaacagctgggtcgtgttctcaggtggcgtttgataaaaccggtacgctgaccgtcggta

SEQ ID NO: 24732 - DNA, 1853 bp, Arabidopsis thaliana
atatgctattatcataggtcatgtgttagataatctaaattagtccgtctgtggtggtgtatacaacgagttttggttacatctaaattagtaaagtcaaagtagtgtcactttagtaggtaattagagttttaccaccatatcatcctaagattcaactttgttcttagagattaaattgtagtgtttcggacatgtctcatattcatggttgtcactagggagattactaccgtatggttatctacttgtatatttaactgtattgagcttggaaaataagtatgaatgtgtttttcttttcctaatgtaaaagtttgcaagcaccatgacaccagaagattggatgggctctgagctcgagccgtatgtggtcttcagcgctgagttcacgaagcaccgtatcctccaactttctcctattgaagtaatttatatataatcatcattataacaaaaaaaaaggaagtaatcatcattatgatgatgacatatatatagtactcatgaatatgttaatcttgatttaggatcttgagcttagattgcttctaaagaggcctggttcattatttcttaatgatttatcgaggatgaagaacttttctgaaaaagggtatggatctgttcctcgagcttacattgtgagcaaagatgaccacaccatctcggaagaatatcaacgatggatgatcgataactatccgccgaatttagtgatagagatggaagggacggatcatttgccattgttttgcaaacctcaactactaagtgaccatctattggcaatcgccgacaaattctcttaaataatattttgatgaaaatgtatttggagtggtacaatcaaacgtgttctaaaatggatcttcataaaggttcaaacttatttcttagttcttactatggttgaaatgagaaacctaagtcaatctagtgtttgtttagaaggactagaaacagtcaatatacaaagagtgtgggggaaagtaatcctcgagatatataactttacgttgaactaagatgttgaaagcaaagaagaaagaaaacaatggagaaaaataacaaggaacggtttgtgctcgtacatgggctgtgccacggggagtggtgttggtacaatgtgaagatgcatttggaggctataggtcactgtgtgaccgcggtggatctagctgcatcaggtataaatatgactagagttgaagagattcagactcttaaagattactgctaacctttgcttaagtttctgagctcttttgtgtaagtgcggatgatgtaataataaagagtataaagtaaacgagacaagaaatttgttcacgaagcctggttttttctagtccacgggaccatatccagattttactagaacaagaaagcaaatacaacctattcgcaaatgcgtaaatcaaacaaacctcttgattcactgctccgttcaataacatgaaaccttaatgataaatctctacctgtactaaacctagatttcataaagataacctcaccttgagctaaattccccatgagcctagacttcacttctccatgtcttggagcaaccgccacacacgaacttcacaccaacaaacccaacgatcaccaaaacgccccaatacttacgtcaacaccaacacataaatcagcttaatcacacaagcaccaaacaccgaaactatgtcacacactatcacacacaatctctcatgtcgaatctctttgggatatttatcctcctcaaatccacattctcataaggtcacgtcccccttatataacagacataaacttcactccaatcacacataagacatatttacacattccataagaaaaaaagt

SEQ ID NO: 24733 - DNA, 643 bp, Arabidopsis thaliana columbia
cgtgtgtgaagaatttgtgagacaattaacaagaggagatcccaagtatatagttgttactctgttttttgagcatacataagattatagtagaaattttggtctgaataataagagttgtgaattatggaaatgcagtgtgagagtatgggagtagtggagaagaagctggaggaaatggggatagattatgtaagggcattagtagaagaaggagggatccaagtggaccagctcttcttccatgaccctgatggcttcatgatcgagatttgcaactgcgatagcctccccgtagtccccctcgtaggagaaatggctcggtcctgctcaagagtcaaactccaccagatggtgcagccacaaccgcagactcagatccaccaagtggtctacccttaattataaacagctcacttcttctttatattgtgtgtgtttgtgtattggtgtgcttggttttgggtgtaatatacaataagagaccgatgtgaatcagcgaatgtgattcccttcgaggaaatgaccattctctttgctccacaagcttatataatataatcaagggaaatcatgttttacatatatgtatattggttaatgtatttggttcgatttaactcttttgtgcaatgcaactaaa

SEQ ID NO: 24734 - DNA, 1007 bp, Arabidopsis thaliana columbia
  unsure (1)..(1007): unsure at all n locations
atgaaatcgtactgtttgaattttaggtcttcagatgttatgagtctcctacgacggtgacggattagtttggtgcaaatgcaatttcttttggtcgtgaaatctactcaacgtactatgattcaaactacgcgtcgtttgattattcttttctccgaaaacggcagaacgtgcgagtttgaacaaatcaaactaatcagtgggctatatataacaaaccagaaaatactctctgtttttccatttgtttttttgatgatgacatcatgtatatttaccaattcaagagattcaggtcaagaaatcaaaccaaaaccgaaccataaagatcagagagatttatggggaggatatagtttccagagagcaacagttgcatcttcagacgcagacgccattagctcacagtctggagagtaggacacagcgttgcactgcaaacaaaacacatgaaggcatcaaaatacaaagatttagaaaatggttgtctctcaactgttgaaccagtctaagaaattttcacataccgttgctcggtggtactttagtattgctagagcatttcctttgcggtaattatagactcgtattctgtttccaaatatgtaacaaacaggagaatagtttttagtcatatgcatcaactttttttcacactggacgaagtctaattgatttattcatatgttttgtttcatattgtgaaaatcagtgcatagcatgaggatgctaacctgtggtcccaaccagccgtggctgcaattttcccatcgactcgaattgaggtgcccgatacaccgggcctttccaaagtaatctctttccttattgtacaagaaccctacaatcatatgaaaaaatgtcatggaatcagtattaaactatagctttacggcaatcacacaagtgcatcctctctagcagatgtcaaacttacagttgaatggttgagattatcatcacaattttgtcatctgccctcctgagattcnccatcacatgatgat

SEQ ID NO: 24735 - DNA, 607 bp, Arabidopsis thaliana
tatctgcttcttcaaaagtcagaggtacgaaatgtgttgacaaacttcattgcatatgcagagaaacaatttggaaaaacaataaaaatcgttaggagtgacaacgggactgaatttatgtgcctctcttctcactttaagcagcagggtatcatacatcaaacatcttgtgttgcgacgccacagcagaatggtagagttgagagaaaacatcgccacattcttaatgttgctagggcattgttgttccaagctagcttacctatcaagttttggggagaagcaattcttactgcagcatatctcatcaattgcacacccttttcagttaacaatggtcgttccccatatgaaattctacacaacagcaagcctccctacgatcaactccgagtgtttggttcagcttgttatgttcatcgtatggctcgagacaaagataaatttggagaaagaagtagactttgcatttttgttggttatgcttatggaaagaagggatggaaggtttatgatttggagaaaaatgaatttttcatatctcgtgttgttattttctgggaagatgtttttccatatgcagctggtgatgttaattatgtgcatg

SEQ ID NO: 24736 - DNA, 970 bp, Arabidopsis thaliana
gtcttttcttttctttgttttcggagcgacttatgttattttaaagagtgtcccggattagtctttcagtcgagtcattatttagtaaatcaagaaaacaaaatttccccctagctcgttttcttgtcactaaataaacaatttgattttgaggttcattatatattttagatgaatttggtgtttttggtactctttcattaatggtggattcaaagacattgagagagcttatatatattcttattcgatttcttctattggtttactgattttgaatgatcttttgaatcagaggaatcagtcaagctcacataaaatgaatgtatcagtgacagaagaaagacatgagtaatacaatgcagatgagtattcaagtatagatgattgctggcaatgatatgaaagcaacaaacagttcaagatgaaataataataaataaataaacacagtagaggaaaatgttggaaactaatgttttttttttttttggtttagtgtgggaaactaatgttgtttctactttcgttgcttattcgatgatgatcacttgcaataatgagtttggctctgggatctccttggttgatctggaattgatctgctagtctcatatggaccatcaatagccaaacaaacctgatgagttatcctcctttgcttagctgagctgcgtgttctatagtggctgggaactatgcagatttggttttaaatgttcatgacttactgttttttcattttccactaagaaaatgttggtagtagtggaaagtcttctttgaaaatgtaactagatgatccgacattagatatgaagacttcttagagtttggatattttgaaatattggaaagaaatactcaacgcaatggagaattggttccattgcttgcgaccttcttcgtattcaatcacaatagtagcttctgaattctctttaagtattggacttcagttttgacaagt

SEQ ID NO: 24737 - DNA, 408 bp, Arabidopsis thaliana
cttctctgttcccgcatttcatgcattgcatatcatatatatgggatggcgtttaactcaatctagttatagatgcaacttaatcattttgtgtaaaacaacattgatcattttagtctctaacttgagtccaatagaaagacagtcagatagccggtttcacatcaagtctggttcttacctcatattcatatacaagaaaatcttgtcatcatgttttctgcgtatatggcgcgtgattgaactttcatattcttccttttacagcttcggaatttggtatgggcgacatctaagcatgatgtatatctactgcaaaattattcactcatgcactggtcatctctactccagagagggatagaagtacttaatgtcgccagatccgttaccccactcaggtgagag

SEQ ID NO: 24738 - DNA, 611 bp, Arabidopsis thaliana
ttcgtttcaaatgtgatcttatgaggtgtgaaagatggggaggggtcaaataatttcaggtctagctgtagaatctttagcatttcgagatatgttaaggctttctagtgcatagtacttgtatatcctccgcttaaatgtttttacttgtatatcctccgcttaaatgtttttgactatttgtagttgtgcatctggaatattagtgtttcttgatagagcttagacatcttttgcaaaactcttattgacctagcataaagtttaagagcaatgtccatgatttctttgctataaaatgtgtaaaatatggcctcaatcatctgtgttaatgtgcagggtgtgtgtggatgtgaccgcttcactagtagttctattagccatgtacttagaacgatagtgaaaaaagatggatacagaggacttctaaggggatggctcccgagaatgctcttccatgctcctgcagcagcaatctgttggtccacttatgaaggagttaaatctttctttcaagacttcaatgtcgatcaaacactgcctgaaaaacagacaaaagggttaggctatttccactcttgaggatctgctttcttatttgttgtacatag

SEQ ID NO: 24739 - DNA, 1455 bp, Arabidopsis thaliana
tcatcaaatggtagcaacaagaacattttcgaaaacatatgttagagggactgtaagcacatgatcaaaccactcaacttttccccaaatttcacgttttttgcgcctttcaagcgtaatcactgcacaccagagcatcttattagacccactataagtcatattctccttccacaaaaccgccatctttccaccaaaattagctaatctaggacaagcaagaataataggtagttgttctaccaaaccctccaactttctccaccgtcctagctcagtgtcataccatctgaaaacagtgccacgccatgttttttcgacagagtacaaaacgttctctatctcacaataatcatatgaagacttataactacacatctctgattcaacaaggtcccatatacctttcttgggattgtaagaaaccacctttctcttagcccctacataccacttttcgtcaatacataagcttttggagtaaatgttgtgttttgtttcgttgtaagggataggtacatgatcccaaacttgtgtttttgtgtcgaacacctcgaaagtgttcttcaagttaagagaatctccatctttgcaacttccggctacatatatctttccgtcaaggacgccagcagaaacttcaactagctccactggcaagcttggagcctcgcgccacgtgtgagaccggcaatcaaaaatcgagacactagagtaaggtgatatggatctgccaatgttgtagatattagaaccaaccgccacgagactggaacgttgcacaagacgaggatgtggaattgatactgtagcccaaacatacccacttgacttcttcttattacttgtttcagaagatagggcttgatcaggtttcaagcagagagtaaaccagctagggctctcaaaaggatttaagtataagcatacatatagacaaccctcggtgcggttcaagagtgaccgttccttgtaaagctccggtgaagctaggagagatcgaaagctcttggagacaaaggagagaatcggataatacaatcttgagactcgtgcgatgcagcttattatcaaagcatcgggaagtgacggatttgagttcgattccggcgctggcgaaaacttttccggggacgacattggatgagtttaagagacgaaaatggctgttgaacttggagaaaacaaatttagggttggactttatatatagagggattaaaaccggttaatgcctttggttaaggggagaaccggttatttgttttgtatgttttgtttggttaagcattgagtagtgagttgttgatagcttcatttatgaacaaccaaaaaggctctatttgtatgctaataatgatcactcgaaatctctaggtatgaaacgatccttatagttgtgagatgtgagttagttttaagaatttatgtatgtattctatatttcttattatg

SEQ ID NO: 24740 - DNA, 521 bp, Arabidopsis thaliana
tttctctcaaatttctgatcctttgatccaacagttagaagaagattcatctgatcatggccctcgaagcgatgaacactccaacttcttctttcaccagaatcgaaacgaaagaagatttgatgaacgacgccgttttcattgagccgtggcttaaacgcaaacgctccaaacgtcagcgttctcacagcccttcttcgtcttcttcctcaccgcctcgatctcgacccaaatcccagaatcaagatcttacggaagaagagtatctcgctctttgtctcctcatgctcgctaaagatcaaccgtcgcaaacgcgatttcatcaacagtcgcaatcgttaacgccgccgccagaatcaaagaaccttccgtacaagtgtaacgtctgtgaaaaagcgtttccttcctatcaggctttaggcggtcacaaagcaagtcaccgaatcaaaccaccaaccgtaatctcaacaaccgccgatgattcaacagctccgaccatctccatcgtcgccggagaaaaa

SEQ ID NO: 24741 - DNA, 452 bp, Arabidopsis thaliana
ctactaagaaaaatagctcggtattgaaaacaaaaagaggaaaaacttatgtgtcatattgaacttaaacagtagagtcatgtcgtcacttcccgatgatttgctattgagcatcttcgcacgcatctcaagattgtactatccgactctctctcttgtctccaagagcttccgatctctactagcttcaccggacctttaccaagcccgatcactctcaggccacactgagagtcgtctctccgtgtgcctccattttccttctggccctaacacacattggttcactctctgtcggacacctgacggacacctaaccaatgacaccagtaagaagaagaagtcaaatgggtatgttttggctactgtgccaattccccattctcctcctgcaaacttttcaagtctcgtggcggttggttctgatatctacaacattggtggatacattt

SEQ ID NO: 24742 - DNA, 598 bp, Arabidopsis thaliana
ttgtagtgcgcatatgtactcaatgaatgtgtagtgctccaaaagatggtatgacactgagctaagacggcggagaaattggagggtttggtaggactacctaggttctctcttcatgcttgtgttagattggctgaatatggtggaaagatggcggttttgtgggagcagaatatgccttatagtgggactggtgacagaggcggtaagaagatgatttggtgtgcggtgattacgcttgaaaggcgcaaaaatagtggaatttggggaaacgttgagtggtttgctcatgtgcttacagttcctaaaacatttgttttccaaaagtttcttgctgctactgtctaatgaatgcgtatgaatgacctcgtctcttgtttcactttctagccatgtccacttgttgatgactaagcttatcttttgaccaaaaaaaagcagtccgccattacaaaatttgaaaatacaatatcaaaacaagaatgatagaatctgtttgttcacttttcagaaattcttgaaacttacaaacaactgataaactatcaaagatcgttccatagtttcgagaatcggaatgaacattagtatcaaacag

SEQ ID NO: 24743 - DNA, 1146 bp, Arabidopsis thaliana
cccaaaccattgtggagtaagtaattgcagtcactgctcctattaaggagagtcccgcaatagaattgaggtttggtagctgagacagaacgatgcagagagatgtaaacaccaaataccattcaactgttgttaacggattcgaggtgcataatggaccgcaaactatctggaagaagagtttcattgtctctccaccgatcagaatcagcgctgtcgcggttcctgctgataagtaaaccgtaggaaacaatgcaagccatactcctaacctttctcctgttccaatcaagagtacaagatttagtaatagcaacttagcaagacacaaaattagtatcaataataattgtcactattgatgcattatttcatcattcttaatgtaaaactaaatttatcattttaccaaaagcagcttgtgcaagctcgacatatcgattgtagcgtttcccggggacagcttcgtgcaactgaaccagaatccacagtgtgtagagttgccagcaatatgctattgttaaagacagtatccccaactcctgtaacaacaataattcacttcttgaagtttggaaataatatatgtgcattttcttacataagaatctcaaatacatgatcattgcaatatcattattcatcactaagctatttaagtattgaactagccaaatgctccaccttaacaagttatgtatagtttcaaatattagaacttgcaataaaaaatatttatctaaatataagtttataagaagaaatagtcatctattatgacgtcaactacatgccctacttatatatacacaataaatacttttcagaaaagtgttttttgccggaaattaacaagaaacaaagtagacgataaagaaggctctgtcttaatccaaattaaagcaaaaaagtatgtctgtgagtatcacatgtgtaatgatggaagcatgacaaattaaaaagaaaatatctactgctaaaattgaaatgttttcaaagttaaaaagtaaattagtcaatatcctattattatttccgacaagaaaaacatttttgatttttgcccaaacaagtaaagtgaccctgaaactggatctgagcaccacagagagtcgaataaaccctcgccgttcactaaacaaaaat

SEQ ID NO: 24744 - DNA, 2616 bp, Arabidopsis thaliana
gtttaaaagcagttatttttactagtcttgtaagaatgagtttaacaaagaaagcaagtgaaccaaagctaagtggtactagtatcaagccaacaactttaaaccctcatgctgctgagtttgttccgtttactctacgttctccttcatctggaggtacaagtactttggatacaagacttttagcttcttctagttctgttgggaaagcggttttggacaggacagaatcatctgcgtcacatcattcagatgaagaagcacgtcagttctggagtcatcaacttcctgatgatataactccagattttgggttgatgactcaagatgacaattcttatggatctggtagtttgtcactagctaacttgtcgttgtttgacggtaatgaagctgagaagtttccttctgctagtggaggatatggcttttcagatcaaactggattagcttcacataatgctaatggtaatagcttggctgataagagtagatatcccatttcttcatttggggaagatcctcagcgacagagtttcatgcaactgagtccaaagccttgggataagcaaatcatgaatgctgagcagcttcttgggaatgacagggaaagaaacccttttagtgggaaatctcgacatggctttgttaacgacatgattactgagagtccaggggatatggaggtgaacctgtggattttctcgcttctcagttccccggattcgccgctgagagtctagcagaagtttattttgctaatgggtgtgatttgcagttgacaattgagatgcttactcagcttgaggtattctcctattcaatatatggcatagcttttattgatgttatgttattaaattctatgtttattttcttctctgtatagctacaagtggatggtggcttgaatcaaaacataagccctaagacttatgctcctcctagtctaactccaatggattttcctgcactaagcatctcaaatagccatggtattcctgcccagtttggtggggatgatttgcaacaaactggaaatcattaccaatctcctgaaaaggataacatgttcttcttcaagtcgggaccatcggtttctcagcctggtgcaatcgattatgtttctgctgtcaggaagttagcatctcaggattctggtatgtggaaatatgaacgaaatgattcagcagactcatctattggctctagcaggaattctggtgcttacaaaagtggccgtgggaggagtatatattctgataagctgcaaagtcgagcccaaactcgacctgctcctgtttgggtggagaccggggatgctgttggtaagtttcttcttttaacaaactttattgcatagacaaataactatatgagtcttgttatacatctgtattgaacatatgttatcttattcgacgatgttgcatttctggctctctcttttatctggggatgaacaggcaatatgtattctgagttacgcgaggaagcacgtgactatgcacgtttgcggaatgtgtactttgaacaggtataatatacttggaaatgacattttactcatttatgtggcctctagttgttctgcagacctgttgttttttgcaactgggaagttccatttggtacatacctgtctattaatgttaaggccgtgtaatgtggcctaaccttgaggtctattgtccagattgatttttggaaaatacttcgggtgtatggcgtagtgaatcataagtatttggaatcttgcgtgcaatttatgatgatagtttataaagctttttgtcaatgatggggttttcaccggttttattacttcgacgtcatcttattaacctgttatctttctgtcttagtcatgtacgctcaatattctatgttgcttctggttgagcgtaggcacgacaagcataccttgttgggaataaggccttagccaaagagctaagtgttaagggacagttgcataatatgcaaatgaaggctgctcatgggaaagctcaagaagccatttaccgccagaggtttgacttctttacctgcactgcatctccttgtaacatgatcttttatccgaaacacacactgatatctccataaatgaaaaacaaaactcctgttctcagtatctctgttctaacctgcctatgagtaaaaaatgaaacaggaacccagtgggtcaaggaaacagtagagggaatgagagaatgatagacttgcatgggttacatgtgagtgaagcacttcaggtgttgaagcacgaactgagtgtgttgaggagcacagctcgagcaacgcaagagaggcttcagatttacatatgtgtagggacaggccaccacacaaggggttcccgcactccggctagactcccagttgctgtacagcgctacctactcgaagaagaaggtcttgactattccgaaccacaggccggtctccttagagtcatcatatactgacagacaaaagccaggtacttatataggatacaagaccgtaaaagataacaaaatacaggaaaggtgaccacgctattcatttgttgtatctgatctgtacatgggaagagaggagacagagactagctgatagtgaagaaggaaa

SEQ ID NO: 24745 - DNA, 795 bp, Arabidopsis thaliana
tataatttcttctgtccccaaatatactacgggtctgctgccacgagagagcaactaacgcagttagttgagtttgcaaagaagaacggttctataatagtgtatgattccgcctatgcaatgtacatgtctgatgataacccacgatccatcttcgaaatccctggagcagaggaggtaatagactgattgattataacattaaaaggtccatttttcaacatctttcttcatgtgtacaaccgcttacaggtcgctatggagacagcttcgttcagcaaatatgctggtttcactggagttcgacttggttggactgtcatcccgaaaaagctactctattcagacggtttccctgttgccaaagacttcaatcggattatctgcacttgtttcaatggtgcatctaatatctctcaagctggtgctcttgcttgccttacacccgaaggacttgaggttagcttagctaaagagagatctcaaaccagttcccactagttcagatatgcaaaatgatttattttgttgtcttttgaatcattgcaggcaatgcataaggtgattggattctataaagaaaacacaaacataatcattgacacattcacatctctcgggtatgatgtatatggaggaaagaatgcgccttacgtatgggttcacttcccgaaccaaagctcatgggatgtgtttgctgagattctggagaagactcatgtggttaaactccaggaagtgggtttggaccagggggtgaagggtcgttcgtgtcagtcctttggcacagagaga

SEQ ID NO: 24746 - DNA, 1003 bp, Arabidopsis thaliana columbia
cgactcatcccctggagaaaaacactcagtttcatatattttctgaaagtcaaaagattcaagctatagtttctgaaaacaacataaaatgtgggtttctaggtgataaattgtgaaacccaaatcctttgcaacatggctcagagggggagggttcttttatttgacaagcattcatctgacaagatgagaagaaataccagtgcgcgggatatcaaaaaggtcataacagcaggaaggtcctttgttgtcaatacgtcagcagcagattgcagtgctaaggcaattccttgccttcctatccaaccagcatcaaagacatcctcaccagacgtagcatcacggatgtacagagaaaataaagttgaaagggataactgcaaaaccaattaatgtttaaaacccatacttatgccacaaaaagtagtaattcaaaaaatgcaaagacctggattgatgacgggctttcatgaagagcatcagccagtgcttctgctgcagctaaacggacgttgagatttatatgagaaagtgctttaaagattcctgaataatcagtccccaaatcatgaccatagcgggcccataaatcatctgctgattcagccactgactgcaagcataaagatcacagagcatcagattgtgcaacagcgaaaaacataggaggacaataactttgttagcctcagtcaagtacatcaatttatcaatttattatagttgacgcagcaaaaaattagaaaacctgtattatgtacaatacaaaaagataacataactagatatcacatcaaattcaggaggttaaccttttcagggtcatgtagagctatccaaatgtttgttgctattttaacattctgaggaagggagcatttggaaacagctggaatacacttcacagcgtttaagcaggcgagtctgacatgaacatcttttgaatagactccatagagcgcctgtaaacaaaacaaaatatgaaatacaactctctcgaacc

SEQ ID NO: 24747 - DNA, 1021 bp, Arabidopsis thaliana
gcagtggctacttcagattggcaagatctctttccaagagcatatgttcagttgatgtcatggggtggctctgatcatcggccccttttgttggatacaggaaacagaaaatggagaggatataaattgttccgttatgataatagatggagatttgattctgctgtaaagcaagaaattcacaaagtctgaactacacaatgtcaagacattcagagcacaaactttcatcttgcgctcaagaaatgtcgtgttagtctgtcccgatggaagtcgaagcacattaccaactcccagaagaaaattcaagagcttaagagtaagttgcataaggcttatgagactcttccaataaactatgctcatatcaatgatctcaaaaatcagttggttaaggaatatcggctggaagaggaatattggggaactaagagtagagttcaatggcttcaagctggagataaaaatacacggtacttccatgcgaaaacaaaacagaggaggaattttaatcgtctcacttcccttgtagatgagcagggtaacgtttgtactaaagaggatgaaatttacaaccttgtggagacttacttcagcactcttttcacttcgcatggcagcaacaacatggaagaggtattgacgtctattcagcctagagttacagaggaaatgaacaaccatttgaccaagccggttacagaagaggagctctctcatgccctatgcagtatgaatagagataaatcacctggtccagacggtcttggagctggattctataaagatcattgggcggtcttaagcaaaggtgtgtttcagtatgtccaaaacttttttaatacgggtaccttagacccaaaactcaatcacactcatatttgcttaatcccaaaggtcgagaatccattagaagtcaaagattacagacctattagcttgtgtaatgttgcctataagcttatctctaaaatcttggctgatagactccaaccttggctccaatttatcatctcagaaa

SEQ ID NO: 24748 - DNA, 1165 bp, Arabidopsis thaliana
tctctgtgtacttcttccaacatctccaagctgctcatttctgtttctctagcttcctcgattcttgcagaccgctgctgctactcttgcgttcgcgagttcttctgcgtcgtcagcacgtttgctgagctcatagtactcttctagcgaaagtgtagcgcttcgtggagactcggtgtcattagctttcaatgttgattcactctcctccaaagccttgatggcagctaaggccagcctctctgaagctttagctgcttcgatttccttctgcgcagcaaatagcctgctctccattgtacttgctccagcttttgcttgctctgcttcttctttcgcctttcgtagctcttcgcgagcaacttcagcaagtgactttgcttcatcagcctcttctgctgcttgctgaagttgcttcggtagctccaccattttctctctcgcgtctttctcctttgactgaaccgaagctatttccgacctcgttctgtcaatttcagcctctatagaagctactgctatagaggccattccttctctctgtttgatagaggcaagagtagacttttctttctcgagttccagttgcaaggaagaggaggccaatttcaagcaactcacttcagcagctgctttctcaatattgacattgacctcttcaagttccttctttgcagaggcaacagctgcatgtaaatctggatggctcatgttttctgtcgaaggatcggtgtttgtggttgagtcacacgcttcttgttttagcttggattccatataagctaccaattccgccttcaaatcaagaagcagcgctgaggcagtgtcgagcttcgattttagatctttcgaagaatgtatctgttggttaagtctttggagttcctcttccgcttgcttcagttccttctcccaacggtgagtatcctggtctctagccatagctgctccaatcctctgttcttccgcctctaaatgagaagcatgtgctgattccaatgactcctttgtagctatcaactctatggtgagttcttccactgtcttctcaacttcttttgacgccaacattgcttcttctactttctttacagccacatctttatcttgcaccagagcatcatattccttatgcagagtttctagttcatccttgacagaagac

SEQ ID NO: 24749 - DNA, 1678 bp, Arabidopsis thaliana
ctctgattcgcctttttgtgtttgtgttgagtcagggtgaagacattcatgatggctcagtcagagaggtgaaagaagagaccggagtaaggcttcttcatgcctcaacttttcactgtcctctttacagtttacatgagaccaagagctaatcccactcttctgcatcgtatgttttcaggtggatacagaattcgaccaaatattggccttcaggtagcaactccaactgcataatcttctatattgcaacataactgattctcgtctgttttaaaattctggcagacaaacacacaaagcgttctttggaaagtcagatttgttcttcgtgtgcatgttaaagcccctttctttggagatcaacgcacaggagtcagagattgaggcagctcaggtaacagtttttgctcctcacttcaacgactctccagtctcatccactaaaacactcataaacctcttctctttctgaaaatgggaatttggtgcagtggatgccttgggaggaatacataaatcaaccatttgtacaaaattatgagctattgaggtatatgacagacatttgctctgctaaaaccaacggagactacgaaggcttcactcctctccgcgtctctgcacctgatcaacaaggcaacttgtactacaacacccgcgacttacattcgcgcaattgaccttctttctcaacaaacagagctttcctcacagattctaacgaagctggtttctttgctgcctctctatgtaagcattttgacacttgaatcactacataactctcaccaaaacataaaagcatcccaaatgaaaacatttgcattcaatacaatggctttagttacatacaagattcaatgaagcagattcgttagtgaatcctattgttcaacaagcacacttgatcttctttacacagcctcaaaatctaaacccttaatgcacatctgattttacatcaccaacaccaatgttcgttctatcacatgatagataccttatatgggtcgtaaaaataggcatgtgtatacatgtatttatgtatctatatacagagagagatccacttcaccaatctttgttaagtccttgtcctaccggaggcagctccacctccactgtcgctaccgccacctgtgctccatacatatggttctgctggtgaagaaactgatgatgttggtgatactgcatcccaccaccaccaccgtagaacccaccgccatctccgacagcatctctctgatgctctccgacctcaccaccagtctgtggcctccctagtccagtcctctccccttcgatctccctaaacctctgcaagtaaactttcaatggctcaacataatcctcaaaacctagagtagtcatagcccagagcaaatcgtctccgttgatcgtcttcctcttctccttctgacacttatcagatgcttctccggtgacgaagctgatgaactcggagacacactcctgcatcgtctctttggcatctttagagatcttggcgttggcgggcaaggccttcttcatgatccggctgacgttagcgatcggcaagaacctgtcttgctctcttggagacaaggaggactgtccgttctggttgttcccgttttgccctccaccggaatccctgtcggaatcccccaatttctgaaaattacaagga

SEQ ID NO: 24750 - DNA, 582 bp, Arabidopsis thaliana
tgtaagtttgcttcattcgaaattgtagctacagatctcaaagctcctcctgttggccatatctctctctaacaaacgcatagtaacacttgaccacagtttgacttctcggcggtttcatggcggcgactatggcagattataatgatcagatcgtcaatgagacctctttttacaaccgaatggttctgagtcaccttttgccggtgaatctatgggaacctttaccacatttcctccagacatggctccggaactacctcgccggaaacatactctacttcatctccggcttcctctggtgcttctacatctattaccttaaactcaacgtttacgtccccaaaggttacttttttcaatttcgatgttctgttttgaaacctttcttttgttgattccttcgattgtatcgcctgatagattgtgttatacgttaaccttttttcttactgttactttcagttcttgtcttctacttctcatttaattagttttaaagtttaatatttttggctaaccacattttttaagttgaacttccatgaaatttgagccaaaatatacatgaaattgaattgt

SEQ ID NO: 24751 - DNA, 1013 bp, Arabidopsis thaliana
catctccaccagaactcccgatctttgaacagcaagttcacagccgcttcgtatcactcaagctactcaccacgttcgaacacactcaaaaaccagagactttgccacagtcctcctcatatgttcacaaatcggctcagcaaccttcttacccaatctcggttcaatcaaggccaacttagcaaatatcttaagaaccttgatcagaacccaattattccttgaatcaaccaatactttatagaactcaggagctaaaggaagacaagactgaggatcctttgtagcaagctcacagaacactccaactacagcagacagaatctgcggatcagaggtttcaagattctcaactagacgtttaaaacacaccttaacagcatcatgatacttctcaaaaaccctcaaaaccacaccaattgctttcttcttcacgaaagatttactactacccaggagagtaaacacttcaggagtcaaatctctagctaggtcatgagttccgatcctagacaaacattccaaagctagactaacctcgtattcattagcactattcaaatcctttctcacctggttagtgatcagaagcataaccgaggtctgatcgttgaatgattgagtaattgcttggtaaccgatcctcttgtgttggaatcgtgaagaagacacgacttctacggcgtgaaacgggcccaagacatgtcgacgccgtgaagtgcggcgaggtaagagagcttgtgaagagcggtggatttagttgagagatctgtggctttgatctcgcggcggatttcttcaacggctctagaaatgaaattggattctccgagaagctggagacgaaagcctttgattagatcctcgagacttcgttggaacaagttgtccattatagaagtggaagacgacgacattgatgattctcgtggttttgaagagatccttcttagtggttaggtcttaaactgtagttggaattgaaggaccatcaattgatgttgggagatgag

SEQ ID NO: 24752 - DNA, 742 bp, Arabidopsis thaliana
ctgtttctttggcttctccaacctcagaaaccgctgctgcaactcttgcattggcggcttcttcagcctcgtgagcacgcttgctaagctcatagtactcttctattgtcagtgttacagtcctcggagaatcaacagcgttttcctttgaactagattcactctcttgcaaggccttgatggcagctaatgccagcctctctgaagctttaatagcctcaatttctttctgagctgcaaataatctgctctccattgtacttgctccagcctttgcttgctctgcttcttcttgagacttccgcagctcttcacgagcaagttcagcgaatgatttcgcttcatctgcctcttgacttgcttgttgcagttgctttggtagctccaccatttcctctctagtttctttttccttggacttaaccaaagctatttcgcacctcgttatgtcgatctcagcttctagagaagcaaccgttaccgatgccatcccttctctttgttttaatgagtcaagtgctgatttctccttatcaatttccaatctcaaggaagaggatgcaacctttaagcaattcacttcagaagttgctttctccacattcgcgttcacttcttcgagttctttctttgcagaagcaacagctttttgtatatgtgtagttttttcctgtaatgaaatctcaatgtttgttactactgtctcactcgtttcctcctttaccttggatgattctttatg

SEQ ID NO: 24753 - DNA, 835 bp, Arabidopsis thaliana columbia
tcaaaggatcgatcacaaaagcctttggcttgcagttcacatggctgctgaggctgctaatccatacttcagactcggttacaacagcttgggtgcttttgccactatcaatcatctccactttcaggtatatccaaaagtgatccaagcataaccttttcacccttgctcatctaagatgtttgttctgattgttttggtggtgattgtttttggaaacaggcttattacttggccatgcctttcccactggagaaagctcctaccaagaagataactaccactgttagtggtgtcaaaatctcagagcttctaagttaccctgtgagaagtcttctctttgaaggtggaagctctatgcaagaactatctgatactgtttcagactgctgtgtttgccttcaaaacaacaacattcctttcaacattctcatctctgattgtggaaggcagatcttcttaatgccacaggtatataactacaccgttggatgaatacatgttttgaattacttaatcaaaagtgaataacagtttgaatgtaaaaattgcagtgttacgcagagaaacaggctctaggtgaagtgagcccggaggtattggaaacacaagtgaacccagccgtgtgggagataagtggtcacatggtactgaagaggaaagaggattacgaaggtgcttcagaggataacgcgtggaggctccttgcggaacttctctgtcggaggaaaggtttaaggaggttactgctctcgcctttgaagccataggttgtagtaacaagaggaggatcttgaaggaccatagttcatcagcaaaactctagtggcaatgt

SEQ ID NO: 24754 - DNA, 882 bp, Arabidopsis thaliana
ccgtctatagttccaaaattaacgatttatatatcaagcctctttggtatctactataattaaccaaaccaatgttacggagcatgtgtgtaatgtagattgtgttgatttttgagtcgacagccacaaggcatataataattaaaggtgtatatgaatggaccaaccggaccaagtaataaagtgatgtaaaataagtttttaggggacaagcaaataagagattgatgaacataagtgtgtggagtagaatcatcgtatgaggtccatttctttagatgcattcacttcactttggtccaccaccctttttcatattatcccctctattttcatgtatacctagctagcatctatttttttactatacgtacgcatatgacttttatttagccacgtacactagtttatgtaaaacgacttgcgtaccttgctggaattgggaaccagtttttgcaaagtcttcatcctttgattgattttatctctcctcttctggtaataaaatcaaccaaggataaaacgcagggggtcatgcatgtgtaacagtagacgaataacataaaactttttttgaaaaataaaataatggttgagtgaatcattacacgttcggattggttatgaatagcagcagctctgcttctcttggttgaaactgatgattttcctccggctttcttctcttcttcgtcctccatctatcgtttttccttaattattatcatttacttataaagctagagacatcaataactagaacaagttaatatatatgatgacttgcctgtgggcggctgtggcagacggagtcatgatcgtcgattgtgttatcgtgcgagcccattgatgttgaggtgaacgtacgtcgtaagtgccatg

SEQ ID NO: 24755 - DNA, 594 bp, Arabidopsis thaliana
atcataaagtctagacccagcttcaacattcgaagacccgtgatctaaccagaggtgcaaattagcgtccacaagccagtatgatatcccatctgaccccaaacgcaaactcatgagactttccatctaacagcaacccgagaaatggcgtcaagtccatgtcataggaaggtagattgaaggcaccgattgctacaactggttcccagaacaagggattgattccaccagtaaagatcaccggaaatggcacctcggatcccacgtatctcccatctatcttaacaaaaacttcccggtatgcaccattgccacgcccggttgttagattgttcgttctgatataagaatttggcgggtttgaataccagaactcatcgtttccatggaacgatacatatagttccagcacaatctgacgagtgttggacggaatttgaattccttttgagtaagtttctctggggttctcgatcatgaaccagaaccctctgttccctccgtcacataccggaattatcaaatccgcaggggtttgatctcttttctgggaatccacaaaccctaatctgttactaatcttcaaatttgacg

SEQ ID NO: 24756 - DNA, 554 bp, Arabidopsis thaliana
caagaatagtgctcttttgtcctggtttctctttattccatccaactcttacatggttcttgaagtgggggatctcaatcaatcgtttgtcgaagcgaaatggtctcattgcaggggtacgtgttttttctagatccaggagaagagggcgatggtctgaaccagtgaagtccaaaaattataattctgcaaatggaaaggaagccaatcccgcagttaataaaggctctatccagacaactcttaatcgtgtgtgtgtgcctttcaccaacccaagagaaccggtcacctcttgaacttatatcctctaaatcacaagtagccaccattcttctaaaatctctgaaagtccattcctctcgttgaggtcctcctattttttcagagtttgttaaaatctcattgaaatccccaattagaatccatgattcattgcgtgtaattgatagattttcaaagtgagtccaaagatggtgtctttcactttgacatggatgtccatcacacaagacaaatagaaattggtattattgatagagatgttttcacaatgt

SEQ ID NO: 24757 - DNA, 554 bp, Arabidopsis thaliana columbia
ccctaagagagaggagagaagcagctagacgacagcaacggtcataagtctgaggccaagtgaagcgagtttgcccgtagattatcgaagttcggttgggataacactccgaagctctcttcaagaacgttatgggcgttagaggaacattgtttgcttcacataacactagattatccatcttgtatgagtggatgtgtggcaataaagatttggaaatccatattatatatagcaaattgtgagaggccttaaaacatatgactgagagtgatagataacaaaatttaatatttgtagcataaccaatggattgcatgctggcagtgcctaaacttttggaaactgtcatagaaacaatctaaagctctaagtacacaagtcacaatctcactttctttttgagtttataacagaaacatgatattaaaggaccttttagaggaatggaagctatattgtaaaagtagtaaatgatatatatgctgcaaaaacaagaagatgcgattatactaaattcgtttatttttaagagttcggctaagctatttatg

SEQ ID NO: 24758 - DNA, 1084 bp, Arabidopsis thaliana
accttttagattattttttacaaatattaaactaatatcaccaaactttaccaaaattttaaaaaatcttgattaaataacaacaaattctacataacatttaagtcattaaaactttatttaaatcacacaccaataattaagtgacaaattatttttcttactttttagttttagccacgttttacatatagttcttaaaatatgacttgttgattctcattatttttctatatatacattatatctttgtgtatcccttttcccacacataaacgttcattaaacacaaagaataaccagacgaagaagaagatggataatttggcgttatgtgaagcaaacaatgttcctctaactcccataacgttcttgaagagagcttcggagtgttatccgaatcgaacttcgataatatacggaaaaactcgtttcacttggcctcagacctatgaccgttgctgtcgtctagccgcttctctcatatctcttaatatcggcaagaacgatgtggtatgtcacactatccttaccttattttttctctgaacagttttagtttttttagagatagtccgtttatctgagataaacattcatttgtatagagtatctgtgactgtacttaacccataattatgtgtttaggtatccgttgttgctccaaacacaccggccatgtatgagatgcactttgccgttcccatggctggagctgtacttaaccctatcaacactcgtctagacgcaacatccattgccgcaatcctccgccacgccaagcccaagattttattcatataccgcagttttgagccattggctcgagaaatcctccagttattatcatctgaagactcaaacctaaacttgccggtcatatttatccacgagattgatttccctaaaagggtttcgtccgaggagtcagactacgagtgtctcatccagaggggagagcctacgcccttgttgttggcacgcatgttctgtattcaagacgagcatgatccaatctctttaaactacacatcgggtaccacagccgacccgaaaaggtgttgtgattagccaccgaggagca

SEQ ID NO: 24759 - DNA, 528 bp, Arabidopsis thaliana columbia
tcagaagtatggataaaaaaaaacatattatgaatctgtgatagcgtttaacattctaactcattttggaatgctaggttgtcgtttatgttgctttaataccttttttacatttcaggctgataatggagaagatgccaacatttgggtttgtgctttattgctggccatacttttccaagacagagaaatcactcgcgcacatgcaacaatgaaggctgttccagtgctctcaaatcttgtgaagtcagaggaatacgcagacagatattttgcagcacaagctctagctagtcttgtctgtaacggtagtcgcggaactcttctatctgttgcaaactccggtgctgcggctgggtttatatcattgcttggttgttctgatgatgacataaaagaacttctgcagctgtcgcaggagttcactttagtgcggtacccagaccaggttgccttgaaaggctttccgagttgaagatattagagttggggctacttctcgaaaggcgattcccttactagttgaac

SEQ ID NO: 24760 - DNA, 983 bp, Arabidopsis thaliana
cccctcgccggtcccatggtacttacctcttgacaaaaatcatttctcactcagtagcttccgccttacagctgttggacgattcataaccaaaaacatggtaaaaaacttgctctaactaatctgccaaatcccataaactattagtagttcatttatccgaacttgtcattgttatttatgtggtaggtcaagatccttgaatacataagacttgcacctcaaggaagccaaagggtctcaaatttcctggagcaggctgcggaaggattagtcgacggtggaaggtgagaggatcccaacttttatttattcagaccatcaagattcactttagatttatcttttttggggtagaattctaaatctcttcttggataaatgtttctcaggagagagattttcacgccaatgtatttcttcttggcccggaagccagagtaagcggatgagagatggcgatggtcatcgtaggtcgaatgaagtgacaaaatttctcaatttgcagtcttattttctatgtttatcggatttgttgcagagtttcttattcaccaactatattttggatgttcgtaacatgtcacgtgttgttcatgtgcactctgcctgaaatctgaatcatgtgcacatgcccaaaatatcttggaatctttctttctctttagatctcaaaaacctttttcttttgtcgttttatgccaagattcaaaagtggggcctcctgattcctgatattttgctgacaccacctcctttgtccgctcctttaatgataagggagaatctttgtttttcctccatggttttttgttttgttttttaacactacctctccatagatgtgattataaaattctcttgaattcaattctctgtctttgataaaggagaaactaatttgttgatcgtggattgaattatgacaagtcagaggaaaaaatgtcaaaagtaaccagaatacaacgaacttagaagaaatg

SEQ ID NO: 24761 - DNA, 823 bp, Arabidopsis thaliana columbia
ctacttctcgaaaggcgattcccttactagttgaacttcttaaaccaattccagaccgccccggtgctcctctactttcacttaatcttctaactcagcttgctggggactgtccacaaaatatgattgtcatggtagagtcaggtgctcttgagggtctctcgaaatatctttcccttggacctcaggacgagcaagaggaagctgcaacaggtcttttaggcatcttatttagcagtgctgaaattcgaaggcatgagtcagcatttggcgcggtcagccaacttgtagctgttttgcgtctaggtggaaggggggcaaggtacagtgccgccaaggcattggatagtctctttactgctgaccatataagaaatgcagagtcttctagacaagctgttcagccattggtagagattctcaacactggttcagagagggagcagcatgctgctattgctgcacttgttaggttgttgagtgataatccatcacgggctctggcagttgcagatgtggagatgaatgcggtggatgttctctgcaggatcctttcttcaaactatacgatggaactgaagggagatgctgcagagctgtgttatgttctgtttgcaaatacaaggattagatctacagttgctgcagcgcgttgtgttgagccacttgtctctcttcttgtgactgagttcagccctgctcagcattcagttgtgcgtgcactggacaagcttgtcgacgatgaacaactggctgaactagttgcagctcatggcgctgtggtacctcttgttggccttctctatggctctacactcgacct

SEQ ID NO: 24762 - DNA, 1461 bp, Arabidopsis thaliana
ttgaaggaaccatagttcatcagcaaaactctagtggcaatgttaaccagaaaagcaacagaacccatggaggtccgatcacaaatgggacggccgccgagtgccttgtccttcagtgaacaatatggtgacttggtggtttgtatgtataattaaaagcctaaataagcaaactctctttgtagttgcatttgaagcttcttggtttatgtatgatggttgtgggcattttgtgcctagacttctggttctttgttttttgttatgagttggtgtttatgaattatatatgttcttcactaatatgattattatttgtatagatttgattattcaaaggatatgtcttaagaaggggttcaggttcagccaactaattacttgtaaccaagtctttctaccatcaacaaccatgttaagattcagacacttagtttttacagctcgagactcgagagagagtaataatactgattattgtcttgtctataaccaccacaagctctggttatgaagtcgtcctctatagactataattcactaactcgatgctagttcatgtttaagtaatattttgtttagttgactagatggattttatctttgctcgccattagctcaatgagctacgtatatgttaagagtcacactttcaataattaatagctttttaccgttaccataccaacaaactttagataattgggttaataacacctttaagccgaaatagtagtatcataggatccgataccaaacgaacaagacaaaaaatcaaccaaagggttctttaaccttcgtgaccataataacttagtttctaaagagaatggtcacgataaaaaaacaagtctgcaaatcctaatgccgattactccttaaccattcatatcacacacaagccctaaacctggacgaagtgtcaggccgtagcaccaccaccgctgccaccagtctgatggagcatcgcatcgatctcatcaccatcctccatgtcaagctgtagtgtcaagaattattagtatcagaaactataaacttcaaaaggtaagaaataaagcatgtagaatgaatgttatacctcatcgggagtttgctcagcacgaagacgacgcccatcaaacaagaaagcaatggagttcatgtccacagattgccggtcacagtaagcattcatcagcttcttgagctgagtgcttctcttgatcctaaagaaaacctcgtttccatcctataaaacaaacatatagaaggaacaataaacgttagagacccgcatatgaaacaataactaaatcacatggctctcttttggtagtaacctgaaagagtcgaaaaattaaacacatatcaacaaacattcagtttaaggcttcgtctatgagaatttgaagcacaaacatcagccaaactaattgaaaacttagtacagagactacaacttcatcagaagatgggatg

SEQ ID NO: 24763 - DNA, 754 bp, Arabidopsis thaliana
tactaatgtcgcaacaagttatagattcgaagaaacttgggtattaatagatttgactcttggtgttttatcttgggctatacataagttgatcaaatgaattgtggctaaagtggtagttgtgtggaataacagactgtgatgaaatcaacaaggcggcaactggagagagagattatgattgaagacattacaagtctcgaagatttgccatcatacagtcttctcagtcaatagcaaatagcttaccaaaaactactttgtaagtagaaagatctaacagctcagaaaccctatatcaaagctaaaacaacagcagagcaagtaagcaagcaaaaaagaagacaaggtttctctctctctcgctcttcactccatcttcctcgatattagtgttggttccatgaaatttgggttgttatttctatgaaaccagggtcagattttgtttcttatggggtcagattttctaacttgtggtgcttgtaaaacgttgttggttagttggtgttttgggctaataaatcatttggttacatttccactactcagaagacccaaaaaaggactctctcaacatttaatggcgcgatcttgtgtagcacatttcaaatttacaaataaaagactcgtgatgagatttgtctatactacacaaaaattttgaagtacgcttctccaccaaatttgtctatactaatcaatatgattttgctttcatctctcggccaatattgacaccttttttgtgaat

SEQ ID NO: 24764 - DNA, 520 bp, Arabidopsis thaliana
gagtaattttccagattagtgtgagtaatactcaacctctggggctgcttcaagtctaaaagagattttccatcatactctatgactaggttccagttttcatatgctttcttcaccagcccctcaacatatacctttagaacacagaagtgaaagaaagaatcaaatttgataactctcttctttaagtggattcaaaagaagatggtgaatcatagctaataaacttttaatagaagatagtgaatcttaacttaaactaaactataacttgcagcaaagcaaagaatgttgttataagttaagcaacatggagcaaaccttttggctatcagtaagtgaatcagcagagaagtattgatctccagaaataaggccgcttagctcatagatattattgaacacaacaccgacattccttgaatcctcagcatagtagatataaagcttgctgctctggacacacgtctttgcgtgctctactagtgcatcccacattttgtttgacatgccgcttcca

SEQ ID NO: 24765 - DNA, 578 bp, Arabidopsis thaliana columbia
cgtatacctcctgaatctggtgcgtgttggttcactctcctccatcgaaccttatcgaactcaacgaattcgaaaatgcttgttccaatcccatcttgtccttcaccgtctctagtcggatccgcttacgttgtggtagattcagagatttacgtgatcggtggatctattagagacgtgccttcttcgagcgtgtgggttctcgattgcagatttcatacttggcgacgagtctctaatatgagagtaggtcgtgaatttgcagcagctggtgtaattgatgggaagatttatgtgattggaggatgtgtagttgataattgggctcgatcgattaactgggcagagatgtttgatataaagactcaaacttgggagccagtggctagtccaggtatggaggttcgtgagaaatggatgcacgcaagcgcgattatggaagggaaggtttacgcaatggctgatcgaaacggtgttgtttacgaacccaaggaaaagaaatgggagatgcctgagaagaggcttgatttgggatggagaggaagagcttgtgtgattgagacatattgtactgttat

SEQ ID NO: 24766 - DNA, 533 bp, Arabidopsis thaliana
ttttttttttacaagcaaaagccacacaatcataaaaactttaatttcttcggaaataaacaaagaaaataattaaaaagttacgaaaccatctcaaccttaatcttgcgacacgtgtccgtaatacaataacataatgaacggctgagatccaccgagacaatcgaaattttctcagggtaaagatagaaatcggtcaacggctccgattcatattttctgaagcttcgccgcaataaccaacggattagctttcgcgatctcttcacgtcccgccgatttgaaatcaaacgtacaaccatgaacctccggatacctatgactcccacaaaaagtcgtcccacaccgacacataaacccggttaacccgacccgtttcctacatacggtgcatcgattcggccgttgcggcggagacggttgctccgtcggaatttgaatcggttttttctctctgtcttcttcgtcgtcgggatctctaactccgccgcgtagttttcgagaacaggtgcgatcaccggagagagagatga

SEQ ID NO: 24767 - DNA, 518 bp, Arabidopsis thaliana columbia
atccccctcctcgatcatcactcactgctcatcttaactgttgttgtggccctgctgctaaagttgggttaagcattgttgattctcttggcgatgatcggtgtttgttaccggatatcgtgtttggaccggctttgaggatcaaatgttcggaggttatggacaaacatcccaagttgttgttccctgtagccaacaagtctaagaagattgaaaatgaaagatctggtgttgttttcgaaatcggtgataactcttctgagactgaaccggttgggttgagaaaccggtccttttctgcgaatgattgtctgcgaaaaacccgtgttctgtctcgatccaagttgggacaagaaggagacttcccggggagtggttctgacaatgctttctcctctgaggatgatatggaggattacacttgtatcattgcacatggtcctaacccgaaaaccactcatatctatggtgaccgagttttagagtgtcacaagaatgagttaaagggacatgaagat

SEQ ID NO: 24768 - DNA, 913 bp, Arabidopsis thaliana
ctgtgacgagtcgatgaaatggcttgatgctcaacccgaggcatcagttgtattcctttgttttgggagtatgggtagcttaagaggtcctctagtgaaggaaatagcacatggacttgagctatgtcagtatagattcctctggtcactccgcacagaagaagtgacaaatgatgatcttttgccagagggattcatggaccgtgtcagtggacggggaatgatatgcggttggtctcctcaggtggaaatactggcccataaagcagtgggaggttttgtttctcattgtggatggaactcaatagtagagagtttatggtttggtgtgccaattgtgacatggccaatgtatgcagagcaacagctcaatgcgtttctgatggtgaaggaactgaagctcgcagtggagctgaaactcgattatagtgtacatagtggtgagattgtaagtgcaaacgagatagagacagcgatttcttgtgtaatgaacaaggataataatgttgtgaggaaacgagtgatggatatctcgcagatgatccagagagctacgaagaatggtggatcttcgtttgccgcaattgagaaattcatacatgacgtgataggaaccaggacttagcctttcttatcggattctccataaactgtaacctgattatgcaacagtcctttgaatctgctttgtttctaatatttttttctattcttttgtcatcagctttgcttttaactttgtctgtgttgattcctttatctaccaagctgtgagtttctttgttagccaatgctgcatttcttctgttatggattttgttcaaaattgggtacatctcttattctttacttcttcaggtcaaacttactctgtttttgttgagacaattttctcacgaatgttagctctaga

SEQ ID NO: 24769 - DNA, 569 bp, Arabidopsis thaliana columbia
caaatcacctcttagtaagataaaactgagggtaaacccgataaatcagtgaaaatgaagaatcttttacctcgtgaaagatacagtctagtatagagtacgagtttgcagggccagaagcgcctttattcctcgcaccaccaggtaatgcagaagggaaaagatgcaaagtggacccatttcgtactctactaacagttgttccatcagatgaaactacaaaacatcttttcccagctggtcttgctaacacatacctaaaaaaccaaccaattctcataatcagccatttatgaaggaagagaagcagcaacaacggattaagaatgagaaagaagcagtaccaatcttggcttaaattatcagggacgtcgatcatccattcaggtaacattagctgctttgcgaaccacttgcgtgcctcaggtcctctgagcctcgaagcttgacgaacgtcaaagctactcgattccgattcggttcctacaagctcaggcacggcttcagatagtatctctgggtcgacatcgggagaggaggattggagcgagattaaggaagaggcgagg

SEQ ID NO: 24770 - DNA, 544 bp, Arabidopsis thaliana columbia
gttccaccattttcacgaaactcactacccatgaggttactcattacatcagatttggcaccaacggaaaattttaagtgcccttttgaaatcaacgcaccaatcaatctgatgatcccaaccatgacacgatctctatcgtcaacattgtttcttgcattattattgaatggagtttcagaaacagaggatattctgtcagcattcacggaactggagagggtaactgagccagtctcacaaatgacagtttcggatccatgcacttttacttgttgaaatgactctgtttccttcaaagatcctacattatcatcatgagcatgagggtcacctcattatcttgtggaactgaatccaactttaacaaaccaggcccattgtgttgactctgtttgctatgagaacaagaagtgtttctatcccaccagatgtgataaatgcctctgcaaatgtctgagcctttgcagcatttggctgtacaaccagcctaaacatgagatgcaatacccttgcaacctaaatagaggtacgactgaatgat

SEQ ID NO: 24771 - DNA, 433 bp, Arabidopsis thaliana columbia
agtgtgctttaaagcacgccgtcatcgcacgccaccaccaacagcgcgtgatcgataccaccaacgcccgccagcatgttggaaagaaacttttcatgaccgggaacgtcgataaaaccaggcacgcgaccatccggctgcggcagtaggcatagccgagatcgatggtcatgccgcgctttttttcttccggcagacggtcagcatttacgccagtaatcgcctgcaataaggttgttttgccgtggtcaacgtgtccggcagtcgcaataatcatttcaacaacatctccaaaaaccgttgctcatcttcaaggcagcgtaaatccagccacaatcgtccgtcataaatacgaccaatcaccggcactggcaattcacgccagcgggcggctaatgactcaaggtggctaccgcgtccatcatggggtgta

SEQ ID NO: 24772 - DNA, 606 bp, Arabidopsis thaliana columbia
tgttgatttgatatgtacctgatctgaccgtagctttgatcgactgctctgtattctcaacctttcgatttcatatagccttgcacatagtactttaagtgctttggctctgttctgttacaaagatattaaatttttcagtaggatgtgtaagattaagggagtaaagcgtagtgggtgaaacaaatgttcagtaccatatgttgtgacctttcatcttggattgagaccatcatccccgttggaagatggattattcggactgcgctgtttgttgtgttggcgtgttgaccgcctgagccaccagacctataagtgtcaatcctcaaatcttcattccttagctgaacatctacctgtaagtagccaccagtaagaacgatgatcaaaaagtatgtacgtttgtaagattaaccgataagaacgataataaaagaaaaatgtaacttgtaagataaaattaataacaggtggcaaaactaagattggagaaacattggtacccatcagcctggggaaggatggcacagatatagcgctagtgtgaattcgacagatttctctgtgataggaatcgctgtcaaagatgtcaagtgtgattattga

SEQ ID NO: 24773 - DNA, 492 bp, Arabidopsis thaliana columbia
tatattatacagcttgtaccatttagtgacaagatcaacgcaatatgcaccaaacaaaagagcgaactaaccagcaatacctaaataaacaaaataaaggcccatgagaatcctaaatactcccaatcctctaaacaaaagcattatgaatcacaaaaaaagagccaactattccttcatcatgtacacacatcacgaagaaaatggtatgaatgcagaatgcctagcagataaaagtacctcaatagcatctttagacagcgaagattgaaaactagctctccgcatccaactaggatcatcatctgaaagaaaagaacgacgagcaatttataagtggagaagaaactaccctttggaatcgaatttcatcatgacggatatattttaataggtcatagttagcctcaccagaattagcatcactggatccaaattccaatctacaaggtttcttccaagaatcagtataaacaggttcatacttttttg

SEQ ID NO: 24774 - DNA, 792 bp, Arabidopsis thaliana
accccattcttatgttaatgattttagctcaaggcggtcagagaagtaccagaaacatgcagtaattttgcatctaaagcagaagagaaagcttcagaagaggaatgcagcaaggctgtctcctctgatgttccccatgctgctgctagtggtgtcagtctgcaagttgagaagactgatattggtatcaagaatgtagattcatcctctggtgtagaacaagagcatggaattagaggaaagcgtgaggtcccaattctaaaagactccaatgatctgcctaatttatcgaacaagaaacagaagaccgcagcctcagatacaaaaatgtcatttgttaattctgtccctagcttagatcaggcattggatagcacaaagggtgatcaaggtggaacaactgacaataaagtaaacagagactcagaagctgatgcaaaagaagtaggtgagcctattccagacaattcggtccatgatggtggttcctcaatttgtcagccacaccatggtagtggaaacggagcaataatcattgcagaaatgtctgagacaagtcgaccatctacagagtggaatcctatcgagaaggatctttacttgaagggagtcgaaatctttggaagaaacaggtaaactggatcttggtaaattattatctttaaacacagaacacctataacgtatttacatctagtatgttttgtccgtgctatctcagctgtcttattgcaagaaacctgctttctggcttgaagacatgcctagatgtgtccaattacatgcgtgaaa

SEQ ID NO: 24775 - DNA, 1383 bp, Arabidopsis thaliana
ccttcaaattgttacatctatcaagctgataccgagtatagaggtcgatcttgccagcaaattactgcgcacccgctctcttccttgattctatacccatcaaaaccgcacccttgaagcaatctcctagcctgcaacatcgcataatagctaagaggaacattcccaaaaccagccaaatcgatcctctggctccatttctcaagcttctcgtgtctttctcttctctcaaatccctcgcaggatatgatgttcttgatctcctccccgaagagcatcttctccactttgatcctatcttgagacgttcttggaacttttgtttccaagcaatcaaacaatgctgcgtaggtgtaaagtgattctaatagcctctccattagtgtggagccgttgtggtctgagtcttgctcagtgaccaccatgacctttggagacaaaccccaaatagcattgaggaagctatcagtccttcctgaacttggtaaaggcaaagatgaggccgagtcaccgctagggctatacccattgttgttactcatatcattctcacgtgcctcagctgcagagccatggctcatcattagaactctctgcaagtcaactccactagggttgttctgaaaccgtaaagcgcagttctttctcatgagatcatcatcagaggccaagaaggtatgcaattgaagaaccgagctaacggctaaggcctctcctgttttaacccgcaactgttctacatttaaacagtctaacctactcacaacgggattaaactgaaacgggatatcgagtttctctgcttcctcaatgagtctatgagccatttgttcaagcacttccttctggtgatgaacaccagtgattctcaaatgaggtggaccttcaggcctagagttaaaagcttgaagcaaagcaagccattgagctggctcagaagcatcgagatcaatcacatgaaccatcttctctccttccatagcctcgagtatagctcgattagtgagcaagtaagagactttgagtatcgggaacatctcaaagaagagtcttctaacatgaatctcctcagagacattgttagttcttgtctgagttgcgttaagagccttgtaaagaccaggccaggacttaaggattctgttagcaagcgcttcggtgaagtaagcagcgattcgctgcatcgtgtcgccgtcaggagaagcgaggtgagagagctgctcgagcgctgcgttagcgttttggaggctacctgaagccacgtggttggcacaagttagcaagaggtggattaagtagagaccacgctcctctggtttgagatctttgagacaatgaaacggagatgaagaagcgaggagagtcggtctgttgagtgacata

SEQ ID NO: 24776 - DNA, 646 bp, Arabidopsis thaliana
aaatgcacatcatgcattgttgttggtggatcacgttctggtgctaatagaaatgtaagtgtcttgttgtgatgtggccatgttttgttatattttcatcaaactgttgcttcaccttatctagctatttttctactctagggtggtgattcgctttcaaggtatggcaatttcaaggcacctgccccagtaccctcatctccaggaagatttcaacgtggcagaggcggaggatataataactgtatgtttgatcttttctttctattttggttatgagtaagaatacgtaatgttttgtttagttgatatttgcattcttcactggtctgctgcacttaatacttcttcaggataagaaaatatttccactatatatgacttgtacatttttctggtagtacaatgttttattgctttccatatattttgtgacatgcttatacatcttatctacgtaaagtttcacatactcttatttgtatctttaaatgcagctggagggaggcatgggggtggaagaggacggggagacgattctttattgggtactactgttaaaatccgtctaggacctttcaaggggtataggggacctgtagtagaagtgaaaggaaattcagtgcgtgtagaacttgagatgaag

SEQ ID NO: 24777 - DNA, 950 bp, Arabidopsis thaliana columbia
tagaggatccccaatgagtttagaaacaagagtgtgagaatttgacaatgcaagtgtggtatatacgctatacattagtctctatgcatatttatgttacaatttcgagggcttcgtgttgataaaaagaacagtgaggtttctaagtcttgttgaatttaagcgtctcttggctttgggttgagctccgtctccatacttgtaggtagcttctgggttgaagcaacgccgccgaacttgcggaccaggattgtgaaacatggcagcaatacaacgtataacgtaataaagaaaaatggagttgctacgagccaccctagtaactgcaataaccataggacttaaaataagacttgcaagttactaatgataagagcacaaaagattaggctagggaatgcaaaaagcggttcgacatagttcccccattagctaagagaaacgagactcattgtagctacttaccgcattaccaatgcttaaaaagacttcttgagaggcttgaccagtgaaaaccttctttagagcatctgatgtcaaaggaaaatgaggtccaccagtaactttttcaccaagtcttaggaaaggaaccacgagacttcaataagaaagacatgaaaaggaaatccaaaatccaagtcaggaagaaaactgatatgcatcgtctttcgataaaagtggtaatttcaaaagatttaaatgatataaggtttacgctagttccactggagtggcaatgatattagccaacattacggtcggagcatgacaagatgatccgagcaaggcaaaagctactccacatagtaacacaggaacacctattttataacaaaaaccacaccaaataaggtacatagcaatctcaaaacgcaacaacgcaagaagcagtaagcttaggaaatagcaaaatggcgagaaatacgcaccacatatcggaaatatcccca

SEQ ID NO: 24778 - DNA, 382 bp, Arabidopsis thaliana columbia
tgtgtctaatattttgaagggatgcgagagttatgtgggaccaaaaaactgggcgctcgagaggctttgggtttgtttccttccgcaatcaacaggtaatgtacattctttaaatcatgcagtgagtttttgttttagctcaaggattgttcgtggtttacattaatgttaaatgttgatttcatttgcaggatgctcaaactgccattaatgagatgaatggtaaggattatatagtagctgagatctcagtacttcgttctcatgctttcttgttctgaagtgcttagaatttgcatgcaactgaatgatactgtgcctagaaagacctgctgaaagttttcttgatttgttagtcaagagctgctgaaagttgcataac

SEQ ID NO: 24779 - DNA, 1242 bp, Arabidopsis thaliana
tggtgacacctctgttgttaaagaagacaactgcaacacctctccctcatcctcatcagcgtctgcaacacacaacatagacagctgaacttcggagtctctcagtttgttcaatttgtcagccttgatagcacgcaccgacgaaggctgaataccatgtatcatcacccgtttcttatcccatttaaactgcattgtcaacaatgtgaaatcccatgtaataggacctagaggtttcaaccaatgtacacccaaaactgcatcaattcctttcaaaggaattaccataaagtcagctacaaaagtcgtgttatgaatctcccacttaaaattctgtattctcgctatcaccttcagattgtaaccatcagccacccgtactcttgcattatcactaggtaggagtgagcaacccaacttctttgccatttgaggatccataaaattgtgagtggaacccgaatcaaccaacataaaaatggatctcttctgacttgtacccttaactcgcatagtgttgtaagttgagataccctccatagcatgagttgagatatgagctacttccccaactaactctttatgctcttcttctgcatccaagaacacttcctcagcatcttccatttccaaaacaaacaattgtgttttcttgtgaatcttataatgttcagatgtgtattgttcatcacaaaaataacacaatcctttagctctcctagcactcatctcttcagtagataagaaccgccttggctgattttgttgtgtgtctcttggtttttcctgaaacgctggtttattgccctgctgctccatgtctttcttaaaggagaactggccctttgaagtaagccttattgttcttccaagaagtcgcattgttctgcacaggatgagcagtttcatagagacgtcccaacatcaaacactgccgcaccgtttggggttgaaacattcggatatgcatctgtgtctcaatccttaacccaaccaaatacgcactcactaaataatcctccgtcatccttactcgagtccggatcgcctcaaactttgcgtgatagtcatcaatgctagcagctgtttcctgcaacttcttcagctcagcaataggatcctctccaaccatctcaaacctctccctgatcctagctttgtacacacccactcaggaacctgcacttcatcctcaatcatattctggtgccaagtagcagccagaccatccaaatgaataga

SEQ ID NO: 24780 - DNA, 811 bp, Arabidopsis thaliana columbia
aagaattttacatgttgtaaaaaaaagataattaaagatacaatccataatttactagaatacaattacaacacgtagttatttcaattatcatcggatatctatctacacagctctatttcatagattttccataaatatcatttaatacacgtagttacattttttgtttgtcttatacacgcactttctagaatcaaacaaatgctttcagaaaactttagtgattaattgatcgtagccaaattcatctagcaaattagtaattacagttataataccattattttgaatagtcattatttgttgaaaatatctttaataaattttgttaacttggagtttataaattataatcataaacgttgtttcgatttttgttacagttttctaacaatgttaaattttccagtatgtgtgtgacctacaaaaatgggaatcaacaagaatcaaaagggcccatcaaagtctccaccaccaatcacctgtgaccgctctcacacttaacgatgatctttgttggattaacggcgcgtgtaatcttgatcccatcacgtgaactttcacgctcatagaccccactgttccaacctcagcaccatcagtcctattcgtcaagaagatttaaggccatacgtaacaaaagcaagctgagagaaacacatcctgtcaataatccttgagctggactctaaaattaggcccatgaaacttaatgacagccaaaaatattgtttgcattatgaattaattatggatttgcactttttttatggcatttgtagactttgaatttttttgaatagtttgt

SEQ ID NO: 24781 - DNA, 464 bp, Arabidopsis thaliana columbia
atccccccttgtgaagtcaacttccttctcaagaaacctctcgggcctaaactcatcagggttcggtccccattctttctcgtcacgtgacacggcccacgcgttgacgttgaccgttgttcctgcggggatgtcgtaaccggcgatcttggtatcttgaatgcaagcacgacggacaaggagaggaaccactggttcgatccttagggtttctttaactaaggctctgaagtaaggaaggttcttgacatcgtcttcagtaacgaacgttgaacctatctctttcatatactctctcacttccgcctgagctttcttcaacactctgtgggtacttcactagatacgtcatcccgcacacaaccgccgcagctgcagtatctgttcccgccactacaatatccttttggagccatcacaaaagaagagaaggtgaaagactagcaaacggtttcttgaagcgc

SEQ ID NO: 24782 - DNA, 520 bp, Arabidopsis thaliana
ctcaaaacatatcactaacccaaaaacaaaacaaaaaatgggtttcattggtaagagtgtattagtgagtctcgtagcactttggtgcttcacttcctctgtcttcactgaagaagtgaaccataagactcaaaccccttctctagctcctgctcctgctccttaccaccacggccaccaccacccacaccctcctcatcaccaccaccctcaccctcaccctcacccccacccaccggccaaatcgtcctgttaaacccccggttaaggcaccagtgtctccaccagccaaacctccggttaagcccccggtttacccacccaccaaagccccggtgaaaccccaactaaacccccggtcaagccacctgtttcccaccagccaaacctccggttaagccaccagtttaccctccaaccaaagctccagttaagcccccaactaaaccccagtcaagcaccagtttacctccaccaaagcccggttaagccccaactaaaccccagtcaagccccagtt

SEQ ID NO: 24783 - DNA, 1154 bp, Arabidopsis thaliana
gagaagaattgtggaaagctttggtattgctcttgtggctcggattttaagcacaagaggtcgcttaaggaccatgtcaaggcctttggaaatggtcatgttccttgtgggattgatagttttggaggagatcatgaggactactatgatgctgcttctgatatcgagcaataagatgatagcaacaacaatgagtgttaattaggggttttgtttatttttcctctcatgcattagttgattgtatgcacgtgttctttagttttgttcttcggatctttgttttattttgttttgagctgttttttttttaattactaagaagttaattatcatctaaagattttcaaccgttagcttgagatacttttaagtaatagaacaaattaaagacttgtggtgcaagcttaaatcaaaatggcaaagaaattaaagcctaatttaaatatgtaattttcaattcatttttggaaaaaatgtcgaaaaaatcgtgaactttcaaatttgggacgaacaaagcataaacttttaaaatgccataaaaatcctaaactttactttgacattttgaaaaatgaccaactttcgttgaccaagccgttttgaacatgggttgtagatatttaggttttgaaaatgcacccatagggtttggtatctctccctgttttaatgttccaatgatttatgaagttgtatctgaaacccaatttttcgctttgtatctgcttattagataacatgagggttttaaatctaactagctccctcgttaatttatactggttcaaagttttgtaattcttagtgagactctagctatgtagatacttgatactttgacaatgaaaacacaattttgttcatttagaactctttttaaaagcttattcatttagaatcatatctttagagagctcaattctttgacaagtctttctaaatcaacactagagcttcctcctacttcagttgcagctcgtgccttctatcccatctccttagcccgagcacgcgcctcgcctccactctcacccattgtgtcagcgataatccgacccatctcatacgggtcaggcacagtcttacccccttcacatacactaaccgccacacccatatgctccactaccaacctcgcatctacaaactgg

SEQ ID NO: 24784 - DNA, 629 bp, Arabidopsis thaliana
cctattttcgaaacattgactacttacgtaacaaaggtcccacttgtaacgttttcaaatttgaattattttctgaaatatgcgtcatgattaagatatgaagtacgtattattttatagatatatacactgtttgaatgcgtatgcagagccaagttgagttgtttgagagattgttactgaggtatgtctcatgtatgagtgaataaactgaataatgaagtggaagaaatagtagtaattaacaaagaaaatagttcaaaccttcgatgggtttagcgcctaagagtgtgttgaaagcagcgtacttgcagcttttgcagtaaaccgtaccccgaacggcgactagactacggttgaacttaggcgggtaaacggcggtgtaacaggtggcttcgtcggaggagaaaccggaggcttaaccggagctttggtaggagggtaaaccgggggcttaactggaggtttggctggtggggaactggtggcttgacctgggggtttagttgggggcttaaccggggctttggttggagggtaactggtggcttgactgggggtttagttgggggcttaccaggggctttggttggagggtaactggtggcttgactgggggtttagttggg

SEQ ID NO: 24785 - DNA, 864 bp, Arabidopsis thaliana
ataatttcatgagcagacaatttacattccaagtgtggattaatgatacttagtcgagaaggacacattattatttatttagagaaagacaagtagaagggatataatacaatctaggatcaaaaaccctcatgacacgttggcaaaccggaaacaacttattaaacagtactagcaccatagtctagcattttttttataacatacatcgatagacgacaattattccatgaaaacagtcacgccactctgaattgcgaccatccttcagttttaaatgtacttgtttaggcacttttaactgcggcggtagatcctccggtgcagacagaagaacatgccttggtgcattgttcaaccgcttcactcaatactttacttgtgtctagtcatggaaacaaaacaatattactttgaattattcctttatcttaaaaaaatgttaataataataacaaaaaaaagacaaaaataataatgtatagtgaacttgttttaccaaagttttggagagtggtcaaggcaccacacacagaggatgcacaccctagcttgcaatattcattgacagcatcacctaaggcaaaaatcaagatacatgcaaattacttgcatcacacaatgaaatttccatccatcttataacaaatataacttaatagaaaaattagatatataccagaattttcgagaatgtcattagtatatcccggaggacatatcgtctgagatgtatttttgcatttactctttaatagacaataaaattgggatgacacggaaagcatgcatacaaaatacacagatctatcatccttggtaggacagcagatttttgcttctacttgaatctgtgctaagaca

SEQ ID NO: 24786 - DNA, 611 bp, Arabidopsis thaliana
tggcccattggcgttatttattcgttagcaaattgttgttcttgtggactaattttgcttttgtcacatgtttccaacagatcccagagatttggaatcaaccggagttgggaactatcagaaatgtgtagctcgtcctaagaaccaaagtaagttttcctcaattcttctcttcatttccgagaaaccaagaaatttcagacctaattaattgtttttttttccttctttgctcaggaccaatcaagcaaaccaatggttaccttcttgttcacgccaatggtggtttgaatcagatgagaactggtgtaagcctcttcttcttctctatgtttccacttccagtataagagattttctcgaatcctcacttcatttcttcttcacagatatgtgatatggtggcaatcgctaaaatcatgaacgcaactcttgttcttccgtttcttgaccattcatctttctggagtgatcaaggtacgtactaaccatcatcatcaatcaattcaccatcatcatcatcataatttaattaagctcccttttcagctcgttcaaggacattttcgactggaaacatttcataaaagtactagcagaagatgcaatat

SEQ ID NO: 24787 - DNA, 671 bp, Arabidopsis thaliana
tctagaggattaccgagctcgaattcgtcagacttcgtttacaaagaaaatttgtgtgaattattcttattatcataaaattttccttgcaacttcgtgtacattcatacatacataggcaatggagttcctcttcagtcttcacgtaaagagcgagtgtgggacacgcactcatgtagcgggtggtgttagtactcgaggttgggcctatataaaagcccatagaggcccgaattactgaatttagcagacaagaatagaaagagtgatgaaacatggaagaaaacgtgtctctagagtcatgtcaagtgtaagacagaggaagagagaagagatgtgcgtcaaagacaaggaaagagagatgtcaatcgctgctttcgtcggcgcgtgcatgtccgccacgcacatcaatcaaatcgattcttattattattacctcattatactctttactctaagacaaacacatacatttgcactcagtctagagacaaagtgagagagagatggggtcaaagacggagatgatggagagagacgcaatggctacggtggaccctatgcgccggtcacttacatcgccgtgctcgtgttgacttggatgatagacttctaaaccttgtaaaccttcactcgctacttgcatttttttatcctaattgattcaatat

SEQ ID NO: 24788 - DNA, 573 bp, Arabidopsis thaliana columbia
caatggccagaaactggggacagaactggcactcctctctcgatctcatcggacagtctctctctttcgaggttactctcaaaggcggcaaaaccattgcctcttatgatgtggctcctccgtattggcgcttcggaatgacataccaaggaaagcagttccactcctgactcctttatcttcttcaaatcatgattcactttcggtgactttattatgactttggagtcattagatatcatcacttcatttcaaggaggtataaatgactttccacgagtggctcatctttgtcttctcttttcttttttctttttatataatatatccttcacaatccttacttggaccgcatttagctgtgtgagagtatattatgcacattgatcacgactggaaggaagaaaataggcattgcagacaaaatgcaatgaccctcctaatctcaccattcttttcttagtttctacaaacagtaatcaattactttatatcagcactatcaatcaacagcacaaaacctgtaaatctcgcatctccgtcgagaagaaaaacaaaagaagaaaagagtga

SEQ ID NO: 24789 - DNA, 965 bp, Arabidopsis thaliana
ctccaatcatcatcgtgaaaaaatatagatgagtttgcagaggagtgattcagttggtggtacgggaggaggagtagcaaacgggaagacagtttcttgagaaatgacgtcacgactaacaaagaacttattgttttccaaatcatagagacgccaacctgtcttcccataaggataaccaacaaatacacatcgtctacttcgttccccaaatatatccttttcacgggctcgatgatgaacatagcacaagcaacccaacatatgtaatgctgaatatgacggctgagacccaaagagtacttcatatggagatttcccttgtagaatcagtgtaggtgtgcgattaataagatggttagcagtcaaaatactttcgccccaaaatttgcgaggtagatagctctgaaaaagacatgcacgtgcaacattaaatatgtggcggtgcttgcgctcgactcgcccgttttgttgcggtgtatctacacacgaagttcgatgaagaataccttgttattgaaaaaacgatgtgagacacatgcgagtatcctttattgatagtatcctttacgcgagaggcattgagattttgttcatctcggatcacacgcgagtacacttgtgtgagaggcagtaaaggatcttgatccgtaattgttgagcgaataggtctgaagcgttcatttaaatttaacaagaattgatgaaccttgtcatcttctgctagttttgtaattttgcagttctccccaaagcttggtgagccttccataataggcaagatcaagttgcccatcttgcttacatgccgatatttcatctttcagtatttgttttcagactccgttgctggtcgagaatcttagcttgagacaatcgcaaaggtcttttacatcagatacaaaagagacggtggaacgaatcgttggatctatggatgtcaaatccacctatgatcatagaat

SEQ ID NO: 24790 - DNA, 549 bp, Arabidopsis thaliana columbia
gatcccccggaaccttcttcaaatgctcttcccgcagtttgtacggacgtcccttatgatattctttgtggaagtcttccacaaagaacgaagcatcaaagtctttagacatctgcttaaaggctgcttctgcaatggtggtcttgcctatgccaggcataccccataaccctaggtaatagaatttaagagattgcttgcaaagcaatttttctatctccagcagcctcgagtagattccgatcttacctgttgcatccagcacttcacgtacatcagcaacaatcttttctacaaattcggagtctctgcacaaattttccaaaacaaaggtcaactttttcacaataaaaaaaatattttcttctctagaaggtacttaaaagattctaccaaaggatggctataaaaggttaaaagattctgttttctagggatgttaaattagtttcaatatttttcttaaaaagttaaatttacagtgaaaatagggatgcactaatgtacacagattttttgatgaataaattttacctcataaaaaaaaaa

SEQ ID NO: 24791 - DNA, 526 bp, Arabidopsis thaliana columbia
tgtcacatttggaggaggcgaatcaataaacagcttcccggaaacatgaatccgatcttctttctttacatgttgaactgcaattttagctaaatctccttcgaatataatcggaatcctgaaaagttttcaactttgattaatctataacacactcatgctttcaatgaaattcaataagcttaaaagcaaaatgtaccagaaattagatgattttgaaccagaacgctgagaaataactgttccagcccagaattttccatcggagcaaggaccgaattgaactggttgttcaacgaatccgattaggttgatccagtttgaaatttccggtttgtactcaattttctttggcggagtcgattctttctccgtcgctacatttagcggtggtttcacagatacttttgccagaggtttctttcctccaccgctgatgactgtggcggagaaaacccggatttgctgcgagattatccatttttgagtggggagcttcgctgcttttgagtggtatagtgacgag

SEQ ID NO: 24792 - DNA, 757 bp, Arabidopsis thaliana columbia
gtagctaacactggacatataaacaataatcatagtcaggtttttttatgctcaaagaaagtgaaattaagttgaagtagaagttagtaccacaggattggaagaagagtttagctgcagcgtttctgtccattccaacagcgagcttgttaagagattccacttgaggagctccaggtgtttcaaagtgtgtcttcaggtgactgtgttttcgtttatagatctcatcattgttactcagtatatagatttggcagataattttgaatctcttaccttttgatgctatctgttatcatctcgtctgattgattgcacactggcttttgagtctgtgtagatgcagtttcaaatagtatttctgtgaaaaagaagccacgttaaggtttgtaagatggtgtttttgaaagttgtataggatcaaaagacaattaaaaacttctacctttatcggctgtgaagcgtttttcaggtaacattgaaaactcaaactcatattcacggtgctcccacggtctctcttccgccactggttcgagtcctcttcttggtgaggaatttggtctttttctattgggcatgcgactgatttggtaagcagaagaagatttagtgatcgtcttccaatggaaaacttgtttgtaagttactattggttttagtatcagagaaacttagatgtgttcttaccttttagagctgatctctatgttgttaattgaagctgctccacgtgcggatggtgtactaggcatgg

SEQ ID NO: 24793 - DNA, 505 bp, Arabidopsis thaliana columbia
tcctaaatcccgtctcgttgatgataatgacgtggctacgtacaaaagagtaacaaattcgagaacatgacgtggcatatttctctagaagcagctccattcttcgacttggacatttgtcttcttaaaagttttcgagaaatgttcgattcttcgagagttcgaattctcaggagaagaagaagaagaagaagtgaacagagaaaatggcggcttactacagatggaagagtttcgaggagaacgaagatcgtccagagaagcctcgccgttacggtgttacggagatgcgaggtcctcattactccgttctcagccagaatcttcttcaggtccctacacgttaattattccggttatgattcacaattttgcttgagattaaaccgaacatttagcggatttaggctcttacaaatttggttaacagttttgttaggaaatttttgaatcgatgggacagtttgttgatgggttacagtcgtatggaggatccacagtttga

SEQ ID NO: 24794 - DNA, 511 bp, Arabidopsis thaliana columbia
agaaataataattattatttatcagaagaaacttagttgtattgtatgcatgaaccaaaccaaaccaaaccaattcaagaagtgattaacccttaccccggccgaaacaacttgtctagcccatccgagacaactactatctaaacaccactgttttaatgttcaaaatatagtttcttgttgaaataaatggacaacattcatgattcatgcatggtcttaaacaactttcattggctatttgtctttttacacaaacgcaaaattgggctttaaaaactcagaaacaatgttttattcatggaagcccattaatatttgtattggactattggacatccaaaaagcccacaaagagctctgctatttcgattcagttcaatttccaatcagagaaaacctcggaagagccctaaacgtcggcgacgaacatcgatggctcttctgctccgtactcttcaaaaatcacgcatttctccttctcattcctcaagaaccctaatttcttggg

SEQ ID NO: 24795 - DNA, 648 bp, Arabidopsis thaliana columbia
  unsure (1)..(648): unsure at all n locations
atccccactaaactttcatttctaacaataagagaactaaacttttatttctaacaatcagaatccagttataacaaacattataacgtacctgaattgatgcgctctaaaggagagaagccatatgaacagtaatgaaaagcaaagaagatcaaaggagatttttagtcagattcgatcttgatatatcaagattcaagaagaggaaattagaagtttctgagaacttactcttgctaacaaagaacgagagaagagcttgttctccgcatattgagcgttgcagagcatatggtctcacccgtcgctgaagctcttccaggcaaactaaagtatatacataaacaaccaaaaaagccaaaatgacaataattaatgatcataaaagagaaaaaaaaaacttaatctaggattacttaaaatgcaaaaggtgaaagtgtaacaaaaaggaaccccaaaggaataatcactccactatttaccaaatggttttggtggtactaaactctttcccaaagtgatggatgtttcacttaaaatgaaaggacatttctcattacttctttattgcaaattggttttctatatgaatagttccaagagctaatatattttagtgtacagatcataggangagagagagagaga

SEQ ID NO: 24796 - DNA, 903 bp, Arabidopsis thaliana
gccagtgtgctctaaagaccgaagccgctggagcgtcttcttcttctacccggctgactttactttcgtatgcccgaccgaactgggtgacgttgctgaccactacgaagaactgcagaaactgggcgtagacgtatacgcagtatctaccgatactcacttcacccacaaagcatggcacagcagctctgaaaccatcgctaaaatcaaatatgcgatgatcggcgacccgactggcgccctgacccgtaacttcgacaacatgcgtgaagatgaaggtctggctgaccgtgcgaccttcgttgttgacccgcaggtatcatccaggcaatcgaagttaccgctgaaggcattggccgtgacgcgtctgacctgctgcgtaaaatcaaagcagcacagtacgtagcttctcacccaggtgaagtttgcccggctaaatggaaagaaggtgaagcaactctggctccgtctctggacctggttggtaaaatctaaatttccttcgtctttcacgccatagcggcgttggcgtcgcccgctcaccccggtcacttacttgtgtaagctcccggggattcacaggctagccgccttgctctgacgcgaaatacttcggaaattcacctaattcttcgggtgctgcggcaccgattttcttccccgcaccatgatgcaagctgcatccaggtagccgcagaggccgcttgcatgatgatgtttaaagcccaggagataaacatgctcgacacaaatatgaaaactcaactcaaggcttaccttgagaaattgaccaagcctgttgagttaattgccacgctggatgacagcgctaaatcggcagaaatcaaggaactgttggctgaaatcgcagaactgtcagacaaagtcacctttaaagaagat

SEQ ID NO: 24797 - DNA, 699 bp, Arabidopsis thaliana columbia
  unsure (1)..(699): unsure at all n locations
ggattcgttatttaccctcggtcaagatttgctaactatttgtaaaaatttcaaacttaagaatcgaacatcattcaaaattatataatgtgttacgagagatgcgagtggagagacaacttcagggtctaaattgcaaattttaataagtatattgctttttgaaactaaactatcaattattacacttttgagacacagtttctttctgattctcacttgtgtcgcttttataaaaaagataaaacgcaaattgatttcttcttattctgcttcggtcttcgtttttctttacccttttgatttgatcttctcttctcggttgaaattagggatttctgtaaaattgtaatgtgtttctgagtaaatcatgagcaagcccgaagaaacttccgacccgaacccaaccggacccgatccgtctcgatcttcctccgatgaggtcaccgtcaccgtcgccgatcgggctccgtctgatctcaatcacgtttctgaggagctaagtgatcaattgaggaatgtgggtttggatgattctgcgaaagagctgagtgttccgattagtgccctcaaggtaatgtagaaacggattcgagggcattattcggcagcgatcaaaaggaggaagaagaagggagcgagaagagaatgatgatggtgtccgagtgagacctgatcagaggnatgtcgtttatatga

SEQ ID NO: 24798 - DNA, 652 bp, Arabidopsis thaliana columbia
  unsure (1)..(652): unsure at all n locations
tgttctgttccttgcggcgattatcggcgcagacgagtgtcaccgggaattcgcggctggggaactcggagattagctcttccatggtgaatttagccggacgtttaacgagtccggtaatttcgattgaccagtctgaccaattcgctttgggaactgcaccgtggttgcggacgtaatggagtggaactggagtgatgaatccatggtgcataagacgaggaagaggtgcttcggcgttgaatggatgttttccggtgagacggagcatggatgagttacgttgaatccaactatcagccgttgattcatctctcggatctaaaatcgacggttctaaatcgctgtttgattttttaaccagctctttgtagtaagggacgttacggttatggctctcgtcttcgtcgtcgcttgaggagtcgtcgtaactgtctacgacggtggtgatgacttcggtttctttgacgattttagtttcggtgaggatgacgtcgagagtttggttttggtgacggtggcggtcgaatgagcgaggagaaggaccgagaggaggtttgaaggcgtgacgacngccgttcatggtgggataatgggcggttacgacggaggtcgccatggtttagtgattgaaccgggtgatagagagaga

SEQ ID NO: 24799 - DNA, 447 bp, Arabidopsis thaliana columbia
tatccacacacacacacacatatataacagcagtgatgtcaaaggttattaccactccagtttctgggttaacacaagccatgtttatccgggtctggaacctcacagtcggtggactttcagggtactccttaccacagaaaagcttcagctgaaagattttcccttcatatgcagtctgatattcgttcatcaccaaacaaaaaacatcaatcttctcaaaatccaaaagcacaaaccaacaatttccttcctttttgtccactctaatcaatagtaatcaagaaatgtcactacataccatttggagtaaagggtcttagataacacagccaacggttatatccattcgagaaacagccacacaactactagttacttcagaaacgcacccaaaacagagagacaaaaagtagaagaaaactccaaagcatatctaaaaaatgt

SEQ ID NO: 24800 - DNA, 651 bp, Arabidopsis thaliana columbia
catgcgtcgctctagaggaagaggatccctacttcgttgcattgttactccactcttccttgccttttcttctctccacttatctctctctctttttctcatcggcctttgccatggcagatataatcggcggcgaagttgtgacggagctcgtgaggcagctctatgcggtttctcaaaaaaccctcagatgcagaggcatcgccaaaaatctcgccaccatgatcgatggtcttcaaccaacgatcaaggagatccaatacagcggcgtcgagctcacacctcatcgccaggctcagttgcgtatgttctcggaaaccttagacaagtgtaggaagctcaccgagaaagttcttaaatccagccgttggaacatggttagacagctactccatgttaggaaaatggagaatcttcagagtaaagtgtctagctttctcaacggtcaattgttagtccatgttctcgctgatgttcatcatgttcgagccgattctgaattccggttcgatcggattgataggaaggttgatagtttgaatgagaagcttggttctatgaaactcaggggaagtgaatcgttgcgtgaggcgttgaagacggccgaggctaccgttgagatgggtgcaacgatggtgctgatttgggggt

SEQ ID NO: 24801 - DNA, 592 bp, Arabidopsis thaliana columbia
  unsure (1)..(592): unsure at all n locations
cttttcaaaagttgcatccaaggctagcaagcaatctgatggtaattccgacttatgtaacggatcagtgtacaaggaaaaagagaatggaaagtgtggcagccaaatcaatggttattatgaatcatgtaaaccttgtaatggttctgatttgcatgataatttagctgaaagttccgatcggttcggggagctatcgattaatggaaacaagataagtattaagtctagcaaaatgagccataaagctgaggcacgttgcggaattagtgatgaatccaggaaaaataagaagtacaccatagcaagaatatcgggaacccattccataagtgtggattttcgactttctagaggcattgcacaggtatagcaatacacagaaaaaaaggaaaagaaaagagctataaggtatagcttccaaatttttgatgactgagcttctgttttgtcaacaggtgaatgaaggaaactatacgaaagctatttctatttttgataaggtgatttggtgatctttatctctggcgagtgtctcttgcttattttttctctgtttacttcttttcggaggttgtttaggganacatta

SEQ ID NO: 24802 - DNA, 552 bp, Arabidopsis thaliana columbia
cgactatccatgtatatgaagcagactagcagaggatatgacgatgatccgtaccagaaagctagaatctccaaaaactcagtgtcgatctgaagataaatgtatgaaaacgttaggttatatatattgatggttgactgatttacattaagatatatggatcttcttacgcctgtttcttcttttacttctctaatggctgcggcgaaaatctcctcaccctagacgcaagaaaataaaatattaaagatgaaatcttcagcaaacatataaagtgggattgaaaacttgttgctacatgcagataacacatacctcgtcaacaactcctgttgggatcttccagatacctgatccgcataatgaaccgtatttttcctgcaccacaagaatctgcctctagttgtaattttaagatgcaaatgctggaatatggagtacattttccttaccattataggatgattagaatattatgacttggaaatacagaaatagacaatatgatggtgtcctatctcctaagtacgtctttgttatggttcagacaca

SEQ ID NO: 24803 - DNA, 566 bp, Arabidopsis thaliana columbia
tatagataaagacacatatatgcgtatacacagagatatggtgttcgtgctgattttgctctttacttgttgttttcagacgtatgaaaagagatatatcacagagtggctgaaccatgaccttacatgtcccacagccaaacaagtcctttatcgagtttgtttgacacccaaccatttgatcaatgagttgattacgcgatggtgtcttgctaacaaatatgatcggccagccccaaaaccatctgatattgactatgtaacggagctgttcactgatggcatcgaatcgttgcttcagcggatttcctctccttcctcctcggttgcagatcagacagaagctgcaaaagagctagccctccagaccgaaaaatttgtcaatgtccgtgacttctttatcaaggaactccctgattcgatcaccaggttactcactccgctctctgttttgggcgatgaggtagactcgaatcccgagcttcaagagaatatcgtcacagcgttgttcaacatgtcgactttcgagaagaataaaacagtacttgctgaaaaccatcaagtga

SEQ ID NO: 24804 - DNA, 655 bp, Arabidopsis thaliana columbia
gagaagattggagagaatagagccaagaagtgagagtttcactattctcatcttcctttgcccaaccgctagaatcgctattatcatctccgttgcgtttccacatgtggcgttcattaatcctccaacttcattcattcattcaattattttcattaattttcataagtgagagaaaatgcaaacactttcacagaatcaaaaatccaatttccttcatgtatatagcttgcatgtcaagttatcaaagatcaatgcactataaaagacacctagattaaaccacaaaaataatgcgttgatttaatttaagaattcggttttgtgctgcgaataacccggttcgattcacatggcaacaaatataaagtcaacgaaatctaaatgatcacctgttggaccggtatggaaagcaatttgcctgtttaagaagaaaatcaaaatatatgtttgtaaatgaactaataacgttattttagatagaaagcaaataaatggtaaaagaagaaaacaaagaagaataaattactcggtgagaaaactgatacgttcggccaaaggtgtcaatccagcaagctcacgcaaagaccacgcatgtttttttgtacacacgcaatacaattacatacatatggtttaagacgatgttggttat

SEQ ID NO: 24805 - DNA, 901 bp, Arabidopsis thaliana
ttggcttctctgatcttgttgactattgactcgagtgttagctcttcaagtaattctctggcggtggatgccaccgaggcaagcacgtatgcgttgccggaaaacccttctggcagcggtgtctccgttcttttccttatgtccactgcgaattgtaaacacaccatggcgtctctcctcaaccctaaagcccttgttcttgcctgcaaaattatacgcttaatatttatgtttctaactttcttataatggctattttaaaaaattcttaatatagttttttttttaaatcatcaaaaatgttttgaaaattttaaaacgcacacctaaatttttgggtgaaaacagtaatttgtaaaataaatttcttgaattcaccttccacaaatgagcagcaagaaactcaaaggaggagcacatgaacccttctagtgatttcttcttcatgctttctatcgcatcgccattaagctcgaacgttttgatcacaaaaccagagtctggtaactctaagttacggttttgctcctgataggtcatcatcgcctgtttgatcaactggtacagatgacaaatggctgcagcattggtttctcggacagcatcccggttaaccagtagatttcgtcgatcatgaaccggtttgatgaccacatcttcctatttattagtaatcttgctgttggatttgttgtgaatgtgagcgttggaggcccacgcgtgaatgaattcgtaagctgagattccatcaaatagagagtggcttgtaccgattccaattgagtaacctccacatgcaaatcttgtcacctacatttattatacgtcgatatatcatcaaatatgtaactaaatcactacccgtttctcaggcgtatcatatctatgtgtttaaatatat

SEQ ID NO: 24806 - DNA, 1623 bp, Arabidopsis thaliana
caagttgttaaggcagtaacttgatgtaatctgatcatggtttcatagtaaatgtgtgttctaagtaattgtggattagggttatggaaaaagattggatttttacatgtctcgctatcaattaacttcaagtgtgtaattaagaaccatagtttgatcccttttgttgcaggcattgtcttatcttcatgctctgttcttcccatcaaaagctcatctttcactggatcccctgtttctctcccgcgggctcaaccatcatcccgaacagctctaagaccgatgaaacccgtctctatcacgatgatggtaaagccggcgctccaattcatccaagggacggatgagatgacaatccctgatgttaagctgactcgatcaagagacggaagcaacggaatggcactgttctctttcgaccaaccatccgttttcgactcgagcggtgaagtcggagagattacaggattgtacatgattgatgaggaaggtgtgattcagtcgacggatgtgaacgcgagattcgtgaatgggaaaccggaagggattgtggcgaagcacataatgcgatcgccgaaagaatgggacaggttcatgaggtttatggagcgatactcggaccagaatggcttgcagtttgttaagaagcaatgaggttggagagaattttcaatgagcaaaacaaaatgtgtatgttacattaaattttttcactcttttgatttataatcttgtactctcctagttttgatctttacttgagtttcaacttacaatggtaatctaggcttttgttctgattaaatttggtttaatctaaacaaatccatgattttactaaaggtatgatcataatttcattatgaattgtgctattagtcaaatacttaactgtgtttgtgtttatattacgagtgttcaatccaattaaaccaaaaccgtgtaagagatttaaaatagaaaacacactccactgaaattgaacagaatcaaaactaaaccgaactttgagcatatccggttttaagttgatgaccatatatagccaaaagtcgttaagaatagtttattatgaaaaggggcatcaaagcattgttcctctgcatcatggcatcgacgttaatctcttctttggccgttgtcttgccgttaacgttactagctccgtcaatgtccatgaaaatctctcgaatcgacgtcctcggatatatttgtaacaacggcaccgtctccaacgaggaggcttaccggagatcatatcagattaacctcgacgcgatcagaggtgatatgaggcatgtcaagtttggaactcatgaacatggagatcctccggagagaatgtacgttttgtcgcagtgtgttagcgatctctcatccgacgaatgtagtttatgttggtcacgtgctaccgatctcctctctcaatgtttcccggccaccggtggttggtttcacctcgacggttgtttcgttagagctgataattacagcttctatcaagaacctgtttctcatcaggacaccaaggtagatggttatgttttgtcagaaatctcatatcgaaaatatgatgggactagtaatatataagtgctatagttggatcaatttggcttgggc

SEQ ID NO: 24807 - DNA, 800 bp, Arabidopsis thaliana
caaacaatgagatagtcagttggttctcaagagtaatggtcgaccttttaagtaagtctggttcttgattcttcaatagaggaaatgttgaggtttttatgcttatcagtggctgtgcttatgtaggaatttaggcaaacggatgtatacatgtgcgattcgtccagcggctatatatggacctggcgaagataggcatcttcctaggattgttactctaacaaagttgggtttggctctcttcaagatcggtgaaccgagtgtcaaatcagactggatttatgtcgaaaaccttgtcctagcaatcatcttggcaagtatgggactcttggatgacattcctggcagagaaggacaacctgttgctgctggtcaaccatattttgtctctgacggtaaatgcatctcttaaaccttaaaactagcttcctaaagcaagctgaagtattttgcattggcgatgttgtaggttacccggtgaatacctttgagtttctgcgtcctttactaaaaagtttagactatgacctgcccaagtgtacaatctctgtaccttttgcgctgtccttgggtaagatcttccaaggtttctacactgtgctatatccatggctatcaaagagctggttaccacagccccttgttcttcctgctgaagtctacaaggtaacagtttttttcccaactcatattccagctgagatcataaaccaacttgtatgaaacttttgatgtggtgcaggtcggtgttacccattatttctcatatcttaaagccaaggaggagcttggatatgttc

SEQ ID NO: 24808 - DNA, 1038 bp, Arabidopsis thaliana
tcactaaatgggaacattttgactcttgattagttagttgtctacatttcttaggacacttatctggcattttatttttgagctgctttgtatttctattaatcaacactgttgttaactgagttctgctttaataaccttgtcatgctgaaaaccgagaccttactgtttgatacttcctctggtctgacatttactatggtgtgcaggtcgaagtccaaccagtatccaaacacgtccctcgtccagatcgaaggagttaacactcaggaggaggtaaactggtacaagggaaagaggatggcttacatctacaaggctaagacaaagaagaacggtagccactaccgctgtatctggggaaaggttaccaggcctcacggtaacagcggtgttgtccgtgccaaattcacatccaaccttcctcccaagtccatggtacttaaacagattctataatcatcttctctgtttagaagtgaaatcttttgcttgggtttttaacaagatattattccttatgttcttgcagggaagcagagtgagagtcttcatgtatccgagtaacatatgaagcaatgcaaaaatggcttaaacttataatttagccgccttggttttgttcactagtttgttattttgtattttgatattgaaagcatttcctttctttgtttgaagtgtttggagattctctaaattgactttgatcatggatccggtttttcatcccaaattagactcccttttccccttttataacgaattaaaacagacgaatggtaacatattttctcaaatcactattacaactttataattagttcttagaaacacttaaattctcagaatcatccatggcatatgttaattgttgaagtctgaaaatcgaaaatcactcaaaataatcaaaaaacaagagctgattgaagttgtaaactgaaacatttgaaactcgatttgtgatatcggcccttaggccgattagacctttattgggcttcctaggctcactttagaattttcaacagaattttg

SEQ ID NO: 24809 - DNA, 1054 bp, Arabidopsis thaliana columbia
tggtaaatcttcgattcattagagagtttcaaagtttccatttatggaaaatgatttagagaaaatgaaaagaagaacaattgatgtgaagttggcaaaagtaaatgtgtgacctttgtttttgttaataagagaggcggcgattagggttttgggagtgagcaagcaaattggataaatcaagagtccgatctctctcgatcatctatgggagttgcgagttctgtgggcatgacctttagcgacggggttccgttggcacgagatggggacgaatcgagaatcctaattgaagatttgaaagaaacagaggaaggagaagagagtggagagtgagttatgcgaatacataaagggaggtgagtgcaaggaatcattcatagcattggagaaatgcgcggatgaagaaaagaagaacgaagaagaaagtgacgtcacgaaatgcaaggaggtcagagccaagttcaagacttgtatgtatgaaaaccctgtttactacgagcccattcttgctggggaggctagagagattgccaagatgttaaatggagttgcaagccgaaaaggaggccattcttgccggtgagctgcagccattgctagggcggttagcaggttgcaaacagaggaatccaatggacgacgtcacgggctcacggcgagtctcccacaccggctttcaatttaagttcaataatcgacaaaggaatccgcaaccgtcttagcacattggccagagtaggatccgagcacgaagggctcctcagatattggtttcagacccacggtcactaatctcttcgaaggctgattaattaaatctttctaaacaattcggttagttgctgcatttattgtacaacagtattttttaattgtatgttaacacaaatggactggaagttagaaatatgtttgtttaattgactaaaactggatctatgttaataaaataattcatcaagactataaacacataagttgtaatctatatcatcagcactcgacaaaccattttaaaatcaaccattaaactaataatagagaaaatacg

SEQ ID NO: 24810 - DNA, 797 bp, Arabidopsis thaliana
ggtttgcatagaggatccacattcatcccaaatgtactttcagaagacccatatgttgtggaaactataggcagcttgttggaataaaactccaacattggaatgtattgagacatttgtcctgttataatacaatcaatatatttggctttgggccaaagtcgtgtaataataccttcccaggacttgtggctgcattcttgttcaataacatcagccaatattgaatcaggtcctcgaagaatggtggagacagcgtttctgccctcaaggtcagtgatccactcactaacatgacctgatcggatattgctacacaattccttccagtgtttctcaagaaaatcgatggctcgaaccaagacaaaagcaaaggctgcacctactctcacaacctcatctcgctggacaagcccgcataaaagatgacaatacaaactctgattatggtctgggcacaatataatttggtcagggcttgtgtactcagaattacattttgatggtcggtttttgaagtaatcgctcatgaagaagaaaatatagcaaagacctggtaaaccagagggtgttgccgatggcgctttagtgcaatgaaactccatcgcttttccttgctcgccaccgctatcaaaatgcctatagtccaaaacaataaaaatcttagttgtggaaattaaagataaaatataccgagtatcttatttatcatttgcgaagtcgattagaggaaagtgttcatgtctcagcacctactttatgagttggaagctcttttacgttttaacgttgatgaa

SEQ ID NO: 24811 - DNA, 700 bp, Arabidopsis thaliana
gttttacaacaacaaaaagaaatgaagtcaatatgataatcccctactataaatatagactcgtgaataaaactcaaatcagtctctgaggttttggtgagagaaaaaaagaactcaaaacagagtgcgtttgtttctgggaatcttgaagcctctcccacttgcgaagacgaagcttgctcgttaggtagttttcttcttcttcttcttcgtttcaattcctttttcgttcatgtgaaatgtgaaatcatgtgacgtgacgattaggttaacgatcgaatgtcttgatctcgtatatgattcttttctagtttcttgatcggcacgtcttgttgttttctttctatcgagactgattctagatgttcttaaggatcttgttggatgaaatttacatgaatctgtattctagaagatgaactttgcatgaatcacgacgaactgatttagttgttgctgtagattaagtttctcgagatagattcgagatacacgaagggtttcaatgaataatctgatctgtttcgatgaacaataatctttatctttgacttatggattaggctaatttgacaccatggttggaaaaagcaaatcaccagagttcaatttcgaagatgggatggcatacttcgatgctgtgaaggtcgcattgcaggatactgaacctggaaaatatcaagagtttgtaagaatcttt

SEQ ID NO: 24812 - DNA, 449 bp, Arabidopsis thaliana
gatgagatatatctataccagcgactagagattggaagaacttctctgtgacataatcctcctcgttggtgttctcaaaagctagactgaatttgtagtgcttaagagcttcaaccttctccactgtaacgaattttcgtaaattattggttcaatgacttgatatggttaggacatagaacatttcgctagcaatgcataatattaatacataccactcccatcccgattccggtgacaaccaccataagaatcaatcttaacattcgtcttcattaaggcttcaagagcttgcaggcggaaattccgagcggcgcaattggaaataaaagcagcagcaagagctttctctgtttttggttgcactggagccataatatcatattccgcccatgaaaaatacccaacaggaacatctgatgacagactagttgtcatcacaatatcat

SEQ ID NO: 24813 - DNA, 544 bp, Arabidopsis thaliana columbia
ccacataaactaaaccgaaatcaagtgttgtgtggtttggttgctcctattaagaatattttggtctaaagcaactgaaaagacaaacggtgaaaatcatatctcactttaacaaataataaaaacaattcttttttcatccacttatatgaaaatttctttttatataatcttgttttagtttatggctattggctagcgcaagcgtggaatagttttgtcctaactacagctggattaaaagagagagaaaaaagagagactcgagtagtttgacttgggctagaaggagcataaaaatttatacattctctctcatttgcttcttccttcattccaaactaacaaatatgaaaccacctccttatttttctgtatctgaaccccaatgtcgtttgtccgatccggctcagccacacaagctttgccgccggagacgggatctcacggtccactttctatctgcttttcgtgcaaaggcaagcatttagagggtagaaagtactattactattgtgctacttgcaagttagaattccacaga

SEQ ID NO: 24814 - DNA, 571 bp, Arabidopsis thaliana columbia
atcttcatcctccatcaccaatcttctcgtctcttcatctccaatgacaagtatcaaacgcgtcaccggcaatttcacctccaccgcgatcttctccttcatttgcttgaccgtcgcatcttcactcacgtccgtatctataaatgttcccgttattatctccacactcaccttcattgtttaatatctctctccaccaaatcttatgattgtgattgttgagacaaatattcatatctttttttctattgttacttttttcgttttttggttattttatttttttggcaatggtttttttttttgttttaagatcttgctatgtatgaaaacatgaactaaccaaacacaacgcatgcgattttcgttttcaattcaatgtatcaaatatcggataccgtgtttgattttatggaaattattatcttgttttatttcaatttcgttgcggatatcttgcaacaagattttgttttacatattttgactaagtaggatcgtcaacaaatctatcctcaagtttagggaactaattaacgaaaatatttagggactatatgatgacatatca

SEQ ID NO: 24815 - DNA, 512 bp, Arabidopsis thaliana
tcaccaaggcctaacctgttgctcagtgaattttatctccgggctagcggcgagaccagctaaatcatgatccatataacggaaaaccaagtataaactactcgacatcctcgaagtaaccaaaccttccaatttaatgacattaggatgatccaatctcctcaaaatcagaatctctctagccataaattttaaactctcccgttcattaacatcacaccgcactttctttaaagccacaatgtttcctgtcagcgaatctttcgccttgtacacattactatacgttcctgatccaatctacacacacacacacacataaccaacaaacttcaattacccaaaatcattgcaaagaacaaacaaaaacagattttgatctcaccttatcaatcttctcaaaggaatccgcttttcttggaagccatccgcttaacgcttccccacaaacttcagacaaccacgagggccatccagcagcaacttgctcaccgagcaaattctttggcggg

SEQ ID NO: 24816 - DNA, 484 bp, Arabidopsis thaliana columbia
tagtagaggccgccagtgtgctctaaagatcacgacggacagtcgcttccgcatagccaaaaagctccatggcctgctgtgtggagaggtgacgatgttgccacaggtagtgcagcatctgtttgatacggtcaggtctctgttggctcatcagacacaatctcctcttacagggtggcgaattgagctaaggtcgcgcgatagtcagatgaagagaacagggcgcgcccaatcaccatatgttgcgccccagctgctgccagttgctgtgcagctgccagcgtaattccgccttcggcccagcactcggtctgaggaagtactgtgggtaccatttggacactctggcacaatatagggaatgaatcgactgtccctgcacatcgggatcactggtcatcaccatcactccgtccagctcagacgccagatatcgtcaggcgtcgatcggggtagccggattaaataccagtccggctcgtgc

SEQ ID NO: 24817 - DNA, 464 bp, Arabidopsis thaliana columbia
ttgagccactagtaattgatgatgatctcacatctggaggatctacaaaaggagagtttaatggtaagttctgttgcaaagaaccagtgggacgtacagaagtcccaccatgtgatacgctgaatgctacagactcttgaggctgcctgggatttaatcgtctgccagctctagataaggtgtcagtgtttcttgtagaatgaaaagcactggctgcaactgctcttccaccaccagatccaaacatttgttctgtccggccaaaatgattagtaacatttggagaactttgtgaaggtgtagccaaacttaagctacttgaagcaccatattgagaaagacttgcatgcgacgacctattttcagtctgaacaatgcggttaggagtttcacagaaaaataatgactaggggatcttcaagagcctttcttttgcaagacgaaccccaaccaccaaatggaga

SEQ ID NO: 24818 - DNA, 559 bp, Arabidopsis thaliana columbia
aaatcgttaaaccgagatgcgggaatccggatttgatcgacggggtttcggagatgaacggtggtaagatactccgtacgactgagaaatactcgtttttccccgggaagccacggtggccgaaacggaaacgagatctgacttatgcgtttgcgccgcagaataatttaacagacgaggttaaacgcgtgttctcacgcgccttcacgcgttgggcggaggtgactccgttgaatttcacgcgctctgagtctatcctccgtgcggatatagtgatcggatttttctccggtgaacatggtgatggagagccgtttgatggagctatgggaacattagcgcatgcttcttcgcctcctacggggatgttacatttagacggtgatgaggattggttgatctctaacggtgaaattagtcgtcggatattaccggtgacgacggtggtggatcttgaatcggtggctgttcatgagattggtcatcttttagggctaggtcattcgtcggtggaagatgcgattatgttccggcgatttctggtggagataggaaagtg

SEQ ID NO: 24819 - DNA, 506 bp, Arabidopsis thaliana columbia
ggtaccgacttcttcttacacaatactctgtttctctatataggaatcttgatcacttctttttttggtatgaaattttgatcacttcttctcggttacttgtatgattttgtttatgggccttgtcctttgtgtgatgtagaaggcggtacaaaaattggaggggccatggaacgatgaggaggaggaggagagggatgggaaacgcaatccaaacgcaaattgttacctgcaccacattgtatgattagtttctccaaacaaaaaaaatctataaatataataacaaagaaggtgaatacaaatataagttatataacaatatgtatatagacgagacgagacctatattataagcatgaaaatgagtgtaaaaaatactaacgtaggttgcgtttggcctcgcatagtccaacttgtgaggagatagatagaagcagaagaaacaaagagagaagaagagcaactaaatttgatgtttttgcagccattttgctaatttagtg

SEQ ID NO: 24820 - DNA, 541 bp, Arabidopsis thaliana columbia
tttcgattaccaagtgcatgcctaaaagagataaacagtatttgttcagcatttttgtggtcaggaccagagctaaatcgtcgaaaggcaaaggtatcatgggatgacatttgcaaaccaaaacaaggaggacttggtctgcggtctttaacagaggcgaatgtggtgagtgttttaaagttgatatggagagtaacctcgaatgatgattcattgtgggtcaaatggtcaaaaatgaatctgcttaaacaagagtctttttggtctctaaagcccaactcaagcttaggatcttggatgtggaaaaaaatgttgaagtatagagaaacagcgacgcgtgttagcagagtagaggtgaataatggagctcggacttcggtctggtttgataactggtcgggaatgggccatttgatggatgtacaggacagagggggcaatagaccgtggaataaccggaacaaacagtggccgagcttggagtatagaagagaaggaacatcgacagacagctaatgatatgaggcaccttaaccagaat

SEQ ID NO: 24821 - DNA, 499 bp, Arabidopsis thaliana columbia
tgtgaacaattgcttggttctgaagatgttcttgcaagatctttgcccgagtatctgcacttcctctaacactgagttgctgtgagaatcagattgatgaagctctcctcctgcactaatatagcaactcttccatgttttgctatgaccataacatgagatttctctgcaactctgggttctgatcggttcaagactccctgcaatatcaattgcatactccaggacatttacccgcctaggaatctggtgaccggagaacttaatcttctgatgaaggctataaactgatccgttttgaacaaccatcccgttagagagcaacactatccggtctatctgctcgagtatgcgaaaaccaggctggtgaatcgtcagaacaatggttttacattgtttaatcgtcatatctttgagaggcgtcacaacttgaagagcggaccagaatccaaaccagaggttggctcatcggtcaatataacatttggatcatgaacaa

SEQ ID NO: 24822 - DNA, 639 bp, Arabidopsis thaliana columbia
gaacttgggtaatgttttacaaagatacttgcatcttctcaactgaagtggatcataatcattaatagactaacccgaaaagaccataaatttcaggctgaaaacatgtcgaagaagtggcatattgagaatgaaggtggtaatactatcaaggagaaaccaatcttgaaggagctttcgaaaattctgggacctaaatcttaaaaggccaagacctttggttaatgtgtaaccatgtggatagagaaagtcaaagaagaagttctatatgtttgtaagattcaataagatcttaggtaaattatcatattgtgctgtaagaactaagaagtttcaatgttgctgtataaaggttgtatcgagtgatttaagttttgtataataaagtttttatgagtttcaatatcaatgtttcctattgtgtaagcaaaataaaatgtttcacttctgattggacatggattggtgggttaaatatacagaataggaagttacagtcaaaattgtgaacgttataataagtaagggttgtttatgtaaattttggcttcagtagagttctctcttctttatgtaattaggcgcttagacggtgaggtaacgatgagtaacagagaagagatcaacgatgaagagaga

SEQ ID NO: 24823 - DNA, 560 bp, Arabidopsis thaliana columbia
aagaatttacaatcttatacaagttccaaaggaaatatcacagaccatctgtgccaactggccaactaggagcattggtcggagcatccaaacgctctaaaattgactggtcggccttcatgattgatatcgagaaccctgagaagggaaggagtatgagagcacagcacaaaatcagtgactctacatagacacaacagaaacagtcacctgccatatcaagagacgtcataaatgatccagtatacaccctatcaacggcaagcccatattccaactgtaattttgggactgcttttccagcagcaatcataagttccattagaggtgtaccacctaagctacagaacaacacgaacaaataaaattattcattgattaagcaaactcgttataccataagtgggtaacatagatatagcattatggtaaaggtgaaaatgagtacaaggatcacataaatatgtagatggaataccaaccttatggtcctacccattaatcatcagaccacactgttccacgtgtaattggacataatttgcgcctggagttagaag

SEQ ID NO: 24824 - DNA, 834 bp, Arabidopsis thaliana
cataaacatggttaaaatttgtgatctaatacaagaatagttgactaaaacaaatcatgcatggtcagagcgatacgaccaaattgaataaaataataggaatatataattaataagaaagtataatagctcttcaagtaaaattagaaagaaagaaagaaataatgcaaaagataaagaaagcgttacaaagtgtggttgaggacagattatattagattccgatttccaataaacaagaaattatatagcaaaaataaaagataaaaataaaataaaaacacttctcaaatcggcaaatccaaaagagagagataaaagagagaaagataatctctttaatgtccacattatctctctcttcttcttcaccttcttgagaaacctcctctccccaaaaacgacgtagtttcacatttctcgacttcttgaatggagtttgaagacaacaacaacaacaacgacgaagagcaagaagaggatatgaatcttcatgaggaagaagaagacgacgacgccgtttacgactctcctcctctctctcgtgttctccccaaagcctcgacagaaagtcatgaaaccaccggaactacttccacaggcggtggcggaggattcatggttgttcacggcggtggagtgagcaggtttaggttccgtgagtgtctcaagaaccaagcggtgaacataggaggacacgcggtcgatggttgtggtgagtttatgccagctggaatcgaaggtaccatcgacgctctaaaatgcgccgcttgtggctgtcaccgtaacttccaccgtcaaggcattaccttacttccatcacgcgccgccaca

SEQ ID NO: 24825 - DNA, 571 bp, Arabidopsis thaliana columbia
gataatggtggtcttaggtttctaatagcagtaagttttcatcaatgagttcttttagatgtatttggttttggtttttgttgtagaatctttttttttaaacttgaataaaaatgtgcttagttaaacttaaacttaaaccacaataatatatcttttagagagttggggatatgaaaaaaagagagctaaataacaatatgataacaataacaaatacttgcataagaatcatcttcaattctcttcatgatattccttcttctcctctatatagtcccatctcttcttccttcctcgctcctatcttttccttcaacgtcatctttattcaaacaaactctctcgtagattatagacaccatccctacccactcttgcccatgtatcagaaaccctaatgatcttataccgaaacgggttcgacgaaatcaccattaaaccggttgcgacagtgccaaacctggtctttgggtttggtatgatccggtactgttttgtagccggtttgcagacgatgtaatctggtatcttttgcctacctttaaacacaacatcgacacagagcaaa

SEQ ID NO: 24826 - DNA, 515 bp, Arabidopsis thaliana
cccacatgtcaaatttgcaggaaatatggtcactcagcctttaagtgttacacacggtttgaagaaaactatcttcctgaagatcttcctaatgcatttgctgctatgcgggtttccgatcaaaatcaagcttcaagtcacgaatggcttcccgactcggctgctactgcgcatatcacgaacacaaccgatggccttcaaaactctcagacatactcaggtgatgattctgtgatagtagggaatggagattttctgcccatcactcatattggtactatccctctgaacatttctcaaggtacattgcctttagaggatgtcttagtatgtcctggaataactaaatcgcttttatctgtttccaagcttactgatgattatccctgctcttttacgtttgactctgattctgttgttataaaggacaaacgaacacaacaactcctcacacaaggaaacaagcataaaggtctctacgtgttgaaggatgtcccgtttcaaacttattactc

SEQ ID NO: 24827 - DNA, 919 bp, Arabidopsis thaliana
aaaaaaaaaaaacctacattctaaatactgaaaccataaaccatatggtaaaaagtggataaatgctcaactatctccatttcaatatacacatcataaaaaagatttatattcaatttattgtaaaatgaaaacttagattgcattactttttttaactctcttctctaatttaatttactatctaaatttgtgagttcataaaattttagattgagaacaattcatcagaaattctgattcagaacagtacaaatcttgtcatgcaaacttatctatcttgtaaaatctatctatcacttgtcgtcactaagtacaaaatctattttagtttgttttttttgtgtgtaagaaaagtttttttatttaataatctatcaccaatattttccaacacaacatgaccgttatctcctccaatctaaaacttaattacgaaactacccttacctctttcactgactgactcgtctccttctccacttggatctcaaaagtccgatccaaaaccaaatccgccataactctctctctctctcccacttcccacagagagacacattcatgccagcaatgccaggtctcgtctcagtcaaaactccttccgatacaccgccgctacgtgtagccgtaccagacacgcaacctctctcaaacccgccgcgaactccgatgaagaaaaccccttcctctacaccatctcgatccaaaccatcaccaaatagatccaccggcaaaaaagattcccaaccgtatcctcctccaccgcagccgtaatcgacgtcgacgatccatctctagataatccagatctcggtccattccttctaaaattagctcgtgacgctattgcttctggtgaaggcctaacaaagcattagattacgcgatccgagcacttacgtcctttgagagatgt

SEQ ID NO: 24828 - DNA, 572 bp, Arabidopsis thaliana
tgggcgagtaattagtgacagattttgtgccttaagaagcctgggggagttagggtgctgtagatcttaacatatgatatggttttcatcgatttaagtttctagactcagtaagaactgaaggaagatattgatttctgatcataactatataccacagtcttaaaaaccagttcttctgagttataaaacatttgtttttttgattagacatggaaatcgttaccggattcaaacgaggtgcagaaagaattccccgggataaccatcacgagcgtggagtcaacacttgatttactcgccgcatcaaacatgttcttcatagcaaagcgtaagaatgggaaccaagacgtcctctatctttcggccaaggtaccaagaggcataccgttcctgatcgaactaacggccatagtgggtcaacctggtctgaaatgtgcagtcaagactccaacccctgagatcgctcctctcttctttgaagcagtcgaaattctcttcaaggcttgatttgattttacactgccctaaggtaagcaaatttcttcttttagtggactagaggatcgtcg

SEQ ID NO: 24829 - DNA, 545 bp, Arabidopsis thaliana
gtgaaagtgctcgtagcatcgtcgtaagcgtactagtaggagcgaggacacgcggctttaaacatctccgaatacacggaaggccgacaactagaaggtgtagcatacgcgccgctgcaacagtattcaggactccgaaacgctaaacacgcgcttttgcaagcgtctccgtcgccgaaacgcagctcagcagggcactgaatgttaagatccgtagtgcatccggtagaagcgcactgcccagatccaccggcgacttcaactatcatcggaatgttgtaaccgtcgacgagactaacgtcgtagaaatcatcgccgccagtgcctagagtgaactccgcgagagttacaggcggtgcggcaccaagcccggcgcattcgacagcgttggagccgcagtcaccggttttgcatgtaccggagccagaactgtcgaacttgcaaccggtacgagcccagaatcgaccggaccaaccggtgggagcttggagagagcgagaggtgcctttagggagctcaaatccggtggtggagagagtaggtga

SEQ ID NO: 24830 - DNA, 916 bp, Arabidopsis thaliana
aggatcgcatttccggtgtaaacatcgtcaacaacatgtttagcggtaccgccaaaaacaacttcccgattgtcaagctagaaggagagtttcatgatattaatcaagttgtgattgatcaaaacaatgcagaagggatgatgctgaaatcaacaaccggaaaggccatggtttccgcaaatggaacacgatggatcgctgatttttcccctgttttggtattccctaaccggataaaccattaccagcattcgtttttcgctcaatccggacagatccctgcaaatgcagtgaccaatgtctccaacaatatggtggttgtagaaaccgatagagctgtaactggaaccgtgtcaataattgcttatcagtaaaacaacattcttcacattgatcatattcctaataagaaagcatgatttgacatctgatttatacaagttcagttacagtttggtgagcttgatactaacaactaataccagcaatcagcaacctcatcattagcggcttcttctggctcatccgacttctcaggtggaccagaagtcctaggcagtccttggaaatcacgtttacctggtttcgcaatgtctatataaatcattctgccattgtacatctgcaacagaggaatgggaaacatttaggttgatttcaagacataaaaatgtaaacttgtgattgaaagaagcttttacccgacggtccatggtctctatggcaagaaaagcatcatcttgagacgtgaattgaataaaagcataacgttttgatctcttcattgcctcatctttgataagcttaactgttttgaagtataagagtgaacatatcaatgccataaaactgaaccttaaagcaacaaaacagagtaaaattgaaaccgcaaacataccttcagctatctctccaa

SEQ ID NO: 24831 - DNA, 570 bp, Arabidopsis thaliana columbia
caaagtcttacagttaacatctttgagatctttcaaggagaaatcaatggtgaaccaaccggaagtaggaactccgttaaccgggtaagatttttgtcgagtagggtaaacagcttcaatagatgaagaatttctcattgttaaatcagggaagcaaataccaagagcatctttggttagctgaacatcacaccatagaacagcatctggtacacttgtcagaattgcgaaattgtaagcatcgtaactcgaatctgggaacaatccagagaatccaccacgagctatcacaagaggaggatcacctgagcacgaaattcaagaaagtgaaaaattttaatacagaaaaaaagagatccaaagtaattctatatttggaaactgtccacaaatggctaaattctcacaaaccaaaatcaaatggagaaaccaaagtgaaatttactatctggaaagagagaaagtgagagaggacataccagtgagcgttggccatggacttttaggttttttactttgagcatggatttgagcagcaagcagctgaatcagaataacaccacagagaag

SEQ ID NO: 24832 - DNA, 473 bp, Arabidopsis thaliana columbia
cttctgtgtaatacacatacttatcctcccatagattcctccgctctaaacaccataaactgtgatgccatgtgcacgagtgtatccactttgttgtgattgcgcattaagttgtggccgtacctaaaaacaaatgcctggaagaacaaataagataacatgtttcacctctcctccggagactggtcatgagccattaaatcatattacaatgttgagtaattaacctaatagtttgtataattgtttattcaaaagcaatgtctatagtagatataccacttgacgaggaattgttcaccggagggtgactccacatagtgatccaccacaaaataatgtaacaacactcaaaatatgtgttgtgattttgatttgacgtgcgactctttcgtctatcccgtctctgtctagtgaataccgagggtactacaccagaggacattcaatatacatatttagaggataacttg

SEQ ID NO: 24833 - DNA, 501 bp, Arabidopsis thaliana columbia
gaggatccctgtaaccaagaatggcggtttcaagtgaagggagctggccgagaacgcttggtaactcgccggtgagattgtttccggataatccgagaaatctcagcttctgtagattcttgaatgaacttggaagtgacccttgaaagaaattccctcggagatcaagaacttctaaagagactaaatttcccgagatcctccgtgagatttccggagagattgttccctgaagcattgaggtgaacaagcccaagtgattcagtgctaaatagagaaagactccctgaagaatgaattctggctgatgtcaatagatttcaacggagggattgatttggggagcagcgactcgaatccgttgcatgatatgttagacgagacaaggcgtactcagctggctgatcgaatctgagattttgcctgtgagattcaccccgccaggtcgagcttctcaacattgccatttgagttgcacgaacaccggtccaattacagtga

SEQ ID NO: 24834 - DNA, 547 bp, Arabidopsis thaliana columbia
gtgtccggactaagaatgttttaagttaagagttataagaacttaggacctcctctgtctctccctccttgttcccgtgggaatttgtcacaacttgtccgtctttttcgtagtcgatgttgatactccttatacaagtgttcatgtaagtaacatacaccttgcttacgccatcataattaggaccatcatcccagtagtcgccgccccaaccacctacgagttctgacttagtatgaggaacttttgttaaatacgctccaatggaatttagggctttccccgcggatccatggaagccattgatcatctttccgtttacccaccaagtgaaaactttgtattactctttgggtatccaatcacttcagaggtcttccggatggttttgaattcaattgcttggatgcaccggatttgtcaaagtaaccgtcaacagatacaatatgttcaccgttttgatagtcaatctcgaactgccaacaaaaatggttgatacgttaataggatgttcgtagacaacaagctagatatgtgacaatgtgga

SEQ ID NO: 24835 - DNA, 565 bp, Arabidopsis thaliana columbia
tagctttatagccataatcaatgcaggaatgtttgtatgtagttacacaaatataaacagagttctattgagtctatgatttgaagtttgaacaactcaacttaatgaataaagcatagactctatattcaatcagatttgcctgtttatagttttggttcttctcaccgtttacagagtagaaaaagttaaagaaaaatgatcacagaatcgaatctcctattcagctgaaaatctcggcgtacttctcggaaactagaactcctgaatcaatagattccagtggatctttcctcagacggtgccttaagcagttagggataacggttgcaacatcatctggagttactcgatcttttcctttgagagctgcaagtgcttttgctgctctgttagtcactatgtctcctctcaacccatcaacattgagctctgaacaaactctagagatcttcaccttcaattccctatcaatctgaaccgaggaaaggtttgcctagcagttgaaatctggtcttgaagcttgtcctgctcggttttgtaagtgtcacggaaatcctttggg

SEQ ID NO: 24836 - DNA, 576 bp, Arabidopsis thaliana columbia
tgatgagtcagtggtttgtgaattagaaagtatgatagtggatgagttgttgtctgaggttgtcagcttcatgtagggtatatagagtgattcttttcattcttttttcgtttcacattgcattcttacattttgattgagaatagaaacagagtagtggttgcatttggcttgcatcatcaaagggagatgtatagcatttgagaaagttttgtatacaaatagtttctttgtcaggtctaggattggcctcttagcaagtcagtcacattgcttcaaaagcttattgtgtgacttgtacccatttgtcaaagtgtttcaacaaagttttttgtgtgaatgaaacaagattttgattgaaacagtctcatttaaataaatttctttagaaatcaaatttgcgcaacaaaggaaaaaggccccaagcggaagtgagtgagcaagaacatataaaaaagcaatcatttcttgtttaacactcattttctcttcaagctttgtaggtaaggtatacctgaaatggaggatggtgtcttgaccatgagtgatatgctggttgtcctggttatgcagagt

SEQ ID NO: 24837 - DNA, 625 bp, Arabidopsis thaliana
ggagccgccattgatgttcctgaacgcataacaaatccaccggcattgagggtgtcattgggagatgtagcagctaaaatgctcacaccgggtgctgctatatcaggctgcattgtgtaaaaaattagagatattgcagaaaaactgataagtcagaaaataaggatccagacatactttcagaatcgctggggaaatcgagttaggccctcttgatgagaaagttgctacctttgtcccaacaggttctccgacgagtgttctagaaggttgtatcttcacaacaggtgatctgtattttttttcttatgattatgtgtttcttgaagggaatgaaacaactgagcatgtgctaatataagaagtgaagatcataattcatagtttcatacccagtataacgtatgtagaaaagtatatcggtcccaagctcattgtcaatggctacacaaggaaaatcatcactacatggagcgagattatacccgggtttcttgcaatgatcaggccaagaccaccggctgccttcacaatagacgcagctgtggatcaacagtgaaacacttgctgttgtgaacacaatacaactttcctggcgattgtacggttagagttgagattaagg

SEQ ID NO: 24838 - DNA, 530 bp, Arabidopsis thaliana columbia
cattttcttggaatatttcttctgcatttctcaacttctttaaaaaaattgtgagaatatttaacctttttgaaccttgtcgtaagagttaatattccttttgtctgtacaccaacaaataaatgaaatcatgaagagaggaagcgagaacatatatcacaacaaccacttatttctttcgggctcaaaacctggattcatggactcatcattaccccactgtgatgatgctcgatgctcgaatacttccgatttctgaaaactgcttgcttctcgagttccatcttccaaggcgcgttctccagaagtcagatcattattacagtttcttgaatttggctacaagtgtatcttctccctcagctggatcttcaaacttctgaaacctaaaataaccaaaactctaagtttagatcttgatttcttttctaaacaaaatctaaccgagaaaacagcttcatcagtagaagatttgcttacactaagcggtagaaaagatctcccaagcgatgtttgatgagagtgtaagt

SEQ ID NO: 24839 - DNA, 354 bp, Arabidopsis thaliana columbia
tcaaggcttaaatgttaaacccaagtaacaagaaagtatcttcctttatctattacaaatgtacaataaaggacagaggcatgatgatcaggatccctaaaccgtacaacatgccaaacagatactactcacagagaatcagaacataatggtgcatgaattttacacatcagaactggacaatttctaactaacttgctaagtctacttcggaactagctcagtccgatttgatactgccaagactctcagacactaatctcatcctcggccgaacctccggatccatttctgtgcagttcaaggcaacatgtatggctggaataacttgcttatctgcgtctacaatctcag

SEQ ID NO: 24840 - DNA, 627 bp, Arabidopsis thaliana columbia
ttgtttctcaacccatcggaggtttgatctgtcttcagtcagaaactaagtttgcgctttgcaatccgggtacgaaaaagtctcgggctttacctgatatccaagcacatgaaaaagcttttataacaagttttttaggatacgatgaagctacgaacgtattcaaggtgttatgtttgacgatggtatgggcccatgaaccatcaaaacgagtttatgagtatcaagtcttgacggtggaatccggtgtagagtcttgttcttggagagggatcacatgtaaggagaaggatcacacaccagaaactcaaggactatgtaaaggaggggttttgtactatggagctcggtccactagtgaccatcgacctctggtaatgagctttaatgtgaggtctcaagagtttaccgccattgaacttcctgatcaactacatattagttatttttggaattttgtgatttacaatggggatattgccttagtgaacgaatctgactttgaccctagagttgtgaatgaaccgaatgggaataaagttttcacatatgggttagggatgcaactgccaagaatggcagagacccgcatcgagattcctcgttgggacaaaatgttggacatgt

SEQ ID NO: 24841 - DNA, 254 bp, Arabidopsis thaliana columbia
atgagaggatcccccgagaacttttagtggtggggcttatgaaaaccaacgtgatttgtctcaatctaacaaaaggtaaaaacataaaacaaaacagagtaaaagaaaaaatggcaagtcatggatcatcttgtggagcatgcaagtttctaaggaggaaatgcaaccgcgactgcgtcttctcgccttacttcagctacgaacaagcctcttcccatttcgcagcggtacacaaagtcatcagcgcaagtaat

SEQ ID NO: 24842 - DNA, 752 bp, Arabidopsis thaliana
atccaaacagtattaagggcttgtcttacactcttgaggagaaaactaagtagacagtgtttggacatacctgctcacctgctttaacataaacaggtgacttcaaggaaaataagagatctctagagaaaaggccggctcctttgatctcgtatgcataatcttctgtctttatcgcggggttatggtttatctgttcaaattcaaacattgaagtcagagattctctgctgagccaagcatcaatgaatgaagattattttctgaagttttcactagacaatatctgaaacaagaagatagcttgccaagtctgcaagagggatcaagacaaggttttggccacggagacgagaaaaagccctcgacttgaggatcccaaacgcccatatgaagtcatcaagtgttatgcgggatgagaagagatctttgttaggcagtaatatctcttgttccagtttcaagaattcattctccacatactctttcacacccaatgtggtgctcaacagttgagtccctgagccaaacaacagtaaccacaaagttaataatgtacatcatcatcagctactgctactcagaccaattggtatgaatctaaacaatgatcagacttttcaaagaaaagggtaagaaaatggacctttaagctcagcaagctcctcttctgacctgtactggagacatttcacgaagaagacatctcatcagcttagtgttgatcagagatcaattgatgatcagagaag

SEQ ID NO: 24843 - DNA, 550 bp, Arabidopsis thaliana columbia
ccggcttcggaattctgtaaaaaagatcttttgcagcatcaacccggcctatcttacatagaccattcatcaaataaccataagttatatcatcaggagcaaaccctctaatcagcatccggttcaccattttagcagcttcgttaatccgatcaaacttacagagaccaaggataacatcgttgaaagtctcagcatcaggaacacatcccatcagaaacatctcctctaaaagctgaagcgcttcgttcactctattacacttcgataacgaatgtataagagtctggtaaataacagagtttgggacacatccatgtttcgtcatgtccctaagcagagacagagccgaatctatctcattaacagcacaaaaagctttcatcacaacaccaaatgtgaaaagcgttggaggaatctttcggctaagcatatcgtagaacacattagctgcaactttatgacaattaccagaaaccaaaatctccaagacaacattgtaagatttaaaagtgggtcacaggaatagacattcctcatctccaacatc

SEQ ID NO: 24844 - DNA, 1059 bp, Arabidopsis thaliana
cttgcattgatcctaggacacacacttgaggatctaggtcgaactttgtggtgcataatctcttaggtaggatagcagcacacccaaagacacgtagtgatgtgtaatttggagctttcccattagaacttcatagggactgcatttcttctccaatactgaacttggtagtagattgataagaaaatttgcagtgtagaacgcctcaacccaatacttctgtggcatactactttggaatatcattgagagtcctaattcaataatgtgtctgtgttttctttctgctaaaccgttttgttgaggtgtgtgtggacatgacatcagttgttgaatgccatgtttttgtagatgagctatgaagtctttgcttataaactcacccccaccatcacattgaaaggttccaattttctattgaaactgattctcaaccattgcttgaaacacaggaaatatcaaagcaaagtctgatttcaacttgaggggataaaaccagctgaagcgtgagtaattgtcaatgagaacagcatagtatcgaaaaccttgtactgacattattggtgaaggaccccaaagatcacaatgtattttttgcaaaggtctagaggctacaaacgaagaagcagaaaaaggtaacttaagactcttcccaagctgacaggcttcacataccatcttggtgtttttgttgactgaaatagctttagttgttgacaggtgctgaagaatctgagcattaggatgaccgagtcttctatgccaaacagcatcacttgcagcttgctgtcttgaggaatagtagacttcaagaggtgagtgattcttcaacatgtacaaccccttattgtgatgccccattgttaacaactctttgttgccttatcagtaatacgcacagtgtcacagtcaaattcaacacaacagggatagtctgatgtgagcttagaaacagatatcaaggatttattaatatcaggacaaactagaacatcagttaaaggaagattccctgaggttgactgaagactagttgatccagtgtgagttatggggaga

SEQ ID NO: 24845 - DNA, 875 bp, Arabidopsis thaliana
tcccctacccaactgaatctatctccttttgatctcatatcttcaatgtcacaatgagaaaccatgtttctgaaatttctaaaagtccattcctctctcatgggaccaccaattttttcagcgttcgaaagtatctcattgaagtcacccactagcaaccattcagcatttcgattatctgagatatgttcaagagtttgccatagttgatgacgttcagattgagtagggtgaccatacacacaagacaagtagaagctcttattattaaatgttacatgagaatcaatgagtctttcatcctgagaaatcaaggataaagagacattgtttttccacataagagctaagccaccactccttccattagggggctgagttattacattagggaagcctaaatcatatgctagtttacatactttatcacactggtttaaggtttcaactaaaaataaaatatcatagttatacatacggaataagcgaaacaaccgtgattgagtcagcggcataccgatgccctgacagttccatgagatgatcctcatattggatcccttaggggtaccgggccccccgcgcctccgtcacgtccatcatgtatcgaacacgatcctgcagattcagtctttcttcctttcttgcaaagttgactcagaacgcccatttcatctgcagcttccacctgttggtacatttcttctaatcgaaccctctttctcttcatgaagacaaactcattttgtgcattgtcagaggactcaaggagcagatctttctcaaccggtgcgtcagttttaactcctgcaagtttggcgtgaaggtagcggagtctttcaactgtgaggtctgtgtcccaatgacgcatggaa

SEQ ID NO: 24846 - DNA, 771 bp, Arabidopsis thaliana
tcgttctgtaatggcaattgattgagaattgtgagaagttttccaaccttcgtgaacgacacgtttgaacgtggggatatcaaccagtcagttatcaaacctaaagggcttttgtcgttgtgcaaatgagtcattggtatggaccaaaaccggtttatgatctgaaccggagaagtccaaaaattcagtttcagcattaggataagttgcagaccaaactgaattagtgaaggctctgtccaaacaacacttcacagtgaacgtgtgtctttcaccaacccatgtaaacctatcccctcttgatctcatatcttcaagatcacaatatgaaatcatgtttctgaaatttctggaagtccactcttctctcaaaggaccaccaatcttctcatcattggataatatctcattaaaatctccaattaacaaccattcagcattgcgattgtctgaaatttgttcaagttgttgccaaagatgatgacgttcagattgaataggatggccatacacacaagacaagtagaagctcttattattatatgttacaaaggtatcaatgatcctttcatcctgagaaatcaaggacaaagatacattgtttttccacataagagctaagccaccactccttccattggggggctgagttattacattagaaaatcccaaatcacaagctaatttatgtagaacatcacactgattaagtgtttcaataagaaatagaatatcatacttatatatgcggtttaaacgggaaagccggga

SEQ ID NO: 24847 - DNA, 618 bp, Arabidopsis thaliana
cacagacctcaatgttgaacgactccgctaccttcatgcgaaattggcaagagtcagaacacacacacccgttgaaagcgatctccttctagattcctctgacaatgcactgaatcctttcgtcttcatgaagaggaagagagttcagtttgagcaactgtttcaagaagttgaagaagcagaggagatggcggtcctgagccatctctgcaagaaagagagaaagactgaatcggcaggctcttgctcgattcatggtggtatagacggaggcgcgggggggcccggtacccccaagggatccaatatgaagatcgcctcatggaactgtcagggcattggtgtgccgctgactcagtcacggctttctcgtcttttacgtatttataagtttgatattctatttctaattgaaacaatgaaccggtgtgatgtattatgtaacttagcgggtgaacttggctatcctaatgtaataacacagccacgtattggaagaagtggtggcttagctcttatgtggaaaaacaatgtttctttgtccttgatttctcaggatgaaaggctcattgatacatatgtaacatataataataagagcttctacttgttttgtgt

SEQ ID NO: 24848 - DNA, 905 bp, Arabidopsis thaliana
taaagatgggaaagtcataattgacactgctgctggagtgcttggaagatatgaccctcgtccagttcaacccgatagtttatttcctgttttctctgtgacaaagggtgtcactgctggaatgatacattggcttgttgacaaaaggtgagtaacaacattttaagctttcaaaaaatttcatgtattcatttcacacaccctgatattttgaatcggctccaatcttacatattggtctcattgttaattccatgatcccatttgcagaacacatgcttagtcatatttagtaatatttattcaatgatacaggaaactccagctcgaccagactgtggcaaatatgtggccagggttcggatcaaatggaaaagataccataaaggtataaggagctacactgtcacttaaccatttcgcaatctattgcccttcattttaatacctcggttttgtatttcaggtccatcatgtgcttaaccatacatctgggatgcaaaattcctttgaccctgtaggagaaaatcctctgcttatttgtgactgggatgaatgtttgaaacggattgctaattcatcacctgaaacagagcctggcagtcagcagtcctatcactatctcacgtttggatggctatgtggtggaatcctcgaggtaaactaattatatcattcattgtttaagcataaaaactatgcaagtcgtcaagttgtaattttttctcttacctctactacgttaatgccaatcttgctttcatcaatcttgaacagtatgcttctggaaagaaactccaggagatccttgaagagtccattgttaaacccctaaatattgatggagaactgtacattggaaccccccaggtaaatagtacagtcacagacattgtgaattagta

SEQ ID NO: 24849 - DNA, 959 bp, Arabidopsis thaliana
ccctgaaagtattccagtaaatagatgaccattattgtaaacattacataacaaaacacctaagcgaagagggcaattcaactaacctggcgttcaattcgcaacacaaattggaatcctttttcatatgggacctgagaatatacatcatctggatcaacaccttcttgtttgttccacagtttagtgcactccaagttgtccttaaaccgttccatttcatcagttaaacccctccaaccaatgccaatgttcaaagtagctatatccgccccttgaacaacctccacaattctcctctctgcgtaagttgtaaatccctattgccatgaacatgaaataaacactttcccatcaacaaggcaaactctaaaaacggacacacagttacacatcctaatttgtagctaaaagaagcaaaagcacaagacaattcaaagctacctcattcaaccagaagtgttcattgttgatattagtgatcaaattcccagtccagctatgtgcgagctcgtgagctacaacttgagctccagtggcgtctcctttgataacagtaggcgtcaggaaaaccattcttggattctccatacctccataaggaaaactcggaggcagcaccagtaagtcaaatctctcccactcgtaatctccaaacagcttctccccttgcttgatcatatcctccgttcctgcaaactccagagcagccgcatctagaacttcaatggcggcagattctgtgtatacccgagtcctaggtccaacttcccgaaaccctaactcaccaacggcaaaagcaaatagataaggcggtataggctgttccatagcaaactcttccacaactctatcctcaccacaccacagtgacgaccccagcgacccagcctcgagatgtttagcctctcaggaaccgcaagcctacgacggacgtggcgagccgcatgacggcagag

SEQ ID NO: 24850 - DNA, 622 bp, Arabidopsis thaliana
cccaaacaaaaaaactctagcagcaacatcaacatatttgatcttgtccttgtccagtttaacttggagatccgacaaagtaagtttcacatttctgacccattcttcgaggacatgacaactgtcgggaactgctttcttcctctccaaggaaacttccttgagctttgacttcaaccagtctagcttgaagcctaatttcttcagttctgtcaattggttttgagcattggttagttcagccgcagacaagctttatggagacttgcttagtgtcttgatgaggtagaagaagagagtcaagtacactgactcaagatcctcgtactttggcaagaaatctacttgaaagtctgggtgccgagtgaaaatataggccattgacagaactcgccaaaagagctttgattaggttcaaccagattcacaagagggaggtagttgttaggtataaatgggaaaccgaacttacttgagaaacaaggatatggacaccattgtattgtaatatatcactctcactcgattgtccctgatgaacaactttgactatttcaaggtaggcttaaactgtgttttaaatagcacaaggtgaggtaaggcgttgaggtgcttgtttgag

SEQ ID NO: 24851 - DNA, 875 bp, Arabidopsis thaliana
ggtgaccactggcgtaacctccgccgcatttgctccctcgaaatcgtctcctcaaaacgtctcgccaactttctccacatccgcaaagaggagatccagcgcatgctaacgagactctcacgtgacgcccgtgtcggcaaagaggtcgagctcgagtctatcttgtacgacctaacgttcaacaatatcgtgagggatggtacagggaagatatactacggcgacgatgtcagcgacaaagaagaagcagagttgttcaagaagctttttactttcatcaccactaatagtggcgcgaggcatcctggagaatacttgcccttcatgaagatattcggagggagctttgagaaggaggtgaaagctgcagcaaaagtcatcgatgaaatgttgcagcgtctgcttgacgagtgcaagagtgataaagacggtaacactatggttaatcacttgctctctttgcaacaggacgaccctgagtactacactgacatcattatcaaaggcttaatgctggtaacgaatcaaaaacattcatatgtatttttaaaacaacgtaccttcaatagaatgaacagcaacatcattactatacaaaaccttaggctacaaaggtagttatgtctctaaggatttttaaaaatataaaattatatttactagttatacaaagatttttataaaagttgagcttctaattggtttcttgctttttttttttatgcactcgattttaggtctggtttatttgggttgaaagataagttattccactattattcaaatttcagatcaatgttttagtatagtttaagggtttcgttttggacagttaacaaactatgatattaatgaatttgacgtgtatgtgagct

SEQ ID NO: 24852 - DNA, 679 bp, Arabidopsis thaliana
cggttcctacggttgtgtagttgtaagcgacgtatttagcggttaggaaacaaggccggtttgagagaatgatgtcgttttggcctgtgaagcattgtgttgcgagtgaggaggaggagattacgacggcacggcggacaaattggagggagaagattgggccgtgtgttttggagaggcggtggaagagacggtggaccggcggcttgaggaggttgtggtggcctaggattgggagagagtaaggtggagagggagggaggttgaaacgcttcgttttggaggtgaagaataatttgtaagccaagagaaagagagctaaaggaaggacaatcacatagtaaaacatctttgacctttctcttcctttttctctaaggaatttggttgtgatatggtgtcaaggaaattatcatattatttatagggtcaccggtctagaatgggaaccatcctgcatggtgtgaaaaggttttaatgataaaaatgtctatatatgtatatatatagttgttattattaaaagtttaaaaccatactacatctttctttacatttgtcacatatatatttattgcgagtattagcagatatttccataagatacttttgcttttactcgaaatagtattaaatcaaacagacaacgtgacaacttgttgcatccctcttttatggg

SEQ ID NO: 24853 - DNA, 495 bp, Arabidopsis thaliana columbia
gagtaagtataagtatgagcaatagatgacagattcacaatccttccttggactccactttctcttgcggtacttttcattttgtccagaagcagattcgtcaacagaaaatgacctggacaatcattataatataaatatatatatataaagaatcactcacgtaatgttatataaaaatggtttattgactagtatatttctttataattcatgtcataacatgatgttttggtaacgaatattgcgtatttcgatactgacaagaaaacactatcaataaaatcttaccaatgtggtttgttgcgaattgtgattcaatcccatcttcggtgagcttgaaaggacaaaacataacacctgcattgtttctaataacatttcgtagacacaacaagttagcatataattaactcttaatcgctgcaaaagaaaatagaaaattcaacaagtaatattcagacgtacatgagaatgttgagaggactattaagg

SEQ ID NO: 24854 - DNA, 1647 bp, Arabidopsis thaliana
aaatgtttgtattctcttaatgtccttcaatggattcacagaatatagggcattgttcgaattccagaagggtcttttgctcagaggaagttgatctatgagctcggaatattttacgcagccatctgttttccgagtgcataagcacagatgtttctttctggtcaagcttttaattgttgtttcatcagttttacttctacattttctctctcacagcttttattaactgagcaataaaagtttaagaatctgtaacctttttttctttttggctttgtacttcctgagttgatgatttcaacatttactgtgatgttactactttggattttacaatctattgcctatttttacattattttctttcttcttacacagcgtctaactcactgatataggaaaacttcaagaaacagtatctaaacacctaacgtcaataacactgtaaccaggaagctttttcaaggcattatcctccaccatcttccgtagtcttacagcttcttcccaacctcccaatccaacataagtatttgccaacgagatgtaataagatgcattgtctggttccatttcaaacaaaacttctgcaacttcttttcccaactttgtatccccatgatagttgcaagcgctcaacaacgctccccatacacctgctttttgtggctcaccaatccctgtgatgaactcataagcttctctcagtttccctgcccggccaagcatgtcaacaatccaaacccgatgctcagtaactggtttaaccccaaatttttcctccatttgcttgtaataacttagaccttcatcaataaacccagagtggctgcaagctgacaacaggcttatgaaactgctcttgtttggttccatctctgagttactactcagttccttgaatagctccattgccttctctcccattccatggaatccatgtgcagagataacggagttccaagcagaaattgaattcacccccgagtttctaaacaccttcatgccagtttctagcatcccgcagctactgtacatgtccacaagtgctgcactgacaaaagggttagcttgaaacccacgacgaatgagatgacaatgtgcctgcataccatagctcgttgacccaagctgagtcgacgcagacagaagaccaacaaatgtgatctcgtttggctctaacttgaggtttctgaagagttgaaacacttctcgtccagctttgttctgagacaaagctgatatcacacagttccaagaacacaagttagggtcagagattaagccaaaaaccttcactgcactctcaatgtctttacatctaccatacatggtgatcaatgtattctgcagttgggtgtcaagttctcttagacttttaatagctagaccatgaaagcaccttccttgtaagaccagtccgaggtttccactagctgaaatagtacccaggagagtaatcaagtcatgacgaattttcccttcacgactcattgcttgaaacgctctcaatgattctaaatggtgaccacttgatgcgcagccagagattacagagttccaagatgtgagatctcttgtttcggacatcggatctatactgcatcttgataacggcgatgacgacgatgacgcaatgagagg

SEQ ID NO: 24855 - DNA, 626 bp, Arabidopsis thaliana
tataaaacttttaaaacccaaccggtttctatatttgtgaaccacaagatctgaagttgaccaaaaaaacagaagatctgaaaaccaaaaaaaaaactgaatgaacctaactaattgaacagccctagatcccttatatgtactaccaacactaatttgcataaactcgtatatcttaccagcattaggcctttgatagtgacgtcagtgtaatactctggttcattttgttgcagagagagcaaatgattaaccatagtgttaccatctttatctctcttgcattcttcaagcaaacgctgcaagatctcatccatggcttccgcaagagctttcactttcttctcaaagctccctccgaacatcttcatgaagggcaagtaatctccgggatgtctcgcgccgctacagtcgttgatatcggcgacgagtttcttgaaaacatttgcctcttcttcgttatggacttcgtcgccgtagtatctcttccctgtaaccattcttactatgttgttgaacgttagatcggacaagagcggctcgagctcgatctctttgttgacgtcgcgtgagagtctcgtgagcatgcggtggatttcgtctttacggatgtggaggaagtttgt

SEQ ID NO: 24856 - DNA, 253 bp, Arabidopsis thaliana columbia
gaagaaccgatttttgcgcgaaaggatctttttcgcttcccttacagattgaatgactctatccactcttattaatttctcctcttcattcgccactctaagttattggcgcataccttctgaaccctcttaagttattcgtggtctgccagtattgggattaatactcgcttggctttccttgacaactccaaagagaggatgagattcactaagaactagactcggaggatgctctggaataacctgatct

SEQ ID NO: 24857 - DNA, 469 bp, Arabidopsis thaliana columbia
ccatcagattaccaaatcaaatgcaacattttttttgtgtgtgtgcatcttcttaaagcataaaagaaacaacaaaacagaagaaaaaatcaatccccatcgaagtgaccaatcaaaacaaaaaatattgtacgtcagcctcacatcacatggcctgtttgtctctccatattaacaagatgaacaaaaaaccaaagtagttattggacgtgtgacaaaaaaaattgtgggcacgtttttgtcaagattaaataagtagattgagaaaaggaccttattgcgaataatctccataatcattttcctgaagagattagctggaccacaagaccatcgatgttgctggaatctaaaggccttaaaattgcttggtaactcgcttttcacctacaaactcagtgttcatatacagaatgtaatgattatagtgtagtaattattagtgtatagcaatgcatcactatatata

SEQ ID NO: 24858 - DNA, 544 bp, Arabidopsis thaliana columbia
aggaagtcatggtgagatgtttgaacaactgatgttgcaactgttggcggagagtttgatgggacgctttgaatggcattggtgctgaaaactcctgagatgccaaagtgatcagcgagtttaagaggcgtctctgatttcacataagagactccattgactgcatatctttgcttcccattaatcaaaggagctgaatttgagaagacaaatgtctttgttggactgatcattccatagtggaaagatccttgagggtttggtctagctgcatttgctgttaagttccatctgaaaaccaaaagcagacaccattcataaactaatcctttgcattaaacatttacacgttatttataagtgactgatctttaaacctgaaggttctagcttgtctcatggaccaaacaagctctccaggtggaagagcgggaggatcaccagaagctgggacgcgagagttagaataacgcaacaaacccataacagaaagcttgcttcttatgaaccgggtgcttgcaacgatgtaataatctttaggaga

SEQ ID NO: 24859 - DNA, 787 bp, Arabidopsis thaliana
tgatgcttcttcaaatctatcgttagatcagctttataagtctcccatggctaccattattcgacaaaaacacaaaaaatacttataaatcgaccaagagtaagtaacaagacaccaaaacatgtagtactaatatgctatgtacccgaaagcaactccatttccattcagttccatcttctttggtgattttcattggcttcacgccccaataactaactattaattgttcccctttgttaccttgatcattaaccttgacgccgtcaccggatccttcctcttcttccgatgttttcttcttttcaaatgtcatcttgctgaaatctctcagacctcccactgccggaaccctaaaatatttcgctggagcaagttggtgaaatagaattccattaatggatgtcgcttgctttgatgcgtcaaggagagagcgacggagtaatgtagtgatcatttttcggattcaagggagatttgttttggtttttgttgataaggaaaacgtaaaaccctaaagtttggggaatcaggggattaaagaggagaagaagaagacaaaatagttctttaacaagaacagtgtggacgatgtcaaaacattaactgaagatatgtgtccaactagctcattaggccttcaatatagcccatgcgcataaggcccattgggtctttccactattgagaagaaaactttactcgagagatacacagtgaaagggtttgtttttttagacagaaacattgttcttggtgataatttgtttagtttgtgggttttgtt

SEQ ID NO: 24860 - DNA, 492 bp, Arabidopsis thaliana columbia
atatggagttttgccaaaagacacaaaacataaaatgagttgtgtttcttcgtaactgtctgttataatcttgaaatttgaagaaatccacaaacttgatagaaaaggttcacattcacacaggaaccaaaatatcacatagaacaataacactcttgcatcacaatagctcaatataaagggctcacaatcatatgaccctaaagatcacaaagaacaacaatactcgctcaatataacctcctgcaaatagtgataccatcgccaagcgcacgttgcgagatctgcacacgctgatcagccgagagtttcttgttcagctcgagggttgctttcttgacttctatcctccactcgggcgtggacgagtccggttcagcaactgatcctccccagagagtgttatcatacactatgatcccaccaaccttgatcaatctaataagcctctcatgatagttccaataattcagcttgtctgcatccacaaat

SEQ ID NO: 24861 - DNA, 563 bp, Arabidopsis thaliana columbia
ccgctgttgagtcttcagtgctctctgcaacaattctgatattaaattctggaatcatagcagtgacttggtttgaagccggttctgctctccgctgctgagcttggttggtgttaaccatgttccttggaacctctgctctgctatctcctactgaatttctcaaattaagagacgactcttcgtcttcttcaggtctgatcaaagaagaagtaatgcttggaaccatctgatcctcatatctcctgtttgggttgagtctggttggttcagtctcttccattgtaatgtcccttgggaactctataggagcttcctctacctcagcagaatctccaagtccttcttcggatccgttctctattgcagctcttgaagcagcttctagttgccacatctgtgaaagcgcttcatgaagccgtgcttttgcttcgtctaatcctacaattggtagaggatagtttgatccaagctcgataccagcagcttgaagaacggactcaggtgcgtccacggatgatgtaccagtctgtcgggagctagagagtcaggaagcatcgctt

SEQ ID NO: 24862 - DNA, 459 bp, Arabidopsis thaliana columbia
gaaagctacgggagaagcttccaaatttcactgataagtgttttatgttatgcaataaaaacaaaagaaaatttgtttttgtgggactgaaacatctagtctatgtatcagtggccatttccaagcttccatctttgtcttttgtcgaatgattgaggaaattcccaagcagcctttgatccaacaccatgttaggtacctgcacagttaagagatatactttcttcagaacagcagaacagagataagacacgagatatgtgaattcagaaatgagatagagtcgagtaaaaccttgtccccgaagaatattttggtgttacgagcaatggcatcgatgaatttgagttcaagaaattcaggggtgagcttcaacttatttgcttcagcttcgctcagtacactaaggacattgatcaggggaagaatttagacattagagccatttattctgtatat

SEQ ID NO: 24863 - DNA, 485 bp, Arabidopsis thaliana
tgctagtactctggggccagtcacggggcttgattttgatgaagagacctctactcagatagcctttatcagagtgaaagtgaggatttccatcacggataggatgcgtttctttcgacgggtgcggtttgaatcacgagaaggtgccatgattggttttgaatatgaacgacttcacaggatttgttccaactgctgccgtatcaaccatgatgttgatcactgtccttatctggctcctcaggggatcaccataatgatggtgctcatgttgttgatgatgaagcggatgttttgatggttcctgtttgggaagagggagggggatcgaacaatcctacaccccctccacctgcgaatcactcttcaagttctgatatctcttctcacagacctatatcacaggcaccaacctctgcttcaccgggtttagacttgaatgaacctgctattgaacatcttccttcaagtgttccattagtaag

SEQ ID NO: 24864 - DNA, 443 bp, Arabidopsis thaliana columbia
tgtagagatttctcaacttgtccagagcgctcttgatggttacaaggtactatctgctttagcttagtttaactccctgtttacttatgtcttcattattcgattcctcaaattttcagagtgtattttggtaaaactgtctaactggtcaataaaagcacatgaatgatgaataatgttatgtttcactgtaccttcttggactaaaggttctattacacaattttcaggtttgcattttcgcatatggacaaacaggatctggaaaaacttatacaatgatgggtaggccaggaaacccggatgaaaaaggactgattcctcgatgtttggagcaaatatttcaaacaaggcagtctcttcgatcacagggttggaagtatgagttgcaggtaacaaaccttataaagacttacaaatagatgatgcattcatatagtatt

SEQ ID NO: 24865 - DNA, 513 bp, Arabidopsis thaliana columbia
  unsure (1)..(513): unsure at all n locations
tgctgcatgatcttgctcagtataaaacggataaaaagtaccgtacccatagaaaagccatctcagcagcatctgcttccctcatagcattgttcagagaggtagcagaagtatttgatttgttaattggaacaaaataatcagtgtatgtggttaaccagtaattacattattgtaatttcagatcaaccctttgctactagtgaaaaaagaccgtggccgtcctggaggtcccattgccagacctaaaaagtatggagaagtcaatgtcttcagcaatgttcccaatgttgatttattgcaagaaagtgatgatgatgaagtggcgttgcctgggagtgatgatatcgaacaggagctgataactgaggacgaggctgaagaagattctaatgatggtgatgatatgaataacactgaagatgatactttggttagtggagatgaagaggaagagaagaatgacagtgatgaagccgagactgattggganaacgcagaagatgaaggaga

SEQ ID NO: 24866 - DNA, 526 bp, Arabidopsis thaliana columbia
gctacaattttctaaattacaatatgtcaaaaatgacattcggttaagataatcatagttatattctttaaaaaattgagttgtcgcatttgagttccgacaatgagttcgaaatttatctttcacacataagttaaatatatttttaagttttggatgatttacactcaacattaataaataatcataagtttagttatagatctttattttggatacggtgacatggcttcggatatcaagagaatacagtttacacatgcttcattgacgcccaaagccaaatgctctccaaaatcctctatataaattctttaataatcacatctcttaccaaacgaacccaactacacaagtctcactctcttttcccatttctccctctctctctttgtctctctatcatcaattatgcaaaaagcaattcgaccgatcgagtcaccgtggacgaagaccgtgccgggcaataggattttccttttaaagaatgaagataaccatcatcatcatcatcatcattatcatg

SEQ ID NO: 24867 - DNA, 761 bp, Arabidopsis thaliana
gatggagactgtttctcgtgtaaacatggggaatcttagtgtgagtcgtgatcaagataagctgtggaggcaatgggattctgattctgcttataaagctcacttcggtacaccggttatgaacctcaaagcggttaacttcagtgctggtggaataactgatgacattgcaccagtttacgtctatggaaccgccacgaggttaaactctgatcttgatcctaatactaacgccaatcttacttggacattcaaagtcgagcctggtttcgattactttgttcggtttcacttttgtaacataatagtggatccttttggattcgagcgtcagatacgttttgacatttttgtgaactcagagaaagttagaaccattgatatgacagaggttttaaatggaacttttggggctcctttaaacgttgatgcagtgatgcgtaaagcgaaaagccgtgaagggttcttgaatttatctattggtttagttatggatgtttcttcgtaccctgtttcttttattaacggatttgagatttcgaagctaagcaatgataagcggagtcttgatgcttttgatgccattttacctgatggttctacgagtaacaagagttcgaatacgagtgtcggattgatagctggtttgtctgcagctttgtgtgttgctttagtgtttggtgtggttgtgtcttggtggtgcattaggaaaagaagaagaagaaatagacaaatgcagactgttcattctagaggagatg

SEQ ID NO: 24868 - DNA, 609 bp, Arabidopsis thaliana columbia
gttccttcgttttatttacttcgccggagagattcgaagctaccaaagaagaagaatcaatggcgagaacgagaattataacgaaccgatttgaatctcgctttttgattcgtttccttgaatctccgactctattcgcctcttgtttcacgagttccagatctcttcaaaccctagcctacgaagaagtccgaacctccggtgatcgggagtctgaatctacagctctcatccttcatggcctcctcggttccggtcgcaactggagatcgttttctcgctcccttgcatcatctctctccgtctcctctgcttctggtacgcttctctctgtgattagtatcttgagcttttcatttgatatatcgattgaaatttcttgtgtgtgtacattcagattggaagatgatattggttgatctgaggaaccatgggagatctgcggaagtggaagggcttaatccgcctcatgatcttgtgaattcagctaaggatttagctgatttggttaagcaagtggctggaattggcctgatgtggtcattggtcactctttgggaggaaagtggcgttcagttcatggagagttgtctcgtggtgatttggtga

SEQ ID NO: 24869 - DNA, 557 bp, Arabidopsis thaliana columbia
gtccttacgggtagtcgtcgactgaggccggtcccatcgcacccctatcaggctccggaatcatcttcttttgtggtagtgaattgggggatctatgttatgtaatcggtggaatcataaacggcaatcccacttccgatgtcttgttcctcaactgtttttctcagacatggcaccgcgtcccgtctatgaagatggctcgtgcttccgcatcggcaagcctcatagacgggaagatctacgtttttggagggtgcccagaggacgctgattcctcaaactgggcggaggtattcgatccagtttaccaaacttggggtatatttaatacgccgaagatggcccatagtatcaaccaaagtgtggtgatagaggagaagaaggtttacgccgtggatgaggaggaccaaagctttagcttcttgccaagtgaaggtagaatctggaaaagcggaaaaaaagattctaaggtaggaagtagacacgattggtgtgtcattgggaaattctatactgtcgtgctactcgcggtagattctatggtgccaccagatgag

SEQ ID NO: 24870 - DNA, 856 bp, Arabidopsis thaliana
atgcaatctcgcttaaaggtctcaagattcacatactaaaacaactaagacagacaaaagcgatgaaaatttcttttcctgtgcaatgaaatcaattatcagttatcaagagcaaactttcatcacaatgcagaccacaaaatcatctctaatcctgataaagttcacaactttttctcatttccccccagaggatgcgtaattgagcagaaagcttgacctgtgtaagagagggagccaattgtgtttgaacgcacactgtcgtcgaagctctccttcttccttggtttgtctgagcccttgatacggaactaacgaacccattgaactgatgaatttgcagaaccaccatgacaatgagttccaaaacaaatgctataaaaccaagagcgaacttttgataaacagagataaaacttgtgaagagaaaactggaaagattgtgcaatgtgtcagagaatgtgacacgtttacagtcttacaaaacaaaaacattttgggttacattaactcaaaacaaacttctgttctaaaattaaaacaaatctaaatgttagtatcgtttctgtaatatttattatatcctcttcttcttttttactgattcatcaaatcggggatcggataagcctgactgcttcagggtttaagggttactctcactcacacttccgctggtaagaaattcgatttcgatgcgtataatctgtcttccgcttttttttttggttttgaaatcgacaacctttttttgcggacttgttgggttaaattcgtatatcttcaattttgcgatgagttttcaattttccaatcgaaatagcaaatgggcattagctaattcctgaattgtgag

SEQ ID NO: 24871 - DNA, 721 bp, Arabidopsis thaliana
attacttaggccaattttcaactccaacttcttctaaaagtcttctacatgagaccaacatgggcagtggtgctattattggtgttattgactctggtattatatcaatatctctattaggttgttttgttctcaacttttcttagcagaacgttaacaaatccgacattatatgagcaggtatatggtcagaatcaggctcctttgacgatgatggatatggaccaataccaaaacattggaaaggacaatgtgtatctgcagaccagttcagtcctgcagattgcaacaaaaagcttattggagctaaatactacattgatggtcttaatgcagatctggaaacaagtattaacagtactacagaatatctatctcctagagatcataatggccacgggactcaagtatcatccacggcagctggttccttcgtttctaacatgactttgcttggtctctcctctgggtcaatcatgagaggtggcgctccaaaggcgcacatagctatgtataaagcatgttgggatgtggaaggagggatgtgttcagttgctgatgtctggaaagcttttgatgaagccattcacgatggtgttgatgttttgtcggttccgtcggcggctcggcctgaaaacacttgatgttgaaatcgacatcgcaattccagcattacacgcagtgaataaaggtatcctgttgtttctccactggtacgaag

SEQ ID NO: 24872 - DNA, 588 bp, Arabidopsis thaliana columbia
  unsure (1)..(588): unsure at all n locations
nnnnnnnnnnnnnnnnnnnnnnctaaagatgttgtttaatgcgggaaggatcgatggtgaagtggctgaccatcgtttgcagacgttcttgtgcttcatgttgcagatgctcttcaaaacgacgcacatcagcggcaaaacggtgcaggctcaggctggctgacccgggtagtacgtgaagtagatgaataactccgtcatcctgggcgaggaattcagcgtggcgaacagctttgtcgctcaattccatttcaaatacatcaactggcataatgattgtcttatacataaccctttctccctgttaatcatgaacaaatcattcgccatgattataatatttatccctgatatttgtctggttctttttccttacgaactgtttctgtgatgaatatattctcactgaacaccaggaattctcccaaaacctgtggtaccgcccgttttcccgctgtgatagctacccttaaagactgactcttttttgaactgtctctggaggttgcatgaaagcattgacttatcacggcccacatcacgttcaggtagaaaatgttcccgatcagggcgttgaacaggcagatg

SEQ ID NO: 24873 - DNA, 815 bp, Arabidopsis thaliana
gtcattgtcaccaagcccgagtcttccatgttctcctcttccccaaccatacacctaagaattagaagaccaaacacataatataataacggaaaaaggatctagcacacagtgagaatgagaaggaaagaaaacatttttgagcgtaagatgattctaacctctcctttatcagttagagccgttgaatgccatccacccgcagcaatatcgacctgcagatgcgtgtaacgaaggacaaattgtcaaagcttataatcagaaccactcttcaaaggtttaataagtagaaagggaatcaagaaaagggaaatgaagcagaaccaaagtgagatcatcgaggccttggactggaacaggatgagatgttggctgggtgtcaccggttccaagttgtccgtattcgttattaccccatgccaataatctcccatcttcttcaagagccagattatgaaatgctccaacagcaataagacggacattttcaagaccttgaactcttacaggaacagatatttgttttctgcaatttagaggaaaccaaaccaaacatattagtaatagccttggaagttagaacgcacaaaatgtatactattgctttgagtttaatggttcattatacatgtcaccgggaggccacggttgaccccaagtccacacatgaccttcgcgtgtaagaaccaccgagtgagtaccacctgcagctaccttttaagaagtttagacctcgaatgaattatccatagatcaccatttagaattagaagacgagcaagtatacctgtctgactgtaagtttgggggcacaa

SEQ ID NO: 24874 - DNA, 593 bp, Arabidopsis thaliana columbia
gcaaggtcatacggaggtttggttttcaaacgctacaccaaagtacgcctttctaacttggttggttgttaaaaacatagttgcaacaggggaaagaatggttaaatggaagcaaaatatggacacaagctgcatcttttgccaagaacctatggagacgagggatcacctcttcttcgtatgtccttattcgagaaaagtgtgggaagaactgatgagtgggcttcttctagacaatttctaggcaagatggcgagatgttatgcggattcttgcgagtaacaacttggacaacacgaaacgattcataattgggtatgtgttccagaatgctatacacactttttggggggaaagaaacagcaggaaacatggagagacaccattaccgacagagaagattgtgaagatgatagataagaacattcgcaatcgcttgagtacactgacaagaggaggagaggagagatatgcgggagggcttcaaatgtggtttgtgcaatactcacactagataaaactcttttgaaagtttttagaaaagtttgcactcgatgtaaattttttttttttttgaatatatttacattaaa

SEQ ID NO: 24875 - DNA, 389 bp, Arabidopsis thaliana columbia
ttcttgatctggacacagttcaaggctgtttcagcttgtgaattgtgatcttactttgtttggattaagtagaaacttcggaatccgatggctaacttaccgaaatcgtcggttaattacccgggaactctcactcctctagagccaaataggccatcaccacagccagatagaaccccggtccctcattctcctccagtagtagcttcacctatacctcctaggtttcctcaaccaagttttagaccagatcagatgtcttcaccgtcgatgaaatccccaagtttgttgtcacctgcgaatggtatcagaaccggaagtcccattcctcgcttgagtactccgcctggtcctcctgtctttaatactccggttaaaccagctgctgt

SEQ ID NO: 24876 - DNA, 564 bp, Arabidopsis thaliana columbia
  unsure (1)..(564): unsure at all n locations
nnnnnnnnnnnnnnnnnnnnnnctaaagatggatcgcagagtggtaatcgcctgccacaaggatatctaacacaatatcaatacgttcggcaacgcgctgggcatcaaattcagacatcaaggacatccttatagcaaaagggggaaaatgaataatgcaaaaattgccgctaaaagagaagtgtttaacagcaacggctaattatcatccaggaatacgatatataatgacgggatatagcgctaagtatatatattcatctacttatgcgcgcttcagatagcgtttataccagcgttcgaaggcgacggcgggcatcggtttggcaaacaaaaatccttgccgctcattgatcccgttcttggttaaaaaagcatcttcctttgcactctctacaccttcggcgatcacctgaagattcaatgcctgggccacagcgacgatcgcccggaccagtgactgcgagacaggttgtttgtgaatatctcgatcaaaaacctggtcaagtgtgatggcatcgatcggaaagcgcgccagttgcgaaagtgaagagtagccggtac

SEQ ID NO: 24877 - DNA, 957 bp, Arabidopsis thaliana
caaccgaagaaatagacaaatgcagactgttcattctagaggagatgatcatcagattaagaagaatgaaacaggtgagagcttaatcttttcgagctcaaagatcggttatcgataccctttggctctaatcaaggaagcaactgatgattttgatgaaagcttagtgattggggttggtgggtttggtaaagtttacaaaggagtcttgagagacaaaaccgaagtagctgtgaaacgtggtgctcctcaatctcgacaaggtctggcggagtttaagacagaggttgaaatgcttactcagttcagacacagacatttggtttctttaatcggatattgcgatgaaaacagtgaaatgatcattgtctatgaatatatggagaagggaacgcttaaggaccatttgtatgacttggatgataagccgaggttgagttggagacagaggcttgagatatgcgttggtgcagctagagggcttcattatctccacacaggttccacaagagcaatcatacaccgcgatgtgaaatctgctaacattctattggatgataattttatggctaaagttgcagattttggattgtctaagacaggtcctgatcttgatcaaacacatgtgagtaccgcggtcaaaggaagctttggatatcttgatccagagtatctaacaagacaacaattaactgagaaatctgatgtttactcttttggtgtggtgatgcttgaagtagtatgtggtagaccagtcattgatccatcactaccgagagagaaagtgaatttgatcgaatgggcgatgaagttggtgaagaaagggaaattggaagatatcatagacccatttcttgtaggaaaagtaaagcttgaagaggtgaaaaagtactgtgaggtacagagaagtgtttgtccaaaacggaattgagagccagcaatgggagatttgttgtg

SEQ ID NO: 24878 - DNA, 504 bp, Arabidopsis thaliana columbia
gatatctttcttctacattttcctgctttaccatttttgttctgataccaaaaggtttaaatggtttcgagattcaaccaactttgaagagttgttaatgcagttgcagaagcatgttaaccgaaaatcattccaaaccggagaatatcaactcgaaccagaataccaaaccggaaattccaacagtgatcgtgctatgtttaagttaaaatttaaattaagcaaacaccggagagtgattggatcggggaatttgggaaaagtatggagaagaagacgaaagtgctaattgtgggaggtactggatacttgggtcagcatcttcttcaagctttcgccggcaactatggcggtgaatgtgagctatacgacgtcgctttcactcaccattcttctccacttcccgctcgtttgctcgacgctttccctcattcccccgtcgtttcctgtcgatcttaaatccggtctagggctcaattccatatcccaggactttcgtcaggt

SEQ ID NO: 24879 - DNA, 439 bp, Arabidopsis thaliana columbia
ttccattaattagcgacagacaggcgcgctgcaacagaactaagcatagaactctccgacttgtagatcacatccagatgtgagatcatcaccaattactagtggctcaaacactggtgagaatcacgacaaatatacgtccacctcccagctttgaccacgaatatacacctatatgactgggacgcttcgtccagttctagagccagtaatccttcgggtattgagatgcctgcacaacgattaggaccgacagtgggaaacaccgagaagcaaccaagagcagccctcgtttgcacctgcaactgacatgagacagccggtgcatgatctttggaatttcgcacgtggaagccctggctcatctgtagattctctctttgtacctcgagcagggccgagttcagctattcatacgccgcagcctaatccgacatgg

SEQ ID NO: 24880 - DNA, 488 bp, Arabidopsis thaliana columbia
ccgtcaagtgacaccaccatgtagggccacctggtcgttcccaatacggagctgctaaatctgtaacaggaacatcttcttcatcatcaatcaactttagattaggccactccgcgtttacttgaacctgttgaactagtttagttattctagtccaaccaataggtacccaatgacttccctcagatctctcaacatgtcctgatggaaggacatgagcctctttaaaatccaaagaagatacagaccttgaccttaaataatcgactgcaggcgaatcaataaacgggttatgaccagggaaactatgtctgatcggtccatcttcttgcttcaagtaacctttataaagttgctttgaatcaacatgtttttttgggcctcgaataaactcaaaggcacaaataatcccatcagtccacagatcactcttcggaacacctgaatgatttgtactctcttgagagactgaatgattctccccattt

SEQ ID NO: 24881 - DNA, 530 bp, Arabidopsis thaliana columbia
cccgtgactcttcgatccgaaaacgcaatcgccataaacaccaaaacgctcatcactgcatgaacaaagtcattaaccgtcaacttatacctatcatcagtcaccggaatctctgcctccgctataacatctccgccaccaaactctggaggcggcggtttcatgaacaccgcgagtccacgtggcgtcacgaaaccgtagtagatcttcccatcggatgctttgaaactgtcggtaaaatggaagaagaaacaagacattgcgcaaagaagcaagaggagatgaatcatgagtgtgttgattccgttacagtctccgtcacggttatattgatggaggaaccatttcgaacatcaagagtgttcctgtcggaaggaagttgacgagcattgatgtcttcgaaaccgtttttggaagtccttgcgccaccatgcgacgttttcgcctctcctcctccagcggcggtcctgacgggagggaagcaatgaagagataagacgggttttggtgacgagaaggtggtgatggtg

SEQ ID NO: 24882 - DNA, 547 bp, Arabidopsis thaliana columbia
tctcataccttcgctattttcaggtttcaactctactcttcgtgaaggcaatgtgactcatcatgaatacatacaagttggtaaagggagagatgtaggactcaaccagatttcaatgtttgaggcaaagatcgctaacggaaatggggagcaaactctaagccgtgacctatataggctggggcaccgatttgatttcttccgcatgctttcttgttatttcactacaattgggttctacttcagtactatggtaggtcatattcctttttctttatcttatctcacgatcagtatgatacatgggaagtttatctcagtctgaaacattatctgtgtctttcttacagttaaccgtgcttacggtctatgtatttctatatggacggctgtatctcgttcttagtggtcttgaagaaggattgagcaaccagaaagcttttcgatccaacatgcctcttcaagctgcacttgcttctcaatcatttgtgcagattggtttcttgatggcctaccgatgatgatggagataggtctgagaggggat

SEQ ID NO: 24883 - DNA, 610 bp, Arabidopsis thaliana columbia
cataggaagtatagttgaatggtataatttcctcatctgctaaccgaagagcgaccaaaccaagaacactagccattgcgacatgtcgctgaaacatcggatcaccaaacttttccatccaagtgaagtcatcatacatagagtgatatactggatagcctattagtaaaaatgcttattgactcggcgtttatacaacagacaatgatatttggttcatgtaagtggctgaatcagatatttacctcgtccaaaggacatgtcaactcctggaacaccaacatgttgtacaaatgatgcataatccgaacctccgccccctaatctcctgatcttcacataccaagtaaacaaatcagtttaaccataagacaaaattcattatctaagctagtctcttcacttactacaacagagtcgcttgatcctatccacgattcatagattgtttgcgttgcgttatctggatcccggacctgcacacagttaaccaaaaagcttgattatgtgtcctccttgctcataagattgctataaaactgcctttgaaagtacctcttgagcagctactttgatcaattcatctagttgtggagtcgcagaggcatga

SEQ ID NO: 24884 - DNA, 411 bp, Arabidopsis thaliana columbia
attgtatcggctactaatagaattggacctgaaccagagattttgatgaaacagatcggagctttgggattgcagagcttcgccggagctaattgctctctttcgccgcctccaagctgtgttccaattccatgtttcttagggacgaagaacaatctccttgtttagatcatctgatttggggaaaacaaaaaccctaaaatcgaaaccgtcttttgatggtctcgtaagagcagatgtgtgaagaaatcctgagatagagagtaaacaaatctctttgtttatctcaaagaagaagaagaagatggagaatgtgatcacaaaacgccaattgcaaccaaaatctttactctgtaatcgagtgttttggtgtacagtcactgtgactattttcaatcgcttttttttagt

SEQ ID NO: 24885 - DNA, 597 bp, Arabidopsis thaliana columbia
  unsure (1)..(597): unsure at all n locations
ctcatgctggaatcaagtggcagagaagatgcatatcccctcctttgtttatcctctcggaaaacggatgaaagagatcggatcagagagatgattttggcaaaaccaagattcccagtttgatgatgaggagaatcaagatgatatgtggaagaggagatatagcattgccactctctgtgagcagcagggccaaggattttgccccatttggtcttcaaatgtttctcccatagatgatcactaacacatctctccctcaaggagctacaaaccctagccatgctgcagagtccagagggtggaagaaggtcaagaatgcagtcaagagccagctcagggaggtcaagaaccgacatttggtcgatcaccggagaggctggatcgtgtttggtctgatgtagggtgttcataaagggattcttgatgaagtagaaggagagcaaggttttggtttcagatgcccatggaggaagagaaagagatttggtaaagaaaaagaaagagagacaagtgatgagnaagtagagaagcatttagacagtattattgtgctgcgtatttgattcttgtttctgagagtataaataaagaaga

SEQ ID NO: 24886 - DNA, 590 bp, Arabidopsis thaliana columbia
caccaacagagtcgcaagaaaacaaaaaccaaactcggatttagtttgacagaagaaggaatcgagagtcgggtatgcattatcctaacaacagaaccgaattcgtcggagctccagccccaacccggtatcaaaaggagcagttgtcaccggagcaagagctttcagttattgtctctgctttgcaacacgtgatctcaggggaaaacgaaacggcgccgtgtcagggtttttccagtgacagcacagtgataagcgcgggaatgcctcggttggattcagacacttgtcaagtctgtaggatcgaaggatgtctcggctgtaactactttttcgcgccaaatcagagaattgaaaagaatcatcaacaagaagaagagattactagtagtagtaacagaagaagagagagctctcccgtggcgaagaaagcggaaggtggcgggaaaatcaggaagaggaagaacaagaagaatggttacagaggagttaggcaaagaccttggggaaaatttgcagctgagatcagagatctaaaagagcacacgtgtttggcttggtactttcgaaaccgctgaagatgcggctcg

SEQ ID NO: 24887 - DNA, 410 bp, Arabidopsis thaliana columbia
tcaaacttgagaggtggttgttcgaatgagaacggaaacgtagcatttagaatgcaccgaggttggatattgtagatggaaagatttgaggcaatccctggatcaagataattggtgaaatctgcctcaactgttgtaccctgaaacatgaggtcaagaaagctaagaaacacatttcataatggaaacaaacagaaaccaaccaaaaaaacttaccaaaacattgttggctaaagtacgcaaaatctcagaggcgttcgcgacacagaactagtgaacagattctcagatacagctaaagaaaacatgaagataagttccagtgtaggtacacaagaacagaagcatataaaagaaggagaagagacatacttgttcccagggaacggttatttccagtaaagagtata

SEQ ID NO: 24888 - DNA, 364 bp, Arabidopsis thaliana columbia
ttcttcgtgaaaactgttggagagaagcaacatttcagtctctatctgcggttagttttcttcacttttaggacagattactagatattgttaccatctccaatctttgttcttattcaaatccgtctctttcccatcagcaagcaaataaccacaatctttttgttacaagacgatgacatattgcaatgtttctatgttagtgaatacagaaggtcccgtgatttaactcttgaatatgtatatatatgcagaaagggtatccagttgacttagcagtctggagcgacccgagcgtcatcagtcagaggcttccagtgattaagcatacgacacagaaactgaagatccctagtacagttta

SEQ ID NO: 24889 - DNA, 479 bp, Arabidopsis thaliana columbia
cacaaacagaaatctgaaataaacataacaaaagagaaacatacagatatatcctcccatgctagctcgagaatcagcagctaccataacaccttccttaaagataaacgcaagtgtacgttgtaccctttgcaggcttcaccatctccacagcttttttctgaaacccatcaaactaaaaaaccaacaacaaacaaaagcaacatatcacaatcaaataaaagcaaaatcaaagtatattggaatccgaaagaactcgaatttcgtaactaaaactcacatcagtggtacgaggaagatcaaacgaaggtgcagacgaaaacccatcaagcatctcactgtttgatccaaagccaatcacaggcatagttgtctccaatccactagtgtcaagcttcattgtcaaatttctacagaatcatcgaatacccacaattattcaataaaattatgcaaaatcatgaagcttgagaggtacc

SEQ ID NO: 24890 - DNA, 500 bp, Arabidopsis thaliana columbia
  unsure (1)..(500): unsure at all n locations
tgatcccctaaaaccctaagcaagagaagactaaattagagcttgggtttggattgattaccgtgcttaagcatcttgaggagagcgagagaagagatgtaaacctgctccgatgtatcgagagtcggagaatcaggcgatgcgtgacctaaaccgccaccagctccgaagattctctgtagtctctccataatcagatgaattgattagtcgtcttcttcgaaagtttgttcttctgggtttttgctacaagaatgggatcttataagaaaacctttctcagttttctttgttaacaagacagacgaagatggatcgaattactggattaggcgacactaattacatataagtccttcaatatttccttttatttattgtaaccaataattcaccaaatttccaaatcatccccaaaaataaaagttaataaccaatttgaattccatattttttttgtcaaattttaaattcattacaatgcaaantcatgcattgtg

SEQ ID NO: 24891 - DNA, 565 bp, Arabidopsis thaliana columbia
tcaattcggcgattggtctcagaagatgcattcttgttctcatactcacttcgtatctttcaagcttcctcatttcttcgcgcctaaggtctcttctctcattctttatctcttttgtgtgtgctttgtcgccaattaagaagaaaagtttaaaactttggattttcttaacagagttttgtggtgtcttcacggagagaattaagagtgttcgcagtggcaactaccgtcgaggaggcgtccggtaacataccagcggctccgatttctctacctcaagggtcatggaaacaggttttgaattgcatataaaattagaaatcttttcgagaagttgctatcaaagtctgaaaatttgagtgttttgtttagatagctggtggagttacagctgctaaagggtttaaagctgctggtatgtatgctggattacgagctgcagggaagaaacctgatctcgctcttgtaacatgtgatgtcgaagctgtagctgcaggtccaatgctggcttttgtggccctttaatgttggttttgtttgtttgaaatgtgacaagcttttttga

SEQ ID NO: 24892 - DNA, 578 bp, Arabidopsis thaliana columbia
gtattaaacaaagtctaatttctccctaaagtcttaattttttgcaatgcttctactaggaacatgacttgagtaacttttcctacttgattctctgttatctctgtggacgttgattcactagtcttgaacgtgtatcttctcttcaagggactttgacgagatggttaccttgagaccgtgcctcatgtacaaggttgtagttactctggggacaactacatgatctttagcaacctttattgagtacctagacaggactgaagcagcgattgtcttcatctgtaggtaagcaaatgttttccctaaacacagccttggtccagcattgaacacaacgtatttaaattggtcatcattcacgaaattccctgattggatccatctctctggtttgaatgattcacagtcttttccccatatggattccatccttcccatggcgtaagtcgcaaagtaaacccgtgagcctttacgtatgaatgtccatcggaaacacatcgtcttcgatggcttgtttcatttccattggtattggagggtaaagtccattgtttctgaaagtgctgcttgtagat

SEQ ID NO: 24893 - DNA, 478 bp, Arabidopsis thaliana columbia
agaggatgggatcagaatatgagagagggagtgagcgtttatgaggatttatctgatggtattgagagaactggagaattaagggttggacgatttggtggtatagatgtaagggcatttttgttattctgtttttgtacgtttcctgagtttctgagtcttggtatataaattagagggtggagttcagtgcatacgcaaatgtgtcagctttagtctcttcaaaactgatgacattgctgttgatcgtaataatggctgttggttgtgcactcttttcgggatactcctgcgtagctatgtaaggaatagcagaggattcgaaagtgaatgatgataagatctgagggaactggaaatgttttgagcaggttgtagtcgtctaagcgtactttacagttattgtatccaaggattgcaagggtgataaggacgttgtaatgagtttatatcttgagtgtatttttcattgaaaatg

SEQ ID NO: 24894 - DNA, 536 bp, Arabidopsis thaliana columbia
tgctagctctgttgcaacgaagagtcggctctatcgtgtcttctcataatgtaagtgctcgtctcaaagactaccctggcttattattattctgctaaaactattcaaatatttcttacacaggatcaagaaatgttcgaagctgatcctgatcaaaagcctatgacacattccagaccatctctgattccggctggagacgagcagctagagacacaagaggcaacatttgtcgtatcgctgggacaactcgtttcacatgcttgggagtcagttatggagatccttagacaacagcagacaggcaccagctttcagcagtaccatgggacaacaaagcagtctgctgcatttagcacatcaactccatggccaattcaagagagctttgtgattcgagacgaagacggacctcctcctgttgagcccaggaacccaactccaagacagacttatgcttttatgtccaaagatgcagagacaatgcagcagctacgtcagacgcgcgcattctacagtagctgggacgctgagtt

SEQ ID NO: 24895 - DNA, 544 bp, Arabidopsis thaliana columbia
ctgtatctgaattctatgctcatcatcgatcgattggtttgcggaaagatcgtgatcttgatcagaccacatcaatagtcctttccttacatcgttaccaaaattaggattaggtcgcttcttccccaagtaaatgttggtgtctgcagcattgttacccgtgaaatggttctctatgttttgatgatggaagttgtgatggtcgaggacttggtcggttgtgtttccatagatgtttaggtcttgaaacggcgggaaactaagaggatgaggaggtgggcccaccgctgctgaaagactcgaacttcccagattacccttgtatcctcctccgacggcggctgctgcggtggcggctgccactgttctcaccggctagggtttggcaagctctctccaagatagattgcatgtactttccttgtgcttcaatcctcagttgcagatgtctttgcacctataaaaattgaatgaaatcatttactatatttatgggatacaaattgattttgtcaagcagttatcatagaatatctataggtta

SEQ ID NO: 24896 - DNA, 800 bp, Arabidopsis thaliana
taaatcacattgcaacacgagatcagacgatagtctttcatctcagcagctacttctttcttcggtattaatggtaagattgtcgtcttcaatcctttcgggagaaaaccagtggtgaagaatgattgaactacagctacaaaatcattgccaacgatagatcaagtagcttgaaaaattttcttgtgtaaccgttaggtactggatctttgttgtttggcattgcaaacaaaacgtttggtatttcttcccctgatactgtctgtgtaagcattgcttggtctgtttctaggcagcaaaatggcatgagatttctcaaagcttctagtgtcatacctacaaaatcactcagttgagtattgagaaacgccttaaagaatctctcatcctcttcttcgattcattcactcgtctgcaaaattttgccatttagtcctcttagttgccgaatagaattttgcattttctgaatgtgtgcagctttgtggaagaatgggttgttctgatcacctacattcatccaatgaagcgtagatttctgctttatatagccttcctccaaatcagcgagatactaccaatttgtgtgagctatagattcttcttggatcgtttgtagcgttggatgcgctaatgtgttagcttgtttggcacatagattatcataagcctcacgagtcctctttagaaggtctccagtttctccttacctagagatcgcaagcttggtttcagagtctttaacttcttcggaaatcgatgtagtgctgaagtagaagggaaaacgggatgtgtggttg

SEQ ID NO: 24897 - DNA, 534 bp, Arabidopsis thaliana columbia
gctttctttatattttcccaagtagctggaccttccgggtgggtattgacaaagtatggcacaataagggtattagaaataccgacaacagtgcctagtgtcagcctcggtattactgcatctctttccctcaaccaaatgtacattgtgaatctctgatgtattctcttcatactataacacaaatatgttggggactctatcacggattctattggataaaccaaataatctattagcataatgatcttcttttctatgatatctttcggccggttaagtatatgaggcgcccgcttaacaagctggctaaccacattatagtccaaaccagccttcacaaagcaatcaaatctctcctgtagctcatctcccctcccttggaactttttcagagccctcaccatctcatcggaattctctacataccctaacttcaacaagaatgtcgtcttctctgcattcctcgaatccagtgaatcaagttcaattctacctttattagttttagaagctatactgaacaatctcaaa

SEQ ID NO: 24898 - DNA, 585 bp, Arabidopsis thaliana
tgtagtatatcttctctgctcctttggtatcaccaagcttcaagagagaaccaatcaaagttcgaaattcttcattatccttctgtcttgtcgccttgtacttgtcccatacacggtgaacatcttctatctctcctgcttcaccatataggctcatgagttccttatagtcatgacccaatcattcctctgtttcatgaagcatcctcctagccttttgtttagaaccgtctctcacataagcctttgccatcgcaagcattgtgagcccatcaagccttgtaatctctttcctatcagctagaaacttgtccattgtcgctacatcagatacagcagcgtatactcgcaaagcgttgttcacggtgacattatcgagctcaacgttgttctccttcatctctcgaagaatctcatcgactttatctctgtttccgagagagctatagagtgatgtcatcgagttgtacggtgaaggtctcaagagcaaccctagcttcttcatcttcttgaaaacagattcggctttcttcagagctttttctccggattgtcttgcgtaacttcttaatagagaattgtaca

SEQ ID NO: 24899 - DNA, 699 bp, Arabidopsis thaliana
cctgattcttgtagcaaacaatcatcgaaaagaaaacatgaaatgcatgacgaacctcggcattctctgtataagcccttccccaaaatggttatatgctattgtcacttgcatcaacttgtctctagtgtacgaatcactatgccccatcaacataacctgcattatccatcaagaaacttcttctcaactctttaacacaccctacacaattcagttcactatactaactaatttagctactaaatcaaccaaaatccactccaaaaacgtgattctgcagcaaattcatcatcagttccactgaatcagcaaagaaagctaacctcgttgtggtgagtcatgtagttattggagatagtaatagcagtagatcccataatagcatcaatcaaaccatcagcacaattagacaaagagttatgatcaatccaaatatgactcgatccaaatatcgatatagcatcaccatccgccatagtcctccacccataatgcgacggcgagcttcgaaccatagcattaccagttcttctacaatcatgtacattaatcccatggatgataatattcgtcacatactgaatcgtaatacaagcaccgcctgcgattgcaacgttcacgcctcttccatcgattgttttgaagctgttcatgattagctcctgagttagagtaatcaccatgtctcgcttgaag

SEQ ID NO: 24900 - DNA, 995 bp, Arabidopsis thaliana
gaggatccaccacctagctcagtatacatttgcaaaccataacttcataattttgaataaacgataatgtaagacaggttggctcattagaaagcatatcaaattaattgtaaggacacaaatatctataattaatgcaggcttttatgaatcaatcatcatcattcacatcctcgtataattgtctaatttcgtacctcaaaaaaaaaacaacaacgtgaaaacctaaaattagatgagttacgaaaattaggcaaaaataaataaactaaatcatagtattacaaaacaaaatgaaaacgaaaaaatgaagaaaaagcaagctggtccccaacagacatgcgagttcgtctcctataaaactttgttaatctctccttcacacttatcacgccacctcaccacctctctcctctctcctctctctcccccctggagagattattcattccctccaatggatctccgtcggaggcctcctaaaccaccggttaccaacaacaacaactccaacggatctttccgttcttatcagcctcgcacttccgatgacgatcatcgtcgccgggctacaacaattgctcctccaccgaaagcatccgacgcgcttcctcttccgttatatctcacaaacgccgttttcttcacgctcttcttctccgtcgcgtattacctcctccaccggtggcgtgacaagatccgttacaatacgcctcttcacgtcgtcactatcacagaactcggcgccattattgctctcatcgcttcgtttatctatctcctagggttttttggtattgactttgttcagtcatttatctcacgtgcctctggtgatgcttgggatctcgccgatacgatcgatgatgatgaccaccgccttgtcacgtgctctccaccgactccgatcgtttccgttgctaaattacctaatccggaacctattgttaccgaatcgcttcctgaggaagacgaggagattgtgaaatcggtta

SEQ ID NO: 24901 - DNA, 583 bp, Arabidopsis thaliana columbia
ctgtaaatttcacccaagactctagatgcttgtcccatgtgtactgcctcaagaagtcgataatcccgagaactagctcgttcttttcttcatccacgcctactagcaatgaataatccatcacatcacccaactgcaaacacgaaaaatatagttattgctaataaaccttttcaaagagtagtgaagagtaaatggtttgcagaagaataaaactcactgcaagaaaagcagtatcgttccagacagctctttccaacaatcgttttgctttgttaccgacgaaaatgggagaagttggcattgcttcaatcaagttttgatccaacaagactttgttgctcccactagagtcaggattgtagcgcgcccgcgaagatcctttaaggtcataaagccgtttcacagttcttccaaacagaagattctccataatcagaacatccatctttgtttcttcccgctcttaagttgctttgttgcgacctattaacacaagacatatttttatcaagagtgaatctaacctgaacgggaaatctctcatcttagcagttacgtacctgatagattccaagatttt

SEQ ID NO: 24902 - DNA, 416 bp, Arabidopsis thaliana columbia
cccccctccgaaatcatatccgacggttagtgtagaacctgaaagcccaagctgcacgtttcatcttagtcgaaggaaaactgttcaagtagcgcttatccggaccactgatgacctgtgtagagaaagcagaggctcacaaggttataaaaaaagtgcacggcggctcgtggaaatcattccaggagaaaagccctggccatcaaaatgaaacgccacaggtacttctggccaacaatgattaaagattgcgaaacttctccaagggctgcgaggaaatgccaaagactcgccttaacgattcgccagccggccgagctcctatcgtccgtcgcctcactgtgtcccttcatgctctggtccgtggatatcatgggtactatgcgtcgctcgtagccgtgccaattggtcctcgt

SEQ ID NO: 24903 - DNA, 437 bp, Arabidopsis thaliana columbia
agtatcatctactgcttctctgaccaaccccaatttggttaacgtgttttcacattgggcaagagcctgatccaaagcaacgaagaagggtttaaatagtgccaagagaaaaagaactcgattatgcacaaaggtatgtggcatacctgtggatggctaagcacccttctcaaatcttcaatatttacaccgtggttagccaacaaacagtgccgaacagctagcttgacttcgcctacaatatgcaaattgtgtcgcagcagaagatcataatttctatggatgcttccacctaaagagttctcaatcggtaaaacagctctgtcaacaagccaccgctcaaccgcctaaacaagaacaaagcaagactaatggcgaccaaaacttaagaaaatgaaatagtgatcatttcagtcttgatcagtataggaacgaga

SEQ ID NO: 24904 - DNA, 1687 bp, Arabidopsis thaliana
tatgtaaactaaaagtgcttatgaagatgtaaaatatgtttagtcataataacgattatttttcaacgttagaatgttttgaactagtacaaaacaattgacactagattagaacaaaaaaaaaagttaataaaaaatattattaaattgtaattagatcagaaattaaagcaatgctattctactatattaggtatccaattaaaacgctaattaaattaaatcaacctgatttaaatgggaacccaaacggtagcaaacacaacactatgacctttccacgtcagcacgagactctcgtcgtcgtcttccttcttcattccccacccgacagcgtgctcctccagcatcgccttcacatccgccaccgcatcttctttaaccctaactccaccgaactcagcctctctcattctctctatccaccgtctcttcgtctccgtcctctccactctctccgcaccttccttcgccaccacgttttctatcttccaacttatctccgcctcgtaccaccgtctctgctcactcataaacgtgtccgtcgtatcgaacggaatccagaagtagttaaacgccgattttaaccggttaaccaagttctccgatgtgagatctacgtcttcttcgattagggttacgattcttggattcaaagatcggagttgtttcaagaaaactgttcggagcgatgatgatgatgaagttaggggttcttcagggatgtaacggagcatcatgtgacagttaacgacgagagcttcgttgaatgaagaaggataaatccgtaactgttgtaagagggaggagaagccatcggagtaagtagaaggtacgattgtgaactccattgtaatgtttcgtgtggtggcgaagttgactagtttagatccgagttcttcgtaggagatgttgatgaatggtgggaagtggtcggaggaagagacgacggtgagtttaagaagcggaggaggtttgttgagtcggcttgccatggcgtctataagagtagggatttgcatacaatgagtcaaacttaagtcaacgatgtgaaccgttgagtaaccttcaacggcggttaagatcgcggcgttggctgcaatgaatccgaaccggtgccacggagtgaggtctacgaaagcggctaactccacgactgagaaacgatggagttcatcggcctgaggtaggaagctaatggtggatgatagtgtaggggttttggagacggcgcgtgagagcaacgcgcggaggaatgcggatgtaagacgttgggtggagtcaccgtctggtggagcgatgttgttgaggacccagaggatttggtgagttaatgcagcgtcgttggagtctatggcggtggcgcagtgaaggaggagctgttccatgaagttagcgtcgccgcagccacgtaagggtttgggagaagggaatcgggtcgggttgagaatccgggttttggtcatttgagtctggttttagagagaaatgtacgtttaatcttgttatttttgtgacacaagaggaaacaaaaagaacaaaaaaagagtatagtagggtggagacaatgacatgtccatgatttttacgtaaaagtattctgaaaagtgaaaaatagagtgaaaggagacaaaggagagggatgaggaaagaaagagacgagacaatagagagagtcgtgtaagta

SEQ ID NO: 24905 - DNA, 742 bp, Arabidopsis thaliana columbia
cgactggaaattattcttttgctattattcacaaaaactctctttcgcattgattattattcccattgcttgtttgtcttcatcttcttcctcctctgttctttcaaggggatccaaatatgaacacaacccaaattctaaacccgacccgacccatttggcccagtttctcttcgtccaaatctcttagcggtgatgctaactgcatggagcagcttctcctccattgcgcaaacgccatcgaatcaaacgacgccacgttggctcaacagatcatttgggtgctcaacaacctcgcttcacccgacggcgactcaactcaactcaaagactcgctgcctctttcctccgcgcgttaatatcacgcaccgcctccaaaagccctgcgtttgcgtttctatcactggctgctacagcttccatatcccagaaaacgctacaccggttctccgtcatagagctcgctgagttcgtcgacttgacgccatggcaccgtttcggattcatagccgccaacgccgcaatcctcgacgccgtagaaggttactcatccgttcacatcgttgacttaagtttgactcactgcatgcaaatccctactcttatagactccatggcaaacaaactccacaaaaaacccgcctccgcttctcaaactcaccgtcattgcttccgacgctgaatttcatccgccgccgttgctcggaatctcctacgaagagctaggttcggggatcctcta

SEQ ID NO: 24906 - DNA, 500 bp, Arabidopsis thaliana columbia
tatggtctcaatattcaaatccatggtgattcagttttttttttttttggcttttcaaaatgactaaacgttataacttaataataacattctgaactttcaagacttttataaattttagatacagcttattcccaagaaacaatacccaagaaaacaatcacatttaatatagggatgacaacaaaataaaagaagcaaacaataataatcaaactcacatatattgagatattttcatttctatatctcttaattagcagaccgacacgtcttacggatctccccggccttacccgtaagaactccagtccgacccattttcaccatagagacaccaaagtcgttaaagaacattgacccatgagttcttatctgttgcaagacataagccctagtcttggagttgtcgagtagagcagcatcctgctggaaaagtcctcttctcttagccactagcgtgaagtagctcaagtcaaatgtgttgaaactccccggat

SEQ ID NO: 24907 - DNA, 511 bp, Arabidopsis thaliana
attgcagattcaaagatgatagaaaagatgggtcaaatttcagaacaagagcgttgtcaaatgaaagctttcttgaagctatcactgagatgcaccggccctagtgaagaagttccaacgatggtggaagtggccaaagaactaaacaagattcaaagatctctttttaacgactcttcttctctttcttcaggtcaaacccaactcgactctgcccaagacatttcttccacagtggtcctctcaaattagacactgctaccaagtattgcctgccaggtatttcatgaaatgtttcaatgggttatgttgagctggtttcgttttttcaggaaaaaaatcgaacaatgtgctgaaaataacttcgattcttgtttgtattaaaacattatcaagtttcatttttgttgttgtatttataaatagtgctacgttacttttgattcattatattgtcccttagagtctgtgtatgtgtgtttggattttgatggatgcgtctgtgtttgtt

SEQ ID NO: 24908 - DNA, 547 bp, Arabidopsis thaliana columbia
cactgttgtcggtataaacatcacaacccaacttaaactatcaggtgaagaagcttctcccctcatctcctttagcattctggatatcacaatatagcctgctaaaagaatgtgtctgtttttgatctatttcagatgatgacctcttggagcttggtaactgcaaggggaaacactctaaattgataagcgatatgtgcaaattttatagagattggcacgtcaaatctgatggtgtttacggtaagcaagaatctgtgatcaatcaaacatgcttagaaattgcagttttgattctcaagagtttgttgttactggtttcaggagtgtacctccatgacccagtcagctttgtggctgtagtacggcctgatttattcacatataagaaaggcgttgttcgggtggagactcaagggatatgtgttggcacacgctcatggatcaaggcctcaagaggtttataacttgtttttcccaaaaaataacactctttgaatctttagaccttcactaagtaatggtttggtcggattgtagatggacg

SEQ ID NO: 24909 - DNA, 551 bp, Arabidopsis thaliana
tagattatgcaaagaacagcaagaaagttgttgggaattctacttcactactttctccgtatctccatttcggggaaataagcgtcagacacgttttccagtgtgcccggatgaaacaaattatatgggcaagagataagaacagtgaaggagaagaaagtgcagatctttttcttaggggaatcggtttaagagagtattctcggtatatatgtttcaacttcccgtttactcacgagcaatcgttgttgagtcatcttcggtttttcccttgggatgctgatgttgataagttcaaggcctggagacaaggcaggaccggttatccgttggtggatgccggaatgagagagctttgggctaccggatggatgcataacagaataagagtgattgtttcaagctttgctgtgaagtttcttctccttccatggaaatggggaatgaagtatttctgggatacacttttggatgctgatttggaatgtgacatccttggctggcagtatatctctgggagtaccccgatggcacgagcttgacgcttggac

SEQ ID NO: 24910 - DNA, 564 bp, Arabidopsis thaliana
tttcgggcattttcgtgatgtagagtgtgtcttggtaaccatcgatttggcagttgtagaagacggccaaatccgccgagactcttagggccacagcttgatgtccttcgggacctgcagtgttttcaaacccgatgttcttcgccgtgaagttatcaccattgatcgctgtaacaaagtatgcatgttaaattgggttaactagatcgcacaaaaacaagtagcaaaatagtaattacgggagacatattgaaaaatagcatgttaaaaatgaaaaaagtgtcactgaatgaaaccatgaaatataaagctcgcaattttcatcaacataggggtattttgcaaactaaatgtcttcatatcacttttaccaacttggatataaaatttaagtcctatcaaatttttgataattatgtttgtggttgaaatgtgggaatttttagggattagaaacagaattggactcaccaacagtggcagtaaggtatgtcttgaccttgccgatgtaatagttgagactaccagtgatcttagttttggttggtcatcaccgatgaaagt

SEQ ID NO: 24911 - DNA, 478 bp, Arabidopsis thaliana
cactcatctagctattccgagatgctgcgtaatgcatgtgtatccttattctcacggcaatactgttaatttctttctttcttggcaattttcaataataaccaggtgttacaaactagttctaaatcttgttttaaatttcttccctaccattaaaccaattaaaactgtctccttaattggcaagaaaataaaaagagaaataagaaacaaaacttgaatggaaacatataagttggtgatctacaaaatgtttctaatggaatctagtagataaatgtctgtgcagttgagaatcagtaggcataaacactggaagttggtctcctctctgtgatctaacctgttgaaaataaccagtcaatgggtttcctctagcccttctgctacgatcagtcccagtagaagttatggtgttgagacattcattaccaagaggacctccaacatctgttccgggaatccgagacaacgatac

SEQ ID NO: 24912 - DNA, 550 bp, Arabidopsis thaliana
gatgttctaagcacattgacaggagacatcatgaacggaggagaaaagttagaatctatcccgattgatctcattattgagatacattcaagattaccagcggagtcagtcgcaaggtttcgctgcgtgtcgaagctatgggggtctatgtttcgccgtccatatttcaccgagctgttcttgaacaagtcgcgttctcgtccacgtgtcttagtcgtcatccaacacaaccgtaaatggagcttcagcgtcttctcttcgcctcaaaatcagaatatatgtgagaagccgtcttttgtagtagctgatttccacatgaagtactctgtaagcacgttcccagattgtcatagttgctctggtatgatccatttctctatgatgaaaggcgcatatacagtgccggtggtatgtaacctcgcacgggacaatatgctgtcctacctaaactggcaacgacaaggtacgaaaactcgtatagcttcgtagggtatgatccgattgagaagcaaatcaaggtactgttcatgtctgatccagatagtggtga

SEQ ID NO: 24913 - DNA, 543 bp, Arabidopsis thaliana
gatgtagcgtagtatccgacatatcgaagagaagttaggacgctgactcggttctgagtgccaacatcgtttgatcagactaacgaggtattttggtaaattctctggctaaagtcgaagtaaccgaagatcttcagatgtttgggggacttatgaaagccacaggctacaactggaactcaggaatggcccgaaggagctcaaaccgaggaagaaaacgactggtcagcaacattgacagagctccggtttgctcctctttggcacagccaatgaataacagtagtgtacaaatggtgggactggaagataggagccttacagggtggggaaatgcaaccagaagaccaaggcgacataggtgccctgcaggtactcccgcaacagtgctattaacataaagcttttcgaaataaatccgatttcacaatttgaggaacattatagagggaaaagaaccagagcaagtaacaatggacaaaaactgattttcagcgatcgatgttttattattgtcaatcaaccccatgtttgtgggtgttg

SEQ ID NO: 24914 - DNA, 515 bp, Arabidopsis thaliana
tgatcctttcccacacttgatgaacccaccattcccatcctagcttgctgctgtgctttttgatgctgagcctgcatagcaaactgaatatacgcttgctgcattggattaaaattttgctggccctcttgggtagaagaaccctgttgttgttgttgttgttgttgctgaggagactcaaaaaaatttctagactgctgaggcatttgcatagagcccggagacgaagcaaagttgccaccgcccatcattccctgaaccccaccaggttgatatgcaaacatattttcgtttgtatctgagtttctgtgctgctgctgctgctgccatatcagaagcacgataataattagtaacaatcaaatgaacaataatccacaattcagagcaactatatatatatgtggaaatgaacaaaacatgttctccaagtggctaccattacacaacttcaatttaaagatattggttactttccttttacacagaattgataaacagcaagtccactaaaa

SEQ ID NO: 24915 - DNA, 571 bp, Arabidopsis thaliana
tctctaatgttgaataaagcgactgaagaaggaaagttcaattaccatcatcactgtgacgttgcaaagcttactcacttgtgtttcgctgatgacctgcttattttcatggatggctctctctcttaagtccaaaacgttctccaggtgctgaaggagtttgaggagcgttctggtcttgctataagcctataaaaatcttcgttctttgctggagggctctctgagggtgagactgaaactatccgatccactactggtttaactcttggccttctccctgttcgttatcttggcgttcccctgtgtacaaaaaagctaacctttcaggattgtgagccattactgatgcaggttaaagggaaaataaataactggtgtgcgaaatccttatcttttgctggtaggctggtgctcatcaacactgtcattgctggaatctcaaacttctggtgctccactttcgtccttccaaagttgtgcattcgtaaaatccactccatctgtagtgcttttctgtggaaaggaaaactggaaggtcatcatagtgctagagtttcctgggaattgg

SEQ ID NO: 24916 - DNA, 270 bp, Arabidopsis thaliana
gaatcttgtaatttaaatacttatacatatatcatgttatatagaaataaaaatatttgcattgctctataggcaaagaggtggtgagctatgaattgccaaggccaatcatagggatacataggtttgtgtgtgttctattcaggcagaagcaatgacgagttgaccttcctcaaatcccttcgacagatcacttcaatactcgtcaacttgcggtcgagtatgatcttggtctccctgtcagcggccgtcttcgttaactcacatcga

SEQ ID NO: 24917 - DNA, 549 bp, Arabidopsis thaliana columbia
  unsure (1)..(549): unsure at all n locations
ctaatccaaccatgtgccatgtaaaactctcttcgttgtttggaagaagatacataggatggccactctactccatttttgtccactagaattatctcttcagcctccttgatcccgttctccctcacaaatgatctccggagacgctgcataagcattcgtgaagtattacaagaaaatgcataatcaaattaaccctaaacctaagacgttgaaaacttacaagttgccctgactggatcatgtaatgcttcaaggttactgtcagaaacttgttctgcttcgttgaagcactcccatcttctctgctatacttttcagaaacattagcttttccatttgctttggaattggaacagtttccttgtggaataactttaaaacacaattgtagcaaaggccttgtcccattccggacaagcttaaaccggtagaacgatccgggtttcagctcatttgcatggcagaaacttctccagcgtccacggataaaagcctgaccagttcttttgttgtgtcgcagaccagangtcatgattcccacttaga

SEQ ID NO: 24918 - DNA, 572 bp, Arabidopsis thaliana columbia
gagaaacgattaacaaacgaaacaagcatgcacatgatacagcattgaacaaagttccaacataggaggagacctagaaatgactggggaacaaacataccagtcgtcctccaaccaaatcatagtgtgcataatgtggtccatctggttctccaagtaacttataagtgaccaagttctccggaaacagcttaacagtgtctgccatattcacaagcatttgtaattagtcataatggtgaaaatgcatgtgtgagtagcttaaaaatttatttggtgtgtgtggaaagtatcacaaaagttaatccatctacgccttatacagcctctcataactcgaaagaattcagtaacagcaatgtagaatttaaaatgaaatgcatatctgggtaaatgaatggtttcatgtatatgctagagtcatctatgcagaatttcataataaacattatgttagtataccttccacagcctgcagggggcagatcaagtcacgatcacctgcaagagctaagacagggacactggttctgggaagatgatccttatagtagaatttccactacgatcac

SEQ ID NO: 24919 - DNA, 620 bp, Arabidopsis thaliana
cgtgctgcggcactgctgcggttgctcgtgctttggcgggacttccttctgatcagagattgagtatatcttctactgctactgagcttaactcaatttatggaaacagacctcttcctcaacaagttgaagagcttgaagaaggtttctatgaagaggtctgtgtgtgtgtatgctttgttttggtgtttgtgatatcattactaagcccacaggtgacattttggttttgttgttgtgtaggattttgatccggtaaggcatattttggagaatgtgccggatgatgaaagtgagttagcttattttgagaagcaggtactaacttttaacttctctcaaggaattgaatataaactgatgcgtctattgtgaaaggttaagaatgttgatgaacgttttagttagtgagtttaataggttttgtttactgtgtaggctaccttgaggttggtacagctggataaagtggcagaaactctgtctcaccatgttatggagcatcatgaagtaatgggtaagtattcttgaattgagaagatcatatgcgtttggttttgtgagtatacaaaaatgcttttggccagtgaaggggatgaatttggtaagagaattggaga

SEQ ID NO: 24920 - DNA, 487 bp, Arabidopsis thaliana columbia
ggtttattaacgtataaggaaacgatggtttcatcttagttcgctaatgttgcaggtaacctgactcgctcataagcatctcttcacactagaccttaaggtaaacgagcttactctgattttccagacttcgacctgaacttttcttgaatatcctttataagacgaccattagcccccaccgctttttcttccgtctgtgtccaataaaccagattgagtataccgtccagacccagtagtttattcaggccattggactgcctgctttctggggctgaagaatcagaactcatctttatttcatttatgacaacttggtcataaagcgcaccaagatactcttctgggagatctttgccatcatcaatgcctcggttatttctgataaaatcagccttggtcatctgattgtcataaaccagaaagcagacgttaaatacactgtaaagacctttacaccaaaaagcatctccaatttagaata

SEQ ID NO: 24921 - DNA, 617 bp, Arabidopsis thaliana columbia
gaattgtctggttagtgtcaactccatgatcctctgataaaccttgacttttggtgtcatcgcttacaattacactcgtgtcattcgcagaagacacaacctcatgtagcgcatgggatgggagtttttcaactagcccagatatctcatcactttctgatccctgctggttagtacaagataagccatcagaaatagcagcttctgaaccattatctttggcaacaataacagcatcacttatttcttctgaagcaggggcatcaagaacttccttaacttcggatgatatgtgttgttttccaccttgatcacaagtaggatcgctggcatcttgagattctggatgagtgtttatactcccatcagacacagagccatcatcaacagctccaatttccgattgcatcttgctgtcttcagattctgatttgctattaccattttcaacaacactatctttgccagaaggctgggaatccaagctgatggcattgagagcttgagtctcagcagggacgtcactgcttacctctgatacaacaacatccacggttccagagtctggcaacacttcaccatcggaagcattgacttttcccgcactgaagtgaatg

SEQ ID NO: 24922 - DNA, 482 bp, Arabidopsis thaliana columbia
caaacccgtgacaagaatctgcttcttgaatggaaacttacattcatgtcgccggccttagaacaagcgctaatgaaggatgtgtaagtatgaatgtcgggtttaacaccttcttttttcatctgctgtatcaaatccgcggcttcccatacatcgcctcttcgtgcccatctaaaataaaccagagggaaacgaatgagaattctagaagcaggccaaaaagtggctacaaaaccagatacattacccgtcgattaatatgttatagacgaaggaattgcgcgggatattccgtgcactcatttctttcgtgacagctaatgcgctctgcattcttcctgatttgcagcaagctttaagtaacgcctcgtaagtgaaaatgtcaacatccaaaccttcgttttgaagccttgtaaaatactcaaaggcttttccggtatcacgactgatgcataccttgcatgatctttgtgtaagtatgt

SEQ ID NO: 24923 - DNA, 748 bp, Arabidopsis thaliana
cttctttgtctcagggtcatacaggcggtatgcttttgactctttactcactcccagcatcacacattttctactcttttcatccaacttaattctcttctcatatggcactagtgcgtaccctacacacccaaacactcttaggtgatcgattgatggcttatgcttgctccacatttcttctggtgtagcatctgcaagagctttagagggacttctattcaatatgtgtactgcatattgcacagcttccggccaaaatctccttggtactgacatcccaaacagcatacaccttgtcatgttcaacaggctcctgtttttcctctctgcaactccattctgttgaggagtgtatgctgcagtgagttgtcttttaatcccatgttccttacagaactcctgaaacgcattagagttgtactcgccttctctgtctgatctcaagcatatcaaactcactccgagttccctctctgcagccaccttgaactctttgaacactctcaaagcttccgatttctctgacaagaaataggtccagcacttacgactatagtcatcaataaagttaatgatgtacctcttgccaccttctgatgtgggagttattggtccgcagatgtctgtgtggaccaattggagaccccgacttgctctccatgaactcttctttggaatgctaagcctgttctgtttcccttcatgcatacatacacaactctgcagcattggtctttgtttgcat

SEQ ID NO: 24924 - DNA, 995 bp, Arabidopsis thaliana
tccctactaacactggtggtgttcaccacgagaaaaaaagtgtgaccgaaaaagttatggagaaactaccaggtcatcatgggtcacatcaaactgggactaacacggcttatggtactaacactaatgtcgttcaccatgagaaaaaaggtatagcagaaaagattaaagagcaactgccaggtcatcatggaactcacaaaactggaaccaccacaagttatggtaatactggcgttgttcaccatgaaaataaaagtacgatggataagattaaagagaagcttcccggtggtcatcactagattgattaacaacttgtttaagcttattttaagtatttgtgtggtgtaataatatgatgatgtggctttctttcattgagtcgctaaataatatatgtaagtgatggatctttgaattaatataaaatatctacttctggtttcgtttatttatctttctatcgcttcaactattccatgttattaaaatacttgtgagttgtgacacatacaaccacgtataattcacatgtaattatttggtaattcaattctttacaagtttatatgttcttttgcatacaagttatcagggaaacgaccgcagttgtttggcaatgtatattactcaggttttcaattcaggcccatacggcccaaataagttgtttttacggatatcgagttaaaagaggtgtgtcgattataacggacatgtgtcacactaaccacaaaaccaacgtcttacgtaatcgccacgtgtgtcacttcaacgcaatttgataataatcataatactatatgtgattatgatccctatccaaagttgcggttctataaaaataccattcaagagcgtatacatctttatccatcagtgtcttaattttgtctatagctaaaaaaaggttcaattgtaaaaggaatatggagtcttaccaaaaccagtccggagcgcagcagactcaccaacagcttgaccaatttgga

SEQ ID NO: 24925 - DNA, 632 bp, Arabidopsis thaliana columbia
gttgacagtgtttaacttaggatctaaccggcttcacggcaaaataccggcatccgttagtcagtgcaagactctaagcagattcatcctcagagaaaacaacctttcaggctttcttcctaagttttcgaagaatcaagatctttcgtttctcgacctcaatagcaacagcttcgaaggaccaatccctcgtagtctcggaagctgtaggaatctcacgaccatcaatctgtctcggaacaagctcacgaggaatattcctagagaacttgagaatctacaaaaccttagtcacctgaatcttgggtctaacttattaaacggtacggttccttcaaagtttagtaactggaaagagttgaccactttggttctctccggaaaccggttttcaggattcgttccgcccgatcgccactcttagagagaaggaaaacaaccatgtattccagtgacatcatatcaaacatttttactatacaacatactctcttttttttctttgcttaaatcgttgtatacgttttcaccattcttattgccgcttagtacatttttaattgataacacaaaagtttcggttgataagaccaaattcataatatcgaaattcttatttacgatcaataaga

SEQ ID NO: 24926 - DNA, 528 bp, Arabidopsis thaliana columbia
ggattagttgtggtacgttacgtacgtaccttaggaatcttccaagccgaaagctagtgtccataagctgcttgttcgatatctctgcctgcgttccaaacgccacgtacaaaaccggacgcccttcctctcgcttctgatccaaccaatgaatccaagccggtttagcactccccggtttaggaggatctgtcaaacacagtggcccaacacaccacgactttggtttatcaccagagttgttgtggtaatcaacaaatgctgactcgagctcgtagaagctattgactaaaaacccatggcttgtggtggtcgacttgatttggtccatagatagttcgagggctgcacctgattcttccggctcggtagtgccatggtcgaaatccacttcttgaccttgatcgatggaaagtctggtacagtgacgggttcggtatcagatttactttccggttcggtaaagagttcgtgtttgaaaacagagatggagacagcggcggagtaagagttcatgccgtagagaca

SEQ ID NO: 24927 - DNA, 405 bp, Arabidopsis thaliana columbia
cagagcaacaacacgtgtcgacctcgggatggacaattcgagagcatttaccgtggtcaaaaactcaacctaaccacggttcaagaaacaatggagatatcgacacatgtctcaatctaaatacccgatgatattatctcacagatattcgcttcctcgataaatatcatctcttcgtcctcaacagcgtctccagaaaatctaggtcatacacttataaaatccacgttcccagaatcgaacaacaacaatggcgtcgcatcctaaagttttcttcgacgtgaacatcggcggcgcaccagtggggaagatcgtgatggagctttacaccgacaagacacctcagacggcggagaatttcagagctctatgcaccggagagaaaggcgtcggacgtagcggaaa

SEQ ID NO: 24928 - DNA, 534 bp, Arabidopsis thaliana columbia
cagattggtccattagcatttacaagaaatcttgaaaacaaacacaacaactatcaataacatcttaaaaggcttatcatagatgtattgtaaaacctttggaagaagcaagagaggcttgttctgattcattggctccaccattgtcagatctaccagaagtatccttgagggtttgatgaaagttccctatcaaattttcaatattaacaccacaaaatcaattaactaatgcaaattataatctcaaggaagataatggcaaatcatatacaaaaggtccaataagatcttaacactcaaacataacaaaacaagattagtttcttagcttcaagtgaactcatcaaactaacagataaaaaggttttgtttttctttttctatgaaaaaaaaaaaaactcaaacttgagcagagtagtgagtacccttttcatggcgacacgagcacaagcaagattaagtttactcttgagaaatgctctgtattccgctgaatctacaggaacattaggaggagaggagacggaaaca

SEQ ID NO: 24929 - DNA, 462 bp, Arabidopsis thaliana columbia
caaagcgcttcttggtcgagtgaaactatctattccagacaaaacatcatctctggtgctctcacagagggctataagctgaatcctgtctccaacccatttcttaatttcagcttcccagttactgacaagactcgttggtgtaacaataatggcctttttaaccataggcgtcccatcaaatccttgaccaagaagtgtgtatagtacagtaatggactgtaatgtcttccctaaattgccgaatctatttagaaggccataagcaaattgcataggagacaagtaaagtccagatccaattttacataacggtcaagatagattttacccatgtcatcatgcagaatgcaacgatttatatttgccgaaccatgtaatcctgaaacacaatcgaacatgaactggacaccctctctgcagtctcagaaaaaccacctctccatgtacgtacagttgtat

SEQ ID NO: 24930 - DNA, 316 bp, Arabidopsis thaliana columbia
tacctgtaataagaacacagccgcagaggtcaagggtcctgagatctggacagccataagctaaactcattaccccatcatcactgatattctcacaccatcccaagtttagtgactgcatctgattgcagttattcccaatagcctgcacacaacaacatgaacaaattctatcaactctgccacacttatgaccaaaggagtaaaaccaagtttgggagagaacattaaagaaaaacaaagattcacctccaaggcattgtcagttacagctttgacacatccgcaaagattcaaaactttaagcttctgcaga

SEQ ID NO: 24931 - DNA, 422 bp, Arabidopsis thaliana columbia
ggttgaagatcaaaagggtatgcaaatattaaatttaatttaattaaatggtaaattttacatgtttatatatttgtgatgatttcttcatatttgatgttgattttttttttttcaataacaatcatacgttggaattgtggactttttatatgatctctgttacaaattcaaaactatacacccaatttacgtgttatataacttctcgaactttttcttgtgaggcacgttgtatagaaatattgacgtaaatttttgggtttggtagcagaaaaaattgatattgatacggtggtagaagagaaaagtgtagaggatgaaaaagatggtgatgttgataccgaaattgcatcttctgaggttgaagaaccaataccggagtacatactccagtaacaacggaattagaagcacaagaa

SEQ ID NO: 24932 - DNA, 590 bp, Arabidopsis thaliana
aaccatcaacagtcggtggagcagagcactcctatacaaattaagctctctctcaagctcatcagcttctacttgccttctctgctgctcaccaagtaatactccaatctctttctcataatcatccccaaaagatgaatcttcgttccctctatgcaatcggtcttctccccagttccggtatcattatcacctaaacaacaaaaaccctataaccactttatcagattgtactcatatacactaaactcttcaggaaaagaaacataaaaatcataaagatcaaaactttatacctcaatatatacaatcctcgaaatactctgttgtagaactaaacccaaagatcaaaacttcattaagcgatactcaaatccatcctgagattgtatcgaagctttgatttttcatgtcactgtttgttttaaagtaaagacttttagacagagagatagaaaaatgggttttatagtgttgacgaaaaatccgatactgagcctatcgacagaagagttgaagaagaagaagatcgagagagaaagagagtgagagagatagaaatgggaggaagaattgagattaataattgt

SEQ ID NO: 24933 - DNA, 587 bp, Arabidopsis thaliana columbia
  unsure (1)..(587): unsure at all n locations
gtctgattattcttcagtagatggttctgggaattcaaaggacccttccctgatttctgagaaggcgaaacaccacttggtggagaaactgagggtgaaaggaaaggaaatgaagtggaagtgaggggtaagaacacgtttgctgtcccaagaaatgttaaaccactcggctacacgacacctaaacccagcgcagatgagacaccaaaatcaaatgatgagttcaggaatatgttccttaaaaagtgagacttttgcttggtccctatcttccttcccttagatacttgtcttgttctacttttcggaagtaatcttatgttgtagaccagcaacatcggatctgctactctcttttgtcaagataactagttgagcttctatataactaatatataaatttaagacttgctagacgaccatgttaatatgttttgatgttatctttcatttagtttgatgttagaaccatatatattttgagagctttgccaagtgaattattcatgttttctttgaagagaaggaactaaaccccttgtcatgaagnacctttacaagcaaaaaatttcactttgtacactggg

SEQ ID NO: 24934 - DNA, 946 bp, Arabidopsis thaliana
ttctgcttgcctccaagtcccaaaccaatcaatccattagcatcccactcagaagcagaagcaccaggttttccagcctcaaaaccaggtggcatagagaacaaagaccgactgtcattcacttttctcctatccccaacaccacctaacacattattactccctttaagcctctgagcaaccctcaaatcctccctagacatcaaaggaggtggcaacctcggattcaacttcatattagcatagtaataagacaagtaagctggatctttcctaaactcctcatcatcaccaccaaacccattacccttattaactccaccaaattccagaaaagaagccccacctccgccgctaaaaagccctccggcagcactaagagaaccatcaacagtcggtggagcagagcacttctatacaagttaagctctctctcaagctcatccgcctctacttgccttctctgctgctcaccaagcaatactccaatctctttctcgtaatcatccccaaaagatgaatcttcgttacctctatgcatcggtcttctccctagttccggtatcatcatcacctaaacaacaagaaacccccaaaatcaattacgctaaaaatcctaaagatgacacctttataccccaaaactaaacccaaagatcaaaactttaagctagtactcaaaatccaatctccatgtattactgtcgttttcaattaaaaaaaaaaaaaaccctaaacacaatgatcagatgatgagaaatagaaaaatcgaaactttaagaagaaactgggttttatagagagttagaagaaaaaaatcgacggcgatgtaagaaacccttagggtttttgtgaaaaaaaattttaaaaaaaaaatttactgtgaatcattattagggttgttgttgttgatctgacctagtgattgcataaggaattgaaaaat

SEQ ID NO: 24935 - DNA, 613 bp, Arabidopsis thaliana columbia
caacacacaagcaaaatccacaagtatctgtatttggaacaagacctgtaatctattacactagttgagaggactcagcttacagtacattctctgtctgaagactcatcgtcgttggctactaagcttgcaatgaagcgagcatcatttccttcatcactgccaatgtcagttgaaacgtatctcctctctgtaaaagccgacgtctgacgtctctgtagcctaagaacatgcataattacatcaggagtcagtgttaccctcgattggtcttctctccccaccctgttcaattccatcacctgcatttcccacaaaatacagtttcagtgtttgtgacactgtctcaacattaaacattggttgagagaagacttgatttaccttatcgatcttttcaggcagggaaagaacatcatttgacattggcgtccagagcttaacgctcttttcaatcccgcaggatgcaagtaacggtatgtgtgggtgagctctaactgattcacactcgtctatcactcacatagctcggacaagcttacgtctttcttctccatataaaaatgtgccgcagtctgaacactcgtgacatatcatcatttggacaaagaag

SEQ ID NO: 24936 - DNA, 637 bp, Arabidopsis thaliana
tgcaattcaactaccactttaacgatcacgagaattggttacgttgttcttacataattttcatatgtacaaaatgaaaactttgcgtattgagagtatgcaatgtgaataacataagcttttcgagaagagagaaaggtttatcataaaaatcttttaggatttcagaatgaggttcaaaaggaaacacagacaacaaaacttgaaacatagaaaacaagagaaacaaagtttatctcttttaactctagtctgccttggcagctgaagcagcagcttgacctctgagacgaccagtcctccttgcagcaataagaccaaccttctgtccaggaggtgcatcacgcctaacagtactggcgtgaccaatgtgctgatggttacctcctccatgaggatgctccactggattcatagccacaccacgaaccttaggccatgagttcctcttcacacggtacttgtggtacgcgtttcctgccttgagcatcggcttctcagttcttccactccagcaacttgtccaatcatagccctgcatccacttgggacaatcttcttcgaacccgatggcaacttaatcctgcgcaaacatatactcaaatcatcattcacaagactacaacaactataccac

SEQ ID NO: 24937 - DNA, 565 bp, Arabidopsis thaliana columbia
gactacacacattgggaaatgtatgcaattggtgggaacatgaaccctacaattattagtcaaggcaatcgtttcattgctcctcctaatgaagaagccaaacagattacaaaaagagagtacacaccatacggtgaatggaaatcttggaattggcaatcagaaggagattactttctcaacggagcttattttgtgcaatccggaaaagcaaatgcgtggagctctaaaccgaaaaccccgctcccaaacaagtttacaattcgacctaaaccgggaacgatggtccggaaacttaccatggatgcaggagtacttggctgcaaacttggtgaagcttgctgattacataaccattttgcccccttccaacaaacagccaaagcttttgccctgtttttgcttgttgttcaagaaaaacaatatggagagagaggagagaaaacgaaagagaatgtttttctatgaatggtgttttgtaactaagactgcatatataatgcgcagttttcggattattattcttaataggatctaggttcctttttctacggaaaaatgagaa

SEQ ID NO: 24938 - DNA, 282 bp, Arabidopsis thaliana columbia
gctattgtggatcatcacattgcagagggtatattgggggagatcctctgaatggtgatgtaattattcaaagtgattcagatgaagagtatcctgaacttgtgatccttgatgatgatgaaagtggagaaggaatcttaggtgcaacatctaggaccttcactgatgacgctgacgagcaaatgccacagagctttgaaaaggttaatggttacaaggaccttgctcctgataatacccaaacacagagctcagtatctgtaaaacttccagagagagaaa

SEQ ID NO: 24939 - DNA, 696 bp, Arabidopsis thaliana
cataagttctctcgtcttataaacagctctctcacagtgtctctttcttgctcagaatttgattgacttagctggatctgagagttccaaaactgagacaacgggactgaggaggaaagagggtgcatacatcaacaagagtcttctgactcttggaactgtaggtgtctcttttctgttggagctttcttttatttgtcagatatttccttttcagttataatatgatataaatcagaattaagtataatgcaaaactgccttagaagaacaacctggtttgctagtgtatcttaatgatcaatgcctttattttctgataagcctgttccctttttgtgtccttatgtcaaggataacatctctagtcacctaacctttgaaatcgattttaggatgttttgattataaactatatctcatggttcaaatatgtaggtgattggaaaactgactgagggcaagacaactcatgtcccatttcgggactctaagctaactcgtcttctgcaatcttcactgagtgggcatgggcatgtatcggtacgactcttctgtatctggtgaatatttcccattttactgtaatagttttcacacggttgattatctcagattgtctaattgtgttgtcttcagtagcatatttaaggcaatgttggtttgtttgtatttattggctatctaatatacgct

SEQ ID NO: 24940 - DNA, 548 bp, Arabidopsis thaliana columbia
  unsure (1)..(548): unsure at all n locations
nnnnnnnnnnnnnnnnnnnnctaaagcagcgtcagttatatttgccatgaatttaccaaagagtatcgtatttcccctattaactatgttattcaacggcgtatgacggaagcaaaatggtcactcactaatactgaattatcacaggcagagatctcctggcgtgtgggttatgaaaatgtcgatcactttgccaaactgtttttgcgccatgtcggttgttcgcccagcgattaccgtagacaatttaaaaactgttttgcggaacaagaaatcctatctgaatttcctcaaccggtaagtcttgttggataaatctggcggcgcagtttgttaagaagctgcgccgcctgcagattatttgttctgatagtctttcaggatctgccgacctgctacgtaaatcataatttcgtctgtaccgccgccgatacgttcacaacggacatcacgccagaagcgggagacgcgcgcctcatcggtatagccagaccgccatgatttgaacgcatcacaatgacttcattgcggtacgtcacagtcagttt

SEQ ID NO: 24941 - DNA, 603 bp, Arabidopsis thaliana columbia
caacttcttcaatagtgaaaaccaaaaaggtttgatcaatctaaaaaaatcatcttaaaagagcttttgccccccatcattggtttaggtatagaatatccgcagttatgttcctggcccagccggattttgtactgtgtctgtctgtatttgatgatatatatctgcagttgaacattttcagagaaaccatatgatatgctcacataagaaaacctttcctgttatttgcctggtcaagaattcttcatctttgcaaacacagtgcatagctataaaagggatgcatgtgtattcaacagatacatgtgacaaaacaatttcaaccaactggaataaacttttcaacttttttttgtttgtttttgttaaagaacaaaaaaaggaaaggagaaggatcaagaaatatctctctccaaaccccaaatcgaaaaagtataaaagaattggactctttgtaatcgacttatgttctcttttcactgcacataagaaaaagaaaggtttttcatttggaagccctgtgagctgatggcttggattgagttgaagttgctgctgatgacattactcgtaagcgccagctatctctgtgaaagatgg

SEQ ID NO: 24942 - DNA, 1194 bp, Arabidopsis thaliana
cacaagatttggacatgtatcaaataatcgctctgaaatgaaagattcatacagcttccataagaatttgaagatcagtatcagctatctgttgtccagctttttgaagtccatatttaagctcctcgagatttatcttgcctctcttgtttacgtccatcatttcaaatgcttcctttatccctgctgcttcctccactgacaaatgttcagctatcacctagaaggacgaaacaaatttacattttcatttttgattctgaatcagactggaagcaaatcgataatcagtgacatggtttaacagaatcaatactcgtagagctcgtttcttgagcttgttcataacagaaaactgctttagtcttgctttcacagtctccccaagagagacatttggagccttctttgcattcagtatccaagtatgttctgcaaatggaatatttatttatgagtttacgatttcagaaagctcagccttgctgaaaacagaagcctaccgagaacttgtgcagcagtaagccgttttttgggatcaggttcaagcatctttctcacaaggtctttggcgctgtcagaaactcttggccatggatctctcttaaagtcaataactgatctaatgatcgcttgagccaccccttgctcagtctctgtacccaaaagaaagataaaaacgtctgaaagaggtcttaaagtgaataagccagaggaaacaaagagaatgcggtaaagcataaacaaacctgcccaaaatggcggaacaccacaaagtaggatatagaggataactccagcgctccacacatcgatctcaggaccatagtttcgccgcagcacctcgggtgccatgtaataaggacttccaacaatctcattaaactgctcacctgttacagtttagaaaattcagctcaagtaaagatacactaataaatgtgctccattgatactcatcaaaagctgatgttgtaaatgtaccaggtttgaagaatacagataatccaaaatcaatggccttaagggctgatgtctctttcttatttgcaaaaagaaagttctctggtttgagatcccgatgcatcactccttgcttatggcatatctgtaaagacaaaccagcgatgtgtgaacataaaacacagacaaaaggaattggggacttcagacattgtaaacacagctatatat

SEQ ID NO: 24943 - DNA, 449 bp, Arabidopsis thaliana
gcaaagagtttctatcgagtggaagttagaaacggcgacttcttcttttgggtttgacagatggagtgagatgggttgtctttatgacagattgggtgcaagagggtgcattgatttgggtagcccgatgactgctactgtgggtgaggtaatggcaggggcaagaagaagaaaatatcgggtagctattttgaatcaagtcgaaaacgaaatagtaaaacagaagctcataagatcgaatgagaccgatgtagcattatggaatggaaagcatgaccactatcgaaaagagtttcacaccaaagagacgtggctgcagattcgcaccgcaaagctattgatggagaactacaacggaatctggttcaagcactcgactccgaagtactcactcatcacatggctcgttcagaaaaatagagtagctacgggtgacaagctgattaagt

SEQ ID NO: 24944 - DNA, 434 bp, Arabidopsis thaliana columbia
aaagtgatacagtgcccctgatactttgtgttgctgctgctatcgcctgcgccctggcacctttcacgcccatcgtgactggcgcactctttctctatttctgtttcgtactcacgctcagtgttattgattttcgcactcagctcctgcccgacaaactcaccttaccgctgctctggcttggcttggtatttaatgcgcagtatggattaattgatttacatgatgcggtttacggcgcggtacgggccatggggtgctgtggtgtgtttaccggggcgtctggctagtttgtcacaaagagggattgggctacggtgatttcaagctactggccgctgcaggcgcatggtgtggctggcaaacgttgccaatgatactgctgattgcctcgctgggtggcattggttacgccatcggttcacaacttctgc

SEQ ID NO: 24945 - DNA, 1023 bp, Arabidopsis thaliana columbia
cacccttcacagaacttgtaaggaggactcacacacgtaaagacggtagtttcatggaccctcgttatgaatctatttttctcgagtggaggaagcgggtaaacaagttatggacgaggatgattctctcaatgccctcagccaaacagcctcatctagtggtactccctctcgaattgttttgaacaaagaatatctgaaggtactcaacaaagaatttctcattagtttgattttaaacttgttcagtttggattatgttcatttgtttgatttttaattggaacacttaattttatccatctgcaatgctcatttgtttgattagtttcgttttgtttatccatctaaaattgtatttcattttgaatgatacttaaatgtttctttgtttcacagcgaggtcaaaataaaaaaggatatatttatggactaggcagtgttcaataccgggatatcaatccatcccagaaagtggctacaactatgtctcacaaccttgacaatgagatgcgcatgaatggtttggaaaaaaataatcatgcgctcaagaaacacaatgaggccctcaaggaagacatggtggtgttgaagactggtgtgggcagggtaatggatgagctggcaactgcccgacttgcgctgaatgcgattatgaagtctttggagttcaacctgatgtgttgatggtcttgatgttccttctgcaggttgggttggttctcctgcacgtcgtgatggttctcttgcagggactgctgcacgtcgtgatggctcttttgctcttgttgcgggtcgtgatggttctcctgctcctgatgcattaatacattttaaatattaatttaaaaaactttataattactttttgaaagtattttaaaatttaaaaatctattttcacattttcacatttttatatattataatttcataactaatgaaaatatcttttttttcaaattatttacttattttattacgatttatatattacatttatatagccacagactgacgaca

SEQ ID NO: 24946 - DNA, 581 bp, Arabidopsis thaliana columbia
caatctcatcttgcacccctaacgagttatccatgttgttctgtccactgcaatcactaggttcaacatctccttcatctcctatctcatgattccccattgacacattctcttccaccaaatgaacatccataaccttcacttagtagagaagttctaatttcacacaaatgtttctcatcttcatagtctacaaaaaagtactaatagtgtttggagatcttcttccgaacatataaatatgaggactttttgcatctctcactctccgattgtttgttgagagagagagaaacccagaaagaggagaaagcaaaagagagaaagaggagcttacgtcagtcagtgatgcgaagaactcagaactcagaagaatcgaaagtcgtgaaattagggagaagggcaacaacaattggggaaaattgagaagaagctatggcagctatttcgttttcagattcgaccggaggaaattaaactcctgcttcttctcagtcgttcgcgaggaagaagagattcaagcacgaaaccgacgtcgtttcgtgcttttgttggtttttttttttcaatttaaatagcga

SEQ ID NO: 24947 - DNA, 551 bp, Arabidopsis thaliana columbia
  unsure (1)..(551): unsure at all n locations
nnnnnnnnnnnnnnnnnnnnnnctaaaggccttcagcgttgtcggtgccgacaatggcttatgtgctgcaaggctcgcctttgctgccgtacgcaccttttcagcaatcatttcgttatacgccagcataccttcgcgaatacccagttgcggtttggtgacaaaatctatcgcccccagctccagcgcgcgcagtagacttctgaccctttgccggtcagggaagaaaccatcacaacgggcattggacgcaaacgcattaatttttcgaggaaatccagtccgtccatccgcggcatttcaacatccagcgtcacgacatcgggattgaatttcttaatcaagtcacgcgcgaccagcggatcaggcgcggtcgcaccatttccatgtcgctatggctgttgatgatttctgtcatgatctggcgcatcagtgccgaatcatcgacagataacaccctgattttgctcatcgttaatccttacttagcgcatacaccgtctgaccacgcagcgtgaagcgcgctcaaggtggctaaagtttcagagtga

SEQ ID NO: 24948 - DNA, 448 bp, Arabidopsis thaliana
tatttagtctctctatatatgtttagactgtaatttaaagaaagtgaatcaaaactcacttttcttgctcagccacattcttatctaaccagctttttactttctctgcttcctttgagacctgaatcggaaaacgcagtttagcatgtgctcgccagaagttttaaaaagagcttgtgtattttcacttatcagatgagtaatacaaacctcgtcgatctgctcttttggaagccaagttttgttcgtctcccattctgttatgatctgcaaatgaggttgaaactcagcagtttgtctgaaatcatggatctgatcatgagataactgcgaaatcatgtaatgtctgagtacctccttgagttcagttaggtacttcctagcaaattcaatagctactgtgcgtgctgtaagctcctcagaactgtacagatgtataaacaaatgg

SEQ ID NO: 24949 - DNA, 510 bp, Arabidopsis thaliana columbia
cgcgtcactcctcttttttggtcacgtttcctatttttgtactaatacttcttcttctctctacacatattttgttggtaatcacatcgaagattcgaaattggatcacatttggtaatcaacttttttttccaaagtctccacgtgtatggacgattacatacgtacacttatttattttcgctttggtggataaactcgatgttaccaaaagtatacactatctaattaccgaaccaaaattaatctgaaacccttctatatatatatactttctttgcaataacagagtgaaagcaaacattcagaaaaaaaaaaaaaccattttttttttcttactcaaatcttttttagtatcattctccaaatgaattggactagaggaaaaactttaggccgtggctcaacgtagcaccgtttccgccgccacttgtcacgaatccggcgaaacactcgccgtaaaatccgccgagtttcaccggtcggagttcttgcaaagagaagccaaga

SEQ ID NO: 24950 - DNA, 520 bp, Arabidopsis thaliana columbia
ttagcagtggagagaggttcaaggcttgggttgagttcagaaacaaagactctacgattacggttacactcgcgcctgaaaacgttaagaaacctaagcgggctttgatcgaagctcccagagtgctcaatgaagttcttcttcaaaacatgtacgccggttttgctggttccatgggacgtgccgttgagcgtcacgatatttggagctggtcgtttgaaaacgccgccaaaaacaactaaaccggtttggttctgtttataggctaagtatcgtttgttttgtttttacttttttagtaattgctgcatactactcagtggtaactagagtgaataattatggtttgaataaaacaagccaagtgcgtggtttcattactccggattgccatatttgtattcagtctgattaattcagatatctcaataaaaagaactttgttttcatgtattttataactgattaactagatttgcttgaaccacatgatttactaggaaacatcgatttatgttca

SEQ ID NO: 24951 - DNA, 516 bp, Arabidopsis thaliana columbia
cacatcagaaatttacttatatacaactttggatgggcctaacgacgcattgcctccagcacgagaaccagtttgcgaagatgtggttcttccgttatttgcctgataccaataattatactataagatctctcatttctctaacaaaggaggaaatcatatagaacccgactaagcaaataaacttgcgtaaatgatttacctggccaagcctatgagtggatgaatctttggttccttggttgaagaaaatctcctgacctttccttctcttaggaggtggagcagatgcaaagccagaggaaccaatagctccggttatggcagcatttgcgtgttgaagataagccaagttgtgggaatgttcaccgtgaaaaagagattgtctaacttcactcccttcaaagtttttgcaatccaagcatttgcagttctcagaacaaagaatgtttgcttgaaagcactcacaatacttcttaagacatccggatttcttgcagtgacagcctttgttgt

SEQ ID NO: 24952 - DNA, 460 bp, Arabidopsis thaliana columbia
cgcagtgaacggaacaacatctcttttaaagtacttccaagaaactgtctcttctctcatgatagattatttgatatcttagaaactctctcacaagttaaagtgagtttagaagcaatcaactccaatacatgattagtgaccacaaaatgtaaaaaatatctctcaacttgactaataattttacaccaagagggatcatagattcgaatattctagggaccccatgacaatgaactttgccccattctagctttggtttcttcagctaaatcattcattcaactgaagaaaagtttccaattttccatttgaactttcttatccaaagattgagactttatatcttcagagaacaaatcttgggaaggggatagtggattttctcgtcaccttgccgagagattaccccaaattatgaaacctctaatcaatagtaactaacctgaagcaattggag

SEQ ID NO: 24953 - DNA, 631 bp, Arabidopsis thaliana
aaaagtcttgttgccctattgtaatgtttgacggattgtcatccacactgaggttctgattaaaatgcttttcttttccgttttttcttccagaaagagggaattccagagctatcaatggaagactacttctcgaaaaacaacgagtttgctacatggctgaaagaagaaaaacgtacttactttaatgatctcacgaccgaagctgcacgaggactgttctcacgatttgtcaagagatggaacagaggaaaactcgagtctcgatactacgagggaatctccactgccccacgaacagctcacgactggatgatcaagcgtaggtgacacacagcaaaagcaataccttcctcttctgtggttcgccggtcacctctcttcttgcttcttgtacacgtgaaggttgattgcatcagagatatatttctatgtagtttctctacttagaacttgttgttgctgaactagttagatagattgtcgtggagagatatgtagtcggttttcagagtaagacaaactttacatatccaaggtcttaaccaaagttgccgaagaactatctgatgaatcgttatgtaacattgagaatttgatatccggttaagggagaaatagaccgttttga

SEQ ID NO: 24954 - DNA, 528 bp, Arabidopsis thaliana columbia
tgcctcgcatgtttttattcttctctttttgttaagacttaagagagcatgctagctatacttttctagaagtcttttatacctaagcaaattgatttgtcataaagaaagaaaaaaacaagaataaggatcggatggttgagatttactatgttttagagaagaaaattgatttcatttgtgttatttgtactatgtttaagagaagagaaataatttactttgtgttgcttaattactttggcagattcacaagaggagcgttcgttcgttttcatcctccacgacaggtccctatttgcagcttagtctcagtgcaaaaccctcgtcggaaggcgtcgtcaacatcggagaaatcgttttgtacgaccctgctaaacaagagttactcaaccttacggacaaaccaattccagaagaaatcgtgacagccaaatggatcggagcttccaagggatgggcattcttcttggacacacaagaccgttgtgtactcatcaccgactctttgaacccatgggcatgcaa

SEQ ID NO: 24955 - DNA, 468 bp, Arabidopsis thaliana columbia
cacgttctgtctgcaactcctctcgttcatccctcaacttttgcaacaacttcacagctatatcaagcttctggtttagcttttccattgtaccatcagattttgctatctggctctcaagcatcgatttctgagccattgcactttgaagttctaccatgatcacctcttgctcgcgttttactgttataaatctcactttctctttcgctactgctatctccgtatcattccttcgcttcaattcctcagaataggcactttctgaatgtttagcctataataattacctataatatcagtatactatcatattttagctgttattgcgtgtaactagaagcgaccactattaagcctagtgatctctccaagtgatacactagcggctccagtatagtatatatctccagctagaacatctagcaatcatttccacaaaagttttaacagtgccaactaaattat

SEQ ID NO: 24956 - DNA, 599 bp, Arabidopsis thaliana columbia
gactataagtaaataaataataatttctagtctaatatgttaatatctttaaagtagggtagttagggtttctcaataagacaatagacatattctctttaccctctgacgtggtatcagagctagggttttaagaaacggaaacaaaataaagggagagataagagatcatgtggacgacgacgacggtggtaacaaagatttgacgataaccgggtaataaagctgtggaaggcgacggtgggactggcctcacgatggcagaaaaagccatggcttccccactttatctccattcttctgatggaccagagaatttgataactaatgttcaactgaagggtgaaaactatgaagattgggcaaagcatgtgcggaaccgctcacgaactaaacaaaaattgggattcattgatggaaccttggagaaacctaccaaggaagatgatatggaacagtaggaggttgtgaatacaatgctagttgcatggataatgaatacattcgagcccacagtacgcacttcgatatcaagggtggaggaagccccagtgttgtgggatgacttaagctgacagtctcgcctgggaatgaccgtg

SEQ ID NO: 24957 - DNA, 456 bp, Arabidopsis thaliana
aactgatggtccaagagactctcctgccatcaccgaactccagtgacacggaactaaaggcgttacagctaatagggcagatctggagccaaaggatgtgtcgatgaaaaactgctctagaattttggcaagggcgatgctgaagaagtgcgcctcttgtgttgtcgggttcaaaggtggatcttgggttgactcatgattcggggcaaggcttgtagagtaaagattgagtgttgcgttgtacagcagaccttaagagaagaagactaaagcaaatgaaagtcttggattttgcatgagagaagaacttaacggagagaaaaatgaagactagaaggttaagacagactgaaagaggttaagaagattttgcaggtctagacgctagtgaagatgagtcttattggagttggaaagcatgtttacagaagatgttttgattatcgtgtctgggag

SEQ ID NO: 24958 - DNA, 539 bp, Arabidopsis thaliana columbia
aggttacattagcaacatcgacgaccttcgaattaagaaaaaccctagcaatgtctctaaaatcatctccaccacattcgcttcgtcgtactgtcttgaaggtagagctggaatggctccacatgactccgttatcaaacttattaatccatagtggaacactttgtgctcgcacaagtaattatattatgcatcaaatctttctttgataatcatcttgctttgatttacgttcctaaaacataaaagtgaaattagcaaactagcaaactacttcgcatagaatcatgacggattatggagttacgtacttggccttgaagcaacaaccataacttatcgagtttaacttagagtaaggcttcgacagattctgtaaaattttgacactttgatatttacaaacatgtgttattcgagatctaagtctatcttgttcgacgagattaactttgtaacgcctcaaccgtcccgatcaatgagcacacacggtcttctttcgggccagtcgctatgtttggaggctttaaagacttgtt

SEQ ID NO: 24959 - DNA, 317 bp, Arabidopsis thaliana columbia
caaacagagttaagagactaaacataaatggtttcaagaaacaaaacaaacggactcaatgttacttgaatagggtttcagctgaacgcgaaggaccagcaaacacaagcttgctctttgatcttggtgtcatgaacggaccaatcacagtataaaacacaaggtaccaccaaggaacattgataaaagcctgaaaatattgatcaacaaaacattcaacacgaacatgtcttaatgctaagaaacctaaaacagatatctactctagtttagagctaaaggtccacaggaaaatgttacctgtttgaagaccaact

SEQ ID NO: 24960 - DNA, 505 bp, Arabidopsis thaliana columbia
tctagtaacggtccgccgctctaaagaactacgcgaaacgccggcgttgcccagcaatctgacttccaataccgcagaagcgcatcttctgttgcaacaggcgattgccgaagggctacgtcgctcgatacccatgaagttcagcccatcctgcaagcgtatggcatgaacacgctccctacctggattgccagcgatacactcgaagcggtgcatattgccgaacagattggttatccggtggcgctgaaattgcgttcgccggatattccacataaatcggaagttcagggcgtcatgctttacctgcgtacagccaatgaagtccagcaagcggcgaacgctattttcgatcgcgtaaaaatggcctggccacaggcgcgggtccacggcctggttggtgcaaagtatggctaaccgtgctggcgctcaggagttgcgggttgtggttgagcacgatccggttttcgggccgttgatcatgctgggtgaaggcggtgtgtag

SEQ ID NO: 24961 - DNA, 608 bp, Arabidopsis thaliana columbia
  unsure (1)..(608): unsure at all n locations
ctnnnnnnnnnnnnnnnnnnnnnnnctaaagattcacccaacgttttggtcgttttgttagcacgaaaaagggggcgtgatgaaagttcttaactctctgcgtaccgcaaaagaacgccatccagactgtcagattgtgaagcgaaaaggacggctatatgtgatttgtaaatctaatccacgttttaaggccgttcagggtcgtaagaaaaaacgttgattcaaaattcgacggattaacgatatttgtctgattaataatcagatcggattaatgttggtgtgtttataacaccaacattaattttcctggggatatattcttcctgttcatttgaggccaactgcctgacgtttctctccgaatattccattatcttaatgttgacttgttgnaccagcttcgcccctgtatgctggcatcaaccctcttttagactgaacacgccactcagtctcctccctttgcggcgcacgtgcattttcactcaaactgttaagatgataaatgtggtaaatctgttgggtactacataaaaacgtgtacgccacaggaacagtctgatccaccggtaccccgtcgccgacgttcgagtgccagttagagt

SEQ ID NO: 24962 - DNA, 487 bp, Arabidopsis thaliana columbia
catcatccattgggaatggggttcagttcctcaatcgtcacctctcttcaattatgttccgtaacaaagaaagcatggagcctttgcttgagtttctccgcactcacaaacatgatggccgtgttagttttttctacacttgaacgtagcttatgtcataaacaatgcgtacttagtatatgacactgactctgtactctctctgtataatgtgcagcctatgatgctgaatgatcgaatacagaatatccccatacttcagggagctttggcaagagcagaggagttcctttctaaacttcctctggcaacaccatactctgaattcgaatttgagtaaagatcttttgctattcgcgtcatatctgtttttttctgtatttgttagttagcagattatgttgccttttttcttatattggcaatgttctttggtgaagactacaagggatgggatttgaaaagggatggggtgacacagcacaga

SEQ ID NO: 24963 - DNA, 589 bp, Arabidopsis thaliana columbia
tgcatatttccgacaagtcaagcacagcttcctcacctcatctactgtcggatcaagctgaaccttatagcgggcctgagaaatcataaaataaataagaaaagcgtaacttaacaaaacaataatgatagggtgcagggaaaaaaattgtcaccctgggttgccatctctcatactgagtgctcaaattttttccaattgtctcgagagctttaggcggtgccatagaaaatggatctgccatcagaaagaaaaaaaatagagataaaattgactgtggcgacaaaaaaaagggataaacacagaaaagaaagagtgtaataggattgagtaggccaaagtttcaacctatccatgcctcgattctagcacaaggagatatctttataacatccggcggatcaacagtaatgtttaaacacagaactaaagctacacatcctgttttcatctgcaaagaagaagaagaaaagttaacaaagaatatgagacttgcaagaactcccctagctatcagatccaatgaacacgtgatttagcttctgacgagaaatagaattatttctgaagagacattgagattgaaacg

SEQ ID NO: 24964 - DNA, 406 bp, Arabidopsis thaliana columbia
tacgcatgttgggccttttggtcacttcctcttatcgtctatggattcttgccccaacttgctctcctttatcaatctagcgtctttcccaagtcatcagatccatggttttggctttacatcgttttgttcctcggtgcatatgggcaagatctactcgactttgtattagaaggaggaacttatggcggatggtggaacgatcaaagaatgtggtcgataagaggattctcttcacacctatttggcttcatagagttcactcttaaaaccctaaacctctccacgcatggattcaacgtcacaagcaaagccaacgatgacgaagaacaaagcaagaggtatgagaaagagatttttgagttcggcccctcttcgtccatgttcttgcccttgactacggttg

SEQ ID NO: 24965 - DNA, 493 bp, Arabidopsis thaliana columbia
gcatattccagttatcagttacacatctgccttgctcttttacatgagttggagaatctgtctgcccataaaccacctcaagatttgttgtttgaggtgtttcatactgagtattatgagaaggtatagataccaaacactgagattttttcctttctttattatggataaggatctcgagctgctggatttgctttttcaacagtaatctagcaacgatacaagtgtcaaaagcttagaaactacgtcagaactcaaagtatactctcagttgtgatgcaattaacgagataaaaaaaaaaaaatcagacatgatatcagatgtttcattagtccttacatctaattccttcttgctgtataagttcctaacaacttttctgtgtaatgtattacagcctattgaagaagctaaatcattttccaaataggacaaagcaaagaaaaagggaatatagttgaagagtgatgggaatgcgaacctcttttgatg

SEQ ID NO: 24966 - DNA, 511 bp, Arabidopsis thaliana columbia
caagttttgcaatctttttcacaccttccagatgctgcttatttgcgatatccgccgacttcaaactcatgtttttctcttcattgcggatctcaacttctttggaagcaacgtgaagatcgtacttcagataactaatctccttctcagccaactgaagattagtcttcaacttttccacatcagcttcagctttagacctctcctcactaatccttactatcatctcagatcgttcttgcaacgatctagtgagtgctgcattgtcagaagctgcccggtgtagtccttcactcaattcatcgatctttccttcaagctcggctttgatcttatcccattgactggtcttagcaagaatcacatcctgcagcttcttatcactctcttctttcacaatccttatctgccttgtacactctttcaacgcatcatccaaatgcgatgctcgatcctctgcagtgagctttaagagtgtaacagattcgagttgacgtttaagtgccaaagt

SEQ ID NO: 24967 - DNA, 515 bp, Arabidopsis thaliana columbia
  unsure (1)..(515): unsure at all n locations
cgactcgatcctacagatattttcagctctaaagtaaaacgctccctgcggatcatcgaagggattactgaatgccatattcaactcctgtcatggaaaagtggttgccagaggtcgattagcccctgcatcaagccaccgcgccaacaaagcgcatcatgtccgccgtcaacctgacgccagaaaatggattcttttatggggtgtaattgcgcatacagcgcctgattggcccgcatgatcatcggctcgcgaatacccgcttccagcacaatgcgcagaccttcggcgctaacttcaccagcttttagcttttcaagtaacacgccctcttgctgcccgccccgatgcggccaccagtacgatcctgactggcttaatacacagccaaagcgttcaggccagtgcagtccggcatacagcgcggaaagccaccaaaactctgcccggcaaccacggtgcgatcggcacgatccgtaaacaggggcaatagcttctttagagnnnnnnnnnnn

SEQ ID NO: 24968 - DNA, 560 bp, Arabidopsis thaliana columbia
gcaggtagaggatcccccaatggatgaagcttgggccacaagatagggttgttgtagaaactagagaaagggctctgtagattctgaagctgcatgtgaagctggagcctctccagtgccgaattgctcagattctgaggactcttattgttgttattgttgctgaggttgttctcagtagaatcggttatggagtcttgacgattcatttgtttctgtcttcctagaagtttcttcttcagttttgtgttccaataattcttgatatcattgtcagtccttccaggaagctgagctgcaattatggaccacctgcataaatatatcacattaaggttaaaactaatagaaagttttttttagaaaactatgtatttagaatcacgaaccaagttcaagattaaaagatataaatgtataaaggttcttacaaagacaccaaaacaagaagaaagagacaatataaaccctaaattctatgtgagatccatagcttgaagaaacatgggcttgcatgtgtttcagcataagattcatagacaaaaggtaaaaagacaaga

SEQ ID NO: 24969 - DNA, 572 bp, Arabidopsis thaliana columbia
catgccacactataaaaaggttggttcatttacggtttttcaaatcacaagtgcttacagggtcaggtttggtgtttgagaggcccagcatttgacagaatgcttgtaaaggagctgttaagaaaaaagtaaactgacttccatttagtgcttccgtatcatcagtagatgggttctcgaatgatggcttcagaggagaaagaagcatagcaacaggctcgcctctctctgcgccgcccaaaacctggagtttgtttattttattacaatccatcagcaaatatcgcatagttactgagagaaactatcagactctccagagaaatgaaacactaagttatgacaaacctgccttgaatgcacggctagtgtcgctatcaatgatcaagaaaagtggtttccgtgtaaaagggattaggtcaccagggtaaaggttgtttgaacctaaacaaaaacgagacagtgagtgagaaaagtctgatctttggagacatactcaaatgttaatccgaagaaaacgacttaccagagcttcctcctctaggacctaaccagaggtgattttcatagta

SEQ ID NO: 24970 - DNA, 524 bp, Arabidopsis thaliana columbia
caaattccggaaattagagaaagctgagtctttaatcattgacggaatcagattaggtgttgatcctgatgtcgtcacttacaacacactgatcagtggctattgtcgattcgttggtatagaagaagcttacgctgtgactcgtcgtatgagagacgccggaattagaccagacgtagctacgtataattctttaatcgccggagcagctagacggcttatgttagatcatgtcctctacctgttcgacgaaatgcttgagtggggaatttatcctgatttgtggagttacaatactttgatgtgttgtgattttaagctagggaaacacgaagaagcgtttcgggttctttataaggatcttcagctcgctgggctaaatccaggtcctgatacttacaatgttcttcttgatgctttatgcaagtgtggttatatagacaatgctctagagcttgttaaagagatgcagagtaggtttaaccggagcttatgacttataacattcttatcaacgggctttg

SEQ ID NO: 24971 - DNA, 776 bp, Arabidopsis thaliana
atatcctaaactatatatgtcgaccaagggatgatgcctggatgtctatagctccaaggaggtcgtcccctattcaatatacgtcacggcctgactgtctaagggtctcctcgatctttaacaccgagcctgcggtttttaatgatgatgaggctctggaacatcgagaccgttctgctgaatctgctttggttaaacctggtgtgactgggacattggaagttaaaacataccctgagatttcggaagtagtgagatcggtttcattcaaggattttgctgtactgatcaatctaaaagctcctacttcttcaaagtcctcttcaaatccatcttcgtcttctcgggctcctgtcgatctagtcacagttcttgatgtgagtggaagcatggctggaacaaaactggcgttgctaaagcgagcaatgggttttgtgattcagaatcttggtccatttgaccgtctctcagttatatccttctcctccacagcacgtcgtaacttccctcttcgtctcatgaccgagactggtaaacaagaggcgcttcaggcggttaattcattggtctcaaacggagggactaacattgcagagggattgaagaagggcgcaagagttttgatcgatcgtagattcaagaacccggtatctagcatcgtactcttatccgatggccaagatacatataccatgactagccccaacggttccagagggacggattacaaagcccttcttcctaaagagatcaacggaaaccggattccagttcac

SEQ ID NO: 24972 - DNA, 600 bp, Arabidopsis thaliana columbia
tttcgctagctggtccatttgctggagctgcactctcagtttccatgtttgctgttggtctgttcctatctacagaaccagatgcagctaacgacctggtccaggttcccagcatgttatttcaaggttcattacttcttggactcatcagcagacaactctgggatatgcgtaactctccacagctaacgtctgttcaccctaaacgaaaaaatctaactccaatctccatttccattttcctattgattgcagagctttgcatgctgcaacagtttcaatccacccacttgtaattgctggatggtagtgtcttatgccttggctcatgcttctgtctttcatcagcaatcttactttgaaatttgattgttaggtgtggtttaacaacaacagcatttaatatgcttccagtgggatgtttggatggaggaagagctgtacaggtacttccttgtatataaggaatggtgcatactctattcgaaaactagaaacttaatgttgcttagtgaaaatttgactcataccaagaaaaacgcttcttccaagtctatcttgtcattaaaacaatccaactagtatcaagtatggaaagtg

SEQ ID NO: 24973 - DNA, 587 bp, Arabidopsis thaliana columbia
tacaacagcggtggatccgacggcgtcacactgaggagactgcaattcacatctacaagaatttttcatactccgagtagcaccattaacaactaagttacactctcgttggctaacttctttatccattttttgaaaactcttaaccatcgtctctgtccactcgtcggaagccataacttcaacttccttcttcactatatcatgcaaccgttctctgcacttctccgcaacctaaaatcaaccaaacaaaaccctaattagtaactaatcacaaacaaaagaaaaaaatattactaaacagaggaaattaacgtacatgagagcagccatggccgtcaaagacaccgtagaaatgatgattctcagagttccgttgaagaaacgaaggatgaatcgagacagcgtcttccatgtctcgtcttctaccacaaaccgacgtcgtaccgatcttaggtacatcggaaaagaaactctctgcttccgtaacagaatttgaattcgtaaccgctgatctagccttcttattctcactcctcacattcgaatccagatgtagatttcccggtaacgtcgagagcactact

SEQ ID NO: 24974 - DNA, 525 bp, Arabidopsis thaliana columbia
cttgaagctcatgaaccttggcttgatcatgaccattgacctgaccaaccttcttattaatctttggcaatggctcagccattgcgtctaggtcatccccgcttgatccaaccgctacatacgaataggagcctctgaacagaggatcacttccccatttgctcttcaagacctttgtaatcttcatggcttcatcatcatcattcaatgagccattggtcaagggctttgcggtatcattcttaacttccttgcctgtcaagcaagagatagtggtcatgacagcgtctttgatctcctcatcggtaagtttctcaagctcgagagcttctttgcctgcaaaccaagaaagcaagacctttgaattgctatggattggggtaatggtcgcggttcttctcatccaccatggaattttcacgaacctaaactcggaatcctcccggtcaaacacaagctgcaaagaggggaactttctttgagacatctcgacgaacagcttgttgacaactccatagcctagtc

SEQ ID NO: 24975 - DNA, 427 bp, Arabidopsis thaliana columbia
caagcatgtgatcttgttggtgagagtggccttaggtacgctctagtgtcggctagtttccgtgaattgttaacattgtcttggatcttggagattgatcgtatcaagaaagaagaagtgatgtggtgaagatctatgcagtcttgaagagagccacgttatccctcaactaggttgtaggagaccccagcgccagaaaggagatcggtgagtatcccagcctcggaaagagctgtttggagggtttggaggaggaatgagagaatgttggggcttatgttgatggagatggatagttttaaggaggtaaagcatgcatctggatatggtgtgtatttgcagaaacttgtagcagaagtatcatgagggtttagagaaggttgaatcgaatacgagaagacggaaggagtgaagaagaggaggaata

SEQ ID NO: 24976 - DNA, 560 bp, Arabidopsis thaliana columbia
  unsure (1)..(560): unsure at all n locations
aagaagctacggaatgtacataatgtgaatgatttgaaaatatactattcctctagtgaataaaaagcaaataaattggttcttcataatcattaatagcaaattaaacaaaaaaacagagtaaacacatatattggatatattgggtctgtacataatatgggttcatgtctctcctttgtggagattatggaggatatacagagaagcagaggacaagaagatgcaaacggaataactaagcaaatctagaccggtggcgatagtaaccatcttgcttctctcgaacatcttcactagcagaatcataacaatgacatgtcccactttggttttaagctcatcaagtgagctgatcttcatccattttggtctctccttcattgcaaacataccaaagagggaagaggatctaagggcacgatcggattcaggtggaacatcatgaggcgagtgactgatgaagagtcatacaaacccatactaaatattaacatcacagtcgcagctagataaacatctgcaatcanatttcacacacaagtatatatgagtattat

SEQ ID NO: 24977 - DNA, 459 bp, Arabidopsis thaliana
accatttgccagcacttttcagcagatacattcgagaaattctcagtggggtaatcttctactgagacctggaaataatactgattgatcagtaacttaccaccttcatgtgttctgcatgataaatagatattcagttatattctcgaaaccactacgtagttagtgtaccctgaacaatggaccaagaagccctgcatccagaacctctgagatgtagttggttaggtttgttgggtcaagcacacttaagaacttaacacggctcttgaaccctgtaacatacaatcaaaagcaaaagtctcagaagacataaaaaataaaatactaaagtataaagctcatccaaaattctcaattcatcaccttttgggtatatggcctgtttactgcaccacagctttttaacaacgagagatccagaactcaaaagctcaacagagagacttaacctattgg

SEQ ID NO: 24978 - DNA, 377 bp, Arabidopsis thaliana columbia
gttaatagagctagagtgtacttagcaccctagatacatatgaaaagggtctccttattagtcacatgggacgattaagtaaagagtaactcttaacacaacaagggtcaaaacaaaaacaacccttggaaaaataaaagtacaataattgaaagacatgtcgtcgaaattaagtatggttctcgcttgcatacggaactagtgcgtataaggcacaagacgcggtcggaggaacctcagtgacaccgtgacggtgaagctctgtcatcacaccgtcaacagccggcggatttaatcccgacggcagtggcagccatggcctcgtcaatagatctcctatggctgcatccatgctctcttttgactgttccatttat

SEQ ID NO: 24979 - DNA, 501 bp, Arabidopsis thaliana columbia
gaaagagttgctagcagattgtgacatctctaggaaaacaaaaggaccttttttaccgagagattccacaatagtctctgcacattctctgctgtatttcttctccttcatagaacacctgatgttaaaatctgtcacatagtcccaccaaacccaagaagtgttcttctccttagctactttatgaacacataactgcctcaaattctcataaacgacgtctttaccattatatccatcttcaaattcttgcttagtatcaagagcacaatacctcccttggtttatacactgagtcctacactgcttgctaagtagaagctctttgggacaaacccaagaaatgtagtgaggtctgaacaaagtataaccgcctttttcaagaatgtgagccattcccttaaagttcttaatgaaatctatctgtttatcgcagtgtacaccacattcatcattagtattagcccatagctcatactcaactctctcatcagggtttgg

SEQ ID NO: 24980 - DNA, 315 bp, Arabidopsis thaliana
ttatgtttgatatattttcagttttcaccaggatgacaatcttcgtgctctctgtcttgccagcaccgctttccccactcaccaagatcgcctggctcactccctcgttaatcattttcctgaaaggttatgtttttggtgatcataatgccgaaaaacagttgtaagtgaaacaataatataagctaatttaaacggcaaaagagttacctgtacgcagaatctgcaacggcgaaaggatgtggacacaactcaccaaatgctgtgccctagtactgtgtcattgtctcacttccacaaaggtggggcaatctc

SEQ ID NO: 24981 - DNA, 526 bp, Arabidopsis thaliana columbia
taggatcccctgaagtaaaaagcagagagagttagtttctctcagagtaagtaatcccaaaactacgatttggctacttacacttcctgattttatgatttctttatacctctcagttttccaatcctgcaaaagataagaatccaatcttttaacatcaacattgcagtaaattatagatttggttcttcttcaggcaagtgacctgaagagtatcgattaacttggctcgatcatcgtcattctgaggaggagagtcaaaaatggtggaagttggccatccattttctttgaaataccaacgcattttcggtttcccacctccgactagattctgaaacttatcgtagaactcgaggctccaatcgagagactcagaggaagaaggaggacatcgaacatcgaaatgcgagaaagcatcgttgtaagcttgatggtgtagattctcggattcgagaatcacgccgtcgcaatcgagaatcagagcttctagatgacgtaaaggcaatgctgagacaggagaaga

SEQ ID NO: 24982 - DNA, 535 bp, Arabidopsis thaliana
ctttctcaaactgtcataaatttcactatgcatgtaaatgatttaaatttattttagagtagggtttttcactacatcatgcatgtatctgttcaatcgaaaagtaacaaataaatattggaaggtaatcaaatcattcgtaaaaaagaactcccaaaaataaaacaataacaacgaaaaaaaaacatggttaattagtaaactcagacagacacataaaaaacataaataaatgttttatatattaaaaagagtcatcaaaaaaattgaaagtgttgagactttgagagatcgatgtatatgggtgtgtatatatgtatattaagcttagaaggtgacgtcagggacgattccaagctccttgaaaacttgagggcattcagcgagaggagtcttcctcatgaacccaagtgggttaatggttcgagtctagttggagacaatgccatcattggccgtgagactgattctggctgcgtttcttaggaattcttggttgtcacgtctccacactctgggtcaggtgattggagga

SEQ ID NO: 24983 - DNA, 561 bp, Arabidopsis thaliana
catgcaacatagggtggtagtttatattatgaaatgtttacaatttcctttgtcttcctgcagatacctgttagcaaggttcagacatttggagacctgcgaaatgttctgatgaaaagaatatttctctctgctctacattttcgaattaatacgagatacaaggtatgagggtgttaggatgtcgtctttccgaatacatttgttctcaattttactcaagaagagaaaatttgttctcattttcttgcacagtacattttgcttttatagattaatgaatctcaaatctcagtgaaattacaaaaacggctctttgatgggtttgttcaaataatataactgtgttttcaataatctcgaggtgcactatctgagtaaaaactctttttcagttcatggacgtagctatattatattgaaggttttaggaattatgtctattataactagactcaatactgtcagtgaattttgatgatgttatttttgtacctttcagagttcaaaccaccatttacgtctgttgaactggaccatagtgatctgggaagggaagga

SEQ ID NO: 24984 - DNA, 535 bp, Arabidopsis thaliana columbia
gaccttgaaattcttctgaaaatttgtgccaaagccttactcatcaccttcacaatgattccttcaaacaaccagtagtctttcctattcatcctctccttcttcttctcttcctccttcatcaactcatccaaagctgatctcttcctcttatcccctctctcaaccttgtcattctcttcatccccaaacacaagtttcgagctttcccctctctctttaacacctaaaccaagagcaaacccaaccttcttcaacctaaagtcttcatctttcttcttctcatcatcatcattatcatcatcatcaaccacaacgtctttaccttcacaaccagcagaagctctctcaatctgtttctgaatctccctctcttgcttctcctcctcagctaaaccactcttaactctcttcttcaaccttacacttaccagttttccctagatactttataaactcagtcaaagttgcccactttgtcgaattcatatgaacatgaagtctatcgttaatatactcattgtagacaacagtg

SEQ ID NO: 24985 - DNA, 615 bp, Arabidopsis thaliana columbia
  unsure (1)..(615): unsure at all n locations
ggtagagaatctacgcatctctcacttcacactctaaaacgacggcgttttcgtcttataaagtcttctccttttctctgttttgcaaatatagcagaaaactaaagccctaaacctaaaagagacaactttcttcactcacagagctatagatgactgatgagaaaagctctatgtttaacagagagtttatcagccatagcagaaaactctaccacgttgctcaatttaaaccggagactaacgggtctcactcgttccggcgagaacagaaacgctctcaagctcttcgccgatgttcaccgttgcacaactctgagaccagaccagtacagtgtctcgttagctattactacagctaggcacctccgtgatactatctttggtggtcaggttcattgctatgcgattcgctctggtttattgtgtcactctcacgtttccaatacgcttctttcgctatatgagagattagggaacttagcttcgttgaagaagaagttcgacgagattgatgaacctgatgtttattcatggacgacgcttctgagtgcaagttttagcttggtgatatagagtatgcatntgaggtgtttgataaaatgctgagagaga

SEQ ID NO: 24986 - DNA, 507 bp, Arabidopsis thaliana columbia
cgttcttgctttttgagctactctgcaacagttattgtgtttatgaatctgagttctacaattcagaaataaatgattttcaaagaacagagaaaaatccgagattcgaaactagtgaacacaactttcaaatcagggttgagatttacatccaagatgctgcggtttaggaaaacaaagagacaatcaagaacaagatgatgagcaagagtgtaatttgtcataaactgtaaaaccatgtctaagacgagcagcagtagctcgacgaggtactggtggtctgtgcggggttttgtttgaagatgttcttctttccgccagacgaaccttcagcagtaagactcggcgtttccaatatctgcaaataaagaaagattacgacatactcatatatcctcagaacaaaaatctagaagctagctgcaaaatttactaccttaagaacaagctcttcaaaacattgctcaacgttgactcgagtctttgcactacactccagaaacaaac

SEQ ID NO: 24987 - DNA, 620 bp, Arabidopsis thaliana columbia
cgagaagagtgtctttatatatgcataatcaatcaaattatatagacctatagaagggacatttatcgaccgtagcattagtacaacatgcatatatatatggacgtgatcaccgttgataagattataaagcatatattgatatactagacctgagaatgcattggggatcttgattttgctgatttctgagtagccaatgacttcgacatcgccaacaaccttgacgtcacagctaagggaatgagccaccgaacaaagagcaaacacaaagaggaggcaaagagcacctcctccgcttttcggtaatatcctcatgagattcactttgttgaagatatgtaactagtagaggagaaagaagatatgattctactgatgagatcgcctcacgtgtatatttataggttcgttagggctattattttatcaattcatgaattaattaatttagtgtgtttgtttgtaaaagttactattcacatacttggtggtaccattgccacgaagatgagaacctaaataaactgaatatattgatacaattacattgatttggtctttagtttgaattcgagtttcaaacattgttaaccttaaaacaaactgaaaattttaga

SEQ ID NO: 24988 - DNA, 548 bp, Arabidopsis thaliana
ttctgtataaataattgcgagctgcataatccctccgactattaacttacaaagtacccttttagccaggctttttctgtcttatttttttgtcattaaactatataaccaaacacaaacatcatctttctccttcatttcacaaacttaaaattctctgtttttgtttcttcttctttcaaaatctcaagcaaaagaaaaaatggagctattcacaaaaggtaacaacgttaagttacgtagccacctagataagtttttagtcgccgacgatgaccaagaaaccatccgtcaaagccgtaaaggagatgcacggcgtgccgtttggacggtggagcccgtcgtcgataaacctaatctgataaggttaaagagcagccacggcacgtacttaacggcgagcaacaaaccgttattgttaggtatgaccggtgagaaagtgactcaaacggcgtcgtttaacaagctgatggattggcaaacgcagtgggaactggagcgagatgggtttcaggtgaagctaaaatcttggtgcggtaagtggatga

SEQ ID NO: 24989 - DNA, 572 bp, Arabidopsis thaliana columbia
cacgtattgttttgtgcggatgctggaagggctcaaaaacgtcggctcaaccttctcgcgtctcaccaaaaagattcttcaggaccagatgggctgcaacgtcttcacatatgttgatgatatagttgttgcgagcaaaaacaaagatgatcacctttcagacctcgcagaaacattcgccaacatgtgcgaagccgactccggctaaacccggaaaatgcatttttgatgtacgccaaggcaaaatacttggttacctcatatcatacaaaggaattgaagctagtctgagaaaaattcaggctatcatggatatggcactaccacaatccaccaaagacatcccacgactgataggtagattggctgcacagaacagatttatctcgcgatccactgaacgaagcctttcgtttctgaagcaatatctgtccgacctagcaacattaacaagtctagacccagggctacccctactactatacatcgcaacttaacccagcgcggttagcgagccttagtccaagaaaagactagagagggcaagactccccaatgcccagtatattttg

SEQ ID NO: 24990 - DNA, 596 bp, Arabidopsis thaliana columbia
gtgagctctccttgttcaccgtctctttactctgatcatttttatgcttcttctggctctgatcatttcccctttgagggtcttcttgaaattcctccacagctttctgccaattttaacaacactcaattatttcagccctaaaccatcaaaagctttagtctttcctaattctaccaaatccagttcaagaagtttatttataccttgttccattgtgattcggcttcaggtagccttcttttcccaactggggaagcaccaagaacagcatcatctgaaacctgatgatgatcctcatgagatgattctccagctctgatcaatctttcccctttcttgtctgaaccaagaaaatgaccaatttgaccaccaccacaatcaccaaacggaagaagactagcaggcatgtctgctgcaaaaccggaaacagaactgggttggtaatgagagaagcaactcatccctggattatccatcgccatggaaggatggtaatgagagctggagaagcagcagcagcagcattgacaactggatccaatctgcagaagagaagaaaggatctgcctttgcatacaagggcattgatgtaa

SEQ ID NO: 24991 - DNA, 578 bp, Arabidopsis thaliana columbia
gtgagtgaggttaacaaagaacacatgcataaatagaccgaccttgaagattgtctaagttcccgattagaggagggatttcaccggagagattgttgacattgaggtataaatcggtgaggagaggcagatttgagatatctttaggaatatgaccggtcaaggagttgaagtgaaggtataaaccggttaagcttgtgagaagaccgattgaaggagggatagttccagtgagacccattccttgaagagagatgttagcaacacggcggtttccgtcgcacgcgacaccgtcgaaggagccagaggagcaagggtcggcgtcgggagtccatgaagtgaggaaacgtttttcagggtcgagagaggatttgatatcgaggagaatgtcgagctctgaggaggaggaagacagtgcagaagaaaggaagaagaagaagaggatgagaaagagtgtgagtggagagaccatgtttggttggagagaagagagagagagagatgaggaagaaaatgaaaatgactctctcttgtggttttgaagaaaaaatcttgtcgattgtatttataaaatagta

SEQ ID NO: 24992 - DNA, 601 bp, Arabidopsis thaliana columbia
  unsure (1)..(601): unsure at all n locations
gattgaattgtgagaatgccttacatttattttcaaggttagagatgtctgctaccgtcctcctggaacacagttgaatatcttgaatggagttaatttttccctgcgcgagaaaaggtaattccggctgtttcttgaggtactgtgtataaacaacatgcctacttaatagttttgtgactctattactctttgcagctttggcttgatctttgggaagagtgggagtggtaaaactacccttttgcaggtttgttttgttgtctcacgagcttgtcatcacacacagctatccggcactgttctttgagttgtttgtagtctgtagcaacttttggggttttcttcttcttttctgtagcttcttgctgggctaaacaaaccaacatcaggttccatttgtatccaaggatatggggatgatggccagccgacggganatcctgacttgcttcccactgaaaaggtgggcattgttttccagtttccagaaaggtaattctcattatcatcttttttccttttttttttacgttatcaggtttaggtgctgctgtttaagtgacacgaaaatatcgatgtatttttcttttttgtgtgt

SEQ ID NO: 24993 - DNA, 286 bp, Arabidopsis thaliana columbia
atcccctaagaataagcataatcttcgttgctcgttcctctgatgtcgccgtcgaagccggatccgaggaagaattagacgatctagagcagctccttgcggttgacgaacaattgcaggaagagagaccagagcaacaatctgaagcggagacggtgagcaaggcgcacggagtcgttgtggaactcaacggagacaatacgaagcgattgattgatgggaatgagtatgtgatggttttaggttacgcgccgtggtgtgcgaggagtgctgagctaatgccgag

SEQ ID NO: 24994 - DNA, 548 bp, Arabidopsis thaliana columbia
tcgatcccctcaccgtcaatcccactttaatttgtctccacatattaatatcttatcaataattgaaacagtaccaatctataaatctatagataatgtaataaaattttgaatttactatttcaactaaaaatattatcaacttcttctccaaaaacgcggtttcttcgagtttaagaaactattcatctccaaactttcaaaaaaaaacctaaaacaaaaaaaatctctttccttcttctttctccatcaatggcgtcaacaaaaccaaccgatcaaatcaaacaactcaaagatatcttcgctcgtttcgacatggacaaggacggaagcttaacgcagctagaactcgccgctcttctgcgttctctcggaatcaaacctcgcggcgatcaaatctctcttctgttgaaccaaatcgaccgtaacggtaacggatccgtagagttcgacgagctggtcgtggcgatattgccggatataaacgaagaggttttgataaatcaagaacagttgatggaggttttcagttcgtttgatcgtgacgg

SEQ ID NO: 24995 - DNA, 450 bp, Arabidopsis thaliana columbia
ctttgatgttctaatccataccggaagccctagttctacaagttggtgagcttgatacagcgaggaaagtatgggactacatcaaagcaaaacacgttggagcagaacgtgttaagttagctacatcaaactcttatggcagagttagaccggtgtacgatgaaagaaacagagagaattaatgactttgatgaaaagttagctggaaatttaaaaaaatcagcgtcattaggagttatcattgaagaatcaaggctggtcaagaagttttttaagagtcttccttgaaggaagtacatacaaattgtagcatctcttgaacaagtattagatctcaacactacaggctttgaagacatagttggacgtcgtaaagtgtatgaagaacgtatttttgatgaagaggatgttcaagataagcaaagcaaacttatgtatgcaaacacggag

SEQ ID NO: 24996 - DNA, 289 bp, Arabidopsis thaliana columbia
agatgaagtaaaggagctaactttatgtttcaattcgatcactttatactcaaaaatcaaaatttacagagaacctgcttgagggagatagggaaagtcaatttagaggagaattcaggaacagctacaatctccttggtgagaatcctccagctacgacaaacgccggcacaagccaccacgtttcgccgcgacggccaatcgccgccgtcaacagtctcaaccctaatcaggatttctctaagcagctcctccgggagctcctgacagctgaaagggtctgaactat

SEQ ID NO: 24997 - DNA, 580 bp, Arabidopsis thaliana columbia
gattatctatatatatatatgcaaaccttacataaacatttgacctaggcatgcagtctaaaacatcaattcacctgtctatgtcctcttgaaccaagatgaggcgttgcgaaagttataaagttcataggttctaacccagcaatttcgcctcctcttgcgctcttctccttcgaaggagagtccagagagtcgacttcccctggctgttcatagagcttccctatggcatatcttgcaacaagacctcctaatgaatgagccacaaaagatatcttcttcagcccacttctatgcttaacaacacccaaaaccttcacaaattttcaaacatagaaatcaaattttaagttgcaagttacagaggaaacaacaatgcatccaaatactaccgtcattagctagcctttcacccattttatcaacaccatcaaatgtcaacgttgcactattactctcgctacctgcttcatccaatttcatcatcaaaatcaaacaaatcataaaattacagagtaatcaaaaccacaatatctataggtcaagaacacgcacggtgcactagtactttatctgggac

SEQ ID NO: 24998 - DNA, 578 bp, Arabidopsis thaliana columbia
agaggttcccgatatatttaatgtcaaagccagactaatgatatgcagagaatcatgtaacaaaaaaagatcattaccgtatctaatgaaatcagacaagccaaaatctatgaccttgagtatcgcatcctcatttctgctggtaaagagaaaattctggacacacaattgtaccatatgtttaagcaaccatacaaaacaaagaagagggtataggtaataactgaaatatcagcaacttatagaagcaaacagtgtacctccggcttcagatcacggtgcacgacaccttgaaggtgaaaaaatgctgttgcagacaaaatctgcacaagaatacgtttggcatcgacttcagggtatcgtccacctctgcagtaaaatataatacaaggttggaaccatatctaaatgcaaataactaacctacgaaagccgaaataacaataagcactcatataaaagcaagactaagaaaggtaactttggatttacctcgccaaaattctatccaatagctctccacttcgcataacctgaaaccatatcggagaagaagatttgaatatctaacagtagat

SEQ ID NO: 24999 - DNA, 619 bp, Arabidopsis thaliana columbia
  unsure (1)..(619): unsure at all n locations
gcatttgaaacgatacctccttcttcttcctcttctctttcttcgccttcttcgtcttcgacaatgggagaatcaagaaacgcggctacttcctttcgggataaaagagcggtcttgacacgagattctaaagaaggctggaagaggcggactagccttggtttaagattcgtgaagaagaagtttagggagagaatgaagagtgagagatagagaaaaagaatttgtggttccatttttcatcaaaatcaaatcaaaatttctatctcgggttatttgtcccggttgtcttatttatagggagatgatctatgtcaactgatgataacgtgactaatgtatacaaaaaaaaaacttaacggcttttcgtgggatcttggtaatctttcgtttggtttacttaatgtgtgtactctttaagatcggtttaaaactaagaaaattttggttttcgagtcggttccaaatattttggctactcaagatcatgatgcattcgagtttggtgcagggaaaacaactaaatttacttggggttggggaaagagtttatggggccaaaagtttgaaacgtcttggcaacccaagaaatngtgtcaatattggttgatatagagat

SEQ ID NO: 25000 - DNA, 564 bp, Arabidopsis thaliana columbia
gacgcaaggagaggaaactagtattgttggtttcaaggtgttgttttggtttagggaaaatgaaaaagagagggatgagaataggaaacgcagcgttttggatcagagcttgcgtccatgttcctttatattgtagatcttggtcatactcttctcgacggtcttgcttcatttggacatagaagaagttcaagagaagcatgacgagagaatctccgagtaagactaagaaaagacataaagaaacagagatccaccattttctttgttttagctccaacgatcttcttggactcaagatttggtctggttctggattctgaacgtgttctgattcttctggttgttaaagaaaatatttagtttttattttgttttcgagtacagaaacaatattataaaacttatgataagaatttgaaataattaccatgtcttgttgtctgtttggaagctttggacatctccattagttttctctggtacctctgaagtctgaacacccttaaatatgcagatttcattctctgtggaatgactagttctatcttgcaattagaaaag

SEQ ID NO: 25001 - DNA, 326 bp, Arabidopsis thaliana columbia
tttgtattcccaagatcaagtaaatcacccatttcttcttgtttcttctctatgatcacttcttcctttgcttcttcctcaggttttacgtcatcttcttcttttggtggaggttcatgtaaggccgttattgcgttcatatcttcttgctcttcattaacatcctctgttctcgcttcatcatcagcttcatcggcttcagatttaacagattttgaatgcctcggtgtgttctaaagcagatttgtctcttataaactcgtccatgagatcacgcttcttctgtgtgatcttctctatctctggatactcagaagaccgtgcga

SEQ ID NO: 25002 - DNA, 491 bp, Arabidopsis thaliana columbia
ttctcagcattttgtactgccaaatgcagtctctcaccggcgtctctcaagtacgcctgaatcgtgttgtaaacgattggtcggtctttgtcagcattgaacatgatcgccgatgaataagccatgtaatcgatcgcgggttggaggattgtgtcttccgcatcaatcaacaatggtacattggactcttggcatttcctacagatttcttgaatccttccatgagctgcttcgagctccctttcttcttccgcggttaacggttccggttctgagtttgtgtggtagagaggactcgattcggagaaaaccggaaacgatttgagcttccatgagagtttgaagttcggacttttgtattcccacgcagcagatcgctcactcgtttcagaagactaattggacaaatggcagttatcttcacaaccactgagctaaactgttaggacaagaaaacaaataaccggtcattacaaaaccaaaccggaaca

SEQ ID NO: 25003 - DNA, 491 bp, Arabidopsis thaliana
ctatagaaggaaaagaaaaaggatatgatagtcttgacgggattgaatttgtagtgaacaggagaagcagggcatgccaaatggtagatctgatcaacctctagaaggatcggctccactacatcgtgacggatcatctcgaaattagggttattgaaatggtgcatcacgttctctttccttcccgtgaagaaattgtcgaccacgatcacgttgtctcctcgagccatcaaccggtccaccaggtgtgacccgacgaaccctgctccacctgtcacaacaacccgtagcactttccgtttcaagcctagagggattttgccgcctgccgatccgatccggctcatgtactcgatgcttggcttcttatgaatcgtcgctggcagatacgatgactccgatcgcatttcgtattcggaaagcggatccacgtcgtaagggattggttggtggttggatgatttggagaagattgtgaatcccaatgtggc

SEQ ID NO: 25004 - DNA, 926 bp, Arabidopsis thaliana
ccagtaagtctcaacctgaggatgctgcagaggatcaccataaacctcactggtactcgtcagaagaaatctagccccaactcgcttagccaaaccaagcatgttcaatgttccaaccacattcgtcttgtatcaatcaaagtcaaggaacaaacacaaacaacaattccaaaatcgaatcgaaaattgaaaaaaaagaaagaaaggatatgatagtcttgacgggattgaatttgtaatgaacaggagaagcagggcaagccaaatggtagatctgatcaacctcaagaagaatcggctcaaccacatcgtgacggatcatctcaaagttagggttactgaaatggtgcataacgttctctttccttccagtgaagaaattatcaacaacaatcacagtatctcctctagccatcaaacgatccacgagatgcgatccaacgaatccagcaccaccggtcacaaccactcttagccctttgcgtttcaatcccagtgggattttcccgcctgttgctccgatccggttcaggtactcgaggctaggtttcctctgagcttgtatagccggaacgtacgattcgtcgggtcggattccgtaaccggagaaaggatccgagtaaggggttgattgtgtggagcgagggaaaattgtgaaaaccaaagtagcgattgcaatgccaacgagaacgaagataagtctctgttcacggagcatgtaacgcatcggacgagtcaccgtgaaccatggtttgattggtttcgggtaataagcatcggcggttggttgatccgtctcgtgtcgccgattgatcagctcgctcgccatctccaaacctcacaaattgaattctagatctagaatcgaaagatagaaaaccaaaatcgatcaatcgttaagaagaaattttatttttctaggaaaa

SEQ ID NO: 25005 - DNA, 584 bp, Arabidopsis thaliana columbia
catattgatatttcttatgttaactaataattaaaaaatatgaattcaaatctctcttcttttttttaaagaacagaaaggaagaagctaaatattatgaaagtcaacccttaatacaggcttttaagttttaacaaaaatgttaggaatcaagtggaccgaactccgaaccaaaccttcttaagaaaccaaacactctagttgccttaaaataggacggctttggatacctaaccttctctgacttatgaagtcttcactttttgaaattttcaaactttctgcaaatggccacctttttaagctcatcttctctaagtttcttctacacggcttcgcaagctcttccaaccattgtaagtaagtcttttttacattctatttcagtttattgaagtagttcttgatttcatttgttttcttttaggattttttgacggttcccatcaattgcttctaattatggttggcgattacaagaattgaatcagctagctattctgtgggtttatatcaaaacgttggagaattttgttgattctgtttgtggaattgattattctagttcatgagtatattaaaga

SEQ ID NO: 25006 - DNA, 545 bp, Arabidopsis thaliana columbia
cccttgcgcctgccgctgaggttgcgtgaccagctttgtccaccaaatactgagctgagtactcagtgcggacactatccagcttaagtgcaagccgtgcagagcttatcagctcaaccgctacgatagcagcagaagcagattcatctgcatagacaaaacacaaaatggaacaataaatcaaatctgaatgtattcccatcttacaagatacgaataggatcagaatcaactgtgatatactaacataatccaggctataactaaagcaatgtgacaaaagcagtggattcaacacaacatcctaattctacagccacaaaatttggctgattgattggtcaaatgacttaaatctcactgttaacataaaagagaatctctgaaatcatgaaaaaacgtacaaagacaacacacatgctatcaatatctgagagaatctaaaacctatcttggcaaacaagttatcagagccaacaacaacaaaacttaagacattggtgtaattaagcacatgaccagaactgtgatactcaacataatgg

SEQ ID NO: 25007 - DNA, 574 bp, Arabidopsis thaliana columbia
gatgccaacaatatccatagctcgtcgggtagcaagatactcctcggtgtcatccactccatccagtttatagcacttcgattgatttaggtagtggaataacttaggatctcccaacttgaacttttctctttcctacagattgggaaaataaatgaaatccacaaccgattaaatcatgtggatttaaagcagaacgcctaacaataaggtatattggcatcattgtgtagcaccaatacctcaggtggggcagcacataaaaggtaaaagcagtggtaatttctttcaggatctgatatttgacacactcgagacctttccaacaaatatgttcgcacagctgctccagatattctcccacagttgtcaaactgaagctcgacaaactttccaaatcgactgcattttgattgaaaataaaagttacaatgaggatatctgccttgaagcttaaaataactctatagtacaataatcaatcacgtacaaaagtattactattgagttgatactctctaactttaccgataaaaaaggccaagagattagcatagtgtatatgtgattaatt

SEQ ID NO: 25008 - DNA, 510 bp, Arabidopsis thaliana columbia
tccaaaatataatcgaacgaagaacttctcttacgaatgctatactcaccttaaatctagctgcagtacagggtacttggattttggattggacattataaaaacgttgtcctggatcaaaatcgcagcaaattcacatcacgagaatgcctttacatatgggtacataacagattatacattcttcagcaatatatagtacaaataatttaggacgatcgaagcttaccttcctatctatcagtcttggagtatcctctacgccattctcgttatccaaattaaagaaggatctagaacaaaatcactcatatgttatagtttgctttaaccagtgaaacaaaagtaaaaaaacagccaaacagggcaaaataagcatcagaaaaactcacttctcctccttggtcttggtttcatttttctttggcttaactcgtgcaacagtctctagaaccgcctaatgagcacaacacatgcctttaattaaaaagaaagaaaacatagagtagt

SEQ ID NO: 25009 - DNA, 627 bp, Arabidopsis thaliana columbia
cttgtaaatgctcaccaagctatccatatgtggagcacctcgaatctctaacatattaacataatcatcaaactgcaaacttaggtttaacaacagataaagctgaactctgagatcaataaagagcaagagaaagtacctctacgatggtaagggattttacaaacaggacaagtagcatccattttcatagatttcactatacacgcactgaaatcaagagaagaccatgtgttcattacttttaaagattgatgaaatgagaatacgaagaaagaacaaactaaggaaaggtacttacttgcaaaatacatggttacacgaaagtgaaactgcagaattatatagactcaagctgccaataacaaaaaaaaacaaattaaaattgttaccaaggcagttaaacgagattcattagtcagacaatacgaaatcagggtttatgctcgtcacaaaattgagcaaagagagacgcgatttaccaaatagggcacttgagttctcttcccatcctctccaggtgactagtgtccgccattttcgatcttcactcagagaaaacgagacgaatcaatctgatgaatcaggaacaaagcgactctttgggtatatagatagatagagggt

SEQ ID NO: 25010 - DNA, 530 bp, Arabidopsis thaliana columbia
  unsure (1)..(530): unsure at all n locations
nnnnnnnnnnnnnnnnnnnnnnctaaaggctcaactgcaatgcgttacggcggaagttaatggtcatgacgagactatccctttaaagtatgttgtaactaagcaagagtttgcgtcgtatttgttacgcggagcagacgctgtcgcccctgcgcgtggtggcagagcaaatgccaccagcgccgggatgagataaataaaccagacggcgacttcgctgacgctcggcgcttcctgatagccaaaaatcccttccatcagcgtgccaaacagcgagtgagttgagagcaccgcactcatatcgaaggcgatttcctgaaagtggttccacaatccggcttcatgaaatgcgcgaatggcaccagctgccagccctgcggcgacgaagagaataaacaggctggtccatttaaaaaatgcaccaagattgaggcgaatacagcccagtagagcaggaagcctagcaccacggcagtagcaagaccgagcattgcaccagcggcggccagatccgacatcttgttgaaatg

SEQ ID NO: 25011 - DNA, 488 bp, Arabidopsis thaliana columbia
cgcaacacaccggaacgccagctcagcaaccgccgcaacaccgaatccgtcactcaccgcagccacatcatcgccgtctaacgcaagcaaggggtcaatcacctgatccaaaagacccatttgaatcttggatacaacaagatccgctaaagccatgtccctcttctcacgtcgttgatcaaccgctttcatacccgtaatcaactccatcaaaacgacaccgtagctatacacgtcacttttctccgttaaccgaaaagaccggtgataatccgggtctaaataaccgggcgtaccttgtggtccggtacaaacgtaatcagacgaagtagctgaattcacagtcgtctctgaaaacaccaagagcctagagagaccaaagtctccgactttgattttcatatccttctccacaaagatattcgacgaagttatatctctatgaacaaccggaggaacaatatcgaagtgaagatactccatagcta

SEQ ID NO: 25012 - DNA, 695 bp, Arabidopsis thaliana
  unsure (1)..(695): unsure at all n locations
acttcacccttgtgtcaccatatcatcttccatacctcgtgtctctctttctatcagaacggactcttccctgaacactcctctctgtctttgctgcgtcttctatgagaactgtgtgtgtgtgcgctcgacctgtgactgtgatatgacctaagggctcgtcgctctttaaactcttcttcccgttctacagaactcttttcccgataatattcttcctctctatccgacacacttccttttctccttggaggtgatgggatctgcatccaacaagtaagttgtggtaccaagattttagtttacaaactatcagctttccactagacacattgaacaacccatttaatatattatttctagcagaagaacattaacaaatgacccaataagatagcaccagagacagaacaggggtaaagttcaaatgactatagagtggtggtgaagttcaagacatggtagacctgtgtgcgcgacatatatcttccctcaggcggaacgtgaataccgagctttttcaaatcttcatgagggattggtcgtctgatattaacaaatagaaagaatgcccatttcatgaccactatgtttagctggtgttatctctggacatgctaaaggaagagtanagcaaaaccatacaagggagcacggaatggtctatctcgctctccacagcgaagttgtctgga

SEQ ID NO: 25013 - DNA, 588 bp, Arabidopsis thaliana columbia
ttattgttaaatcactcgagcatgggattctgaagactgataaggatttgaggaacgagaaaggattagccttgagcttgcagcaagagaaggagaaatttaagatgggggtaaagaaacagaaaacgctgtttgacaacttgggatatgttgcagaggaaatcgatcgaattgaggtggagattgcgtctgggaatttaaccttggattcacttgccaatcgtttcaaggacttgcgttcaagctatcctgatgactataagtgttgtaacttgtcatgcattgcttcctcactggccttgcctctctttatcaggatgtttcagggttgggacctcttagtgatgcagacatggtatcgaggctatatcttcctggaaaatgctgctggaagttgaggacaatcaaagtatctcgacgccttatagccaacttgtctcagaggtaattttacctgctgtgcgagtatcaggcatcaatacttgggaacctagagatcctgagccaatgttgagattgctagagacatgggagaaaatgctacctcacttattttcgaacgattttgacacagtagtgctgcaaaat

SEQ ID NO: 25014 - DNA, 508 bp, Arabidopsis thaliana columbia
ctatacctattcttagatgatctctaaagcgagagagggcgcaagtgtcaacgtatagatacgtaccatcatttcctcctataggctgatttcagtctggcaccgaatcagcggaaagtgaagaaattaacaatatgatttattggagctttatttaaaattttgcagataaatatatataaataaaaatctgttttcgccacatgcttattcaaaaaatgaaataagaatacattgctaagttattcgcgcctttttataattcgttacctttccagggacgctaatctttgatccttaagaaagtttccgggaccgcgatgggctctttttttgttgtacggactcttgataaatgaagcttttgaagacagttcctgccatcgttatgttggcggggggcatgtttgcgtcactgaatgcagctgccgatgattccgtttttactgtcatggatgatgcatgcagcgctaaaaaaccgtttcgaaggtaatctgaacgcaggata

SEQ ID NO: 25015 - DNA, 496 bp, Arabidopsis thaliana columbia
cttacttctcctatcttgagaaaacaaaatacatttcatatttttatagatacacaaacacacacagagacacataactgacacacaaacttatatctaaagccctttttcttatatcttcttcttcttctttctttctttgttattttcttgagggggggattatttagtcaatcgtcatcggctggctcaagcaacatctgaaacgggcttttctcgctgtcgtcattatctctgtttctgcagcttcaagcagcttcacaacctccacaaaacatggacggacttctggattagcatcccagcatcgagtcataatgtcactcagcaccgggagacaatcgtttgggactgttggacgcactcctgtgtgtacaaccgcaaacgctgcctgtacagctgtcatgttctggaacggtaagagtcctgtgattaactccacagcacaatcccgaaactatacacatccactttttgattgtaggctctatgctgt

SEQ ID NO: 25016 - DNA, 475 bp, Arabidopsis thaliana columbia
gtgtttcaatcttgtctcttccactgcagatcatgtcaaaaccaccctgttgagaccaaaaaaagaattataaccacatcgacttaaaaagacaagtatatttaaccaaggactaatgctccacatctagtggagtgtaaattcaaatcttgtggaaggatctgaatccaagtacctggtttctgtaaggctgaatatattcagcattcaactcaacatatttgcatttcatgataccagctggaccacccttgaacccgtaaaatgtgctacctttcgcacgctcttgcaggtaatctaacacgccgaaaacaaaatcaagagtggaacaatgtcagcaactattctacaaaaaaaaaaaaaaaaacatcatttgacgtaaaaatcaaacccttaccaaacagtccagaaataacattgtgcccaccaggtgcctgacctccagacaaaacaacaccaatcttcaatttcggtg

SEQ ID NO: 25017 - DNA, 268 bp, Arabidopsis thaliana columbia
tgtggtgcgtgtaagactatagttgtagacccaacaacacagagaatgcaaccaagtatcccaaacatatgcaatttctctttcaaaataaaatgcgcgagactgcgctgcataaaacatggatctttgttttcaagaaaaccatagtctatcatctaaatacctgacactgatggcattttccacaataaggactccttgactataatacttaacgcttccaaaggtgttaccaaaactagcggtgcaaatgcatagggtggaaaat

SEQ ID NO: 25018 - DNA, 506 bp, Arabidopsis thaliana
ggtccatagcatttatgctctccaaaagtcaccgtcctaaaaaataaaacccatacaagacataagtaagatcttttatgtatgttgagatgtgtatatatctcgcctctcacttctctttggtcgagtctcgccagttattccatccttctggagtaatgattcgagacatgtaagtatttgagaaaatgactgtagcataggtttctgaaggtcttcgaaggaatatttatgtactgtgattgatcttagaattaacaaaagagaatactgactgtacatcttctgattgtattcattgagctgtgatagatacggtaaatagggatgtattaagatttactattgaattgatagtataatcatgtttgcaattttagagtattatggttatgtttggaaaaggtcatgtatgaatgtggtttatctttaaactggttgagtgattttagattgaggtatatgaaatctatggatgcttgaatgaaggagtctttgaagaaatg

SEQ ID NO: 25019 - DNA, 625 bp, Arabidopsis thaliana columbia
ccgccccaacatcaagtgtttgtaagtttccgaggcagcgacgttcgctataacttcttcagctttcttaaagacgcattgataaagaatggtatcaacgtggtaacggacgaggacgcacctaggggaaaaccaatcgatgagaatcttttgaagcttataaaagactcgaggatcgctgtcgtgatcttctcggaaaactatccggagtccacttggtgcttagacgagttggtggagatcgagaaacaaatggatcttaagatgcttgattcttgtcctatcttttttgaggttgagacttgtcacgttaaacttcaggtcgcaagaagtactttcaactacaatctactgcagttggagcacgatgagcggaagaaagctaggcagattagtaagaaggcttgggaggatgcagagaagagattcgaaggatggagaaaagctttgatttcggtcgcgtctcgcttgggcttaacatataagaaggggaggtttgattttatttactaatcactatgtttttagcttttaaggaatcatagattacctaatactgagtggaatgcatcttagttatatagttaatcgtaaatcatatactagaaatgatggaccatatttt

SEQ ID NO: 25020 - DNA, 446 bp, Arabidopsis thaliana columbia
ttctttctgagatatcttcttctatcagtttcttcttcatcatgaagttcatgaaacttggatccaaacctgattcatttcaatctgaaggagacaatgttaggtttgtgttctaatcctcatcttttacctttctgttttatgttcttgattattacaatgttggttctgtctgaatacaaacttagaaacttagcttatagatctgacaatatacttgttaatctctgttttttaaggtatgtatcaagtgagttagcaacagatgttattgtcatcattggtgatgtcaaattctatcttcacaaggtacacatttttatatagaaatattcaaatcttttgtgtatccttaatcttgatatgaaactttggttgatcaaatcttttgttatgtgttttgatgttttcagtttccgttgctttcgaaaagtgcacggttgcag

SEQ ID NO: 25021 - DNA, 546 bp, Arabidopsis thaliana columbia
  unsure (1)..(546): unsure at all n locations
nnnnnnnnnnnnnnnnnnnnnnctaaagacatttccacgtcgaaccatttgtcggcgcaaatttgcaaccagaagccctcgccttcaacggcattgacccgaacgatcccgatcgcggcgggtcaggaatacgaggcgctgcacgaaatttttaaagttgtacgtaaaggtattaaagcgagcggctgtaaccgcgccattatggtggcgacaatgccaattttgatcacagctttatgatggccgccgcagaacgcgcctcactgaaacgtaacccgttccaccctttcgccacttttgacactgctgcactggccgggctggcactcgtacaaaccgtattgtcaaaggcttgccagaccgctggcatggacttcgacagcacccaggcgcactccgcgctgtacgacaccgaacgcactgctgtgctgttttgtgaaatcgtcaaccgctggaaacgtctgggaggctggcgctatctgccgccgaagaggtgtaatcgagtcgatgcctgatgacatgcaatgattcaggcatctatagtga

SEQ ID NO: 25022 - DNA, 471 bp, Arabidopsis thaliana
tctatacacaacgctatgttactgaagctggacttcttggttgtaagcccgctgcaactccgatggaacaaaatcacaagttggagatgaatgagagtgagtttcttcctcgacctgaagaatataggaggttggttggtcgtctcatctatcttcttaccactcggccggagctgtgtcattctgttcacacttcgtcaacgtccgtgcctccacaatgtgacgctaatctctaatcgtgcctccgagcatcagcgttatatgatagggtctccgggacgtggtgtgctactaagttcgaactcacgatcttactaccactgcatacagcgattgagattttatgacatgttgcgcgacacgtcggtctttgagtggatatgtcatgatgaggggtggactccaatttcttggaagacaaagaagcaagatgttgtatctcattcttcggctgaagcggaatatcggtca

SEQ ID NO: 25023 - DNA, 461 bp, Arabidopsis thaliana columbia
atgatacttgaggtgggttcttcgaagaagtcgaacggctctagttctccttttagtgtatggagcacccgaccttgcgagagagggatgctgtcacaaggtgtcgctgttgggtcattcttttgctgcacgtatgatctgtcgtctgagaggacggtccctgatatcggatgcttaaagaatcttgatccgaccttacacgcgatgccaaatctcgaccaggtccatgcggttatcgaacacttcggaccaacagtctacttccacccagaagaggcttacatgccttcatctgtacaatggttctttaagaatggagctttgttgtaccggtcagggaaatcagaaggtcaatcgtattactccacgggctcgaacttgtctgctggaggatgcgatgatatggatttgtggatagatcttcctgaagacgctgacgcaaagagtaatctcaagaaagg

SEQ ID NO: 25024 - DNA, 515 bp, Arabidopsis thaliana columbia
ttcttcgttgtcggcatgacacctctataaaccctaccaaacccacccgatccaagaaggtccttatccttgaacccttttgtagcatagtacaagtccttaaaccttaaccggttcttcccaaactctgtttcccaatcttcgaactcctccgcgaactttctcctcctcctcacgataaagcgcacgaggaagatgagcgagacaacaaacaagaccggaatcaacaagagggaaaataacggcatcctgttcttataaaacctctgtaaactcgttggccctgacctcggaaacttcggaactttcgataaagtcaacggcggactgtcttccctttcaccatgaaactccacccaaaaacaaaatgttctgacagaacataaccagtcgcagccgagaaacctaagtacatgtcttgcaagaaaacagaagatagatctctaacaacagaatcaagcgctttcctaggtttaactcaccaaacggagccatagttacatcgatttgattag

SEQ ID NO: 25025 - DNA, 627 bp, Arabidopsis thaliana columbia
atccccgttgatgtagttgaagatggagattctccaaacccggagtttccgaagatgagatttggatacatctggttaaatccatgtgggaattgtagaggaggtagcttgtctacgtcatcttttgctgcttcgagtaaccaatcaatgactttgcttggctgactcagccctaatcgatcttgaaggtcgtagagttgaatagctgtaggtacggacaaccttatcctccggtctcgaagaccacggactgtacatactttgctgtgtctgtctttgccaccgaatgttcttgagactcgaacgattcttggattcctaaaagctgaagtccattgccttgaagatgataccgaactcggctgttgttgttgcaacatgtggtttaagtttacttgatgattttgattttgatctctttcttgctttgcttgaatctcctcttcatcacattctcctgatctcatctctttaattcactcaacaagatcttcagtactcaatttggtgtaaagaacagatctgaaacaagaagggaataaattgaccaatttaatagaaaataaatcaagaagacaagaattagttgttgttagctttcaattgaatgaaattgttgattttagg

SEQ ID NO: 25026 - DNA, 529 bp, Arabidopsis thaliana
taatttgtgtagatttcttgtttctcacgtttggtaaatggtgtgtgcaggatatgatcacggcagggatggacacgacagcgataacagcggaatgggcgatggcggaaatgatcaagaatccaagagtgcaacaaaaagtgcaagaagagttcgacagagtggttggacttgaccggatcttaaccgaggcagatttctcccgcttaccttacttgcaatgcgtggtgaaagagtcattcaggctgcatcctccaacgcctctaatgctacctcaccgaagcaacgcagatgtcaagatcggaggctatgatatcccaaaggatcaaacgttcatgtgaatgtgtgggctgtggctagagacccggctgtatggaaaaatccatttgagtttagaccagagagattcttggaagaagatgttgacatgaagggtcatgattttaggctgcttccgtttggagctggaagacgggtttgtccggtgcacaacttggtatcaatttggtaacttcgatgatgagttatt

SEQ ID NO: 25027 - DNA, 583 bp, Arabidopsis thaliana columbia
tgttggcgacgtgtttcatagacatagacgatagcagttctagcattatcacaacaatttcactgagctgttcagttctggcttttgctgctggaattgttcttttccttccaggtttttcttttcaagaagcattggttcctttcacttcacaaagcggtctgtgctcgaggcttgtagaagatttagttcgacggctgtggaaagtagaccccaatgtctgcgaaaagctcaacatactcgttaacacaaactagtcgttaaactgtttccatttgcaatctaggaatcaggttttgagagtctgtggcaaagtaaagatgctgctctctatttgcagagatgctctttcatgcacttatggattgcagaatcagtcaatgtcaatgcacaaagaggagattatgtctgagattacgaaaagttgcaggcatctactgtcacaagcaattatgaaatggatgcagattccttttggtatccaaagtatttctcaacataaggccttgtgttggtgccgactatttgctcttagttcagagagtagcaaacgtattcctgacacagtttcagtggacaaggg

SEQ ID NO: 25028 - DNA, 590 bp, Arabidopsis thaliana columbia
tactactactcattaaatttaatcatttcgtatcatgttgaggtaatcattgtccggctcagtggttctattgactaaatatgaatttcttcgcttcatgtttctcagagagactgtttggtgacctttcaaatgccttcagatcctcaattttgtaccaacataacgactgcatggaaatagtgcataagggttgaaatcatactttcactaacattcactatagttgtaatggagcttattggcattgggatctttaaatcactttattatagtcacacaaattttatttggagctacgtgtcataataaatccaaatacaaaactgtgcttttcttgtccctaagctttacaaggagaaagtggaaagccgcaaagacacttgttatcgacaaaagcactagccgggaactttgtcgatggaagctttccgcaaagatggttttgactcaagtttagtgtctgcagtctggtcaccgtcaccgggtccttcccaaataccaagttccttgacaaatccagggttttcaagaagattccaaactttagcttccccaagtcgaactggagtttgtccccggtgcatgga

SEQ ID NO: 25029 - DNA, 516 bp, Arabidopsis thaliana columbia
ttgaatctcatgtatctgtttaatgtggaagattacttgcttaaccttctcatagttatttctttatctctgtgtttttttcaggtggtcaagcatatcgttgcgcatgtgctgctgaccgcactgggcatgctctgttacatactctgtatggccaagcaatgaaacacaacactcaattctttgttgaatactttgccttggatttgataatgaacagtgatggtaaggtctaagaaggtttattaagagtatactatatattatccatcatgttgcaaaatcaatattgttgaatgcttttggtgtatatgaatatatgatgagcaggaacctgtcaaggagtcattgcactgaacatggaagatggaactttacatcgtttccatgcgggttccacgatattggctacaggggtaaagagaacttgttgtggctcataatgtatcttgttttgaattggtgaccacacagtaatgaatcatgatccataaaatgacttcagggctatggaag

SEQ ID NO: 25030 - DNA, 517 bp, Arabidopsis thaliana columbia
tcttcctagtttctatcttcaactcacattttactgctgtagatatttctgtgccttagagatctcgcgatattaaatcttttgtgagtgtaataggttattgaggctggagcaaatgctctagtggctggatcagctgtatttggagctaaggactacgcagaaggtatagagataaatccgatgtttcgtttactttctgagcttagccagtaggaaaatataacgttgctctgtttgtttgttgaaaaatctgcagctataaaaggaattaaggccagcaaacgaccagcagctgtagctgtgtaatgtgaagcaacagcaagcgaaaagactctgttaaacttaggttaatgacttcgccatttctaaatactcatggttgtatctatatactctgcttgcagtacacaaacttggatcttgaaaacgaaaattcacatatttgacctgtttctttctttgtttgatgagcaaatcctgtttctgggatttatctgtggtttgatctgacttg

SEQ ID NO: 25031 - DNA, 544 bp, Arabidopsis thaliana columbia
ggattacatttcctttgagtacagctaggatgattcggagtaataagtttggttttaagagcaggttaactcaacatgcttcagcttcaactattggaggatctgctttatctttgcactatgcaaatgttgtgattgtggtagaaaagcttcttaagtaccctcatctaataggcgaagaagcaagagatgatctttaccaaatgttaccaacgagtttgaagacaacgcttaaggctagtctaagatcatacttgaagaacatttcgatctacgacgctcctctagctcacgactggaaagaaaccatagacggtatactttcttggcttgctcctttagctcacaacatgatccggtggcagagcgaacgcaacttcgagcagcagaatcagattgtgaagcgaactaacgttcttctacttcagactctttactttgctgatagagagaagacagaagctgcgatttgtaagcttcttgtcgggttaaactacatttgccattacgaacaacaacaaaacgcgttgtttggatgcgcgag

SEQ ID NO: 25032 - DNA, 331 bp, Arabidopsis thaliana columbia
tgtcacatatctggtacatcctagttgataagtcatggagaatagccttgcgtcctacatcatctatcgtacgtaaatccacagtgaaagttacctgaattcatctccatgaaatcatttagagttcattcacaataccaatagagaaaaaacataagtgcaaaggagagaatagtttcgtagtcttaaatggcctgggatgacattgctagcacttggacatgttgagatctctccaacagtagatacaagtgaatgagcaagggattctaatgtatcctcgtcgcattgaacgtctcaagataagtaagcacgagggtggtagcaaaca

SEQ ID NO: 25033 - DNA, 603 bp, Arabidopsis thaliana columbia
cttaaaactactccatacttttaagggttcttttatttgatttgatttccaactgtttattggcaatttgtaggtaacacatccacgggaacatttgccacctcatctcggagcttctatgcatgcaatagctggtattctctcatatgatggtcatgcaggactttcatgtccaccggagtctatggtaccaaaacattcaaggactgagatgtatgataccggtggatgggaagagaaaccaaactctttccttaactcactcttttggtctctgagtttgaaagagaacaagcatcctagtcacacgaataggaatcagcagcataactacaacatggctccaacagaagctgcatcaatacctaggcagcaaaactataagcaaagaaatcccaaagcaaccaacaataccgattcgggtaagaagaaagagaagatgtttgttaatcccaccaataggattaaccagcctgaagctgcttctacgggtaagccatcaaagcacaaatcagccaacagttcgggttcgagtaacaagaaagagaacatgccttctgatcaggcctatgggaataagcaacattacacagttccaagaga

SEQ ID NO: 25034 - DNA, 895 bp, Arabidopsis thaliana
ccatatcttgtgtatgtagctgaattgtctttcttgaaattcttatatagctggagaaagtgtatgtttgtgtcgctaatagagttttgtttttggattgtgtaatgtgttgtagtgggatgatggtacaagatcctaagaaagtgaaagatgttgatgaactttttgaccaagctaggcagtcagctgtagacagacctgttgaaccatcaagatcagcttctacaagcttcactggagctgcgcgtttgttgtctggtgaagctgtttcgtcttctcctcagcaacaacagcaagagcagcctcaaaggattatgcacaccatcactttctggttgaatggtttcactgttaatgatggtccgttaagagggttcagtgaccctgaaaacgcagcctttatgaatgtaatgtccagattttctctaattagtaactacaattccatggaaatcaagcttgatacttgtctttactcacttggatagtctttgaatccctaatatatatgttgtcttttgcagagcatctcaaggtcagagtgccccagcgaactcgaaccagcagataagaagatccctgttcatgtcgatctggtcaggcgtggagaaaatttcaccgtaagtctcattcccatctatcaataataatctcgttaacctattctctggagaagccactcataggattcttttaacgtctgtatcttttgactcacaggaaccaccaaagcctaaaaatccattccaaggtgtaggaagaaccctaggagccagcggatctggttcaagttcagcaccacaagcttcatctgccccaatgaacgtagcaccagcaccatcaagagggctagttgtagatccagcagcaccgacaacctctatccagctcagat

SEQ ID NO: 25035 - DNA, 412 bp, Arabidopsis thaliana columbia
tagaaacctaaagctgcatggaaactgttctgttggtttatgtgacacatgattttaatcataactttaatctaccgcagcaattggtgctgaaggaagtgcacgaaactgaactgttcaaacacatcaataagttcttatccacagtgggttatgaagacagtctgacttatgctgctgcaaaggcttgttgccaaggagctgaaatcttatccggaagcccatcaaaagagttttgttgtcgggaaacttgcgtgaaatgcatcaaaggtatgtcgccatgtcgattcttcaaatttcttatcatagttaaaagttttggtgttagatcaactgttaattttttgtttcctattaaggtcctgatgactctgaaggcacggtggtgactggagttgtggtgcgtgatggg

SEQ ID NO: 25036 - DNA, 546 bp, Arabidopsis thaliana columbia
caacatcagcaccaagctgcttaagaccaacaaccaaatcccctataggtctttctctcatacgaggcaccccatcaagcacataactggaataaatggatcataaagcatcaacaaaagctccattccttaaacatcaaataccaagaagcatcaactccttcaatctaccttgcgtttccacctgcagcagtgaccgcagcggtaagtggacgcattgctgttcctgcattaccgaggtaaagttcgatatcactctttgaatctatggaagctgggaatatcccgccacatccttcaactacagcacgattattttcactgtcagtttccacattaagtcccaatctcttcaacgcatcaagcatgtaattgatgtcatcgctattcaacaagttgtccactacagttgttccctataaaaccacagcaaaatggtaaagtatcaatctttataatctaagttcagattacagagaaggacgaaacgaagtgctatatacgtcagacagagcagcgagaagcaggatctgatttgatagagac

SEQ ID NO: 25037 - DNA, 596 bp, Arabidopsis thaliana columbia
tatcaaatgtttggacaaaaaaaaatgtgatagataatttttttttagcaagagtatacgtgtatacagtataactaaatttatacacatgttcttggtcagtagctgcgctgtgaggcgcatatgcatcagtgcaatgcgcatgggccatggctacaaaaatcacattttttctactccaaaacgtacgtatgtacataaaaacaaattagacagatacaaacttgttcatattaaaaaaaaagttatatcgtttaacagtttttttttcttcttcttaaaagtacaacataacaagaaagcccaaagaaattgaaatctcaaacccaaattacaacgccttttattgtatcaaatgaaacatgtaactaaaggtcgcacatatgcagattaacctcccattaccaaatagatcatgaaactaacaaatttcttgaagaaacgaaacttttggagtcgtccagagactctcaacgttctacatcgattaagcgggacatttgaagtcagatggtggagttttccacagtcgagaagaagctcaagagcaatggggagacaaggtcgatgttgagaagtttgagcttaatggtggt

SEQ ID NO: 25038 - DNA, 1033 bp, Arabidopsis thaliana
atccctgatcattgagagagagaaaacgagacatcgtttgctcacatacctgttgttgtccacagccaagttaaagagagccatggctccaactttttgggctgaagcgttattttcattcagagctgatcccagaaactgaagcaacgcttcaacacacccattttcccccatgagaatcctggcctcctcatcatcttttagcaatactcttatctgctcaacaactctgcatttctttcttaaggtatccacgtcagttaaagtggtcaacaattccgtacatctttcaacaagagtaacttgatcttcctggtattctgattcacaggcttcctctttaatggttccactttcttccaaaggaaccaccttcacatccttcaacttacaagaaccaacacgttttgctgatctcgtatcggtggactcggacacagacaacgccaacctccaatagttaaggtctagagactcagggggtccatcagggacctgaacgccgttctgttcacaccagctagaaattagagccttgacacagtagttaggagtcaagcaaagatgagagagctgctggtgagttttgggacatgtgttgtgtccatcactaaaccatttctcaatacagattctctcatatgtttgcccagacgcgataatgacagggtcatacataagctgcaaagatatcggacacctcaattcttctggcggaacagacatctgcgaagatctcctattgttattgcaggatctgaagttaaaggaactcagttttgacagctgacggtcaaaagcacgaccatgggcatcgtctatagaaccctggatagtaggtgaacaaggcaatgaactactaccctgtgaatcattgtcatcccagatctcacttctgaatagctttgagtatttcctcatgagatgtaataaataagccacaattgattctttcctcttgtcatcctccattcgggccctctcaatgagtttcttgaggcatcttcgctctgtgagagctgctctagaagaa

SEQ ID NO: 25039 - DNA, 481 bp, Arabidopsis thaliana columbia
ctaaaggcaacctatgtgcatagccactgctctgagaacatctcttatttcagccaaagcttctttttgattacttgaaaggtactggcgacgaggaatagttgatgtttgtaagttcacggcctgaaaaacatagacaaaaacatgagtgaagagagataaaagaaagaagaagcaaagacacatacacaaagagaagagagataaggttagttaattacctgcagagcacggcaaacagagttcatctccacatcaaagtttggtttttccctacatgtcacaagttccagaactgcacaacaagaagaacctgatgcttcaaggacaggaattgcaatcgaaccacggacttcgttatctaatgcatgcttcatccttaaatattcagcagtcttgtaatacataacgtttgatgtccactcaggaactccagagataaagactctgcctggaagacctggataagagcattgatttg

SEQ ID NO: 25040 - DNA, 543 bp, Arabidopsis thaliana columbia
  unsure (1)..(543): unsure at all n locations
gcttcacttcagctctatcgaaataccaatctccaaccgctatcgccaccgcctaaatcgccgtttcaaaacgtttaaaatttgattatttctcataaatttgatgttttaaacttctcaaggcaaaatgaaacatgaaatgcatacctttttgtgtataacaggagaatcatcggcgaaccaagtgtcttgcctttcggtttggcaatgagcaaagcaagaattgatgaacaaaccgttctttttcgaattcgagaaaccactcacagctctcaacatttggtttctaaaccctgtcaaaattgacaacatcataagataagagtgaagttggatcattttgaaaatgatgacttcttttaagttttgaatttaccttgcaagaaccgtatctgcgccggagtgcatctaccgtggtttaatctgcattcatgccaataaccactaggatctgcactcggcggacgantactgctttgaatctggttcaacaaaccagaatggttacttttcatagtctctattagtatacacagagttgat

SEQ ID NO: 25041 - DNA, 1390 bp, Arabidopsis thaliana columbia
cactgcttgaaaggagagaatggaggcggagcatattggttcttggagagattgtggagccaaacatggtctttactccacttgttccctcacagtgagtgttcatttatccctcgaaaccgtttcattttaaatagttgttcaaatgttcattagagagtgactgataagccatgatcttatttaaatagttgctcaaatgttcattagagattgactgataagcatgatcttatggcgtgttaaaatgtcaggcctcattacaatgtgaatctgctgagcatctcagtaaatggccaagctttacctatcaatccatcggtcttctctacatcaaacggccagggaacaatcattgacactggtacaacattggcatacctttctgaagcagcctatgttcctttcgttgaagctgtaagtcatcagagctcacgttgctatatgcttttgatatcaccgaaccatctgtgaaatggagttactataactgtactccattgacttgatactctgcaatcttcgttcaatacttaaatgttatctgtcttatggaatttttcagattacaaatgctgtttcgcagtctgtcagacccgttgtttcgaaagggaaccaatgttacgtaataaccacaaggtctatcctctgaccacatcttcttatcccaagcatgtcttcttaattggtaaacatttgaacttttttattgtactgtgatgatcagtgtcggagaatatttcctccagttagcttgaactttgctggtggagcatctatgttcttgaatcctcaggattacctcatacagcagaacaatgtcgtaagcactttaactcgcaaccttttcataggaacctggtttcagaatctgaacctaccttgacctgaaacagtgagtttttttttttctgttcctggtataacattggcctctgcactctgctttctagggaggtactgcagtgtggtgcatcggttttcaaaggatacagaatcaagggataacgatccttggaggtaacccgaatcgaaagctgaagcctttgttatttgaaatctacatttggtaacacaaaacatctgtttttgtcatctttttttcttctgcagatttggttcttaaagacaagatctttgtctatgatctggtcggtcagagaatcggatgggcaaactacgactgtaaatctcatctctttaactcaaatgacaccctaaagcaatgaaatcttaccacacttaaaaaattcttaaccttttttatctttcttcaggttcgacgtcggtaaatgtctcagcgactagcagcagcggaagaagcgaatatgtgaacgcaggacagtttagtgagaatgctgcagaccgcagaagttacctttggacatgt

SEQ ID NO: 25042 - DNA, 469 bp, Arabidopsis thaliana columbia
gcttcactcaaaagaccacattccactctcacacgaagagctgtgacagcttcaccaattgaaaccaattctgatacaccatcacgaccagaccaacgcaagaccataagagctgtttcagggttatccctttctaacaggacttgcgctactttggggtaggtttctggaccgcatatttcaggtagaatcctacaagcttcctgacatataatttggaaagtttgtaagctacaccaattaatatatgtatggcacaataggttacacgtttctataagttttccttgggtctgtcaagagatacctggtgtgccgtcctctgagtgatcatcgagtagattatatacaaaagactccagcaatgaatgcctcgttatgccacacgtagcagtcatatcaactatagtgtgcttccagtatagttcaggggtagtccaatgccgatcaaacaggtagtaaagaaact

SEQ ID NO: 25043 - DNA, 499 bp, Arabidopsis thaliana
ttcagggagtttttggctgaggatagtttagtgagaaaatatggaaattctaaagaattggtgaaatcggtggtggatgcattgcaaagaaaatcaaacccccaaaaaagtcttgcaaacctcattgaagcggctcaagaagtggggcattgtcattacgagtaccaaaccagttggggcaacgtaaattaccttcttaacagtttacacaatattatcgtgttgtttacaagaatctattaacctttacccataataatgcaaatcctgcagctcggttggatgtacgattcagtggcagaagatataaacacgagtgttggaatccatttgaggggatggactagctcattcatttctccggatccacctgcgtttattggatccacgccgacgttaggattagaggctatagtccagcagcggcgatgggcgacgggagcaatcgaagtcctttttaacaaacaaagcccgttcatgggaatgttcacgggaaaat

SEQ ID NO: 25044 - DNA, 543 bp, Arabidopsis thaliana columbia
atatgaatctggaacacatccatgtctttcgattgaactgaacatctctcttgcttcactctctcttccagattcacttagagctttgatgagagtgctatatgtaaagttatctggtttcaaaccaattctcagcattgttttaagcaattcctcagccttcttaacctttctcatcttgcaaaaactctgaatagtcgcattgtacgcataaaggtctggacttaacccgttttccttcatcttcgcaaacagcttcactgatctatcggtatctccggtggaacaacaggagcgaatcaagatattgtatgtgatctcgtttggctcaataccccattccaacatctccttgaaacagtcaaatgcatctttaatttcttttgctctgcaaagacagtttatgatccaactgaaagtgatcacgtctggtttgaaaccatgtacaagaagcttctctagcacgccgtgaaccttctttacatcaaccctcacgctataaccgctcagaaaggtattgacagttacgagattcggagaaat

SEQ ID NO: 25045 - DNA, 615 bp, Arabidopsis thaliana columbia
tgaagagttttttatttttaagaaatctaaaaagtttaataagaacccttcataactaattccacacatcttaaaatgtaaaacgtaatggggaatacgtcgaattaatcctctcagaatttcttggattgtaagttgtaacatagactgaacaggttttgtcaattggtttaaactagtagtgaaataaatgttgaattgagagcttaatgtgaaacactaaaaagcatcttattattattcagaacttttacattaaaggaagagggataaaattgggagcataaacacagtgataacaaaagaaagcagaggaatcaatttcaaacttcttgaacaaatccccccctgatgatatagatgcaagccgctgaagtgttctcgtcttcacaataaatgattaaggtggtcttgtcatagatgaagtaactaatgccataacacacaataaataagtttggcaagttatttggtggcaaagtcaacaagctaatccacacaacttcgtctgatccattgttgtactagaatcaatcttcttcttcgtaaccagatctcaatcgtcattgtcttacacattgatttacaaggatacctatctccttgaaacttgga

SEQ ID NO: 25046 - DNA, 563 bp, Arabidopsis thaliana columbia
taacggccgccagtgtgctctaaagaaagtcgcacaactggaaaaacttcgcggatttaaagcctggctgattctgctgtacggcattttgctatgcttgtcgccactgttgaagctgattgagtaaaccggagcgcatggccccggttttgtgagttaacgctgcggattttcatcctgatcaacagcaaaacaagctaccagttgaccgccgtagtcttttagctgcggctgcaactgggtgcaggggccgaagcgccgacgacagcgggcgttgaaggcgcaacccggcggtggattcagtgggcttggtagttcaccgctgagcttgatgcgctcgcggcgatcgtccgggttcaggcgcggcgtcgcggaaagtagcgcctgagtgtacggatggcgcgggttattgaagatttggtctttcgttcccttctccacgcagcggcccaggtacatcaccatcacttcatcagcaatgtgctccaccaccgacaagtcgatgggagataaagacataagacagccccaactcctgctgcaaatccatcatcagattcagc

SEQ ID NO: 25047 - DNA, 549 bp, Arabidopsis thaliana columbia
tcgacacgatcccgagaatgagtttgtatcgcaagaactccactctagaatctcaaaactttgtttagtctttattgtttctgttacaaagtctgatgacctaaaccttatgaatttgtgtcaggttacgttatcaggtaaccagcaaccaatccgtactgatattaccgaggcagcaatggaactaggttccgaagtgagtaaccatacgtaccttgttatggaacagtcaaagctaattcatcagtttctcttgttgatgttgtgtgttttcctttggcagaaactatcacaacttgtcacagaagcatacaaggacgcacacgccaagagtgtggtggtatagcaatttgcagaccatttatcacaatgcgactaaagtatttgtttctatccatttcttctaattgaactttgtgaattttttcacaggctatgaaagagagaatgagtgaccttgcgcagagcctaggaatgccacgggtctcagcgaaggaatgaagtaagaagctgtatttgttgtatcagtcaactctcaggtatgagagg

SEQ ID NO: 25048 - DNA, 120 bp, Arabidopsis thaliana columbia
tgcagcacggtgaacagtgggcgtggatgattgtggttctggcggcgatgctggggcaaattggcctgccaggtggtggttttggttttggctggcactacaacggcgcaggcacgccgg

SEQ ID NO: 25049 - DNA, 377 bp, Arabidopsis thaliana columbia
gaggatacgatcccctggaaaatctgcagcttcatctgcttgtgacgccaaaacggcagcgtaaaaatttctccctactaaacagtatcttaattgtgatgatgacagtgtcaattaatcaatgtaatgagctcaattgtttttgcagactttgtgcgccacgatgtctaaacaaaagccgtgtgaagggaaagattttagtgtgtggtggtccgagtggttacaagatagctaaatcagttggagctattgcaatcattgataaatcccctagacccgacgttgcattcactcaccatttacctgcctctggtttaaaagcaaaagactttaagtctctcgtctcttacattgagtcccaagagtaaacaatcatc

SEQ ID NO: 25050 - DNA, 271 bp, Arabidopsis thaliana columbia
cagaagcgacgctggtcccgccgccgagaagttccagcgcgccccgccggagtcttcgggttgggcgtgatcacgtccacgccgggctggatcaggtcattccagtcgcggatgtgcttcggattgcccttcttcaccaggaacacgatggtggaggtgtaggggctcgaattgttgggcaggcgcgcttgccaagtcttggccaccaagccgtgatcggccagggcgtcgatgtcgtaggcgagggccagcgtcgccacgtccgccggca

SEQ ID NO: 25051 - DNA, 552 bp, Arabidopsis thaliana columbia
tgcgaataatgagcctgagagtgatagttatcagagtgaaagggtctggaacgagaatgtctggcactgttattaggggatcgattatccctatggtggtaagagggatagcgagagttctgattaggtgagaagtcttggggagatcttctctgttttccatgttctctccctcggccaggtgaaaagcgtctggtttggtgatgatgggaattactctcccgatgggtgaccacaggagacggtctgggatttgaatctctgatgaggttagagctagcgtgtctgaccactcctcttctgagatcagacttttgtttttcagcctccagtttgaggagagtcttttgctgatttattccaagaaccctgagtgggttggctggttccctttaagcctagggcagtcgctttcttcatgaaggagagagaagcatgtaaaacaatgcttctccaatttctcatattccagttctactgtgatgacctccccgcaggcatccggataggcaacgtcatctctagaggtccagcccattgacctggacacgg

SEQ ID NO: 25052 - DNA, 842 bp, Arabidopsis thaliana columbia
ctttgcgacctcatcctccatcaaccccaccatgtccattcgttgctgtctcacgtagacagatgccaacccaaacagctcattaatattctcaggggagaactcatactcccaattacgcaccaaaacaccaacattggtggtatcaaccttcactgtaggcagatttgcccagaattcaaacaccacttcctccttatacggtttcaaatcagtcaccgtacgaatcaatccagccttctcaataaaactccgaacagcctcatccattttcctagacaaaccatcttctacaatgaagttcttcgggaaaaatgagcatacatcttctcagcctcattcgagacgaatcggattccatcgaaggtagatgaagcggtgatccccttgcccttttcttgcttcatccgctttccaccctatccagcggtggattgcttcctcttacgcatccttgaagcaacagagggttgagaaggtgcagcctcgggaaattttggttcagccttctgaacctgattggttgacgactgagtctcgtcctcaatttcgatgatcggtggcggcgggcctgtgacaagtatcatagcccacttggaatcaggcatcaaaagttcttcgtcagacttcacctcttgagatttcgattcaatcggctgtggaacctctggcatcgcgtcgctgggctgtgaatctggtagatctccagacaattcggactcagatttctggtgaacaagatgttgcagcccggaagaattgatttcatgctctctctcactcgagttctgatggatttgctttgagcacaagggtttgccttctcgactttcaaagacagt

SEQ ID NO: 25053 - DNA, 486 bp, Arabidopsis thaliana
atcaagcattgatcagttaagtaactgtgagataaccgaaacagatgcatttaagtcattacctgtaacaaggcagcaatggtaccaaaagagttccacaacaaaggcgccagatcctgaaacaattctcttttctacaaaagaaaccactaattcagatactgaaccaagttcccaaattcacatactcaacacaatttgagaaaagttctcaactttagcaaatttcaagagtaaccctagcgctcgttgacgaatcagacaaaaaaaacgactgcccagatggaagaaatgaagaagaaaacatgagagattataagaaaaccttggaaagctcgagaagagcattttctctgagttcaggattgctgagatcgagtaccaactgttcagcagaggccaaattgcgatctttgttggccggagctccggtaggattttgtgcggaggtgctaggaccaccgaaaagtgtgccccatggagaga

SEQ ID NO: 25054 - DNA, 478 bp, Arabidopsis thaliana columbia
catatccaccacctggtacgggtccgtacccaccaggcattgctccatagccaccaccaggaacgcctccatatccaccacctccaccatagtagtcagcaccaccaccgcctcgactaaaagattctctcctgaagtcacgaccaccaaaccgtccaccagaccgccggttcttaccaccgtccaaatgaagcacgagatgcgtatcgagtcagccagtcagggacctcctggttagcttcttgcattagctcagccagtggcttggccattgttgtgttgttgtcattgaagaaagcagttgctagtcctgaatttcctgcacgtcctgttcgtccgatacggtggacatagtcatcaatgtcgtttggtagatcaaagttcactacatgagccacgtgcggaatgtcaagaccacgtgctgccacatcggttgcaacaaaataggtgtccgccagtcttgaatgatctcagtgca

SEQ ID NO: 25055 - DNA, 565 bp, Arabidopsis thaliana
aatgttcataactattaagtaagaatgtaagatatatctggtagctagtaacagacaaataaaattttgttttctcctaatcaccacgtgaataatgagctctacatttacggtttaatttcaatgtatactacaattttcacaaaaaaagaaagaacagaataatttaataaatttattggtgagtttgtttttggcgatggggtcatgcttcttctgtggatgtcatggaccatggtgtcatatccatggggtaacttcccagcacccttaggaacgacgtgtactcttgaacctccgcaagcgcgttctgtgcacgcggctcagccatcgatgcctcaaaatccacgtaaaacatgtactcgaagttcttcgacgtcccaaagctcccgtcaccaacaaccctaagcgggcggttatggtgaggccgggactcgatcttggtcaggctaatgtctctgaaagcgaaagctgagaggactttaaagaggacgctagttcctttgtgctcttgggcagcaaagacgatgctagtcttgaatggccggtcagtgcgtgggattat

SEQ ID NO: 25056 - DNA, 471 bp, Arabidopsis thaliana
ttgaggagaaaagaaatttctttctgattgcacaaagttagaaaggcctttctctgggtgctgagcagaaaacgaaggaaacacgaacttgtctgcgttatctgtgcttttgatttagtttaggctcatggtcgagatatgtgggccgggcctccccttgttttatttttggttgtattttctaataattgtgcaaaacaaagaaacctcacctcggtcaagaaacgctctgaaatctgaactctgaaggttgtttttcttcttctttcggtggtgaaaaaattatctttatgaaaagacaaaaaagtttttgaaaaaaggaaatttttttcaaaaaaacagactgagagagagagagagagagtgtgttgttggccatgggatgcacggcctccaagctcgacagtgaggatgctgtccgtcgctgcaaggagcggcgccgtcttatgaaggacgccgtctacgctcgtc

SEQ ID NO: 25057 - DNA, 513 bp, Arabidopsis thaliana columbia
tgttagttttagtgatagtttcgatgtttcgttgaacagcttcgccaaggctatgttttcaacattgaagctgggaaaaaagctctcagtaacatcaattcattggggctgttctctaacattgaagtcaatccacgcccagatgagaaaaatgaagggggcattattgttgagatcaagcttaaggagctagaacagaagtcagctgaagtcagtacagaatggagtattgttcctgggcgtggaggagctcccacattggtatgaatccttccttactgaaataagtacagattgtaaaatttgagaagttccattgagtttgattgttattgtttatatgcatcaggcttcattccagccaggtggttctgttactttcgagcatcgaaacctccagggtcttaataggtctctcatgggttcagtgaccactagcaacttcttgaatcctcaggtacattcgataagcttacatgattgatacatctctggttcaacttttcggttgat

SEQ ID NO: 25058 - DNA, 567 bp, Arabidopsis thaliana
aatgagaaaagagataactattcttagaattaagtttttgtgcatctgttaagtctttcgaatgcatcgagacgtaaaaaaaaaaaaagtaaaggaagaagaaaaatttaggcatataacttggtgagatcttcagagaattccctcctaattacatctcttttcagctttagagctgctgtgactaatcctgactctggcgtccatggagatgccaataatttgatctttgctggtatctcaaacttctccaatcgtgattgtttagccgcctgcataacacagatgttataaggaaatgactgggggactcaaatagcttggtaatgagtagcaatgaacataccttcacaagggacgcatacacttctttcacggcttgctctttcgtgcacagttcttcgaagttggcaaagtctattccttgctttgaagccaaccttcaactgtatgttgggacgcgccacaagagcccacagtaactgtagaacgaatcagcatgaaccattatgtttcaacatagggacttatacttagagcagcttcacctgcgagaaaaaagaatgt

SEQ ID NO: 25059 - DNA, 503 bp, Arabidopsis thaliana columbia
ccaaaaattcaaaccgtagtaccttatactcattatcctataatattggatttattatcattcttggaactactaagaatcatcatgtgttttcaaaacgttaaagattttgaatgaattgcagatggagccaacttgaacaatgatgatctaaatcagctttttattccatatcgaggatattgtgcgcgaaaaggggtatataatatatagttaatccttctaccatttcgttttcaagcatatatgaacagaaatgttttaacgccatgcactcttagtagatttctatgacggaggttgttctagacgattccgacgtagcaaaaacaatcttggattacgttaataacaacctggttaacaatcttgtattgggagcatcccgaagaacaccttcgctaggtcttttatgtttagtaaaccacatgaggtgcaatctagcataatgaaatcgacgcctgatttttgttcggtgtatgtcatttctaaaggagggaaag

SEQ ID NO: 25060 - DNA, 547 bp, Arabidopsis thaliana columbia
tattagctttctgcttagcaatggctatagctcgggacagcccaccgacagcatctattagaccacgagaatgagcatccttaccggtccacactctgccctgtgcaacttcttccatcttgtcgacctaggaacatggtaagaataaatatttagtcttgaaaaagcataggaatacaagaaagaaaacaagattggaacaaatacaggcatcgatcttgataaggctgctttatctcggaaaagctggtatgcatgctgtgcagacttctcaaacagttctgcttcctctggcctgttagcatacatttgttattatagtgaatgaaaggaacctataggttcttacaagagtagtttcgagaatcgaaattgacaaaaagagaaaaaccaaattggcatcaattgggtgacaaagaagtcttagacggttagagcctaactaagtaaaatcgttgtaataaacagagtgaggtcactcactttaaaggtctttcctcagcccccagaagctcagcatatttcctctagatatagtttcttgttg

SEQ ID NO: 25061 - DNA, 591 bp, Arabidopsis thaliana columbia
cagacaatgaaatgcattaggattacagataagtcattaaggggtcgaatgatttaaattggtaagagcattactcacaagaatttcagatcttcaccatcagatgccatcctcaaaagaagaggtggtttatcagctttaccatcagtgaggaacaactgactaccagtccgaccaacaaagaatggagctattggtgcagcaagtttctcaagaataggaactcccaacagaaaaggcagctgatacaaggggttccagaaaaagaggagagaatgagatagaatttacagggattatcaattaatattcatcactcatcagtctagacacttaggggaccaaatagcaaaaaacgcaagacagttttgatgaaacttatgatatctgtctgaacacaaggagaaggtagatgaaatttacatgtgaaaaacgactaactactttcttaattacgcatacaccacatctacgtacaggtactgcgagatatatatgaaactctttgattccaaaattccaattatgataagtagagaagaagagacctgctttctgcgttcactcctagatgaggtgttccaaagtgat

SEQ ID NO: 25062 - DNA, 511 bp, Arabidopsis thaliana columbia
ttccatgttcttgtaggagcactttcttgcctgcattacaatatgccaaagacaatgatcttcacatcactcttcactgtggagaggtattaactcttgaaaatccacttaaccgattttcaaatgtttatgtttcagattgtctactactttctctatcttagtgctttgtaggttcccaatccgaaagagatccaagccatgcttgattttaaaccgcatcggattggacatgcctgtttcttcaaagacgaagattggacaaagttgaaatctttccggattccggtaatagatttgcatgtaccattattctctgtttcttataatctctttaaccaatttcaagagtttgctatgttttgcaggttgaaatatgtttaacatccaacattgtaaccaaatcgatatcttccatcgatatacaccatttcggttagattttctctttccgctgcttcgttttctacattcctccttgttcatttaaaatcaaagcaatcttgacaag

SEQ ID NO: 25063 - DNA, 647 bp, Arabidopsis thaliana columbia
caacatttccagaaacagagtataaacgcactagtgagtgaaataagaatcagacatgagctcgttatcaaaaccaaacagacaatttttgtcaccaacaacaaacaaccaagacaccggcagagaacaaacaatcgcctgcgcccgagatatggttgtcttgtacaacgagtgccttaaaaaccacgcggtcagtctcggaggccacgctcttgacggctgcggtgagttcacaccaaagtcaaccaccatcctcacggaccctccgtcccttaggtgcgatgcttgtggctgccatcgcaacttccaccgtcgtagtccttctgacggcttcagtcagcaccggtcaccaccgtctccgttacagctgcagccactcgcccctgttccgaacttgcttctctctcttagctccggtttctttggaccctcggatcaagaagtcaagaacaaatttacggtggaaagggatgttaggaagactgcgatgattaagaaacataagaggacgaaattcacggcggacgagaaggtgaagatgagaggtttcgcggagagagcggggtggaagattacggctgggatgagaagtgggtgagagagttttgtagtgaagttggaatagagagaaaagttcttaaggtttg

SEQ ID NO: 25064 - DNA, 525 bp, Arabidopsis thaliana columbia
aataagttagtagagtgtaagataaatctgaattggtcgagtaaaattcaattagtagacagaggtttacgtgtatgtaaccatgaatgacccaatacagtgaatcattaagatgcatcacatgtatgtatgtctatcagttcagtacatgtgatccaaaatacagaagaaaagctgttatgtatcactattattcttacacacatcaaagagtcaagacaaaggatgttacataaagatgagtcctcaaaaccaatgactcatttattttaagtaaaaccaaaaacttccacattagctttagattaatgcaacggatcaacaacttggccaatgaacagaaccactcctgttatgttctctgtgaccaccaatagaaacggatggtctgcaacaaaatctatttcatcttcctccataagcaatcctcttagctttataactccagctgatgcagctgcagcttctgttccttcttcattcacttcgatacacgctttatggaaaatgttcgatacgcataga

SEQ ID NO: 25065 - DNA, 538 bp, Arabidopsis thaliana columbia
cagcaaaggagctcaagaagatgattgctttcaacacgttggttgtgactgaaatggtggctgatatcaagggagaatcttctgataaggcacctgaggaggaccctgttcaagagaaagaagaagatgatgaagatgaagaatggggatcccttgaatcgctcagaaagacaagacccgacaaggaactcgctgagaaaatgggaaagcctggccagactgagataactctcaaagatgaccttcccgacaggagcagaatagatctctacaaaacatacttgctctactgtgtaactggagaggtaacaagaatcccttttggcgcccagatcacaacaaagagagacgattcagagtacttgcttctaaatcagcttggtgggattctcggattgagttcgaaagaaatagtcaacattcaggtaggtttagccgagcaggcgtttaggcaacaagctgaagtgattttagctgatgggcaattgacaaaggctagagtagagcagctagacgagttgcaaaacaagttggtttg

SEQ ID NO: 25066 - DNA, 556 bp, Arabidopsis thaliana columbia
aggactcgaaaagggagactttggatgcttggttgatgggaaatggcaatgaacaagaaccattggagtttggtgtggatgaaacgtttgatattaatgagctattgggtatattaaacgacaacaatgtgtctggtcaagagacaatgcagtatcaagtggatagacacccaaatttcagttaccaaacgcagtttccaaattctaacttgctcgggagcctcaaccctatggagattgctcaaccaggagttgattatggatgtccttatgtgcagcccagtgatatggagaactatggtattgatttagaccatcgcaggttcaatgatcttgacatacaggacttggattttggaggagacaaagatgttcatggatctacataagatttcaaatttcgtttgactggcctaagtttgtgtgtctgctccgagacggtgtagctgttactagctagaagctgcccttctttgaagctactgatactttctgatattaatggttgtgagacgtagtacatgtagttaggtaatgtaggacaagtcaaatatga

SEQ ID NO: 25067 - DNA, 410 bp, Arabidopsis thaliana columbia
tatgaaagattataggcctattgccctatgctctatctactacaaaatcatagcaaaggtactcaccaagagactccagccaattcttcacttcctgatctcagaaaaccaatctgcttttgttcctcaacgggcgattgctgacaatggaatgaataacccatgaagttctacactacctacataattcaaaggcaaaagaaagatgctttatggccgtgaagactgatatgagtaaggcatatgatagagttgagtgggatttcattgaactagttatggagaggatgggcttccacagtacttggatcaattggatcatgcaatgtataacaacggtctcttactcttacctccttaatggatcggctcaaggttcagtgataccacaaaggggcattcgccaaggt

SEQ ID NO: 25068 - DNA, 507 bp, Arabidopsis thaliana columbia
aaaaaagattttcaatgtatgaatagtttagaagtattggaaatagaaaacttgatttaaagttgcttagatctaaacaatgaccaaaaaactatatatgtgtgttctaaaaacttgtagcgactaataataccaataaggaaatcttctgtggcaaacttccaattcttcaaactataaacattcttggactttactgggccgcaactggtgtctatcgacacgacaccaagagtcgctgatgccacaagttgacatcatctttttgcagaaaaacaattgttactatgattttcccacatgtaacaattattccctgttcgctttcctcctagaacaatatcaccggttacattgaacgccttgcaatcagtcctagtgaaagtaacttcaagtacttcatcacacaactgacttacacttatcagatttgcctttaaaccatgaactagatagacattcataaggtgaggggactatttcgcttgtttttcctttgccttgaat

SEQ ID NO: 25069 - DNA, 455 bp, Arabidopsis thaliana
taaactgcgttgcggttgcaatcgccacaccaaatccaaccaggtcacacagtctgctcgttcatataagcaacaaaagtatagttaacagatgatgcgtgtgaatgacatggatttttacaatgcgatatacctgaagggacccattggcattccaaacttgctgattgccctgtcgattagatatggatctgctccacactcaacaaggaacatagctgcctgtgtgtaagggaagaacatcctattcactgcaaaccctgtgcagtttcccaccacaactggtgttttcttaatcttcttcccaacatctaacaggtcaacaattacttgggcagaggtatgattggtccgaactatttcaagtagcggcatgatatgtgctggactgcatcagaaaaatgaaggtacatgattatgtgtggagtgagtaaaccactctgggcataagattt

SEQ ID NO: 25070 - DNA, 510 bp, Arabidopsis thaliana columbia
catggagactgctgaggagcttcacaggaagaaattggcggaagatcgacaaggagagatggaggaagatacagataccaaaaatgatcctatggccagagcagaggctgatgctctaagtcacggcgatgcctaatgaaagtaagcgttaccggattctcttatgcaccttgtcctgtaggataacaagtatgttttcgcctgagtgtgtaacactgtcactatcacctcatagagtttttgaggttagattgtttcttgaggttgattaccatgttattgctatagttaatagatttggtagtttggtgaaacttgcttgcttagaaaagtaagagtcatgtatctaaaccggatgctcttcatacaaaaagggtcatcactaataacaagaaccaattgcttttgactcaaagaagaaaacctaaatcctactcggaaaatttaaacctgtcaagcttagacccgcttgtttaccataaccaaatcagatcccattgctcgggtgga

SEQ ID NO: 25071 - DNA, 623 bp, Arabidopsis thaliana
catcttagcccgcgtgccaagatggtatcatccaattctctcttgcgtgtcgaagaacttacgatttctcgtaagttcctctgagcttaagattacgcgatctcttttggagaaagatcgcttctacgtctgctttcaagaacatagtaattctccttccttaaccacgtatcattggttcagtttcactgagaatcgtcgttgtttggtctcgatcccgttcacttctcctgttgagccttactttgcaactctcacgctgggccccgaaatctactttgttggcaagtctaggagcatgtggatcctcgactctcggtctggaaagttgcgtcagggtccaaggccgcttgtggcctgtgatcaggcagctgtgggactagttaacgacaagatttacgtttttggaggaattgatgacatgaataaaagatactacgaaggtatccatgcgcaagtgtttgacctaaagacacaaacttggcatgtcgggccaaatctcagtgtgaaattggcatgcctaaataggtctgtggtaacccgtcactaggcagaaaaatttatgtgaggggtatgatcgagacgtacaatctatgacataaagatggtaatgtgcaagataa

SEQ ID NO: 25072 - DNA, 589 bp, Arabidopsis thaliana
gggtttttgtgtacctcaaggtaccagagacaaagggaatgccccttgaagttatctctgagttcttctccgtcggtgcaaaacagcaagacgctgcagcttcatttctctctgatggatgactttctattctctgctgtctttttcaacattcctgctgtatttgaagttgagaacattaataataacaaatccataccatttgtttggtcttctagcatgcttcttcaggctgtataaagctttcctggattcttggtgttgtagctgcaaattgggagttcttcacatttgtaaccatgagatgagatctagacattaaccaaatttttatttttttgttgtacaagtcaaatcaccaggagattaaatacaaacagtgtaacaacaaagagggatatgtacatactagagccattatgaggtctctttggtgcaactaatttgctggaaatactttagttgcagcgacttgaaccatttgccagagatatcttcaagctgcctttccctagaggacctagccttggcgtcttcttctatctcttttacaaaggggagcaaagggtggatacgcgcggatggtgag

SEQ ID NO: 25073 - DNA, 533 bp, Arabidopsis thaliana columbia
ccgattcggcgtcatcgatgaactggagaatgtcgagctcgaggaaaggatcatgttcttgaataaacttccatccttcagtctgctcaacggtcttaaactgcgaatggatcagacgcatagatcgaaggcaaacatcgggtgcgtcgcagagccgagctagctggaggacgtcgactacgttctctgtagttaaacgttgtacaacgccttttgagcaccgttgcttcagctgggtgaccatgtagacgtgagacaacgctaaaagatggattccatatctctccatctcatcctccgtcaaactaaaacagagacgcaaaagggtagtttagtcatttcctgacagctattgttccccaagaaaatagcccaaaaaaaaacagagtttcttcaaatccgtgtatgaaaaagaaaaaccgggaaaattgtgtagtaccggaaataaccatcggtttgaagtttctacatttggaaaattcaagaagaataccgaaccaaaccaacctagaagagtagaggaatttgataaa

SEQ ID NO: 25074 - DNA, 537 bp, Arabidopsis thaliana columbia
gtatttgaattatttgttcacgtaattcaaattttaataattactcaaaattatacaatattttccaagatattgaaactattatcaatttgtgaatattcgggtggtattttaggtacattaatctgatatcaaattcgataaatgttggtcgatcgtatatttcattatagttctatattatcaaaatttcacgtcccgtattttactagataatttataaaactcccgccaataataacggtctcaaatagtgctcttcttacaaattcaaatattagtattgttgaatgtgaatgtgaattgatcaaattctcattgttgtttcttgtttgattgaacctttcgaaataaacaggaagatcttcaaggcggaatgcgagttcccaccgtggttttccttagaatccaaggaactactctcaagattgcttgtgctggatcctgaacaaagaatttcaatgtcagagatcaaaatgattgcatggttccgaaagaactttacaccatcagtagccttttcgatagacgaaacga

SEQ ID NO: 25075 - DNA, 515 bp, Arabidopsis thaliana
taccttttttttttatctaatttagaaatccctgagagctgaactgagagcagaaactctagtcacgagtttattaagagagaaattgtattccaaggaacaagaaatcgaacagctgcatgcagaagtagccgcaggggtacggggtaacgaagttcttcaatgtgaaattcaaaacgtattagacaacctatcactaaacaaccatcaactaaaagacctcaagctgcaggtatttcagactttacatttttgttactcataacgaattaaagctcctcgagtgtgttctgatgattgatttaacaccagatggtgaagaaggacgagaacataaaccggatggaaatcaatcttcaagaagctgctaaagaattgcttacattaccaaaagtgttggaggaaagagaagagatgtggaaggaagtgaaggaatgcagaaagagaaacatggatttggagtcagagaaggagatgttgaagaaaaaggtagagaaacttgaggggatcctctg

SEQ ID NO: 25076 - DNA, 434 bp, Arabidopsis thaliana columbia
cgaatctgcggttaattcttcaccgctttcagctgtgttcgccagaatcataccagcaccaccggctagcttgactgcacttcctttctcaactcttgcgttgcctcctctgtcacagagcacgattttgccttcaaccaatgatgaattcaatttcccagggtaacacaatctgcttccgcaatcgccggaatataccagagaaagttgagaatccggtagagattcgcctgcgtacagtgatgttcccgtgaagactttcccgtctcccgtgattgcgtttgcggcgaattctctatcgacggtggacgcaccaacggttaagatccatggagcgatgttcgtcgcggtttcaggattaggaccagaattcccagcggacgaagaaacgacgatgccgtgccgcgtagctccaaatgctccgatcgctatag

SEQ ID NO: 25077 - DNA, 494 bp, Arabidopsis thaliana columbia
tcctaaatacaaaaagggtttataagttagatagaaattcttaccaagatagacggagacgagtgaggccaaaagagatagcatctctccagccagtgcaaacaccagaagcaacaatgacattacgatcatcaacaagggaaaggatcctcatcagaagctccacagggatatctttccactctttgatcgagattccttccatcttcatcttctgaaaacactggtccagttccatggatgcttctcctcccatcaccatctttgtttaatgactaaaatgaagcggtgaacttgatcctatcaccacaaaggaatgagagtgaaaaatctgccatttaccgattttacaacctcaaaagacggtagtgattggaaattaaagttcatagattgctctggtgtctagatttttccagaagtcggacaaattcagtgactaaacgtaagaccagaggatttgctacaaagaaaacataattctctcaaagaat

SEQ ID NO: 25078 - DNA, 474 bp, Arabidopsis thaliana columbia
taatatatatcgctactatataacattcttctgttatcttgtgtgtatagatttcagttacctgttcttgtgcatcgaacaattggcggtgagtccacagttggaaaacaagatatgcaatgtagctgatcaacataacaatactgaagcctcgcgatatactcagttgcatgtcggacaaaacagcagccgaagcctctccgtttttcaagtatcccaccaacaatggcagcaagtgacacaagaaacccagtagaagtaagaagaagttcacatcggcttgtttctgcaacaatgaccacacaaattgatttcgtttagcatatccgttattaaaatttggttcaaacataccacttgcttgtttatcaagctaaacttttaaacaaaatcctggttaacactagccggtacaaacctatttcattcccggttcaattatcttaactaaaaaaaatattattggttttgaaa

SEQ ID NO: 25079 - DNA, 439 bp, Arabidopsis thaliana columbia
gtttataagttataaccattaaaatcatgttgcgatgttgtagaagtaaatataaatctaagacttgtacctccttcaaaaattctgcaacttttcattgaggttttagttgttgcaagtttcgattaaaccaaacggatcatatgcaccagcattaacaaaaaaacaacccgatattttgaagactcaaaaccagaaaagattacgactttagaagtcccaaaaagtttgcagcttcgaaccttttcatcaaacactgccttggccaaagtcttgaatcctgtcaccacgaacatttaagctctccattgcattctccaatccagaactcatctcagccaacacatgaggatcattgtaatgttgaacagcttgaacaatgctcctaagtttcttaaacggatcaggaccaatcaaaaactcagaacccacaaaaacc

SEQ ID NO: 25080 - DNA, 556 bp, Arabidopsis thaliana columbia
ccattgattccagaaaatttaaaagctttatacttggacgggacatcgataagtcaacttcctgacaacgtggggaacctcaaaagacttgtcttattgaatatgaaggactgcaaagtgctggagactatccctacctgtgttagtgagctgaaaactcttcaaaaacttgtactttcaggttgttcaaagctcaaggaatttccagaaatcaacaagagctctttaaaaattttacttctagatgggacatccatcaaaacgatgccgcagttaccctcagtacagtatttatgcttaagcagaaatgatcatctcatctaccttccagctggcatcaatcaagtttctcagttaacacggctggatttgaagtattgtacgaagcttacatatgttccagagttgccaccaactctccagtacttagatgcacatggctgtagctcactgaagaatgttgcaaaaccactggcccgtatcatgtcaaccgtgcagaaccattacactttcaatttcaccaactgtggtaacctggagcaagctgcaaaggagg

SEQ ID NO: 25081 - DNA, 985 bp, Arabidopsis thaliana
ttctttcataaatttatgttctaatcaccactgatgacgatgatgaacccattatctttttttttttttttaatatgaacccattaactttctagagccaatcaaaatagctgtacaaaagaaaagggtgtcataaaataacttgtttgcttcatccatcttatatttgagtacaagagattagtaggatatttaatcttggcaaaacctttgctaagaaaatattgagtacaagttttaagtggtggtccatccaagaagctcatttgaactattaatataccttgttcatataatatgtaatttattaacgtatatgtaagtaaaattttaaaaagaaaacaaaacggtccaaagttgtaccctctttaccaatcagaaacctaacactaaactctctctgtctctctctcttacatatataaaaacaaacctctccaactctgaactcaactcatatctctaatcactaaaacataccacaaagaagaaacataaaaaaaaaaagtatggcggcttatctagagcgatgcgacagtgtagaagaagattacattgatatggaagtaacttctttcacaaacctcgtacgtaaaactctgagcaacaactaccctcgagagttcgagttccaaatgtctcatctttgtcctcttgagatagacaaaaccacttcccctgcggacgaactcttctacaaaggcaagcttctccctcttcacttacctccacgtctccaaatggtccaaaagattctagaagattacaccttcgacgacgaattctacagcactcctttagccaccggaacggttacaactccagtgacgagcaacactccgttcgagtcctgcaccgtctctccggcagagtcttgccaagtgagtaaagagcttaaccctgaagactacttcctagaatattcagattcattggaggaggacgatgagaagaagaaatcttggaccacgaactaagattgatg

SEQ ID NO: 25082 - DNA, 457 bp, Arabidopsis thaliana columbia
taaccttgtcatatttcttgaggattttacggatagcaattgcattcatggtgatgtattgaatcaagatttggccctcttggactaaagcttgtttttcgtcagtgaagcatctgcgtaggcgaatcatgtatctctgcatcccagtggctacatgaagatggagaagatgcctcactctttgacctgaagaaatcccgctatgtcagtagcgtctttcatcagctcctcgaagaacatctgatcacaccctgcattgtaattaacatcatcttttacatcaaccacctcatctcacatcattaaacaatacactcactccactccttaataatttgaaatcttttacatcaataaacatttagattattctagtaggattcacatcagaaacctagaaaaaatctacagtatataatagaattagactaatccattcagtgtcaattggtttaga

SEQ ID NO: 25083 - DNA, 548 bp, Arabidopsis thaliana columbia
  unsure (1)..(548): unsure at all n locations
ccccgttggccttagaaaaatgaagctaatgaataattttcttattgtctaggtgagtacgaagtttggagatttgctagcgtttagcggtccagcacccgagaggatcaacgggagactagcaatggttggattcgtggcggccatcgccatggagttatcaaagggagaaaacgtgtttgctcagatctctgacggtggtgtcgggtggtttctaggaacaacagcgttgttgacgttggcatcgatggttccgttgttcaagggaataagggcagaggcaaagtcaaaagggttcatgacttcagacgccgagctatggaacggtcggtttgcgatgctcggtctcgttgcgttggccttcaccgagtacgtcactggtgggactctagtctaaagctaaagctttttgtttgctagtttaaggacaaatttggagaatgattatgtaacgcatagattgatttaatactatgagttttaaacagtgtgtcacatgaatcanatttaaaccatgaaaaaacattataaaatttatttgaaaaagt

SEQ ID NO: 25084 - DNA, 1170 bp, Arabidopsis thaliana
tgcatatattcttctcgaacacctgcaaacaatactttttaggttattaatgtgcatgagcatgaaataacaattaattattattcattaacaaaatagaattctgaaattttcaaaaacagttgtatttatctgatattttttgtgagctaactttcgtaattaaaagctttgaaagcatatattattttggtaagttttttaaatactgttgttgtcttcgggtcgttgttgcctccagatacattaataatacaaaggttttaaggtccatataaactcaagtagtactaatctgtctcttttcattaataataatttaacaaaaagaacaaaatcaaaatcactttcacagtttaagcacaacggaatttagaagtttccaactgactttacacacagagagagtcaattattgtcagacatgtcacgaaatctcgcaagtgctttcttatggagaagagttctgtaagtgtcaccaggctgaacctcaaactcagcatcaactttcttctgctgactcccaagtcctgctctcctatcaacgccttgcgcttgcaccggttctttcattccgctcccgtctttccccaaaccctgaccacaatccaacaatcaccattaacatataaacgttacccatcaatcaaatttctggtttttaaagttaccgatccttcgtgccaacccatgttcctcagcattctgtttcccacgttactctcatctattgctctctcttctgtaatcacatcgaaactactgacttcggtgcttgttgtaatcccacgtccacccacaccaggaggaaatggtgttggatccgatgaacctttcctcaaccccattaaatcctcaccttcatttaaacgaaccattttcccaattataacaacaataaaaacctcatttcaggattctatttttagaaaagtctagagtcaagggctcttacttgaatcaataacatcatttccacttgatgttgatgagccatacaagtttcttctttctgcagcacggtcccggtatgatgtctgaggctgttctctatgagtaggccctgcagtcggtgtttcagagaacttcttctcccactcccagaaactgaaaccgaagctggagaagcagaaggtaatattggcggcatttgtacactagctgaagaag

SEQ ID NO: 25085 - DNA, 529 bp, Arabidopsis thaliana
gtagagcatacgttagcaaacacaagatgtggtggcaacggttttggcaaaagggtctgctcttggacaagatgcagtgaataaagccaaggctttcgacgaaaagcaccaattaagagccaatgcttctgctaaagtttcatcttttgacaagcgagttggtcttactgagaagttatctgttggtatttctgctgttaatgagaaagttaaatctgttgatcaaaagcttcaagtctccgataaaactatggcagcaatatttgcagccgagaggaagttaaacgacacgggttcagctgtcaaatcaagcaggtataaatccttagacatccttcttggtaatagatatggcaggaatcaactttgtccatctttaactacttttctaccctgactttatgaatttgtttctttgtttgtgattatgcttccaaataggtacgtgactgctggagctgcttggtttagtggcgcttttagtaaagtggcgagagtaggtcaggttgctggctcaaaaaccaaagag

SEQ ID NO: 25086 - DNA, 467 bp, Arabidopsis thaliana
tagtaacgtccgccagtgtgctccatatctcgttcctataaattaaaccagcttagaacgaaattttaaggcaatatttcaaatcgaacaatactgcaaaaccagagagagggagagcgagagagatcaaaaaaccctaatcgactaaatcctctcttcttcttcaaatttttggttaatttcttcggctgaagaataataatcatgaaaactgtgacttctcagcatccttcttcattgtcaccaccatcttttcttcctccacaaattcccgtcgaagcgtacataggaagtttcgtcactctgattgctaacttcgatatacgttacgaaggcatactctgttttctcaatctccaagagtcgactctaggtcttcaaaacggtactttatttcgattcaaaacctctaagaaactttgatttgttcttttcttgttgtcaagcttttctaactaggttttttt

SEQ ID NO: 25087 - DNA, 353 bp, Arabidopsis thaliana
aggatcccctcagaaccctctgacgtgtacatttgataatcccctaacatgaaaatcactctgttataaaacccaattggtttcaccatcccatcataactcacactctctcttcaatcctttcctttcattgtagttaaacaaagattacgattatggccacatcagctatccaacaatcctccttcgccggccaaacggctctcaagcactccagcgacctcatccaaaaggtgggcgtcttgggcggtggccgtgtgaccatgcgtcgtaccgtcaagtctactccccaaagcatctggtaccaaatttatcctctctcgctcttatatgtcttaagtcatccttagttg

SEQ ID NO: 25088 - DNA, 382 bp, Arabidopsis thaliana columbia
ccatccgtacgatacatctcgttaacacgtgcacctatatttaaacacacgataaaaatgtttgttattcggattaattgttacaactcataaccaagttcatttgtaatgtagactcacctggctacgaacaacgatggagacattagcgttgcacttagatagatcataagcaatctccatgccagaatttccacatccgacgaccaaaacatcttttccagcgaacttctctccgttcttgtactcacttgagtgcaaatactttccttgaaagctctctacaagccccggaatctctggaatcacaccttcgccattctctcccgtcgcagcaaccataaacttcgccgagtaaacttctatcaacgccgtggttttg

SEQ ID NO: 25089 - DNA, 916 bp, Arabidopsis thaliana
ccttgaaccacacggcttcaccgaatttgactccgttttttgagagaatttcagggaaggtgcagcctaaagctcccaacattgcccatctactgtggatcacttcgagctcacgattctttgcgaatgtttctggatcggctgagagaccagcggtgtcccaaccgtagtctccagggtattctccggttaggtatgatggtgtgttttcggaaaatggtcctaggtatttgggacggtctggtccgtacctgtcacaaatgttttgttgggtactaaattagatggttggcatttgtaataaatggaaaatctctttcaagaataacaaagattaggtcatttaatagagagagtgtgaggttggaaccagatgctctgaggagtagacttgacggtacgacgcatgatgatgcggccaccgccattggaggctccgattttgcggaggagatcgttggatggctttagggtcgtttggccagcgaaagaagagtgttggattgctgaagtggccattgcttcttctaaacaagaacacaaaaaaagaaaagaagtaagtgagaatgagatgttgttgaattggagacgccgtttatatagtaaagtgttcattactccattttgtgggaagattaacatatagacacgtcagcgagtgtagattggttggttttagatttccacaaactagattcacgtgtagaagatatgtagagattgtggttatgcagcgtgggagtggaagatctcgtggcagtgaaaaatgtccacgtaagcgaacaagtggatagtgttgtcccaacatgctcatgatcactctcttattggtttagtggcaatgcttgctattgcgttgataaataattataaacaaagttatattacgtacacaaagagtatatcataagatttt

SEQ ID NO: 25090 - DNA, 536 bp, Arabidopsis thaliana
atgaattttacaagagtggatatttcaattcaattgagtcttcagataaaacgccaacacagttagagaaaaagaggttcgatttctatacaaagataccacaaaggaaagttcacaaatttacatagaatagaccacaaacaaactctctttctctgctctcattcacataataagcagccgctcactttccggggacgaagttggtggcgaaggcccaagcgttgttgttgactgggtcggccaaatggtcggcgaggttctccaaaggtccctttccggtgacgatggcttgaacgaagaatccaaacatagagaacatagccaaccttccgttcttgagctccttcaccttcaactctgcgaaagcctcggggtcagtagcgaggcccaatgggtcgaagctgccacctgggtaaagcaagtcctctgcttctcccaatggaccatctccggcgactctgtagccttcaacagctcccatgaggataacttgagtagcccaaatggctaagatgctctgagcgtggaccaag

SEQ ID NO: 25091 - DNA, 1277 bp, Arabidopsis thaliana
gtcatccgctttagtgagtcgttttacaatcactaaagcggttctaccatccaatgttgtgtctaaaatatttgcccctttcattaacaatgatattatcaacttcggctccttccgcatcgcagcaacatgaagcacagtgtatcccctcggatttctaaggttaacatccgcaagctcaagctcgaggagatcatacgcggtcttcacagcgcagtgagcgatacgaacatgaagagcatacgcctcatcgagattggtgtgtccttctagcaaaagcatcttgacaagctcaacatcatctgagtctagcgccttgtatatgttcttgacatgcctttctagtttaggtggctctagacagagcgcttcgcggatgtctatgatttgcttgaaaatgtgttgaggtaaagacttctcaagactaactagttctatatcagacttcacgataatttctatgcatctatccaaaagcttcttgtatgttgtaccacatagagtatcaagcttgaatataaccaagatgtcttcgactacaactttgtctacaatttccaagaactgcctctgaaatgaaaacagaggagacttaagatgatgttatgagtcaatgagaatttagtggattgtgttttacctcatacagagtaactaattcttgaatctggaaaacgaaagacagataaagaacctccaccatgaaatccacctttgaccggcaagccacgtggcaacaatcgtcgtctacgcaagcagaagctcccttcggcggggacctcactctgccgctgtaaacatacgccaaaaccgccacaaccgagtcaaagccgacttcgtaatctctggcgatctctttcagctggagcttcacggtggtggaggatttttgttccttcacggtggctaaagcgcttttgaagacaggaattctcgcggaaagaatacaacggtgaaaagaaacttcccggccgccggcgagaactagcttagcatcgctgtagaacgtctccggcgagtcgaaaacagactcgaggcagttagacagaagtttaagagctgatacctccggtggcgtgagaaattccgtcggataatcaagagatgactcggcggcgaagaagctattgccgcttgtgttgctgaactcgtatgaatcagagaatctagcggtggtggtggtggtggtggtggccatcatcacgagatcggcgggaaacaaaacagagtcaagagtctaataacagtggaatttcaagacacaacgaccgaatcgt

SEQ ID NO: 25092 - DNA, 771 bp, Arabidopsis thaliana
tttaaaggaaagatcacacaaataagttatctctattcagaactattaagctgcttccaaaagacttgcaacatgtggtctcgaaatgctttggctgcaatgaaaaaatcatagcaaaagctagtggactagagactgccacataagaatagtaaacgttaaaaccaaaatctcaaaaatccaatgagtaaagagatatagattacttcatagataacaaacgttactcgcaattttcctatataatccaaccctacctaaccattttcaatcactctcactcacaagttagtcaccaaaaaaaaaaaaaaacacaaaaagtttcaatggccgcctccacaatggctctctcctcccctgccttcgccggaaaggctgtgaacctttcccccgcggcatctgaagtcctcggaagcggccgtgtgacaatgaggaagactgttgccaagccaaagggtccatcaggcagcccatggtacggatccgaccgagtcaagtacttgggtccattctctggcgagtcaccgagctaccttaccggagagttccccggagactacggatgggacaccgctggactttcagctgatcccgagacattcgcaaggaaccgtgagctagaagttatccacagcaggtgggctatgctcggagccctaggctgcgtcttccctgagcttttggctaggaacggagtcaagttcggagaggcggtttggttcaaggccggttcacagatctttagcgatggaggactcgattacttgggaa

SEQ ID NO: 25093 - DNA, 1186 bp, Arabidopsis thaliana
caaataaagccatattaaaccaacagatactataggcccaatatcacttcctaactaagcggtgaagttttgtagccattagtggaatttctgatcccattgctgctcctctctccggagatacaaaggcgaatctgaccagtaagaaagatggcagtcgagatggcctctcagtctcaggtctctttcttgcgtctttaatccgaatctacgacgatcaattcttcgctctctgaattaataatatgatcacaggttttggtggaagagaaatcgagtgttagaatcttgacactaaacagaccaaagcagctgaatgctctgtccttccacatggtatcgaatatttcccttcttgtacatgcgtactgtattggcttagactcatttttttctgtagatctctcgattgctgcaactgttccttgcatttgaggaggaccctagtgtgaaacttgtcatcctaaaggtaatcattatccttatctcttccgcttacacacatttagtactgaataactttgccacagggtcatgggagagccttttgtgctggtggcgatgttgcagctgttgttcgtgacatcaatcaaggtttaccacccattcttttctgtttcttactttcagcttttatacactctttctctatcttcgttcgttgactaggtaactggagactcggtgccaattacttctcatctgaatacatgctcaactatgttatggccacatatagcaaagctcaggtctcgctataatttcgttttgtttttgtaaaatcactcccgagtggataaactcatcaattcgtataggtttcaatcttgaatggtatcgtcatgggaggcggacgtggtgtatccgtccatggtcgatttcgtattgcaactgagaacacggtaatctttccttaaacatgtccatggatgacaaataggtcgctccaaaatatgctcatatctttcgactttctccaaggtttttgccatgcctgagacagctctggggctctttccagatgtaggcgcctcctacttcttgtcaaggctccctggtttttttggtaacagaagctatatttcctttttttgcatcttcttaaagccaccaaagtttgaaaatgctttcttgtcttttttgttcaggggagtatgttggcctcacaggagctagattagatggt

SEQ ID NO: 25094 - DNA, 535 bp, Arabidopsis thaliana
tattacattcaaccgccatagtggcttgttttgcgatcatgagtgcggttctaccttccaaagttgcttctgatgcacttgcacctttttccaatagagatagtatcaattgtggctccttccgcatcgcagcaacatgaagcaccgtatatcccctcggattcctatggttgacatcggcaagatcaagttttaaaagatctgttgcggtcttcacattgcaatatgcaacagcgaaatgaagagcacacgcatcatctagattggtgtgatcctctttcaaaagcaacttgactaactcaatatcatccgagtcaagtgccttatgtacattcgagacatgtttctttactttaggtacctccaaaccaagctctttacgtctatcaattatctctttaacaagctcttccggcaatgacttttcaagactaaccatatctacattagacttgacaataatctctttacatctatccaatagcttcatacaagctttaccacatatattagcaagcttgagtataaccaatgt

SEQ ID NO: 25095 - DNA, 479 bp, Arabidopsis thaliana
tagtaacggtaggagcaccccaaacgcaaaaacatcagtagcggttgtggcccgtcctgttctgacatgatccggggctaggtatccccaagttccaacaacacgcgtagtttgaggatccgaaccgtgatcgcacaaccgagctaaaccaaaatccccgagtcttccgttgtactccgcgtctaacaaaacgttgctggctttgatgtcgcggtgaatcaccacttgttcccattcctcgtggagatagaataagccagaggcacacctataattacattaaacctctgtttccaatcaagtgttacctcaggacaatcgtacaaatacttgtctaagctaccattaggcatgtaatcatacaccaaaagaagctcgtctctacgacgacaataacccaagagaggaactaagttccgatgactcatcctaccaatactcacaatctcagcaacaaactctttcaacccttgtcgaga

SEQ ID NO: 25096 - DNA, 720 bp, Arabidopsis thaliana
cctccatcgctgaagatctgtgaaccggccttgaaccaaaccgcctctccgaacttgactccgtttctagccaaaagctcagggaagacgcagcctagggctccgagcatggcccacctgctgtggataacttctagttcacggttccttgcgaatgtctcggggtcagctgaaagtccggcggtgtcccatccgtagtctccggggaactctccggtaaggtagctcggtgattcgccagagaatggacccaagtacttgacacggtcagatccgtaccatgggctgcctgatgggccctttggcttggcaacagtcttcctcattgtcacacggccgcttccaaggacttcagatgccgcgggggaaagcttgacggccttaccggcgaaggcaggggaggagagagccattgttgaggcggccattgaggttgagtagtgcagcacaaagtaaaacgtttaagatttgttgttgtaagccaagaaatgggtggtttggtattgatgcgattttcgctatatataatacagaaatctaaatactgtcttatcttgaaatatcaatctctgaggttgatattggctagtcatagattttttttggggtttagattgtctgtttgcttacgtggttaatggctcgcacttcgcagattcgcaattgatatgtgttttagatatctaggtgcgtttcatggattggcgaaacacccactca

SEQ ID NO: 25097 - DNA, 739 bp, Arabidopsis thaliana
tagtaacgcttgagactgatacgattcaaagggatagaaacacgtcagatttacaagtggcacgtcttcaatggacaatgggtattccaatatgctaagatgctacgagatatctaatttatctaacacaactcaattccaaaccaaaaatctgatgccagctcgacaagacaaaaaatctaagctcaaaaatgtcaacaaccaatagaaatcaaggcattgacgatatcacgagataagcaaattaaatcttcaagttttgcaattcatatgtacgttataaatacccaaaaacctcaccgtaacctagctatccaatttcatcacatcttattaactaaagagccttttacttgcgccacactctcaccgcaatggccgcctcgacaatggctctctcctctcctgctttgaccggaaaggccgttaagctatccccggcggcctccgaagtatttggaaccggccgaatcaccatgcgcaaagcctccaagcccaccggtccatccggcagcccatggtacggatccgaccgagtcaagtacttgggtccattctccggtgagcctccgagctacctcactggagagttccccggtgattacgggtgggacactgccggtctatccgccgatcccgagaccttcgctaggaaccgtgagctagaagttatcacagcagatgggccatgctcggagccctaggctgcgttttccctgagctattggctaggaacgga

SEQ ID NO: 25098 - DNA, 334 bp, Arabidopsis thaliana columbia
catctctcatccacatcctctctcgatctcgtctcaaaagccacgctagtgaaatcatacgtctcgctctccgtctcgccgccaccgtcgaagacgaggacacattcttgaaactgttccgttcggtgattatgagttattatccatgtggctcttctccgtttgtattcgacgtggtgataaaatcttgtcttgaatcgatacggattgatgtcagctgtgattgtgatgagaaagtttaggtgtagagggatcaattcactgattattactcgtgatgctgtgatcacagaggtatccaggcgcagatgtgcttctaatggatatgagatgt

SEQ ID NO: 25099 - DNA, 524 bp, Arabidopsis thaliana columbia
cgccttgtaaagagaatctgctgcgatctccatcctcctcatccgagccatgtcacggaaaaaggctaagatctcctccgatgaagtctcgacggagcgtgacggtgattcacatagatgcgatgtgaaagggacggcggtttcgattgtgatcggtgatgagtctgtggaaacatgacggcggatggaggagggcaaggcggtaatcgcggctttaggaaagtgttggatcgtgaagaaagtcgtgataacgccatcgccgaagctctccgatttgcttttagaaattctcttttttgcagtcaaaaatcgaatctttttaaagtgagggaaagagttaggagagggcgaacgtcgtttatggaaaaggtcaaaccttttatggtcatttgactcatttctatataacataccataacaaaatgaaatttttgataaatgttacaacaacatacaaaactttacaacaagagagtgaataaagacaaactttacatatgtaacatcatttttgtgagtgattg

SEQ ID NO: 25100 - DNA, 317 bp, Arabidopsis thaliana
ccggatcgaacagatcctgatgggctgcgtcctgcccgccggcctcggacaggccccggcgcgccaggcggccgtcgggccgggctcgggctccacgtcgaggccaccaccgtcaacaagatgtgcggctcggggctgcaggccgccgccatggcccacgacgccctggcgccgggacggtcgaggtgatcgtcgccggcggcatggagtcgatgaccggcgcgccctacctgatggccaagcaccgcggcggcgccgcatcggccacgatgtgatcagcgacacgatgtacctcgacgggctggaggacgcctata

SEQ ID NO: 25101 - DNA, 277 bp, Arabidopsis thaliana
tctagtaacgtcccgccagtgtgctctaaaggttgatgaagctgaggacgataaccgagaactagttgaagttgcttaaatcataaaagatcctcaacgaatcataaaacttggaactcgaacaccagcaggtgttcatttaaatcggagctccagggacagcttagcctgcgaaggcaaacgcagtcgaaggagatgcacgagtcccaagcatcactagctctggatctgaagacatagatgtctaagtcggagatagtgctagtcgtgttcgctc

SEQ ID NO: 25102 - DNA, 1421 bp, Arabidopsis thaliana
ttttgaccacagagaaaccttactttattatataagataagattcacatatttagcaaaaagaaagaaagaagaaaaaagtaaacacaatacaagatattgagatatcatcatcacaaagaatccaattaaaaatcagtgtcacttattacaaaccacaagatcttcaactgccagatggcaccaccacagccactaccaatcttctattaggaccaaggaaatcttcgaaatctcgattaaactctctcaaccaatcagaattcactgacatgtacatttgataaccctctaacatgaacgccttctctgttataaaaccatattggtttcaccatctcatccataactcacactctctcttatctcctttcctttcattgtagttaacgaaaagattacgataatggcaacatcagctatccagcaatcctccttcgccggccaaacggctctcaagccctccaacgaactcctccgcaaggttggtgtatccggtggtggccgtgtgaccatgcgtcgtaccgtcaagtctactcctcaaagcatctggtaccaaatccactctctctggctcttacctaacctatcattaacttttcagatatgtctaatcaccaaattcatcttgtaacaggtacggaccagaccgtcccaagtacttaggaccattctcggagaatacaccgtcctacctaaccggagaataccccggagactacggctgggacaccgctggactctcggctgacccggagacattcgctaagaaccgtgagcttgaagtaatccacagcagatgggctatgttgggtgctctcggatgcacattccctgagattctctccaagaacggtgttaaattcggagaagccgtgtggttcaaggcaggttctcagattttctcagaaggaggtcttgattacctcggaaaccctaacttgatccacgcgcaaagcatcttagccatctgggctgttcaagttgtgctcatggggttcattgaaggctacagaatcggaggtggacctctcggagaagggcttgacccgctttaccccggaggtgcgttcgacccattgaacttggctgaggatccagaggctttctctgagctgaaggtgaaggagctcaagaacggtcgtcttgccatgttctctatgtttggattctttgtccaagccattgttactggtaaaggtcccattgagaacttatttgatcatttggctgatcctgtggctaacaacgcctggtcttacgctactaactttgtccccggaaagtaattatcttatgtatttgcttcataatctctctgctttgtaaactcgtgattgtgtaatattgacgtttgatgtgaatttggcacttaatgatgtttcttgggacttgattttttttatttattggcaagagtca

SEQ ID NO: 25103 - DNA, 558 bp, Arabidopsis thaliana columbia
atttttaccttggccttgtcgattctcttgactgcaacgcgattgccattgttgttatcggtggcgacgtaggtaaagccaaactggccatgtccgagcaatttcccaatggtgtatcggttatcgaaatccttagcgtacccaaaatcgatgcgtttaccgtacgggatccctccttggtgcctcaattggatcttcttcgtattcttcttgtttttattactaaccttctcactcgccttcccctgcgtcggagaatcaggattagggttccgactaccggtgccacgtctggtggctttaggagacgagaaacagagacccatgtgatgcttgttgggtccctactctaatggaggatattttcacagatgagcgaaaattgcaaagatgaggaaggtgaagcagattgtacttgtttacctaattaatgtgtttccttagacaacgattttcaaatcttgttgcgcacgaaaataaaccactatttcggcagttattagcgttggcattcattttggctattacatttaaacttgtgagtcgttgtgtgtagag

SEQ ID NO: 25104 - DNA, 1162 bp, Arabidopsis thaliana
ccagtcataaaaaaaaaaaaaaaacaaaaaaaaatcaaaggccgcctcaacaatggctctatcctcccctgcattcgccggaaagatgataaacctttcccctgcggcatcagaagtccttggaagcagccgtgtgacaatgaggaagactgttgccaagccaaagggtccatcaggcagcccatggtacggatccgaccgagtcaagtacttgggtccattctctggcgagtcacccagctaccttaccggagagttccctggagactacggatgggacacagctggtctatccgctgaccccgagacattcgcaaggaaccgtgagctagaagttatccacagcaggtgggccatgctcggagccctaggctgcgtcttccctgagcttttggccaggaacggagtcaagtttggagaggcagtttggttcaaggctggttcacagatcttcagcgatggagggctcgattacttgggaaaccctagcttggttcacgctcagagcattttggccatttgggccacacaagttattttgatgggagccgttgaaggttacagagtcgcaggaaatgggccattgggagaggccgaggacttgctttaccccggtggcagtttcgacccattgggtttggctaccgacccagaggcattcgctgagttgaaggtaaaggagctcaagaacggaagattggctatgttctctatgtttggattcttcgttcaagccatcgtcactggtaagggaccgatagagaaccttgctgaccatttggccgatccagtcaacaacaacgcatgggccttcgcaaccaactttgttcccggaaagtgagccaagttttatcagtttgtattttgcttttctttcagtcttttgaattcgagtgagagacatgaggagaaagagaaggttgtatgtgatggtttgagactttcagatgtaaatttgcaagactttgtatgatttgtcattaatcaaactcaattttctctcatactagtctcgtattaactaaaattcaaatggaatgttcttgggttcgctcaaatgaagaggctgtttctacaattgcacaatcttatagaacataactcgagtttaagccaagcgttacatgacctgatacaatcaaaggcttgtgtatatctgaat

SEQ ID NO: 25105 - DNA, 519 bp, Arabidopsis thaliana columbia
atctagatggtatagctaagagttctgcgattttagcttctaacacaagttctatatccattactcgtcttgcatctgctacgagaagacccagccaggtttaagactcttttacttcctctgcttgagttgattatttatctgttcatgagttttcaggtgcgatcatttcgaaccttatattaagtgtttgtttatcgtctataggtcattggaatgcactttatgaaccctcctccaataatgaaactggttgaaatcattcgcggtgcagatacctcagaagagacgtttcttgctacaaaagttctggctgaaaggtttgatattttcttgaaataaagtttacattgtatgagatattttcaacttagtatcaaatgttggaatgaaatcaaatgcattatctatcaaaactgttacctttgggtcactcgaacgcagattacaaatctcttttaaggtcgagaacaatttgattataggacatccttgaaatagccgtcttgtgtttgattg

SEQ ID NO: 25106 - DNA, 572 bp, Arabidopsis thaliana columbia
cgggccatacgcaagcggttctggttcagagtctggtccaggatgggaagcgtttaaggatgattctgcggattgggaaacagctttggtgcaaacagctacaaacttgtcaggacaaaagtcagaactcggaggaggcttagatatgttgttgcttaacggaatgtatcatcacggcgctgtaaacgctgccgtgaaaacatcgacggcttatggagccagcggaacgcgagcagtatggcatttggttctgcaggaagaccagcaggttttaaacaaacattactttgctctgttcttaaacttcttagaattttttgctctgtttttagttataaattttgctctgtttcagtttgcattctgatgatttgacatgaatattctattgattacagcaactatgctggcacttccagcaccatcaacggctaatggaaacgccggaaacattaacagtccggttcccatggatccatttgcagcgtcattggaggttgcgccgcagcatatgtgcagatgaatgatatggagaagaaacagaggatgttgatggaagaacagatgatgtg

SEQ ID NO: 25107 - DNA, 555 bp, Arabidopsis thaliana columbia
cgtgtacccctgtctggtggtacaatacatgggccaggcagctttcctgtcaaagaacctcgggtctattcctaacagtttttacgattcagtcccaggttcatttactttgacaccagggtttaatattcacttttttccttgtgataatgacaatcttatatgatcttggtcctttatgcagatcctgttttctggcctgtctttgtcattgccacacttgcagccattgttggcagtcaggctgtgataaccactacgttctcaataatcaaacaatgccatgccctagggtgcttcccacgcatcaaagtagtccatacttcgaaacatatatatggacagatctatatcccggagatcaactggatcctgatgatccttactcttgcaatggctataggctttcgagacacaactttgattggaaatgcctacggtaaactttatatcattgcaaactatatttccctctccaggatctgattgtttgatggtggtctctcattagcacaggaatcgcatgcatggtagtaatgttcacacacgttttca

SEQ ID NO: 25108 - DNA, 579 bp, Arabidopsis thaliana columbia
tgctgttatctttgatgaagaatttcttggcacaaattcagaagatgatttgactcttttctctaaaaggaagctgccaactgatgcaaactttgccgccttatagccactgcctttgctgtaagtcctaattttttccacacatgatttttgccgaagcattgctatctcttttttagtacggccttttcgacaagataccaatttttcatcagagactagagtaaatgatgtacttctcatgccttgacaagaaacagtgctacccgagcatacttcttttcctggtgttgttccactagactgagtttttttggagttcggtgtatttgggaagtttccaaatttgagtggctcattccgattgctttgaggatcggattggggaggctttgggttatctgggtcactagattttggaggattagattcagcaccaagagattccgaatcagataatttacttgaactcaccaatccatcgccttcagcttcaaaggcttgcaagacattcaagtcgcacatcaaaagcctccacatagcttcaactgttgatagggacggcctgactccttaata

SEQ ID NO: 25109 - DNA, 2853 bp, Arabidopsis thaliana
ccctgggcatgtggcttcaaaacagcactgcgctcacggaagaagtttggttttcttgacggctccattccacaaccgccgtcagaatctctggacctcgaggactggttaacgattaatgctttgctagtgtcttggatgaagatgacgattgacccggcgctcttgacgaatatctcccaccgtgacgtggctagagatctttgggaacacactcgtaaacgcttctctgtttctagtggtccaaagaatcagaagatgaaggcagatcttgctacttgtaaacaagagggtatgactgttgaaggatattatggaaaactcaacaagatttgggataatatcaacaactatcgtcctcttcgaacctgcaaatgtggaagatgtgtgtgtaatcttgaagctgagcaggagaaaggtagagaagatgacatggttcaacaatttctgtatggacttgatgaaactcaatttcatacaattcggtctagcttaacatcacgtgttcctcttcctggactcgaagaagtctacaacattgtgagacaagaagaggacatgttgagcaatagatactctaaggaagaaaagctagatgtcactgcttttgctactcagtctcgtccacagattgatcctagttctgcaaagttccccaacaagaacgtttgtaagcactgcaatcgtggcggtcactcgccggagaactgctttgtgatcattggatacccagagtggtggggcgatagacgcgaggacaatctggtcgaggcagaggcaaacccggtctaggctttaatggaggacaaaatcgcactccaacctcttatgtgaatgctgtcacaactggcttaaccactgtggaacgggctaatcgagttatcactgatagagatcgagatgcggtgaatggtcttacagatgagcagtggcgtggtgtactcaagctcttgaacgctggaaaaagtgatgaagccaacatcaaacccaacgaacaaggacatgagactctaacgggtacgtgttctaatttctcttcttggatcctagatataggtgcagctcaccatatgactggaaagttacatctgttgactgatatgcgcaagatctctccggttttgattatattggctgatgggaataagcgagttgctgtgagtgaaggaacagtgcgccttggttccagtttggttctgaaatccgttttctatgtcaaggaattgacttcagatttgatctctgttggacagatgattgatgagaattactgtgttgtgcagcttgctgatcactttcttgtgatacaggaccgcattacgaggacggtgactggagttggtaaaagagagaatggaagttttttgtttaaaagtatggagttggcagcagttgtgagcacaagtgtcaaaggttcatatgatctatggcacaaacgtttgggacacgcatcataaaaagcaattagcttgattcctactgattttttgtctagtagtagagattttttggacagtgtctgcgacatatgtatgagagctaaacaaactcgtgaaactttttctctaagtgataatagaagcatggaagcttttggtcttatacattgtgatgtctggggaccgtataggactccttctcactctggtgctcgttatttcctaaccatagtggaatatttctcgaggggagtgtggctgtatttgatggttgaaaagagtgagacgcagaaacatttgaaaagttttcttgctcttgttgaatgtcaattcaatgtccgtgtcaaaactgtgagaagtgataatggaacagaatttatgtgtatgcgggattactttgaataacgcgggattcatcatgaaacttcttgtgttgggactccgcatcagaatggacggatggaacgaaagcaccgacacatcttgaatattgctagatcattgcggtttcaatcgcatttgccaattgaattttgggggggactgtgttttgtctgctgcatacctgataaatcgaactccatcgatgcttcttcaaggaaaatctccttatgagctgctgcataagaaggcgccgaattatgctcatcttcgtgtttttggatctttgtgttatgcccacaatcaaaatcataaaggcgacaaatttgcctctcgaacgaaaagatgtgttttcgttgggtatcctcatggacaaaagggatggcgtttgtttgatctcgatgatcaaatgttcatgatttctcgagatgtcatctttaaggaaacagagtttccttttgcagaagtccctcgtggagaagatgatcacgatttgggccgtatgggccaggaattaaacacaacaagtttaattccttctcttgtaccaaatgggccgactattgtttcttcagaaggcccagcaactttatctcccactcaggcccacgcagatgattctctttcaaccctagttggtgtctctctcgacacaacaccagaagagtcgcaacagccaatagaatccacagtttcacttccaatggaaccaacgctaacaccggtgaactctgagccaaatcccccagaggctgaaccgcttggccgtggtcatcgccgaaaacagcaaccggtaactctaaaacactttgttacaaatactgttaccgtggaacctgatgtagttgcggattcatcgtctctttatccaatcgagcactatattgacagtagccgtttctcatcggctcataaagcttttcttgcggctgtaactgctggtgtggaaccgacaacgtataatagagttgtgattgaaaaagtttggtgtgatcactgctaaaggtaacttgatttgtagtatgacttttca

SEQ ID NO: 25110 - DNA, 1189 bp, Arabidopsis thaliana
gatctctgatcttaaatcgtctctctgtcgtagtaatggcttcttcttcttctttatctctttcatttccttcatcttctttgtctcgaacctgggattacgatgtttttccgagctttcacggggaagatgtacgcaaagcctttctcagccagattctcaagaaggagtttggaagaaaagcaatcaacttttttgttgatcacgagatggagagaggagagttcatcggtcctgtactcaaacaggcgatcaaaggatctaagattgctcttgtcttgctctccaagaattacgcttcttcgtggtgttgtcttgacgaattggtggagatcatgaagaaagagtcgggtcaaacggtgattaccattttctatgaagttgatccaaatgaagtaaagaagcagaccggagattttgggaaggccttcaaagaaacttgtcaaggtaaaactgaggaaaaggttcagacatggaggaaagctttggagggtgtgggtttggccacaatcgcaggttttcattcaagcaactggttcgtgttctttatttaatttctgataaacttaagacaagatgtagtttggtttatgttgtcttgcgttattaaagaggcgttaaaaccttacttatacaaagcaaaagatataatctaaagtgttgcacaaacgaaatgactaaacaggacaaatatatattgttgactaagctaactaaaatattgaccagcaatagcttcaacatcctccctcaaggtggagcatgcacatcgagaatgcccaacttgcgcagaaagtaacgaacttccttttcacccaaagccttagttagaatatctgcaagctgcttgtgagagggaacaaacgaagtcgcaattataccatcaagaatagcatcgcggataaaatgacaatccacctcaacatgtttggtgcgctcatgctgaactggattgacactgagagcaattgcagatttactgtcagagaagatgcgcatagcctgaacgtgagagacaccaagatcataaagcacccgcttgagccacatgagttcttgagtaaggaatgccatagctctatattcagcctccgcggaagagcgactgacagtgggctgctttttcgtttccaagatatgggagtatcccaagctgtacaaagtatcctgtgagagagcgcgagtgaga

SEQ ID NO: 25111 - DNA, 2323 bp, Arabidopsis thaliana
ttgataaggtaagccggagataagatatagtctccggagaagtgaattggcaaatacgattgaaatcgcaaggctctcgcgatattcaaaatatgtcgatgcttgctctcaacccttccattttgatgcggagtcccaacacatgaagtttcatgagtaatgcctttgtgtagaaagtactcacgcatacatagaaactcagtcccattatcacttcttactgttttgatctcagtgtcaaattgtcgttcaactaaagcaatgaaatctttcaaatgtttctgagtttcacttttatcagtcatcaaataaacccacacaccacgagaataatcgtcaacgattgtcaagaaatatcgagcaccagagtaagaaggtgttcgataaggcccccacacatcacaatgaattagctgaaaactatccatacttctattatcacttagaggaaaagtatcacgggtttgcttagctcgcatacatgtatcacatacattctccaaaatctctttaccactagacaaaagttctctaggcaacaaattaactatcttgtctgatgcgtgtcccaaacgcctatgccatagatcaaaaggggccttcacactcgtgtgcacagcagcagcattctccattccccgaaaacaaaaacttccattctctcttttaccaattccagtcaccatcctcgtagtgcggtcctgtatcacaaggaagtgatcagcaagttgaaccacacaatgattctcatccatcatttgcccaacagagattaaatctgattccaactccttgacatagaaaactgattttaatatcagatgcgagcctaatctaactgttccctcactgacagcaactctcttatttccatcagctaagataattaaaacaggagacatggatcgcatatcactcaacaattccaggtttccagtcatatggtgtgaagcacctgtgtcgagtatccaagaagtgaaaagagaacatgtacctgattgagtttcatgagcattggacttgttatcgcttcttccagaattgagaagcttaacaactccacgccattgctcatcagtaagcccactgactgcatcacgatcgctatcagtgataacccggttcacatgttcagaagatggaaacggtccagtcatgacgacattcacatacgttggacgaggttgtcctccattaaaaccaggcccaaatcttcctctgccacgacttgttgagccatttgaatttgattttcctcttgggcgatctccccaccactctggatatccaatcaacacaaagcaattttccggcgaatgacctccacggttacaatgagtacaaagtttcttgttttgaagcttctctgaatttgcaaacttctctgagattacctcagaacgtggccgcatttgaacagcaaaagcagtgacatcggttctctcttcattagacgatctgttgttcaccatatcttcttcttgtcgcacaatgttgtaaacctcttccagcccggggagaggaacacgagacgtcaaacttgaccgtatggtgtgaaatttagtttcattcagtccataaagatattgatgaaccatgtcatcttctcgatatttttcttggtctgttccaagattgcagatacacctaccacatttacatatccgaagagggcgatagctgttgatattatcccaaatcttgttgagttttccataatatccttccactgtcataccctcttgcttgcaagtcgcgagatccgccttcatcttctgattctttggcccattagaaacagaaaaacgcttccgaatctgttcccacaagtctctcgccacatcacggtgagagatatttgtcagcagctctgagtcaatagtcatcttcatccaagagaccaacaaagcattaatcgttaaccaatcttctagatctggagaaccatctagtggttgaggaatggttccatcaaggaaaccaaactttttcctagaccgcaacgccgtcttgaaaccacatgcccactcttcatagttatttgtcttcagtatcggatgggagatcacagctcccgaattgtcagctgccgttaagtcgtacagcgaaattgtgcgtcggacctcaattacagatggaggtggtggtggagcatcagtcatagcttcagagaaaactcacttgaaatactcaattcgaaaaacccagattgcgctctgataccatgacaaacttaagacaagatgtagtttggtttatgttgtcttatcttattaaagaggcgttaaaaccttacttatacaaagcaaaagatataacctaa

SEQ ID NO: 25112 - DNA, 604 bp, Arabidopsis thaliana columbia
tgtattttggaattatttttgagacattttgtaaggagttgactcagcttttggacacacttgatgagtggcccgcttttatttcagaattagaagattttaacactttaaagtatagcttttctcgtttttccatatcttttattctacgtttaaacaatgtcggtgctgattgtctcgccaaaaaggcaagagcacaagattctatcttttcccatgtaagcttatttactccagactgattttctcctaaaaaacccgcccatttgtaatttaaatgcatgaacttattttgctgtcaaaaaaaggaagataaaaaacatgatgaaaataatgttaatgtttcgttgctctctaaaattgatttcttgtcagaccgtagtggcacaatgaatacgctaacgtgtaactccatccccgtatctcaaactcacagccgctaatctttcaaattggttaattttagaatggatcgcgagattatcttcaattgtgaatattcaattctccagctcagaatagttcgatatggacatcaatttcgatgtattttgatatatgcatgtgacactacattaagttcaatcctaaggaattaaatggg

SEQ ID NO: 25113 - DNA, 2891 bp, Arabidopsis thaliana
cttatcaaccgcactccctcgatgcttcttcaaggtaaatctccatatgagatgttatataaaacggctccgaaatactctcatcttcgtgtatttggttccttgtgttatgcacataaccaaaatcataaaggagataagtttgcggcacgatcaagacgatgtgtatttgttgggtatccacatggacaaaaagggtggaggctgtttgatttagaagaacaaaaatttttcgtgtctagagatgtgattttccaggaaacagagtttccatactccaagatgtcgtgcaatgaggaagatgaacgtgtattggtggattgcgttgggccaccttttattgaagaagctattgggccaagaactattattagacgaaatattggtgaagctacagttgggccgaatgttgcaactggcccaataatacctgaaatcaatcaagaatcttcaagtccaagtgagtttgtctctctcttctctctcgatccttttttagtatcaagcaccgtacagacagcagatcttccactgtcatctacaacaccggcgccaatacaacttagacgtagttctcgccaaacacaaaaaccgatgaagttgaagaattttgtcaccaatactgtgttgaatcgatttcccctgaggcttcttgctcctctctgtatccaattgagaaatacgtggattgccatcgattcacttcgtcgcacaaggcttttctcgcagctgttactgctggaatggaaccaacaacttacaacgaggctatggttgacaaagcttggagagaggctatgtctgctgagattgaatctctgcgagttaatcaaaccttctcgattgtaaatttgcctccaggaaagcgggctcttggcaacaaatgggtatacaaaatcaagtatcgatcggatggggcgatagagcgatataaagctcgtttggtagtcttgggtaattgtcaaaaagaaggcgtggattatgatgaaacttttgctccggttgcaaaaatgagcacggtgcgtttgtttttgggagtggctgcggcccgtgattggcatgtacatcaaatggatgtgcataacgctttccttcacggtgacttaaaggaggaagtgtatatgaaattgcctcagggatttcaatgtgatgatcctagcaaggtatgtcgtcttcataaatctctgtatggtttgaaacaagctccaaggtgttggtttccaagctctcttctgctttaaaacaatatgggttcacacaatctttgtcggattactctctgttcagttacaacaatgatggtatctttgttcatgtcctcgtatatgtcgatgacctgatcatttcgggtagctgccctgatgctgttgctcaatttaaatcctatctagaatcatgttttcacatgaaagaccttggcttgctcaaatattttcttggcattgaagtgagccgcaatgctcaaggattctacctgtcccaaaggaagtatgttcttgatattatttctgaaatgggacttttgggggctaggccgtctgcgtttccgcttgaacagaatcataagctctctttgtctacatctcctctgctttctgactcttcacggtatcgtcgtctagttgggagactcatttacttggttgtaacacgtcctgagctatcatattctgttcacactcttgcacagtttatgcagaatccgcgtcaggaccattggaacgccgccattcgtgttgttcgctatttgaaatctaacccaggacaagggattttactctctagcacctctactctgcagattaatggttggtgtgatagtgactatgctgcttgccctctcactcgtcgctctctcacaggatactttgtacagcttggtgatactcccatatcttggaaaacgaaaaagcagcccactgtcagtcgctcttccgcggaggctgaatatagagctatggcattccttactcaagaactcatgtggctcaagcgggtgctttatgatcttggtgtctctcacgttcaggctatgcgcatcttctctgacagtaaatctgcaattgctctcagtgtcaatccagttcagcatgagcgcaccaaacatgttgaggtggattgtcattttatccgcgatgctattcttgatggtataattgcgacttcgtttgttccctctcacaagcagcttgcagatattctaactaaggctttgggtgaaaaggaagttcgttactttctgcgcaagttgggcattctcgatgtgcatgctccaacttgagggaggatgttgaagctattgctggtcaatattttagttagcttagtcaacaatatatatcctgtttagtcatttcctttgtgcaacactttaggttatatcttttgctttgtataagtaaggttttaacgcctctttaataagataagacaacataaaccaaactacatcttgtcttaagtttctcagagagagatggtgaaagacgaaaatggagagattcatgtcactcataagacaatatatatacccatttaacgagcaagatatcaaggctcttgctgaagaaacgggtttgcgtttaatcaagcagatgaaatttcacaactggatatttcctggcaactctgttgatacctatcctattggatcatcagctgttactttcatgtttaagaagtagcttcttcttagagttaataaaatttcacagttactttatcgtgatgacaagcgaacattgtaaccaataccctcattgatagttgcaaacataaggtgaagacttatttaagtaataagaaataagagtggtgagtggttaactttttgacactcaatatcctcattgatgatattagtcataacctgcaaaataggaaatagttta

SEQ ID NO: 25114 - DNA, 421 bp, Arabidopsis thaliana columbia
aattcaatgtgatcaaacttgggatcagtagacatagctgcctctctgtagctgttaatacagtaaccaagctgatcaatgaccgaccctctttccaatgactccttgtaacgcacttcaacagggtcacccacctgcaaaatattaatcccactcctctgttaaaacattatcctgaaatatgatttcttcctgcacaatataaagtgtcatcatatgcatgcattaccttcttgagctcctcgagcttcgcaacataaacacctttggtctcatcttccccatcttcatacaaccaatcctcaacttcctgcagattcgccaggaatgcttccctctccgagtcagtgatatattcctggtatttgtcactcagctgaaaacaagacacgttagtacccaatactcacaactttacata

SEQ ID NO: 25115 - DNA, 579 bp, Arabidopsis thaliana
agtcaggcttctcaccaagaaacatcatccacagtgaaatcatcgttgcaacgaggatcatgtcgtatatgatcgcgaatttgatgaaatctgcgtcggatggattcaatctgtaactaaatcccacttgcttcatcgttttaacggagaagaaagatgcgtaatcttgaagaaagtgaagaagaagatgaaacagaacaaaccaaatcagaaaaacctaaaacgctgagattattatatatagtgggggagttaatagataaagagatcgtatccgttgatgagttttaatcgacggtttataaaagtaatctccacgtctgcagatcgctgacgtgtcagttagtttttggtgttgctgggctttccaggcccatttgttttttaagatcagttgacttgatttgatctggtccaattggttccccaccggttcaaactactatataccaacaatagaagatgcagaatgttgacccttctcacaattactctctcctttagaatacgaatttggtcacaagaaatggcctacacaatacacttaagacaagctgaacaactgataagtttggaaga

SEQ ID NO: 25116 - DNA, 610 bp, Arabidopsis thaliana
taaattttgggaaaacttataattcacctaactcatttccatcatcttcgtcttcgtttgttcccctgagatagagataagagaatttcgagagattcgagagaagagacgatgagtttccaagatctcgaagctggtactcgatctccggcgccgaatcgttttaccggtgggagacaacagagaccttcgtctcgtggggatccatctcaggaggtcgccgccgggattttcaggatcagcacggctgtcaattccttcttccgcctcgttaattcgatcggaacacctaaagatactcttgaattacgagataagctgtcagtagcaattcttaatcacactcttcttctctttgttaaatctctgttgattagggttttggttttacttattgattttggtcgatttcatttcaatttttaattgaaaaagttttctaattgttttgaagctaatcctgcattatttcccttaaccgaagaacaaatttgagtttgctgatcgatgtgagacaacattgcaaataatgcctgacgacattgcaaataatgagctttttgtgtgtgtgtgtgtgtgtgtgtggtatggagaattggtttttttttag

SEQ ID NO: 25117 - DNA, 553 bp, Arabidopsis thaliana
tacagatacgcctcatcacacaactccagccagaatcactcacagaggtttgattccttttagcttcactattttgtttaagttgtaacatatatagtaacagtattgacctgtttctcttactgttgcagttctgagaatcggcctagagagaggaagagaagatctggttgggataattgagtgagccacgttttgcatgatgatagtggaagtgttttgcacaacaatgtaatgaatgttgtataatttgttttatcctttcccgtttcagcctttgaatatataaattttccatttcttgttaggatctaattcttcgtatgagacatgatatggaaaatagatgataaaaagggtttcaaattcacaagaaaaatcacttgagtttcatacaagagagagagacaagaagtaaaaaagcttttagatgtcttgaagcaaagtgacggacatgatctctattggcgactttggttgatactgatcatctgtctcaacctcttcgatctcctgaacaacgtcttgtcctttagaaactcgaccaaagaca

SEQ ID NO: 25118 - DNA, 655 bp, Arabidopsis thaliana
  unsure (1)..(655): unsure at all n locations
aacaacaattcataacaaaaactgtcttcagtataatcacgacatcactaaacaaagattcaaactttataactttgatcaaacaaaagattcaaatttgagtagattaagagatagagactcatacgatcagctgcagagttcttgagttgttcaagagcagagatgctagctgcattagacgcagaatcagaagaagcagagagctcacaacgagctttttggatcaaacctcgtctggttctattgttcttcggaagaacacgaaccccattaagacccaatggtgtctgtgaaacagaggacgaagaagaagaagaaggagatagattatggtgattcaataaagtctcaagctttggacaaccaacgaaagcacttgaaaccgccattgaaacccaaaatctcaaatctcctctctgtcttcaaaaaaccaaacctttgcgagagagaataagaattgaggaagagacagagagggattgggttgcgatgtggaagaaggagatcgctgtgaatatgatttgtcagatttgaggctganaaatcaaatcgggtcaaaactggtttagtagaactggaaattgaggattatgattggatggtaatctaagatatgtaatgaggaatgcattgagattctgatggaatttga

SEQ ID NO: 25119 - DNA, 781 bp, Arabidopsis thaliana
ccgaatccaaaagactcttcacctaattctcttgcgttttggctccttttacataaatttataatgggccatacagttcaattagagatgttttatgttgtagcgaaggcccaatacataaagctaacggaaaaaggcccaataagggctttctttgtctgatggaaaccctaattcccatggagccatctatttaaagcacaaacctaattcgaagaaagaagtgactgcgacgccggaaaatcgcaatgggtatgtttctcactattatctctctctcagatgtcgtttctgtattgttcattagattctagaagttaattaaggatgaaatgtgatttttgattacaggtgcgtacaaatacgtgtcggagctatggaggaagaagcagtcggatgtgatgaggtttcttcagagggttaggtgttgggagtatcgccagcagccttccattgttcgtcttgttcgtccactcgtcccgacaaggctcgtcgtctcggctacaaggccaagcaggtctttttcttcttctcttcattttggttatcaatttaataggtttaggtaatgttgttgaatcaagcctcatcgattgattgctggttaagcggtgtcttgatgcgtagtcatttatgtctgcgctttatgatagaatacttcctgaacccagctacatagattcattcttctgactgaacagctctttatcttttgtgtactcaggttactgtcactttctagtacaagtgctctcattttttgggttggaatcttgaactg

SEQ ID NO: 25120 - DNA, 592 bp, Arabidopsis thaliana columbia
agaacaaatcatctgatgaagaactaaacaaacttgtcttggaactcgtcgtcatcatcgtctcgtcactcatagccctctctacaagaaagctcaccggaaaattcttcagtgcttcttcttctcgtcgttcctctagaatctctttttctccacgcttctctctactttctccattcagattctctttgtctttcttgaagattggcctctctgaccagttttcctcgaacagtctcaacaactcctctccagccattgtttaaagtttgtcttctctgtcttcctggtgtttgttagaagatgatgaacaaggaattgggttaggtatttaaaccttgtaattagctacatatataactccctttcatacccttatctttggactaattacgtgtggcaccttttgctgcacaacacacattaacacacaagtcacaagtgcaatccaattcaaatgtcagactcataacagtcataatacaccattagaattgttgattaattacttgttctttccgttatacaattcacattgttcataaataagacattttctatatgatgcgtacactgtaaagtatatgatgta

SEQ ID NO: 25121 - DNA, 886 bp, Arabidopsis thaliana
ctgactaagcagatcagccaccaatcttgtcaccatagcagttgtacagaaaatgataacctacaacagcaacgaaatcgggatagttcagaaatacagacattggttattcataatggcactagagagataatgttaccttatagtccacattatctgcgatgtgttctttaagaagcacatgtagaagcgaaaaatgtctatccagtgatgcaatcatgtacatttgtgtgacctggagataaaacaaacataagaaactgataacatccaatcatatggcaggccattcactcaaattaagctaaagagaaatcttttaccttttgatgtgtctccccagagccctcttggacacaattgatgaactcatgatcccgtttcagagcaacatggcatatttggcggaccttgacaccaaaaaacacagttcaagattccaacccaaaaaatgagagcctttgtactagaaagtgacagtaacctcttcaggtacggtggcagaaaataaaaatgtttgtctctgcttaggaacagcggcaattatcctctcaatgtcccttcggaaacccatgtccaagagatgatcagcttcgtcaagcacaaggactttcacacccatcaatcttgttgcgaatccagaagtgttttcaatatggtctttgagccttccaggtgtagccacaaggatctgagagtgttcaaatatgtgattattcaacagtatatagatataggtcacggtatctgcagccatcttagaagcgcagtttaagggaagtgcaagatttgctcatgattaacttcaaattagaacacctgtagagacggaagaaatttcttattacctggcaaggattcgtttgcatacgcctttgctctgtag

SEQ ID NO: 25122 - DNA, 401 bp, Arabidopsis thaliana columbia
gttaccgtctccaccactaccactatgctatctttttctcttataaaaatattattaggtaacaactattaataaacaaagctatatactctatttttctatataaggcgtgagttctccacaagcctcctcatcaatcaagatcaagtaagcatcactactttgtactaaatccaaaccatgacttccaacgttcagctttcagaaacaaacagcccaaggaatcagaaaacccgtccgagagcagagaaggaggaagtggactacatgcagagagctcagtggctaagagctgccttgcttggagccaacgatggtctggtcacagtcgcttcgctaatgatgggtgttggttctatcaaagaagacgtcaaagcaatgcttctcgttggttttgctgg

SEQ ID NO: 25123 - DNA, 589 bp, Arabidopsis thaliana columbia
cagtcatcagaaaataataacctcttcctcttcaaaacattctctgatccttctgccactccagcattctcccattgataagaatttagcgttgtagcaatatgatcttgtggtattgttgcggtggaggacttaagattggaagagaggctctgtccccatgatttgttaaacgttttcataccttcaagaaaacttctatgaattcttggaacagctccagctactccattgttatcatgaaccccttcatgagaattgattcgaaatgaaatagttttgttcttatcgttaagaatactattgctaactccgtgatatctctcaccaggctgtgagctaaacattgtttgtcttgttcttgtattttctcgtgtcgttaatcctctccaagggctacggtagatctgtcgtctgtggtcagtccacgaaccaccaccatatctattgaatacattccaagttacacacacgtaattttaacttatagtttaaagatagctagctgaagagtttgtaaatacctaaactagaagaaggctttgacaaaactttgtagcattggaagttgctaaggttgtaagtgtac

SEQ ID NO: 25124 - DNA, 607 bp, Arabidopsis thaliana columbia
  unsure (1)..(607): unsure at all n locations
tagagaaaatttgcacacactatgctatgtatattaaaacagaggccttaacttatcacagtcgtttcaaaaaatatgttatatgattttccaatgtatattggaccaaacgacaatattcatattcacagtgacagaaataataataatgtgtatatatattaataatgaaaatctttttttatcttgacagattaaagaagaagaaaaaaaacagagcattgctccaaaattcaatgtgaaggtaagtaagtaaataaataaaggtaaaaagagagagggggtaaaattagggaccacgaccagagacaaagcagaaacagccaggtctctgatcttccgggatcattccaccgcctttggtggtgtcgacagcttcaagcaaactcacaacttcctccatctctggtcgtttctccggattagcttccaacatctcttcattatggtcgccaatgctgttggacaacatcttggaatatccggtctcagattctgtttaagacaacaaaccaacaatctcagattctctcattgtacagtagtgacaaaataacgaaaccggaaaacaaactganattgaccaaaatttggatctgtctgttta

SEQ ID NO: 25125 - DNA, 546 bp, Arabidopsis thaliana columbia
tctctctacttgtcttgcacaattgttaacaacgagctccaaaacataaacagacacatttgttctgtttcagatcacctttaggcttcttcttcttcttttctgttttaaaccattagcaaagcaaatgatcttcagattctcatacaaatgcataaccttaacagatgaggttttcaaacagtatatactatgaacaatgcttaagaatctaaagattacctttttcagtaacttgatgttgaattataacatgcattgtggtgacagcacctgagaaattgccgacgggactcctgcaatctccaaccgttttgttgttctccaatattctacccgcgcttatcagtttaacatctttcactgtctttggcccgttctccttatctgctcacattcatacaaacaagcaaaaccataaagggttaatcaatttcatatctttcagtgtctttgcacattctccttagctgctcaaaatgtatcaaacaagcaaaaccataacaccaatgactcacaatcaggttttgatattacacagatata

SEQ ID NO: 25126 - DNA, 530 bp, Arabidopsis thaliana columbia
acttgatgggtatcatgagcctacacaaagatttgttgtcccattgatgtttctagaacaccctatgttccgtaagcttctagaacaagcagaggaggaatacgggttctatcacgatggagcgctaatggtaccttgccggccaagccacctacggatgatattgaccgagcaatggtgttagaatttatgctgtagttaattactgatcaacgtcatattacataataataccgaattattcactagatggactcttgtgctttctagtcacttaagtttttctctatgctattggtataatggtatctaatgaataagctatcatcgtctctagcctcaaatttgcaaaacgaacagtttaaattacttcggcgaatattagtcttaattagaaaaaaaaactcaataaaatggtccaatactcagtgattttatatatcttctatcgtgaaaacagtccgttaaaatgttatttcagtgttgttagacttgagttaggactcttgtatgaaatggtgattagtagt

SEQ ID NO: 25127 - DNA, 575 bp, Arabidopsis thaliana columbia
ggtcgacacgatccccagcttctttgcagcatttactacgtcttcatgaaaggagtagatgactccagctctaaaaccaggaattgaaaggtcttttgacaagccatatatgatatgaaccctagtcttatcaaattcccctgagccagcgatctcagccatgctaacaaactctttgtccccgtaaacagaacccgcaaatatttcatcagaaataacatggatgttcttctcttgagcaaatctcaaaatatcacaaagcgtctcccttgatagtatgtttccaacaggatttgacgggtttgaaaagaggatgccagaaaccttgcttcctcgttttctagcctgattcaaagcttgttccagtgcggaaaccgttacagtaaaattgtcagagctacggcagtgtactggtataagctccactcctgtccggaatttaatatccctatcaaagctgcaaaatgaagtttccttagtacatcgcataggaagagaagactggtgtataaatcaaaaagtttcacacatactaatggtcgagaagtgtaactagaaattaccctggataatat

SEQ ID NO: 25128 - DNA, 547 bp, Arabidopsis thaliana columbia
ccttatccggggttgatgcacctgatgtcacaccgattgttattggtccctttgggagaaagttttccttctcgaccagttctccatactatcaatgtaaaatagaaaaaatcagtgaatgcagtttggtaaggagtaagttagttttgaaatgcgcttacgtggagcttataggctattttattcccaggtcctatccgtttctcactatcgatccagtaagatgggattccccgtgcctctgagatttcctgaaggtgagaggtgttacttgaattccatccgccaaccactagcatgaggtcaatcttctcttccactagctcatagattgcgtcttgtcgctcctgaagagattatagtattgatgaataaacacttcctcaagtgtaaaacttgtctagatgcatggtttttgaggtatgggaattttacttgagtagcgtcgcatattgtgttgaagctgatgaaatgccgcttacatttccactccatacttgcgcatcattgttgtccgagtaatcttcctgtggggtttttggcatga

SEQ ID NO: 25129 - DNA, 520 bp, Arabidopsis thaliana columbia
atgtcccggtggatgtaaccggagaccttctaacacgacagctttaagatacggcatcttcttcatctcttcttcttcaatctccttctcttcttcttcaccgattacactttttatctcttcgtataacctcttttgaatttcctggtttctcacagattcgccattatccattgaagtgtcgtcgctgttgtatcagtcccggcgttgagaaactcagagcataaactcacgatctcgtcttcgtttagtttcctcttctcatcaggaagctcaagatcgagcagagtatctacatacgattgtatgtattctttaccggaatctttagattcgatcatgatctttctccgggaacgaatcaacggaagcaagacgttcttgtgttctctcctgaacgtaagaaactcttcccatctctttctcagaaacaacttggtgaaactagggaagacattgaggatgttgaatcttggtaacgtgatgagctctcttctttgaacgaattcgacttgtttga

SEQ ID NO: 25130 - DNA, 634 bp, Arabidopsis thaliana columbia
atgcatgctcattagtatagttttccctttacagttttcaccaatttaggtggtcgatatccatgttacggactaagttagcccacagttttgttaatttcttcttaatatagtgtagaaactctttaagctatctcgcttactaaaacttttttacttgaagcctggtagctcttcagtgcaagacaaccgtgaagacatgaaccaaaagcagccaattaattccagctctcagcacagacatgatctccagaatagtgaaggttcttatcctgaagaggtaaatcattcaaaacgagttcgattattctaaacagtgaaagtagccagtcaagaacaaattaacatcttcttagtgactagcttctagttgatcatgtgttcttcttaccctgttttcacctcctgtttctcgactgctactagtggggtggcattccgtcaaaagagctacaagaggcaataatgctggaaaaagcaatctttggtggagtagctaacgaaagtgcttcacataataatcaacttggaattcacaaggagtcacaatctccgaatcagagggttgttagagaggtaatttgatttcttttggaggcattcattagatggaacgtgaaagttgcatgacata

SEQ ID NO: 25131 - DNA, 535 bp, Arabidopsis thaliana columbia
ccaataaaagacatgacaggaactaactcgctcaagtggatatcttcgaaggtgagattaatgaagaagaaaaaggcgattattaccaccagcgacagagcaaacaacacactaataacgaccaatcctcaaacctaagcaatttcggaaagacagaatggttataacaacgattgcgtgattaggatttgctccgattgtaacacaaccaagactcctctttggagaagtggtccgagaggtcccaaggtattaatcacacgtctgttaattacacatatatgcgtaacgttttttttggttttaatgttaaaagtagatgcctaagtaatgtcatatatactcatattgattattagaagctcacgaagaatatgtctttttatagtactaattaatagcaaatgaaaagtaaatctacaaatctctaactggtaaaaacaatttcatgtagcattataagttggtttaacagattaatctttgagatcttctaaaattcatgttacaagataatttactaaattatcatgtt

SEQ ID NO: 25132 - DNA, 548 bp, Arabidopsis thaliana columbia
tgccttttgttgcgtacattacattctccaaaagattagtacaagcttaactatgcattactctcatcttccaacttcttaatgtaagccataagcaccattataacctctcttgctggtgcttgtaaagtagtgacgagattaatagccggagattgcagagcaccgagcatcttagcgtagacctcagcacgagtgggcatggtctcgaggactttgaaattgtcaggagcgtagaacttaccttcgaagacagcgccggcaaagtcattgttttcaagcttgcgttccttctggaagctccggtagggtttgatagcagaagggatttcatcggtctggacgaaaagccaagcgttcatgcctttcatacaaggcttgagagcttcccatttggtgccttcaatggctttgaagaccaaagtgttcttggcgacgatgagctttgtagtgtcggggagagttcccggagtcttgaaactgcttgacggtgaggcctttgtagttgatggcggcgaggagatggcagttcccaagtgagacttgac

SEQ ID NO: 25133 - DNA, 496 bp, Arabidopsis thaliana columbia
  unsure (1)..(496): unsure at all n locations
ttaggccacccgacgatggataaatggccaacactagttaaccttccacactggcaaaatgatgttcaacacattcaagctcacaaatacgacagtgntgggtctccacaacgtggttcacctgaatcagaaaagtcctgcgtatgatctgttatccaaaatgctggaatatgatcctctaaagcggatcacggcttcacaagcactagaacacgagtatttccgaatggatcctctcccaggacggaacgcatttgtagccagccaaccgatggagaagaatgtgaattacccaactcgtccagtagatacaaacaccgatttcgaaggcacgacaagcatcaatccgcctcaagcagtagcagcaggaaacgtagcagggaacatggcaggagctcatggaatgggcagtagatcgatgccaagaccaatggttgcacataacatgcagaggatgcagcaatctcaaggcatgatggcttataatttccggcac

SEQ ID NO: 25134 - DNA, 550 bp, Arabidopsis thaliana
aagtgtggcaagtactactgtattgtcttcaacctcgggactgtttactctgttcattggtgtatttttgggccaagataccttgaacctgtcgaaagtagtggctgtatttgtcagcatggctggtgtggtcatgacgacgctagggaaaacttgggcttctgatgagtcgcaattaaatgcttcactgtaagtatttcatcctaattcgttcaccatgcatcgttttctgatatgtattcaaaagctcatcctgggctgcgttttaaattgatagctcaatttgtctcattctcatagcatttcttgattccatgagttttccagtttcatcaaccatatttttttaacgtacagttgatatttgtgtttagcaccggggaacgatcctttatgggagatctttttgggcttcgctctgcggtctcttatggaccctttacaggttagaaatgattaatctttaaagggttagagcattagtgtgttggggatgatacctcattgatggcttgtacctactgatattgcaacacagtgcttcttaaga

SEQ ID NO: 25135 - DNA, 774 bp, Arabidopsis thaliana
aacatttttctgactgcaaagtaccccaaccacacgagaagaaagcatgtacgatatacagtactgttaaagctgtggtagcaagactgttctgggatcccgaggtccccaaggtcactacttactggctggacctggaggcttcccacaatctacgttctatccgcagctttcttagctctgttagtccttgctcaactgaaaataagaaccaattgtaagagttgtcttatggataatcctcttggctaaaaggaatttggtaagggtaaattgtaccttccatggcgtcatgtgaagatggagaatgtgcgctcctgctgatccaaaatctaagacgttctctcgcagtgtccacttctatgccaagggattgtgctcttctccagaagtacgtgagccaagcctgccaaatgttccaaatttcatagctttgagaatggagaaaggccaagatgagctgacaaaattatctctaatagatccaaaagatacatagaagaacaaaagtcgatacaaaagggaacatgaaggagggatcagatgaaggaaaagcccatgagagaaagcgagaacgggcttgtaattctgtacctccttgaagagaacatcctcagactcttcttgactcaattctgcaaaggaccacaggccaaggtcagaattatccttaagaataacaagaactgttggaacataggatactggcgttcaagttaagtttttcatggtcataatagtatgaagagtttgtcattgtacccctgtggatta

SEQ ID NO: 25136 - DNA, 391 bp, Arabidopsis thaliana columbia
ctagaggacaggtgcaggtagtcctctttagttctctgcttccttttgactcgatgctgctctctgcatcaggaaacaagtgagggtgttggggaaatttttctctttaagcttcttctggagtttcttccaatggttctttaccggagagaaaattgtgggttctccaacttcccaacatttggactcaaagcttaccagtacaagtaagccaataaacaatatatgtaacttgaaattatagagcattggcttgaaccacaatctggcttattgttttgtcagtaatcccaatgctcgttcctttctggtggagagcctgatgtagaaacagggtctactttgatttttcagcaacatatgttggtgttggaatgatatgtccgtatat

SEQ ID NO: 25137 - DNA, 1076 bp, Arabidopsis thaliana
gacaagctctgagagtccggatcacctcattcgtggtttcattaacgagaaactgttcttgaagaacttcttgctgaagcaaaaggaatccgaagagttcaagactctagcaattgtggggaaatacggagttgggaaaacgacattgtgtcaggctgtgttcaacgacgaagatgttaagcaagtttatttcccgaggatatgggtttctatgtacagcaaagaaacaaaagaagacgaagatcccaagatagatgttgtgaagaggatcttgagatcccttggagttgaagatgagatgtttaaacacatcaaaacagaagcagaagaagagaagagtatcaaagatgaagctggggaaagagaggaagagacggtcaaagaaaaggagcttgctcgattattgtatgctcttcacttgaatctgattgggaagaagtatctgatagtgttggatgatgtttgggaagacaacgagtgggatcaaaggctcgatgatgagaagaagcaacaggaaaaatcacatctttcttgtgggtttcctaaagggtttggtgggaaagtgattatgactagcagagacgagagattggcgaaggcgatagtcggagaagaagagaatctgcagcgtttgtttccaagatccgatgcagagagcttgtgggagatttacattgatgcagtacccaccaaggtggacgatgcagcagccacgaatttgggcgatgcagtagccacaaatgcgggcgatgcagtagccccgaaagtgaatccgaggtatccgggaagatacaaacaagagcttatggataagtcttgtggtattcctttggctgctcgaatgctggcgaagattgagcctgtgaaagtggatgaaattggaaacatagataggaagcagagcttctaacttctaacgcaatatctatgtatttactatttactctctgatataaggaagctattcaagattactatataaagttattttattgttctagaaactgttaagagttgtccttgtgtgagtgtaacctatggcagttaataaagattaaaagagatttaatcatatt

SEQ ID NO: 25138 - DNA, 425 bp, Arabidopsis thaliana columbia
cctatcgctgtggtattgcaaaatattatcctttattttcacatcagcagggacaactatcttgcttttcctgcgcaacacaccttgagtccaagaaaaatgtctcttagcagtaggatctttcttcagagcctcaatgatatcgtgaagacctgaatcagtgatgtaacccgcctgaatttctttgagaaggtcacattccaccacggtcatcgccatatgtaaaacctctgaaccttcaactcgagacaatgcatccgcaaccaagttctccttaccttgcttgtattggatttcgtaatcaaactccaataatttgggcagccactgttgttgaataggggtatttaatcgttgttccagcaagtatttcaaactgcgttgatccgtctttatgataaagtggcttggtaataaatagtgac

SEQ ID NO: 25139 - DNA, 564 bp, Arabidopsis thaliana columbia
caccagtgaaaccattactaccagacatctcaagcgttccagacaaaaccagctcatctttatcataaacctcaaacttcacactaccagataacctgatattatccgtgctgataaaagtagcaacttcagatttcttatcaacacgatcacgcctaagctgagaagaaactccttcagagtacatgctcattctaacaccattaatctcccagaagtgaatctggatccaaaggaatatgagtaatggtgagaacctcaggtgtcgaatgatccaccttgaaattactgattctgacatagaacactctcaaatcaagcaatggcgatgataatgaagatggtagtctggaattgtgatggttataactctgatatctgatcatctgggatgcttcaccgttgttacgtgtctcataaggctccaccatgattaaagaaaaccaaaatcaatctctgtttctcactgaatccaaaacatatccatcagagacgcgtatattgtcgatttggattggaatacgtgtgctgcagaaaaattggaatcaatgagaataacgtgag

SEQ ID NO: 25140 - DNA, 502 bp, Arabidopsis thaliana
ataaataggtaggcatatcatcaccaaacatgcggctacgaatctctgccctccagtgccaccaccaccgccaccaaacggggtcgagaacccgaaaaactcagcgaatatatcatctgcacttctcgggttgaatctgaaagacgaagatccatctcctgttgagaagtaggatgctccactagtagcagcattgggaggtggcacattcccttttaacccttcctcaccgtattgatcatatacagctctcttttgaggatcgctaagaacctaatcatctcacaacaaaaaccaacattagcctcataaaagcctgagtcaaatcaaacaatcttagtatgttcctcataatcctaagctacacattgacaagtacagagtgcctaagaggttctcaataatcaatcacagagttaagaaaacggataaatcatgactcagaagatcagcaaagaaagcacaaattaagagctttggagatacctagcttgccaaatat

SEQ ID NO: 25141 - DNA, 521 bp, Arabidopsis thaliana
tggcggctttcacaaaggatttgaggttaaggtttaagagtttagatgatatatatgtgtggcatgctctttgtggtgcttggaatggtgttaggcctgaaaccatgatggatttgaaggccaaggttgctccttttgagctttcacctagtctaggcgctacgatggctgatctcgcagtcgacaaggttgtagaagctgggattggtcttgttcatccttctaaagctcatgaattctacgactcgatgcactcttatcttgctagtgttggtgttacaggagccaagattgatgttttccaagtaagttgttacattactcttactctgtcttagatactctggcttttctttacatataggagttgttgttaatgttgtgtgtctgtgtttggttttagaccttggagtcactagcagaagaacatggaggacgagtggagcttgctaaagcttactacgatggtctgaccgaatccatgatcaagaattttaatggaactgatgtcattgcgagta

SEQ ID NO: 25142 - DNA, 582 bp, Arabidopsis thaliana
  unsure (1)..(582): unsure at all n locations
tactaacaatcaataagtgaagaataaataataatggctggaggagcctttgtatcagaaggtggtggtggaggaaacagctatgaaggcggagtcaccgtctttgtcatcatgacatgtattgtggccgctatgggaggtctcctctttggttatgacctcggtaactcaagttcggtaaattcacattcgcctttttcttcttcgggttgaagtattttggttcgctttcgctgtccactctagcttcggggaatgtaacgtgacttcttttgttgtataggtggagtgacatctatggaggagtttctgagcaagtttttcccggaggtggataagcaaatgcacgaagcaaggcgcgagactgcttactgcaaattcgataaccaattgctacagttgttcacttcctcactctacctcgcggcactcgcgtcttcctttgtagcttcggctgtcacaaggaagtacggacgcaaaatctccatgtttgttggaggggttgcttcctcataggttctctatcaacgcatttcnaccaatgtccaatctcatcgttggtagattgttctcggagcggtg

SEQ ID NO: 25143 - DNA, 506 bp, Arabidopsis thaliana columbia
cactgtatgttgctaatcttggggactcgagagccgttcttggaagcgttgtttcaggggttgatagtaataaaggtgccgtagctgaacggttatctactgatcataatgttgctgttgaagaagtgagaaaggaggttaaggcacttaaccctgatgactcacaaattcgtcttatacacacgtggagtttggcggattaaaggcattattcaggtataacttagttttgcttgcctgcttgttaaattgcgtgtgattacatagcatctgtgatgaagttataatatttaaaaggtgtaatctgatgttgttttttcttttctcttttcatttatataaatgggggcttgcaatgttccaggaatccgtcacacgggctcctgcaacgtttcttccccagtggattttgtgcttttctaagaattcccggtagtcagagctatacataataatgaagatacatgcttttcagttgcttgtgacctttccgtgaatgtttgagc

SEQ ID NO: 25144 - DNA, 489 bp, Arabidopsis thaliana
tgaagagtttgcttctattccgaatctccttctgaaggatgttgttgatatgaatcctgagaatctggctgaatgtttctaagctgcgagacaaaaagcttggagatgccgtttatagctgcttggacctcatcggcattgcttggacttccccagacagaagattgagagcttaaaccagtgtactcgcttgcagcaacttgtgtcttctttgaggtagcaagaaccttctccaagtccagttgtgtcaatggtctaggaacctgtgaaatgtaggtaactcaaagatgtcattacttaaaaatcaggtggatgaagggaacattgacattccctaaaaaacggtttatcacttacagaaactcgtttgccctctttctctgcctctaggatttctcggattgggaagtaagctgcttttttgcagagttcaaaaatatctgatccggtatagtcctcacataaacgagctatacgatcatagttaat

SEQ ID NO: 25145 - DNA, 536 bp, Arabidopsis thaliana columbia
taatattgtgtacagagagaaacaatgggaagaagtcttgtatcactttagtcatatgtttcgcgatgaagaaaagcctgataatttcacgcttccagttgctctcaaggcctgcggggagctgcgggaagttaattatggtgaaatgattcatgggttcgtgaagaaaggatgtcactcttgggtctgacctttatgttggatcttctctgatatatatgtatatcaaatgtggaagaatgatcgaagctttgaggatgttcgatgaattggagaagcctgatatagtgacatggtcttctatggtttctgggtttgagaaaaacgggtctccctatcaggccgtagagtttttcaggagaatggtgatggcttccgatgttactcctgatcgggtaactttaatcacactagtttctgcttgtacaaagctttcgaattcaaggcttggaagatgtgtgcatggttttgtgattaggagaggattttcaaatgacttgtctttggtaaattcgctattgaattgttatgcaaag

SEQ ID NO: 25146 - DNA, 479 bp, Arabidopsis thaliana columbia
cggtgacggattggatcgggatcacaggaatgccgtcgaaaagcgaaacggacgtactgacgtgcttgcacaagccgtcgggcatccggatggtcctgtccccccgtagcatggcggacccgatgccgtggatgccaggacggccgaaaccatcgtggccgcctgtcggcagcacttcgacattgtggtggtggattgcggcccccggctggccgacccgcaaatcgtggccatggaacatgccacccggattctggaagttgccatccccgaagtgccgaccctacgggccctgaacgatttgcgggacttcctggacgcgttgggggtggaccaggctaagatccgggttgtgctgaactgggtgccgcggcggcccgacctgccgatccgggaagtggctgatctgctgccgtggcccctggttgcccggatcccagacgacccggcggtgaccatggcggccaaccggggggaga

SEQ ID NO: 25147 - DNA, 963 bp, Arabidopsis thaliana
tggtaaataactgaaatattggaaagattatttcaacaattttgtttatgaagagaacgtgtagtgcataaactcgtatactaaactcttgtaataatattatagtactagtattgggataattaatatctaatctccaaattgatcattgactttgtagttggacagcccgtaagtttgagaatgtctcgtgatattttgatgtgtttgtataaaaattagcatttagaaacataagccaaataatcatctcatatctctcgttgctcaaaaaatctctcagcatctctatggagtcgaactcgaatcccgagtcagagctcaaatcactcatctttcaaatatatagtctgagcgtgggtttgaatccggattcatatttagatccggactgggattctatttctaagatgataccactcattactcaaacaatctctctggtcagctcaatggatttcgattcgcaaccggggtcgaggctcatgtcactcactaatcaagcaatctatgtcttcaactctatggattttgattcccagccagattcgttaaggaagctcatagctctcttttcacacaagctctctctcgtcaactctacggaatttatttcggagcaggacacgaattcacagccagacttggagtttttcgtgttactcattcgagaattatgtagtccaacaccggagccgccagagcttatatcactcatcagtcaaataattgacgaagtcgtctgttggaagccacagccagagttagttcgtgatttggagccagagccggagccggagccggagccggagccggagattaatcttgggttgaaaatcatatctctcattactcaactaatctcccaaccaatatctttatccattaagacatctctcattcctcaaataatatctatggtcagtaaaattgatttggatgcgccgcggagacggaaatgat

SEQ ID NO: 25148 - DNA, 518 bp, Arabidopsis thaliana columbia
tatgtgagttttgctgtttttaattgcattttactctattacttcatgggagagctttacatgcgcacatgtctccatgtgtttggcaaccaaatattgtaagagagagagacatagctttgatgggcttaaaatagagcatgaaaaacgctcttgcgtcaaaacaacaaggattttccttattttcaattctctaatctcccaaaaagaatttgagaacaaagataacagtcatcctctgttggtgtcttcttcaacaatttttcatattcttctgttgctgctttgtgttgttccttatctctctcagacatgaagatccctgcggctcttgtctttatccctgttggtgtcctcttcttgatctcagggctcatcgtcaacatcattcaggtcatccatttttgttaaaacttgttttgctctgataccaaaagaagtctatcttcattgtattgtcttctcaatggaagagacatagctgaaacattttatgttctataatgtctgttataaaa

SEQ ID NO: 25149 - DNA, 565 bp, Arabidopsis thaliana
ggatatattttcctttttagcaataaaaataactaaatggaagcttaattttatttagtctaggaacttttggttacaaacaaactattatcttttttagaataacttattccgggagatatatttagttgattttagtacggttgatttggaggatgtatgtcatcaagttctcttccagtagaaaatgatttatgatttatttttcgtctattgaaaaagttacaataattgaattagtagtgaaagttatactagttcaattaaattcttacttacacttaggaaacccaccatcaaagtcaagactcaagagaacaaccttttatataaccaaaagtgtactgatgatgccctgaagctggcggatacgttcttccggcacgccaaagggttaaccgccgatggaccaattcaggaaaattacaacccgctgacaggcgcacagcaaggcgcaccaaatttctcctggagtgccgcgcatttgtatatgttgtaaacgatttttccgtaacaataatttcaactgctggcggatcggcgtaaacgcttatccgcctacatg

SEQ ID NO: 25150 - DNA, 834 bp, Arabidopsis thaliana
cgtatgtcaatgtctcgttaacaaattagcaattagaaacatagtcaaaataatcatctcattctcatatctctcgttgctcaaaaaatctctcagcatctcttatggattcaaactcgaatcccgagtcaaagctcaaatcattcatccttcaaatcagtagtttcagcgagagttggaatccgtatttaggtttcgatccagaatgggattctatatctaagatgatatcaactattactcaaacaatctctctggtcagctcaattgatttcgattcccagccggagtcgaagctcatgtcactcactaatgaagcagtctatgtcttcaactctatggatttggattcccagccagatccgttaatgaagcttatatctctcatttctcaaaaggtctcactcgtcaactctacggatcttatttcggagcaggacacggattcagcgccagacttggagattttcatgttactcattcaagaatcatttagtctaacaccggagccagagcttatatcactcatcaatcaaataatttcccacgtcgtctttcggcagcgacagtcggagtcaatgcctgatttggaggcggagtagagccggagccagattcagagccagagtcggagccggagattgatctggagatgaatctcatatctctcattactcaactaatctctcaacctataactttatctctgaagatatatctcattcctcaaataatctcaatggtcagtaaaatggattttgatttgcagccggagacggaatttgtgtcgctcactaatcaagcagtctcgctcttcaagtctatggatttgga

SEQ ID NO: 25151 - DNA, 1142 bp, Arabidopsis thaliana
gtctgagttctgaatttgatatagagttggcaaaagacattatttgcttaacgactgctaccactgaaatgaactccgactctggctccggctctgaataatccaaatcaagagagcgtacgagagtgattactttacttgtaagcgatatgaatgatttgaattttggcaactcttctggcccaccccgcaactccaactcttcatttgtagtaaacgcatagagtgagtacatttcagaaaggagtgatatcaactcctcctcctccgcctcctccgaatccaaatctgaatctgaatctgaatccgaatccatagagctgtggacaaacatcaactctgaatccacctccggctctggttttgactttgtgtctgtggagataaagagggagtatatttgatggatgattgatatgatctctggcctcggctggagcttgtatgtttcataaaaggttgacatgaactctgagtctggctttggctcataatcggaatctaccgagttgaggtgagacagtttttcaataatgagtgatatgagcttcctcagtggctcgggttgggaactcaaatccatggagttgaagagagagattgtttgagtaacgagcgacatgagcttcgactccggcttcggctgcgacttcaaatccattgagctgaccagagagattgtttgtatcatgcatgatatgttctccgagtccgtattgttgcgagacactaattgagaaatgaatgatatgagctttgactctgactctgaatccatagttgcctggatttttgatcatttgaataacgagtgataagaaagattttgagaatgaaatgtaaaagcttacttttcgtgctctatatggtttatgttaatgcaagctataattctaatacatatatagcaaacagaaaataccaagacaagtgttaataacagaaaatcatgttgttcgaaactaagtcaacgctcaaattaacgattagatatataagcattgatattcttcagtataacaaattatctacgaataaattttaatcgaaaacaaatcattgaatgatgaacgtgaacattagtcttgttttattatatgtatagttgaaatataatattttacaagtctttcacatgcaaa

SEQ ID NO: 25152 - DNA, 613 bp, Arabidopsis thaliana
ttgtgtagctatggctatgaggaaaatgactaatgctcattaaccatagtcacatttatagtgaagttttccactgaggcacttaccattacgctaacacaacaatataaaaccgaaagccgaaaaaagaccaactagtagacagatcaaaaacggagtgacgaacaacgctacgtaaattactcagagctgctgattatacatttattgtatgtttcatagtcaatctacacgatctgatctgtgcatctgaatcttatcttgttatatataatgtttaaagcaagatccgcaagttatgggtagtatagaaaagcgtgagaacaagagtcacaacccatgtggagggagacagtaagtttcaaagctttggcaaaaaaatattttctcatatcactcagaaacaattttctctcggcaacactatggattcagagttagagctcatatcactcatttctcaactaataagtcttcccaagattctggattcgaaatggaattcagttactcattcggagattatatcactcattgctcaaataatctctctggtcagctcaatggatttgcattcacagccgaagccagaatcgtgagttcatgtcactag

SEQ ID NO: 25153 - DNA, 571 bp, Arabidopsis thaliana
agcatatagaaagaaaggttggggggttactaatccagatttgattgaccaggtaaattgctaagaaaaggttcttcgccttttaaattcctggcatcactgtttcaatgcgatagtagcaagttttgtttcatttctttcttcttgtttctttttcttattctttgttagagtctccaaggcttgtgtgcgttttgtttagttagtatgcacttgggaggctcttaactgaactatgcttcaaagagtttccatcttccaactgcgagctgaaatacttttcacttatctgtttgtgattcagtgtaaacgagaaggttttctacaaagagtaaaggatgaagaaggtgaagggtgtaatatatatgggttcttggaggtcaataaggtggctgggaacttccactttgctcctgggaaaagctttcatcagtcgggcgtgcatgttcacgatcttcttgcttttcagaaagacagttttaacgtaagaaatgacttgtcctattgactgcaactcattcgttatgcttctaatcttatatgaattcaatatgttgcgcgccctgcagat

SEQ ID NO: 25154 - DNA, 539 bp, Arabidopsis thaliana columbia
gcaattattatcatactcagctgaatttatgttaaggaagtttatttcactaggttgaatggtgcagacatcaatatgcctgagtggcagttttccaaggcgatcaggagtgcaaaaatcagatatacggattacacagtaatgagactgatccactttctagggaaactaggaaactggagacgagttcttcaagtcattgagtggcttcaaaggcaagaccgttacaaatctaacaagataaggtaaatattttactgactactctaaaagtgagctatggatatattgcattgggagccaggttgatttcacttacagaagtccagaatctctttttttaaacgtaatgctgacaaaaatattaccattttggatccagaatcatctatacaactgcactaaatgttcttggtaaatcaaggaggcctgtggaagctctcaatgtattcacgctatgctggtaaaaccttgtgccatgcttgtatatgttcttgttgctttgatataaattataaaattaagttaatctttttgtt

SEQ ID NO: 25155 - DNA, 593 bp, Arabidopsis thaliana columbia
atcaaagaaattatccacttcttgcgcattcccaagcttgaatgggacagactctcgggtctccacttcaacatcttcgtcttcgccatcagactcatagtcaatagtctcgcccattacaggtccttcctgaatagctggtgctgcttgtaagacaaccagttgcatcgcgtataacagaccccctggacgacaaaaaaacaagtggcgagttgttcaatatccctctctttaatcgatttaatcatcttcttaaatgacaatataccccatggaaaggcaagaaatgcattgagatcctccgctatttcagcgtgggccttcacaatttttggataatgggatgtcggcagtagaaagccatcgacgagtattaaatacgcacatcccaaccttatatcaggattagaaacaatcttcttcttcagcagggcgattactcggtcaacagtgacatcatcttctaaactaaacaacttgttgtagaaaagttttatcttcccaactgtgcctttcttcttcttctttgttgtcgggaacttccacaaggtaaacgagtacaatcttaactcctcaatgaaaacggattgggg

SEQ ID NO: 25156 - DNA, 550 bp, Arabidopsis thaliana columbia
cgactcgatcccttttaaatttggtagataaaaccattgttataactaattatctactatgtttgacaaacaaaaaaaactaattactgtatatatattatatttcccgtagtgtgtttggatggtagcgcgccacatgtccatttcgataagggatcgggctcaggagtgaacaattggatcgttcatatggaagttagtattatttttattttctcattttattagatgttatcataaataactacgtacaaaatataatgatattaattccctatgtatatccttccctgaatacattagggaggaggatggtgcactgatatagctacatgcgttcaacgtaaaagtacaatgaagggttcttctaagcttatgaacaaagactttggtttctccggtatcttgggtggcaagcaaagcaccaatccaggttttcaattctcttttatttcttttcattttgttcagcgaatttcttatttgttttcttatgcaatgagactgaatcggattttgggtgttttgcagacttttacaattggaatag

SEQ ID NO: 25157 - DNA, 588 bp, Arabidopsis thaliana
tgtttcaggatcaggacgcaccgacactagatgcgggaccttgtttcctgcggtaactaagaccctaagcaccttcttttcacctttctctgccaaaacacggtgtcttgggatcttacgagacctgccaggccaaacaatctgtcttctttggctaaaactaccaccactccataatcctatccttctctgtttttctcttccaatattcacgatttcaaatgtctctgagataaatttgttgtcagagatttggatgtcaccactcaaacccttgaatctactatgtctaattgtatccagaagatcagctgatacattcgaagatgcttcaactttaccacttacactgaacttctctactgcatttgctagaatacaagcgatatcgtgtgcgcgtaaaccgatgattacactagaatgctctgtttctgtatcatctcccatacgtttcctcaatcttgaagtaaaattcttaacttcttcagatacagggatgtaagatttgaaaccaatgaccccttgcatcgacctagttattgcaaaatgttccaagtagttcatggttcttgcagtgaggaccaagcg

SEQ ID NO: 25158 - DNA, 624 bp, Arabidopsis thaliana
tggttatatttgcttaacgaaaaatctgaggcaccaaatgttttgaagaacttcatagccatgactgaacgacaattcgaaacccaagtttaagtcataagaagtgataacggctctgaatttgttagtttgaatgagttcttcaagaaacaagagattgttcatgagacatcatgcgtcggcactcctcagcagaatggacgggttgaaagaaagcacagacatattctaaacgtggccagagctctacagtttcaagctaacttgcccattgagttttgggggaatgtgttctcagagcggcatatttaatcaatcgaacaccgagtatggtctggaaaggaatgactccttatgaacggatatacaatgctaaaccggtgtatgatcacattcgaattcttgggaacacgtgctatgctcacgaccaatcacatggaggcgataagttcgcatcgcgaagccgtcgatgtgtattcatgggatatcgtacgggaaaaaggggtggcagttatatgatctagagaagtgtcaattctttgtctcaagagatgtggtgtctttgacatgaatttcatttaaacggatgttgcaaagatttgtggaagaagctgaaatttacat

SEQ ID NO: 25159 - DNA, 605 bp, Arabidopsis thaliana columbia
aggatcacttgccaatttggaggtacttactgtgttatcacacctcaattgttatgcttcattggctgtctctgaataagatttatcctatcatgtcctcttcaggctgcttttctttcagctttggctggcacaaatgttgcagaagcagcagctcgagcggcagtgagagctttatctgatgtagactacgaggctgacaaaaacgccagtagagacccaaatcgacaaggtatcaaagaccaagctgtctctatttgcagtccatttctgtcctaagccaaacccaatagtgacagttttgttttcctgatacacagatgccaatgctgcatcgagtggtgaaacactagaaacgaatctgaaagagcttgggcagatgcaaagtctttaattgagaaggaagagcatgaggtagaaggagcaatcaaagagactgttgaagttgaggttagtaacaatctgcaactttccatagactttttattatatggttatactcaatgatgatttatgttggaacaaacaaaatttgggattaacagatgaagaagatctgagataggattgttcatttcgagaaattggatttggaaatggagaga

SEQ ID NO: 25160 - DNA, 572 bp, Arabidopsis thaliana columbia
gctctcgttttattgttgtatcttcctaactgattcttggtggtatgttttgctggtcagataacaatgaaagtcatgcgaagaaagaacgtccagattcccaaacccgaccacaggttccttcaggacgaagttcggaatctattgatacaaactctgtctactcagagcccatggtaatttctctcagccaaaatctcaactatttgtgcaggctacattcaatgagtgatctttatttcgattatatgatatttggtttagtttctgtgtgatcttgctctcggttataatatgtttgcttgtgattctctttttcaatgctaaaagttttgttttgatgcttacaatgccaaaacttggttgtttgagataattcaagcaagaaagtcccgggatcatcgcctttctgcagttttagacttcgtacgaatgtaaactttgattgctttgaaaatcagtcttgagatgcagtgtaatgataatgttgatccaagtaatgctaaactttttaacctgagatgatacggtttttgtttttgtgtgtgttggtattgaaggcacatggatta

SEQ ID NO: 25161 - DNA, 524 bp, Arabidopsis thaliana columbia
tgaaggtgaggactataatgaaacgtttgctcatgtggttatgatgaagacggtccgtagtttgttacgtattgtggcagccgagaaatgggaagttcaccaaatggatgttcacaatgcctttctccatggtgatttagaagaagaagtatacatgaaattaccggttggttttcgtcattcagatccgaagaaggtttgtcgtctccataagtctctatatgggcttaaacaagccccgcggtgttggttctctaagctctcttcggcgttgctaaagtttggatttgttcaatcttattcagactactctttatttattctctcacgggctggtgtggagcttcgggttcttatttatgttgatgacttgttgatttgtggtaatcatccacgtatgcttcagagttttaaagagtacttggaaaaatgttttcacatgaaagacttgggtaaagcaaagtactttcttgtcattgagattgcccgaaattcagaaggtatatatctttctcaaagaaaat

SEQ ID NO: 25162 - DNA, 1359 bp, Arabidopsis thaliana
tgttgcgcagttctcgtttggcgcttcctacacaaagaagaaatgctatgatcactcgtgccatgagtgcttcctttggtgatatggcagacgattcagctggtaatacattcttctgagctatgcacaatttaaggttatgctttctagtaattggcacagactcataatcctgagttaagcttgtaaacggtgcttttgagtaatttagtagttatatttaagtgcttttgaatcgaactagctttcattagacgaagcaatacctagctagcaattcaatgaaatgcgtaattcttgggttgaaaacttgaattccaaactgactaagctacttccattggttcagctatcttccctcggatcaatgtcaaagacccatataaacggcttgggataagccggatggcctcagaggatgagattcaaggagcgaggaactttctcattcagcaatacgcagggcacaaacccagtgttgatgcaatcgaatcagctcatgacaagattatcatgcagaagtttcatgagaggaaaaaccccaagattgacatatcgaaaaaggttcgccaagtgaggcagtccaaagttgtcaactttgttttcgagagattccaaactcctcccaatgcagtccttgtcaaaacagcagtcacgtttgcagttcttggcgttctaaccgttctgttcccgacagaagaaggaccgaccttgcaggttttgttatcactaatagctaccttttacttcatccaccaaaggctccagaagaagctctggactttcctttacgggtaataagctgatcttaattgtaaaaccgttgctacctacttgattagaatccacacctgatcaggttgatattttgaaacagagcgggagctttcatcttctcgtggctggttgggactttcttgatggtatctgtgatcccaccgttcatcaaaggaccaagaggttttgaagtcatgtcttcgctcctaagctatgttttgctttgggtcgcttcgagttactccggtagcgtgctagcttttttcttttccccgtcttttgggccagaaattcaagtgttatctcggatatatgaaaacacacgaacagagaaaaaatgcatcattttcatgtgacagagagagagagagagagagagatatgatttgtggtcttggagttgttatttcacggagacctcattaactttcaaagctcagtttccaagttgtggctacaaacaaagaatagtaagagttgattacggaaattagtcggatactagtctgatttcataggaattaggaaacatggcctcatagcacatcatgtgctgtctcatacataataactatggctgca

SEQ ID NO: 25163 - DNA, 758 bp, Arabidopsis thaliana
gacttcagatctatacccctaatgagttatgatgatggtacatgggtacatataaatatttcctcttacatagacatttaactctctaaacactggagtcattattgtgactttcctgtcttttccgtataatgttgttacacatcctaagaccattgctctcaacattggatcatattatgtcgttgtattctccaggatcatggaagacagaaagggccaagagaatttccaactcatagtcattacccacgatgaacgctttgctcaaatgattggccaaaggcaacatgctgaaaaatattaccgggtcgcaaaagatgatatgtaagcaaactattatcgctctcatcttttcttctttctatacttgcttttccatttactctgaattcaagacctgatacttcactggggatcttatcaggcaacacagcataatcgaggcccaagagatctttgattgataaaccagtggcttgttctataaaccaacataacagttcagctaatgtttaacggtaagctcacctttttgaatagctacgtgtagctttcttggctctgttatctacagctctacacattgtttgattagatgtgtgcaaaaatttctgttgaatatgaaaaatcagtatgtagaggaggcaactctttgaaccctcatgttaagtttttgttaagagaatgctacaacattccaaagtttgttgatggttctgatatttcatcaagtctcatcgcatattcttaataac

SEQ ID NO: 25164 - DNA, 581 bp, Arabidopsis thaliana
gtcaaatgttgttccaccgaggaaagctgcccctattgagagacaacttccttgtagtttggaagatctctacaaaggagtcagtaagaagatgaagatctctcgggacgtcctcgattcaagcgggtcagttttttttcagctacattgtcatgaattgagtttaagaatcaccttcttatggatttagttccaaaacattgatttgcttaggaatttttaccttaaggagctttggagctggataaatacatgaaagatgtagtgctagaaattagtcattagccattggatagattatgttggactcattagagttgttttttttgtagctatgatgttgttgttatcggtaatgcaagttgaaagtgtattctttgttgcaatgcaggagacccacaacagttgaggagatcttgacgatagaaatcaagccagggtggaagaaagggacgaagattaccttcccggagaaaggaaacgagcagcgaggaatcataccatcagatcttgtattcatagttgatgagaaccacatgcggtgttcaacgagacgggaatgacattgtgatgaccagaag

SEQ ID NO: 25165 - DNA, 524 bp, Arabidopsis thaliana columbia
ccagcctaggcggatccatgctttccaacgaagcacgcccatccaacctaggcgagacaagggttcacatttcgttcatcacccttggccggctttcgaacagccggactcccatcataagctatttgtcgtctcagagacagcttcagccgtcaatttccctttcccagtcctcctaaaccccttcttcgcacttccgtcgtcttccttagcaacgcctccattgctctgatgtttatacagggagtatagttcctctgcttcacatgggtgaatgcattgctaaagaactgcaagaggcaaaaatgaagccccttgaagctgggaatcctctgcgtgtaggtgtgatggccactagcgccacgttatcagcagggttctaccaggagaaactccaaagcaatgtcagtgttctattgtgtccattggaacaacatatctatcatttgtctaagttcgtataaagctagtattatccatcgtatgaagtgactctgtgattatggaaatgtacagggatttga

SEQ ID NO: 25166 - DNA, 462 bp, Arabidopsis thaliana columbia
ttggatgtggttgcctaaacttaagtatggtcatagagattcttctgaatgcaagaggttggagtgttttcttgacaaaaatctgccattacatagagctccggttatagaaagcttccgtctttacttaattgattcaaaatgcacacctgagaatatcaagatgtgggttgttatagcagtttctcactgcctgcgtgagtgagaggttatttattcttcatatccggagaagccaaacatattgccgagtaacttgtatacctgcaaatcgcttgtgatcttggaactctgtggcgagattcgcttggatgttcctcgaatggcatttcttccctctctgaaaactttgcaacttcacagcgtgagatacctcaatgaagactctcttcatcggcttctatctaactgccctgttcttgaagatctattggtggatttacttttgtcagacagcatgga

SEQ ID NO: 25167 - DNA, 404 bp, Arabidopsis thaliana
  unsure (1)..(404): unsure at all n locations
gtaacggccgctatcacccaccgcaaaatccggtgatgtattctgtgtatccaaaaacagaggaatttatcacataatcagtagtgaactttcttatatatttcttattgattgcattgacttatgtttcttatatactaaatagtagtaaataaccctatcaacctatgatacttatatatactaatagtaaataattatctcaacctatgtttcttatatactaatactgttgtctgatatttgagaattcatatgtgatttacctgaacgtataatttggtgatggaagatgcataacctcgaacataatcaaatctccacncatggaatccgatttcagttttaagccaattcatccattcggacaactctttctgaactctagggttaaggtggtcgat

SEQ ID NO: 25168 - DNA, 530 bp, Arabidopsis thaliana
attaatagagagtaatgaaactgtctttatgaaaaaaaaaaatatgacaaaaattctttttgtttttaaatttaacatgagattacttacaaaaataacttctgaatttattagtatataataaaaaggtgattcttcaggactatttatttattacatcaccaaattttgcccgttattttaatttcaacctttttagtggcctcccaacggctagtcaaaatagaaccagtttttcaacaaatatatccggtttagctcactaaaccggtttttataatcagagaacatgaagaaaaggttggatcacactaggattcagagaagcgaattggagcaattctctatcttgttcaaaaagattcatctcttgttcattcagattcacccaagcttcaattccaccagcttctttcgtgtcgagaagcgtcacgatgttcttctgtctaaccgaagaaacccgacccaaactggttttcccaaccgaaatcggtttcgtataaccgaatcgacaagcacttgagaatatg

SEQ ID NO: 25169 - DNA, 687 bp, Arabidopsis thaliana
tgtttctcaatctgaatgatatttaattagattttatggttaaatgacggctttaattcaggtacatgagtatcttagtgaatcactcgttgaattgatatatagttgtcttgtaaggcaaaaccggagctaatttgaattaaatggccttggaacttcttgctggtttcatgaagccaaaatgctaaacttcgaatcaaaaaagcagtgtttttttcttacttttaagatgtcaagatcaaccaagaaatttgtcaatgttttatctgtttggcgataaggtctctgcattaaattagactttacattcaaaaggctagatttgtcgtaaccttgactttgacattgccaataccaaacccaccaacccgagaaagtcagagctctggttgaagttgaaataggtattatctaaaagccagtgtatgtatgcccctcctacacaaagatacagatattatataattgactcaacagttgaatccatattttatccctatcactgcatgtagacagtagacactaggtgcaaacgctagatatgtcaagataatcctggagattgaaattgaaaaggctaagatatgtttgttcctttgcagatatctagatccataggcgacgtgtatcttaaaaaggcagagttcaacaaggaaccattgtacacaaagtatagaatccgtgaac

SEQ ID NO: 25170 - DNA, 570 bp, Arabidopsis thaliana columbia
ctgtgtgtgttattacacatctctcctctgcttaccatgtcgaagagaattcgcccaagctggtacagagagtcccctccaaaacaacctccttttgcttttgaacctgaagaagaagatgatgttgtcattctccctcaagtggataattcagcgctccttgctcgtctccatctcagcctcgtggggagaatgttccaccaaggaggacgcagtactaaagcccttctctcttttctccctaaggaaaacatatgggatgtggagggtcgagtccgaggcgtttctctcggagatgctcgatttcaattcttttttgaatctgaagttgacctccaaaaagttctcaacaagagaccttgtcacttcaacaagtggtctttcgcattggagagatgggaaccccatgttggaactccttccaaacatcatgactttttgggttagaactgaaggcatcctgctgagttttgggatgaagaagtgttaagaaattttggtaactctcttggtttagttcggagagttgatcctctaaaggaagaattctaatctctgtgacagcagatg

SEQ ID NO: 25171 - DNA, 575 bp, Arabidopsis thaliana
taacggccgccagtgtgctctaaagaaccgattgaggttaacgaattcggtgaaatcgatctgcttgcaatggttgaagatgaaatcatcctcgccttgccggtagttccggtgcatgattctgaacactgtgaagtgtccgaagcggacatggtctttggtgaactgcctgaagaagcgcaaaagccaaacccatttgccgtattagccagcttaaagcgtaagtaattggtgctccccgttggatcggggataaaccgtaattgaggagtaaggtccatggccgtacaacagaataaaccaacccgttccaaacgtggcatgcgtcgttcccatgacgcgctgaccgcagtcaccagcctgtctgtagacaaaacttctggtgaaaaacacctgcgtcaccacatcactgccgacggttactaccgcggccgcaaggtcatcgctaagtaatcacgcatctgcgtgatgaagcttagtgaggatttccccaggcaactggggaaagaccaaaccgggcggcgacgataccttgacacgtctaaccctggcgttagatgtcatgggaggggatt

SEQ ID NO: 25172 - DNA, 568 bp, Arabidopsis thaliana
tcattgtactacttgattcaaaaggttctttatgatttactactaaaactaaatgagatttcttaacttatatgaagttagatatagatgctatttttttatttttttatttagatttcgattccttcttatttgttactttaattcgatgtaaatgaaccataactatgtaaacctattcctaaaagattgacgccaaaatagcatatccaaattaaaataaaaccgatcaaagccacaattgcagaatttatacccctaacattcctatttgttttaatatgtaaataaattgcgaatatagtccaagtaataaatgcccaagtttcttttgggtcccagttccaatatgaaccccatgtctcattagcccagacagctcctgaaagaatgccgacggttaaaaagataaatccaagactaataatacgaaaactccaaaaatctaattgttgaatcagttgatacctataataatttctagaaaaactaaaattaatgttttgttgtagtaaaatagaatttctttcatttatgtagtaaagtacatcaaaagaaaataattcat

SEQ ID NO: 25173 - DNA, 475 bp, Arabidopsis thaliana
atctcacacgcttagattcaacaaacgcagaacaacagaaaaaaaaacttcagatgaaggaaagagaggactcgaatcaaatcagtcaaagagcaaatgaggtgtttcactaaccttatcccatgaagaaacgaggagatgatcactgttattagaaaatcggagattagaaatgccgtcggacggcggattcgagagctcacgaccggcggacggagtcagagtcgtcatttttcccgttgaagatcacaaatgctagggttttctactttctaggtttagtgagagagagattcaaaagtagagtggtttaaattttgaattcaaattgcagaagtacaagggtcgattagatctactctacatatccaaacagaaaaactaattttattttatttgaattcgaattagcgaaatggtcgaaacttcaatgatccaaaatgaatcatgtaaaacacgagttcaacgaagatgg

SEQ ID NO: 25174 - DNA, 881 bp, Arabidopsis thaliana
tcgaagagtcgtagttacacttccatactactttaataaaaataggttttctatcaagtgacgcatcacaacatggacagagtcatttaaacttcaaataaatcaaaacatcctatccgtaataaatagcatatgtacagttaacaaaatgaaggagaagctatcaatggtagttctggagaaaactttaataggaaccacttatgggtcttataactgatcatacacttcaaaaggagaatcttatgggtgttataagtgataatgcgatcgaaggaaacagtgtaataccttttaaggcaaggatcctcgagtttgggttcataagagcagaatcagcagttataggcctccttaaaggctgcatcggcatattcatatcgataattacaacactgttctgcggtgccgtctctcgtacacatatgtacttatcagactccatagtaacatttgtaaaggtgatgaactgttgaccgatcccaacgctcggaagctggaaaatttccaaaacaaaagtaatcaattggcatagttcattaacttagttacaagatccgagtagataagcacattgcgcaacacaataacttaaaactaaggactatatacattcagataacacagatctgagcgtccgcagagaaaatctgatcagagaacttgatctcaacgatcgggtagaattgagaacagaatgaaacttgaatcaatcatataacagtgtgagcagaaccaaatcgatagaaatcagagactacaactatagaaacatgttaatcgtccaaaattttagctcgattcccggagatttaaaaacagagaactcaccggttagacctccttcataatgatgggcgcgttcgagcccgccatgtttg

SEQ ID NO: 25175 - DNA, 585 bp, Arabidopsis thaliana
gcaaaagcctattgattttaacacaagtaagaagacgatgaaaattacaatcatacccaaagagctccaacttggacaagcttaggaacaagttgaccacttaagtgaagagcgacaagggactcaagacctccgacgcactcacggccaatgaaaaccgccggcggaggaccaacgacggagacgccaccggaatattcatcttgtagagccgtgggaagagaggaaacctcgtgatcatcgagctcgatgacggtggggattacgccgatcgttgctaagagtctcttcatgacgtggcacatgcaacatgaagatctactgaagatgatcacaggatgctccgatatcagccgtcggatcttggcttccgttgattcctcttcgtcgatggaaagagaagtagatgaggtttgagaaggaggagtgaggtctaagcgaacgacgtcgtttgagaaacgttgtaagcctaattcttgcatcatagcaggcaattagagagagagagagaaacgtaaagagctttttcaagaagaagaggagattttgtatttgtatatatagaaagaatcaaaaagaagttta

SEQ ID NO: 25176 - DNA, 1407 bp, Arabidopsis thaliana
aacgaagaagtaaaatagatacgatggctatggcgagatatctttatgacacgtggtaagtagatacatctaaaatgagtcacaaagtcacaaggcggacacatatagataggagaacttggatcggccaaggcgcaaaggttgcaagttaagaaagcttgtcttggaaacagagcaagaggatgaccatgccactccggacggtgatggtttatcgaaaagactggtggtttcctcgcacaaagtatacttatagcaaaatcgcaagccgagcaataataaagtatacggctaagagcttcatcacaacaatagcattccctggtactatcttcctgcaacacgacaagctggagagaatgatttggatgaagaggatggttgatctcaacaggaacattgttaaattctttatggttatcgccattgcaacctatgcagataaaatggagagtgtcttcttctcttgataacttgaatgtccgccagtttacagaaaggcaatgccacttgttattggtgcgccacgagacgtcttcaagaacacgaaatcttccgttttccagttttacttgtgcttgagggcacaaggaaatatactcccccgagtttgagttcatagagacgacgagggagagtatttgatgagtgagtgagataagttccggctccggtttgacttccaaagtttcatcaatgagagaaatcttttgagaaatgaatgatattagctccaccagccgctttggctggtaatctgaatccctagagttgactagagagagtatttcttggatgagttacactagctcatcagactctggcttctcctctgtagttaaatccattgagctgaccagagagattattttaccaaagagtgttgtggcttccgagtccaaagcagagttaaagagagataaattttgaaaaaccattgacatgagatccgacagcagtgtggactgagactccaagtccatagagttgaagagagatattgcttgagtagtgagtgacatggactctgactccggcttcagctggggagtccaaatccattgagctgactagaaggattagttcggtaagcaatggagtggcatcccagtacaagttaaagtactcgacaaacattagttgagtaaggagtgataagagctccgactccgaatccggatccggatccatagtgtttgccgagagaggctctttgagtaaaagttttgttaatatgagagatttttgaggatgaatgtaaggtcggcttatgcaactttcatattgtcgttcataaactaaacaatagctttgacttttgatgcctagtgggagagtgaaatttaaaaatactggcaagtaggcacgaaaacaaacatatgtgtaaacaagtaccaattttttgta

SEQ ID NO: 25177 - DNA, 490 bp, Arabidopsis thaliana
taacgtccgccagtgtgctctaaagcgagtacgccaaatttaactacggcgtaggcatgatgccttacgacgccgatgcgaaagatgcgccacaaaacgccattatcggcggacacgcctgtgggtgatgcagggtaaagataaagaaacgtataccggtgtggcgaagttcctcgatttcctcgcgaaccagaaaacgctgccgagtggcatcagaaaaccggttatctgccaatcaccaaagcagcgtatgacctgacccgtgagcagggcttttatgagaaaaacccaggggcggataccgcgacgcgtcagatgctgaataagccgccgttgccgttcaccaaagggctgcgtctgggcaacatgccgcagatccgcgtgattgtggatgaagagctggagagcgtgtggactggtaagaagacaccacagcaggcactggataccgccgttgagcgtggaaatcagttgctgcgctgctttgaga

SEQ ID NO: 25178 - DNA, 431 bp, Arabidopsis thaliana
taacgatcgcgaaataaggctgcgttatgcttgtttggctcttgttgatgggtttttgttgcccacatcgcattaccctaaaataattaaagatcacgcggaaatgtccgaggatctgcagggttttttgtcttacccttggggtcgattgtctttcgagatgatgatgacctcaataaaagagagggaagttgaacagctcgccacaacgtgtgttgcggtacaaggtcttctatacgctttgcagcttgttgttttggaagcagtcccagccatacaggagggtccacaaattgatgaggttgttttgtctgattctgatgcggaacgagccgctgatgtggctactcggccaggcgttgcctcaagcttgggaatgccaaaaatgtcgattctaattgcgaggtaatgttttctcccaatacatatac

SEQ ID NO: 25179 - DNA, 591 bp, Arabidopsis thaliana columbia
gaaaacaaaagtaaaaacagagcaagtagagttacgttgcgacagatctcccaaagtacaaactgcaaagaaagtaagtactattttttgataatcgaaaactcgagaggaagaaatgtgatttttactcatctcagtagtttaaagaggatggggaagaagattgtctttaagattaaagcattagtggtttcagtggagaggttttagaagatgtcatatagttaaagtaatcttggccaaatcattgtcacattaagcattatatgttcatagaaattcccacaccaatgtggagtacttaaagatgtggggatcggatcatagaccaattctagcatctatacaatcaagtccggaaaaagtttcgagaaaatttatgtttgataaaagatggattggaaaaccaggacttaaaaaagcagtgttagaaggatggagcggagaaggtttgaaggaagaccgccccattatgaaaaaaatctagaactgcaaaagagttatcccatatggaagaaatcacccgaacaaattcggaaatgcttattaaagaactccatgataagattgaggaaaatatgctgatgatag

SEQ ID NO: 25180 - DNA, 1382 bp, Arabidopsis thaliana
gaagataagggtctaactttgtgattctataattgtttcagaaagacaacttgacagaaagagaactaattagcagagctacctcgccagcttgaaatccccgaaagaaacccagttcacctcttgtgggtatacaatacacggaacagaagaaagatgaaagtgagactaaaattattctctgtggacaacgattatgacaggatgagcaaataggtcgagatatacccataaagttaggcagaatcaatagcgatcccctagagatagaccatgatgaacgaggcttcaagtataagtccttcccaagcatacatgtaatgtgtaggtggacacaacaatactcatcacacttataaaacccttcttcaggatttattttcccctcacaagcttcacaccaataggtcatgctacttgtcttcttcccataaaaaagagggagtatgtgtttatcatgcttatacctcactttttgaggtaaagtagcacatttgaaacacaaagcaaagtcacactcttcctcaatgcaattgaaggtttccttggtgtaataacctcgcgcttcggccgaaaccgaacagtttctttcctcatctggtttggatgttaggaataaaggatgcatatgacttggatgaagtaaaggctccgaaattctggcgcactgcacatgtagcctaaaatcgcaatttctttcactgcactcatagaagaaaccagctatacacaacgaaggacaagctgaacaaatatcacgatcagaattaatcgaatacccgacaggtctgagagggttatctgttactaaagtgagttgatgtggatgtatcgggtgatctaatctgcgagaaagttttgcacattcttcatgtagaatgaaatcacattgcaagcaagagtaggagttaccaaaataaataggcatgatgcatgcttgacacagcttattctcgtcgtaatctttgctggtgttctcatcaagtgtcaaatgatgatgttcatgactgaaatgttgtatgattccatcgcttatcgtcacgaatggctcaagttcttccacttcttcttctgactctccttcacgtcctataccatcccaaacatttgtttgagtggcgcattttgaatgaaccgcataaaaacaaccgttcttgatgcaatgataccccccgtaatcattgttaatcttccggcggcaaacaccacaaataccatctccttttgggaaagaatgggtacaagagatacaatggagttggcgagaaatccgtatgacatgaggtaagctaaagaagctctgatgaccgataaagtcgcaagggggacatatatagaaaaccaaatttgaatgtttgaaggcgcataggctgcaagtttgg

SEQ ID NO: 25181 - DNA, 556 bp, Arabidopsis thaliana
  unsure (1)..(556): unsure at all n locations
nnnnnnnnnnnnnnnnnnnnctaaagcttgtcgatgatggtgctgccactgcccgcattcatactcgacctgttgtttaccttcaatattgccttgtcgatcatggtgttgctggtggcgatgtttacccagcgcacgcttgagtttgctgcgtttccgaccattctgttgtttaccacgctgttgcgtctggcacttaacgtggcttcaacccgtatcattttaatggaagggcataccggcgcggcggcggcagggaaggtggtcgaagcgttcggtcacttcctcgttggtggcaatttcgctatcggtatcgtggtgtttgtcattctcgtgatcatcaactttatggtcattaccaaaggtgccgggcgtatcgcagaagtgggtgcgcgctttgttctcgatggtatgcagggtaagcagatggcgattgacgccgaccttaacgccggattgattggtgaagatgaggcgaaaaaacgccgctccgaagtgactcaggaagccgatttttacggctcaatggacggggcaagtaagtttgtcgcggcga

SEQ ID NO: 25182 - DNA, 586 bp, Arabidopsis thaliana columbia
taagtgtgtacataactagaaaacaagtattaccaatctaccagctgtcacattttaaaattttaatcacttgatttcaaatcgttatcaagatttattttaagaatttgactaataatttgtagatgactaatacacataaaatatttatatcttccctaggatagctggattcaattatttgcgtactcatggagttggttacaacaccaaatactttaactaggcagtgaccaataagaaaaagaaaaaaaactaactcactaagcaaatggttggctgattgattttcttggtagcaaatgattaatcccaaccatttttaagaataacaatcgttttgtgttttaatcattttcgaattaattacagatttaattctatgacgtatataaaaaaaagttaattagagagttagagtaaatgtaaaatttaattacctcaaactgcaaaatccaattgtttgatccagcaccaaaccctctgtctaaatgatacgccggtaagcttccgtccaagcaaactacacaaaatgtaattccaaatgtatatcaaaagaaagtgtgagatatatatatatatatat

SEQ ID NO: 25183 - DNA, 593 bp, Arabidopsis thaliana
atcatgcctctataaccttttcctctgtaaagtttcttcctttctaaccttcccgagaaaaaaacaaaccctttctgttagaaaaccatgagaggtctcgcggcttgttacagtgaacacgccattaaagtatcagatacatattgttcaggtccatcgaatcattcctatatatctccgacattacctccttcaaatccccgacacagtaaccaccacttatagatccaatctcccatcttccgacaaacccgtctctgtttcactcacctggtcggataatctcaccgtcgtcatctcaacgccgccgaaatcatactctgtttcactcagataacctcgaggatcaagaaagttgacttcgtcttcaggtctacttctgcatctgaagtacttggggtgccacggttgtacttgttcgacggatgaggcaaggctcttcctccaccaccggaagctgccgaagccgccgtgtcatgtttgagagctccataggtgagatacctcccttacttgttaacatcatcctctcaccactcggtgatgtcaccatatctttagtttcttcatcttcggtttagatgagttggtca

SEQ ID NO: 25184 - DNA, 579 bp, Arabidopsis thaliana columbia
  unsure (1)..(579): unsure at all n locations
tgaatcccaccaaaaccttgtcaaagatgattggattctcttacaaagagacgaaggaagctgaaaacacgacatcgcgtacgtaggcatagtagataggacacttttgagcatggttaacttgccagcacttgacagacatctattagaccagcttagagccttttgtctgatcctgtccactatagaggtaaagaggtctatcttccagcgcccaaaatgctctggcaatcctagatacttgcccaccccaccttcttgatttataccaagagagaccataactcgctgactcaactccgaagggnctttccttgagaaggagacagaggaattcccccaaatatttgctgtccagaagccaactcatacattcatcaggaatacgaatcattcattgcagcatgagacatttgttttacagaaccacattgtgtcgtcagtgaacaacaaatgattaactctaggtctgcccatagcaactctaatcccttgtagcttcccattagactgagcctttttgcagagcccgcccgacnacacctcactacacaccatggaaatgtatggggcaaggga

SEQ ID NO: 25185 - DNA, 579 bp, Arabidopsis thaliana columbia
gtgtttggtcgaaattgagttgaaactgtttctcgacgtcgagaagctgcagattcatcagccttgtgctctgcagctcaagagctcgttcttcaaacctccttttccacagcagatcttcatgaaaagccctcccccctatacacagagaaatcagtattcaataccaagggaaataaaagagagagagagagagctttataccaagctggaaatccataatgtccctggatggcttagtcctgcagcagaggaatcaaagcgtcgtaaagagatgaggaatcaggagcagctcaaggaggaaaagccaaagtacctgtacttgtctgggactttgcctttctccttgtaaggcttaacaagaaccctggaatgacacacaaagtgagggttccctttggccagaatgctcttcacagtctctgggtacatgaaggtcacgaacccaaacatcctcttctgctggtaaggtatctcacgtcctgaactggcccaaacgtactgcaccaccattgctttaagtagacaacatccaacaagaagaatgaatgggttcaaacaagagtaatacctgaagta

SEQ ID NO: 25186 - DNA, 354 bp, Arabidopsis thaliana columbia
ctactgagatgcagggagtgaagcacaaggtcgccaccccttaccacccacagacacatgggcatgtgaaaatcaccaacagggagataaaatcaattctaaagcagactgtgggatcataaggaaagattggtcaacaaaactcaataatgtagtataggcttacaaaatagcttataaaacccccattggcacaactccgttctatcttccttatgtcacctgcctgttaaacttgagtacaaagctatgtgggcggttaaacttttgaatttcgacatcaagattgctaaggagaagagattgatacaactgaatgatctttgatgagatccgtctagattagtgtgatgg

SEQ ID NO: 25187 - DNA, 441 bp, Arabidopsis thaliana columbia
actcagcctcactgtcatcagagtctctagcaacttccttgccacgagaatcacttctatacttgtccttgccatgtttggtcacatcttcttcctcttttcttttctggctcattcctgcactgtaaacttctaccttactgcgcagttgtttcttgttctgatactcaatctcactgtcatcagagtctcttgcagctttcttgtcatctctagtatatctgtctttcaaatgatcagcctccacgtcttcatcatctcttttctgcttctgtcctccacggtaagcttcttctttctttcgcagtggttgtttattatcctccgattcaggctcgctaacatcagaatcatgcctctttcgtccagctcggctttgttcatcatgtttgtccttaattctttggaccagatcggttggaggggaggtctttttgtgtg

SEQ ID NO: 25188 - DNA, 318 bp, Arabidopsis thaliana columbia
cattgctactgctcatctgtttcctatgatccactggcactttagcaggagctgatcttcgggaatctgatctggaattcagttggccattccggttggctgattgaccattcattgtggaacctgaacctggtggcctcataggtgcttgacggtttgtcgacgaacctggcctttggctgcctgaggacgcaggcctttggctgcctgacgacgcaggcctttggctgcctgaggacgcaggcctttgctgcatttggctatcagcggaacgtgtctctgaattttgtggtcttgaattttgcatctggctgcctg

SEQ ID NO: 25189 - DNA, 567 bp, Arabidopsis thaliana columbia
ctgcttggttcacttggatgtgagaaatgaaaagggcatcgacatccaaacctttgacctgataaccaaatggtttacaaaaagttttagtaactaactaaaatcaccatggcaacaaaacaaaaagagtcgtaaaaccaacctcagcattgctctcagcattcttgagaagatcaagaacgaattgagcagatttagcaggccagcgaccttgtccgttcgaatgcctgttctttgcctgagcggtacgaccaacaccacgacagaaacgggtgaaggggatagcttgcttgtgagctatgacatcttccaagtaccttttggccttgttcaatggtagcttccttatggcgtgcgctgtttctctagtgttctgtttcatacaaattcaattcaaaaacacaattagacacatccaaatcatcaacaatgaaactagaatgacaacaatactgttcagtgtgattatttacctaatggcacagtaacatttagcacctcaaacctaatgtaaatgatttggtgtattgcaaattattgaacgactacatctatacaaacccagat

SEQ ID NO: 25190 - DNA, 850 bp, Arabidopsis thaliana columbia
acggtttttcttctttacttactatattgaatgatatttaaaatagaaaatttgttaaaaaaattaaaacatgatctttataatattgaaaagaagctactaccttgccagagacaaaattttaccgataatctactactaaaactatctataatgatttattgaaaaatattaattcaatagttgaatacttaaagtgaagtattgaataaataaatgaatcttacgtggattaaatggtattgatcggattcaacaatattgaattgttaaaaatgaaccgttcattgccacttgtcatataaataattagagacagaaattgtgggggagaaagttaatgtaaataggacatgttattcttttatttgttactgagatttctgatatttttttttcctctaaattatcagagatcaattatcttataaaatatttatttgttttaaattatttttacattgaaattcatcatattcaaattctataaatagatacttgtttcatttgatttggacatagaaaaaaatacatctactttcactataaattttccattagcctcctgtaaactcgtgtctatatcttttcatgtttcttttccagtgaaatggatcctaacaataacccttttaacacccaaaattccactaattaccaatttcactatccaaatcccaacaactatcaatctaaggcaagcgggtatagtacactggaaccattctcaacggaggtgttacatgcgtttcaaatcatgtgcgtgctagatctgagttgcgtgattcaagtgtccatcatgaattgcaagcagatttagtcaagcacatatgggcaagatttggaatgg

SEQ ID NO: 25191 - DNA, 500 bp, Arabidopsis thaliana columbia
cattatgttaaacttactgaagatttcgaagtacatcgacaagaaacagaacaagaatcttcatcatcaccgtcttcttcttcttcatgtggacagaaacggtctgtttggttttggatcaagcttggtcttttcttcacttttctaactgctttgggtctcgctggttacaaatggctaaaaccctttaatcatggataaggttttcaatttcctccaatgatttcttgttgaattgatcttcttctgaaagtcttcttctttatctattgggtttgattatagtttcaactactgaattagatccttagtgtataaaagaggttcctttatgattttggttcatgtgaattgaaactatgtatccctacgattagctcagtatccaataaccaaagtgaggtttcgttgttgatgttctgtgtctaaaatcggtagacgttcgatgctggtgacaaattcagtcagtgacatattcggctctgttgctgattatggga

SEQ ID NO: 25192 - DNA, 723 bp, Arabidopsis thaliana columbia
ccatccactgttacattctcacacccttgaatctcaaacgtagtcaacttacaacatcctctccctatagccaccaaacccatatcagtcaaatcgccggaattcttaatcgacaacgactgcaatcctccacataaagccacaccgtcgagcctcctccattctgtagcagagcaaacaccttggaactgtcctagcttcaatactcttaacttcttgcatttagaattcaatgcctctaaagctacaccactatgcttcacatcctttcctacgtcaagaaccagctcctctagattcggtaaacctgagaaaacttcaattagcgtccccgccgtgacagctgaatctccagcttccgtacctggaatagctctaggattcgccaacgaagctgtgtccaccatgtgtagaagcgttaacttaggggaactggtagctacggcggagagagtctcgtctccgacgaattcaaagtatctcggatcaaacgtacaagctacacgaaaagtcttcaaattagggcaagatttggtgatactaacgatttcgcttgatttgtatccctcggtgaacgacgccgtcaagagatctaaccgtgtaagcctcgccgccacgtcagcatagcggagaagcacaggaggtaagtcttcagtccagtgatagacgttggagagatctaaagactcaaggaaaccaccactagtgttcaacaataggaac

SEQ ID NO: 25193 - DNA, 903 bp, Arabidopsis thaliana
gcacgacacagatctgtgctaaatctgtcttagctcagatgatgctcggatcttcacaagatctgaagaagattcgcttgatgtatctgtcaaaacgatctacgtcaacgagttattaactttcacggacaagagtgttaatgaaggaagctctgtttatttctgtcaagggtttgtgaatgaagtcatggctgcaggacaaggaagtcctcttcctcctcctgatgtgattcagattctgttgcaaaatcccgagactgaaaccgttatgactccggattcaccgtctttccgaggatacgtggcaaacggagaaggtgattctgagaccggtgacatgagtaaggtgagacaagacgcttttattctgttcaagaacttgtgtaaattgtccatgaggttttcgtccaaggagaacaatgatgatcagatcatggtgagaggtaagactctgtctttggagttgcttaaagtcattattgacaatggtggttctgtttggcggactaatgaaagcttcatcaatgccgttaagcaatacttatgcttatcactactaaagaacagtgcggtatcaatcatgtcaatatttcaattgcaatgtgctatcttcatgagcttgttatcaaagcttagatcagtcttgaaagcagaaatcggcattttctttccgatgattgttcttcgcgtgcttgagaatgttcttcaacctagttacttgcagaagatgactgttctcaacttgctagacaaaatgtcgcaagatccgcagttgatggtcgatatctttgtgaactatgactgcgatgtggagtcttcaaacatacttgaaaggtattattagattagtctaagaaactgtcacaaaattgttgcatgactcgttaagagtaaatgtaatgt

SEQ ID NO: 25194 - DNA, 579 bp, Arabidopsis thaliana columbia
tcgcctattttcatgtttacgttctacataaaatatctctggattttttttgttttcaagtaattttcaaatgccgttctggaaaactcttttggtgtttactaatgtattaattcccgttgttacatggcaggtgcattttaaatcaattatttgagtctgagaaatcagcatttatgtgctacagcttgtcatgctccagtgtgtattcagtgtttattataaaatataagactttcgagagctgagggaatgtcagcacctgggaagtttgattattcttctggtgggctagataggcctctatacagatctaactttgccgcacagatggaaagatcgagtagctttcgcgagtccatggaacatcctgtcccatctcatccaatcatgttgaggaccacttcaccaatagcacaaactgatgtaacaaatttctttcagtgtttgcgttttgatcctaaggtggttgccgcggatcacaagtctattcgtcaaggtgactttaagcggcatgtgagtattgctcttggaatactaggcgatgagctcctagtggatctttaaaagggaagttta

SEQ ID NO: 25195 - DNA, 518 bp, Arabidopsis thaliana columbia
aatgtatctttcacgtagctaaatttaaattttctatgtttgtatgtaattcccatgtgatacactgttttcaagctccaattggattgcttacttacttctgttctgatggaactaaattggctttatgatgccaagagttaattggaattgaaattttgcaggttggaattcttttgaaagcattgggttattctcaaaaagcgatcatatacttggctggttctgaaatatttggcggccaacgggttttgatccctctacgtgccatgttccctaatttagtggatcggacttctttatgcagcacggaggaattatcagaattggttggtcctgagacacctcttccagagaatacatataaaatgcctcctcgaaaaagcgataagcagctcaaggaagagtggaacaaggcaggtcctcgacctcgacctctacctcctcctccagacagacctatctaccagcacgaaaaagaaggatggtatggttggcttacagagaatgacacagaa

SEQ ID NO: 25196 - DNA, 518 bp, Arabidopsis thaliana columbia
cgtatggctcccgcgatctcctcagcttttactatctctccgtacgccgaaacgtagtctaaacgcagctccacggctaaccctaactccttcaccatcgagaatgcgtttaactgttgctcagcgtacattggccacgttgcgatctgaacaccgaaccataagctctccagtacagagttccaaccgcagtgagacacgaatcctccgagcgctttatgggccagaacttctacttgcggggcccattcacacatcaatcccttactgtccgtccgattcacgccctttttcggcaacagatcgtacgggctcgctttctccgtcggatttgtacgtattgaccaaagaaacctgtggccggtgagttccaaggcttcagctatctcttcaatctgcagcttgccaatgattccgaggcttccgaagcagatatacacaattgacgactccggctggtcctcgagccatctcatgatccgatcccggtccgatgcgtccagatttggagacggacg

SEQ ID NO: 25197 - DNA, 577 bp, Arabidopsis thaliana columbia
  unsure (1)..(577): unsure at all n locations
gaagttgaaaggctttgtagaaaaggacattcccactgcttgcttaaagataataatcgaacaacgggcagaatttcgacccggagcaggtattccagagctgtacgatgcatccctatcggttgaatccggtcttcccttcttcagaaaaattatatggaaaatggcggaagactttgttcgtctggatcagcatgagtttgttcattacggaattgcttttcacgttggtttgttgtagacctcttatcatcccaagaacacaacctagagacagatcgccttcaaacccaactggagtctggaggtagattatgaatcaacagttactgtacatcatgtttttaacacggcaatggtattttcacttcctgttaactttagttccaaaagttctttgattaaattgtaaattcatgcttactaataaaagtttaatcttatatatggtttggatttaaaatgtcctttaaaacgagtgtgatgagtgatataatgggtaatttcagctctnttcacaagcagtgtgtataatgattagtagtactaatttagcaatatacatgtacgtcaagag

SEQ ID NO: 25198 - DNA, 487 bp, Arabidopsis thaliana columbia
aaaagtgcactgtcagtcctctaacaaaacacaatcaatgacataatcatgattcagccgcaaaattacctccatgctgataatccactcaggagaatttgcaccatagataccacattttgcttcctaatatcccacatatcaggaaacacaagattaagcaagggaataatcacattgcgacaaaaaaaggaaataatgagactgaatatagatatctgaaaggaaaaagatggatcttacgtccttaactccaacacttctgagagaatttccaagtttcatgacaatgtcgtagacttcttggtatgtttgccagacatacttacccggctaagaacaatcaaaataacaagtgaattttataataacatgaaacgaaaatcacgaaatcaaaatcaataacaaacagtaacaacacctttccatctacaatctcgcggcgtcccagcattggattgtttggatacttctcaacagacatgct

SEQ ID NO: 25199 - DNA, 507 bp, Arabidopsis thaliana
ccctggaataccgttttctaaatccagcaacaacattttcccagtagataacgcagtgccgcttgtgaacgcaaacagcatcaacaacttaatcaatccaaacacagctccactcctaacaggacttagtggctctcaagccaacaccgtaatccaaaacagtaacggtaactctcaaggatcccttagctccaacaaccttccctttgtaaccacgggtcagctccctcccatagctgccctccaacagcttatgtttggctctatcaccgtggttgacgatgagctcaccgagggccatgagttgggctctgcgatcattgggagagcccaagggttttatctcgctagctctttggatggaacgtaccagaccctttcgttgacagtgttactccacgaagatcatgatcatcatgacacccttgatgatgccatcagcttctttggggttcaccgaaccgcttctcatgcgtcgcatatcgctgttgtgggtggactgggaga

SEQ ID NO: 25200 - DNA, 399 bp, Arabidopsis thaliana columbia
atagataatccccgtatctagaaagattagcggatcggatgaacgttcagaagtttgtagcggagaatccattcggtcaaactgccataactgagacacacgagtcatgggagttttactctaaggccgtcgaagcacataagtaattcctcaacaggagtttttactgttatgtaaatgctgtcgactctctagagctcacaacaagcaagtgttgatgcacacacagatgaagttcctgttggaagtgtaattcagctcactttacatcctaattgagattgtatctcgagattcgaagagaccagcgtcgatacatgtatagattcagatacgtaatttggcgaagattgtttactcgttcgaagatacattatcaattcagagtctaatcgtcac

SEQ ID NO: 25201 - DNA, 506 bp, Arabidopsis thaliana
gatgatgttttctcctatgataacaatttttacatcaaattataactttttgaaattgaagacctcgtttttttccatttgaagatacttttccattgtctgctattgaattcggtgtagctaggaactttccgttgttaccggacttttgagttggggacacgttggtacatgttattagctcataacattgtagtcaaagtataattcattataatgtaatataattaatttaaaattagtaaaaggttattagaaagtcaacattatttctctgttgcctcgtattggatgcaaatctggattctttcattgagtttattgtatgtcttaattagcagaatagattaatccttcaagttatataggctaaatttgagttttatggctttgtttgttttttggacagtcagaagttaacttcttgggaatgctttcgcaccgaaatctggtgaagttattgggatactgtcgtgaagacaaagagcttctccttgtctacgagt

SEQ ID NO: 25202 - DNA, 587 bp, Arabidopsis thaliana
  unsure (1)..(587): unsure at all n locations
nnnnnnnnnnnnnnnnnnnnnnctaaagagcttaaactcggttaatcacattttgttcgtcaataaacatgcagcgatttcttccggtttgcttaccctcatacattgcccggtccgctcttccaatgaccacatccagaggctcttcaggaaatgcgcgactcacacctgctgtcacggtaatgttgatatgcccttcagaatgtgtgatggcatggttatcgactaactggcaaattctgacacctgcacgacatgcttcttcatcattagccgctttgacaataatgataaattcttcgcccccgtagcgataaaccgtttcgtaatcacgcgtccaactggctaagtaagttgccagggtgcgtaatactacatcgccgattaaatgcccgtaggtatcattaaccaatttaaatcggtcaatatccaacaacattaaataaagattcagaggctcagcgttgcgtaactgatgatcaaaggattcatcaagaacccgacgacccggcaatcccgtcaaaacatccatattgctacggatcgtcagcaaataaattttgtaatcggttaatccgcagtaaaag

SEQ ID NO: 25203 - DNA, 365 bp, Arabidopsis thaliana columbia
agtcaaagtggtgtttggatgagcttgtgacgatgaatgaacagatgaaggaaaagaaactcgtggtgattccaatcttctataacgtaagatcggacgatgtaaaaagagcagccaatcccgatggagaaggcaatcttgatggagagttttcccttccttttaagcaactgaagcaaaaccatgcaggggagcctgagagggtcgagggttgggagcgtgccctgagatctgtgacaaaaagaatagggttttccggtcaaactcaaagtacaagtaatacttcaaaatacatgtattcttgattatgtttggatctatgcccgactgatctttgattagtagatctctttggtaaggagttt

SEQ ID NO: 25204 - DNA, 439 bp, Arabidopsis thaliana columbia
atctggctcagaggtacactcaatacattattaaggctacatattcggtatttaatatttaatcctatatacaattaaaatcttatgtgatcctcatgggcttcacaagtcaatgaagattgggctgggccgaagtagactctgacttaacaaaacgaacaagagacaactttgcgatatcggaaacggcagcatttcgaacggcggcggaatcactgatgagaaactcatacgccgcttcgaaagcttctcgccagaaccgaggaaccttaacgccaccggagcgtccgtacacatcccacatctgtctcaccactttctctctctcttcaatttcctgtcagaatttttaaaatttctcaaaattttgaaagaccaattttggaagaaaacaaaaatcaataataatttatgaataaattcgtaccagaacgtcgag

SEQ ID NO: 25205 - DNA, 475 bp, Arabidopsis thaliana columbia
tcaattatcttccgcactccattttgcctaaaagtttagtacgatcggaaattatgcagttaatatttctccacctaaaacatttttccttcatactgactattattgtatgcttcatttcttctaggagtggtgtggatttcttaggccctcttcttcctgctgttgcagaaatatgttcagattttgatcctactatggatgtggaaccttcacttttgaagttgtttcgcaatctctggttttatatagccctctttggcttagcacctcctattgtgaaaactccgacaccaccactgaagtcaacctccaattcagtgaacagtgtgggaagtatgagtgcaactgctttgcaagctgtgggcggtccttacatgtgggacaatcagtgggctctagctgttcagcgaattgctcaaggcactcctccccttgtaagtcaatctggtcgtcttcagagtttaatttgtgg

SEQ ID NO: 25206 - DNA, 569 bp, Arabidopsis thaliana columbia
gtgtggacattgaggtgttaacaaattaccattttgctctttgacccttttggttgcagaggactgtgatggaggctgtcagtgttttactcagcggaggaatacgtgttggggtgttaatgcatgggaagaaggttagagatgaaaggaaaactctgtcccagactgggatctcatgtgatgaaaatctagacaaccttgggttcaccttggagcctagtcccagcaaagttcccctacctttgtgttctgaagatcctgctgtgccaaccgaccctacaagtttgtctgaacggtactaagaaattcgctatcatatccttgtgctgctttagttgaatatcactggtgttcattcttcttgaagattcctaagcaaaagcggttctgaattatcatcccaggtctgcggcgtctcctatgctagattctggaattccacatgcagatgacgtgattgattcaagaaatattgtggacagtaactcgaattagtccatatcagggtgacatatctgttgatgaacttcatcagattcaaaagagcttgtccacttccagagttggaa

SEQ ID NO: 25207 - DNA, 333 bp, Arabidopsis thaliana
actcattttcttcttcttcagaagcattgaacaacgacaaagtttctttcctcaacgcccgaaccgctcttccaatcgattctgcatctcgtctcttggtgaatgactttgacatcctcattataccaccactaagaatctcagcctcagtcttaatcccatagtaatccatcaaattacctaacttgaaatcataattcgccttctggtagaaagcttcatcaacatactcctcaaatccgtcaacttccatgtctttatcataagactttgaggccacatcaagcgtgaatgatttgatcgagatctacggtggagctcgctcttttacct

SEQ ID NO: 25208 - DNA, 562 bp, Arabidopsis thaliana columbia
taatttatttcgttagtaccggttctcgaaccaaataaaccaaaccggattaaactcagaaccgataaattatggatccgattacattcaagcagaaggaatcatgccggcttttcttgcataagcgaagattccaccggcgtcgatcaccggaccggcatcaccgagcggtttcagtttgtattctttcctcgtcgtatgattgatcagcaaactactaccgtcttccttgtgttcgattgtcaccacatcccctgttttgcactcgtcgcaaatcctaacctccgattccaacgggaaaatctcacctgtagctacacagttcctgaaaaagatcctagcgtacgattccgccaccacagctttagctcccgccgcgccgagacaaactggagcgtgttcgcgggaagatcgcaaccgaaattatcgccgccgatgatgactgagtactttgatttcatctctcctggaacaacgaaacgttcgttgtagaattttggtaagctgttaagcgcgaaagagccgagtttctcgcgatcttctggaatcgaagggatgagag

SEQ ID NO: 25209 - DNA, 757 bp, Arabidopsis thaliana
ctgctttaatctacaaatccatagacaacattaaagtaatatctcagtggcctgacatgtttaggaacatggataacttactcgagtcaagcattcaaacaaatcattatttcgaaaacgatagaaatgacatacctagaacttcgtcagctgataacctttgggaaggatccacacaaagcatcccgcgaatcaaatccttggcgtatgaagttatattgtcccatggctctgcagaaaatctcaaatcggcagccctgacagcatcaaaaatctttgacttagtctttccccaaaagggcggcgctccactgagaagaatatacaaaataacccctgcactccatacatcagcagcttggttatatccccctgctaacacttccggggctatataaaacggactaccaactgttccgctcagcttttcgcctgctcacacgaaaacccatttcttagaatacacaatctccatttttggatttgataacttataaaatgtcagtgttatttatcttaccaggctttatataggttgccagtccaaaatcagccaatttgataggagacgaagaagacattgtggccataagaatgttttccggtttcaaatctctgtgaacaataccgctatcatgacaaaacttgaccacttgcatcaagtgcttgaagagcaccctagcacgaacctcagaataccttccatatttctcgagcttgtgaaaaagctcaccgcctgcgcatagttccatcacaa

SEQ ID NO: 25210 - DNA, 534 bp, Arabidopsis thaliana columbia
ccgacacaatttcctgtttttacaaaatccactgtactggatctctttgatcgtcggttgaatgttctcgatcaaggtgctgaggttgtcggctgtgtttttgtaccggcctgctctcgcagatatcagaaagagctgcttcaaaagctccgtcgctatctcaccggcgaaataatcagtgacggccatttagtaaaggatatgttaaagagaaaaagtgtggagatagagagctgagagacaaggggatatgaactaattaatctgtatagaggaggaattcaccggtggaagtttcctagcaactcgaagtgacaagtgacatctccatataatatttgttcaagagttcaatgaagaagaaacaaggaaattaatgagaaggtagacgtatattttattttggcatattgtcttgtttacaaatttttaattaaggtttcttagagtcaaattactgacatatacactgacgtaatatgatcatattaaatcgtttgattggtgtatgtacatatgtactgctgagttgtg

SEQ ID NO: 25211 - DNA, 517 bp, Arabidopsis thaliana columbia
  unsure (1)..(517): unsure at all n locations
tggcctgtctcagatttacatccaggacttgagattgcagcaattgttattcaagactcttcttcaaacagcaaactctcgagtcgtgagatgaaagtcatagttccaacaggaaaccacggtttgcctgataccgaaaactcgtgtcctacgccgatactgcaaagatggagatcaggtggaggttgtgactgtagcggatgggacatgggatgtcacctttttgtccttgaatctccagaactcatcaacaatcatcatggtttggaacttttcatagaggtaagaatttgttcattgtgataccaaaatgtgttttaagttgtctcccttaatcttgaaatataaaaattctatgttgcagagtgggaaagagatcacaccagcaatgacaatgacatgtatcagagaaggacattatgaggtaaaatttcacgcgacgtctcagcattacaagcattctcaatctgtgtagccgagctgcaaagaactgaagtctcaagaggaganagaacat

SEQ ID NO: 25212 - DNA, 518 bp, Arabidopsis thaliana columbia
cctagcaagtgaaataacaataccatcaaataacacaaacaattggtgtctactttgttaggcctttgaagctgggattgtctggattaactgctcgcagccttgctttacccaagccccatggggtcggtgtcaaacgcagtgtgtttggacgagaacttggagaatggtacatttctttttctatctcgaatcttgttttcaaaagactatatcttgatggcttgtactgaacaaatcttggttatggctggtttcttgcgtgcttcaggggacttgataactacttgagtgtgaagcaagtgactctctacacttcaaacgatccctggggatggtacaaatctcccaactaagtaatgaatacattgtcatggaaatggaaaccaaaccaaatgctgtctgttcaaatctttgtgcttttattatcagtctgtctagttcggtcctgaaactcttttgtacaacctgttgaatttataatgaataacagatgctttgctgataattattggttg

SEQ ID NO: 25213 - DNA, 549 bp, Arabidopsis thaliana columbia
gtacgaaataatctccgaagaaaaacatactaaatcaagaaacagctaaagcaaaagttctttacctgtaaggactgataattgcagcagagacactgactttcctagtaagaggcctcttgcttctctccccaaactcaggtggcgtttcatacccgtttccaccaccacccgacccgattccatacccatctttaggccaaacagcgttcccatacccataagtacctttagtctcaaacaaccaccgagtatgatcaaaatctccagcttgattctgcgctttaaacgacttcacaaccgaaagcctcttgtcaagctttgattcacccatctgaggaagtggtttcgcctcatcttcttcgtcttcttcctcagtctctggatcatcgttgatatcctataaggctctttgcaaccaggacaattgcctccaccacttgtgatacaatcaaagtaacaatctctacagattcggaaaccacactcacatctccccgtgaacaactttctcatcacaagccttttaaccagcagatctgacctgac

SEQ ID NO: 25214 - DNA, 611 bp, Arabidopsis thaliana
gtaacattattactctttgatcatattcactaatcatttcgattgtcataacatatatcaccaaaactcatttgcgtttttaagtttttaatggaacagaggcacaccaaactcatttgtgtttcgaagtttttgctgttcatgttggaggtagactcaaagttcttcaggacttagctcactagctgactctgcatccccaaaaggtcgctgtatggtttcagaatagacgagccaggtccaacaccaagcattacgttggatgccggttacgagtctcttgagcctcctccctatggacagaaccgcgtccttcatctttctttacaacagctcacatggtgtcactgaaaactggttttctgcagctgcaggagaaccaagtattgatatggagactataaaagcagagccatagtgtctgattaaacgaagcagagccatagtatctgattaaactacaaatctgtatgatcccttggtagttgaaatagtaaaagcgtgaaggaagtgatcaaagacatttatcaaaatgtgtttgtaagaatggttgagaaaaggaaatatatctttgagagcatggttttcggtgatgagactattggaaatag

SEQ ID NO: 25215 - DNA, 529 bp, Arabidopsis thaliana
ggcaatagatgtgggatctctttcgaagggagatgataagcgagaaggtcgatatatgggtatgtgatgacactttttcaatctctccagattgctaatctatttggttgaaacttgaaagtaaaggtttgtttttaaaaaaaaataggctcttggatgtctcttgtttcggatatgctatttcaagaatgcatttgatggagaatcacagctgcaaatcttaaacgggaattatcgtattccagaatcgcctaaatacagtgtatttattacggatctcatcaaagaaatgctccaagcttcacccgatgaacgaccagatattacacaggttaaaagtcaatttttactcattgtttcttctcagttgaggaaatgtaaaatgtctctaacaacatgtccatctacagatttggtttcgtgtcaatgagcagcttcctgctaatttacagaaatcattaccggatcgaccacctgaaatgcaatctactggagtccatgatggtatagtgaataacactattttgga

SEQ ID NO: 25216 - DNA, 535 bp, Arabidopsis thaliana columbia
tgcttcttcatgagcccctcaataaatgatagtacagtctaaggcacccgaagatccaagctttttgctcctttcttttccagagctctcatgatcatcaaaaaactatgaaacagtagagtaattcagctgtcgtcgtctactgaaccaacgtaagttagatcagtccgtctgaccctgactgcacctttcagccaacaggtggctcgaaggttggccatgtcgctgctatttgaagcgttgctgcttgatagacctgaacttgtcccatcttcgaggagcgtccacgggtcaaccacatccgtgttgtctgcttcttgttgttgatgtggtgccaacattgtcggcttcagcttcccttgtgctgctgcagttccacttttcgatatggcaggggagtttctttgattggttccagcagcagcagtagatccagagggctgaacaagtgtgagtgcggttggcggaacagaatgaggctggcatgagagagaacagcgtagagaaggaaggaggattggcatcgctgcttgga

SEQ ID NO: 25217 - DNA, 628 bp, Arabidopsis thaliana
taaagagaaacgaaaacaaactctcacttgcaggtggctcaaataatacatttcatggttttgtttatgtttctcagataatatcgttacaggttgtatcaactgaattctcgggttttccttttgaagacttcttaatcgaaccttctcctcctgctgatgatccttttagtttcctaggacgcgatgtagccttccgtggaggagctgaaccatcaggtatttgattaggaacttctgtgtctggagccgggataccaccacgccttctgcgaactgatggttcttgatcattcgatgagtctgttgacccgtgtgcgcttcggttatgtcttgaatgctttgatggttcatctgatgatgcagcatttccgctactttttctaggcggagacccgttatgatttggagaagctgctcctccgggtttccgccttgttttctgtttcggtttctcgtttgtgttcgaaggcagtaactcttttagcccggctccacgttggttcgtccctattgagatacacatcaatcctcgaaccaatccagatttgttcccaaagcttacactttaagggaaaaggaaaacacactttgcaaaaatactaccttgcgggttgtatttgtggat

SEQ ID NO: 25218 - DNA, 498 bp, Arabidopsis thaliana
taacagatcataattaagatggcagcagctaatggtgtacgacgtgtgtgggttggtaaaaacactctgttatcaactcctgctgtatcagctgtgattcgtgaaagatcaggggctgatgtgagatttctttctctatgctcatggttgtagtgacattttgtttttttgttttttttggttatttgctatgtttgtgcatgacgcaaaatgtaatgatggttttgagttacttaaccccagtctccgattacagggatcgaaagcaactggagcatttatcttaacagcaagccacaatcctggtggccctactgaggtccgttctgttcttgttccatctctactgtgctatcctttcatttgaactattcgttttgtatctctttatatgtactttttttaataataagaacactagatggatgataagactaagaggtgattccataccccttgtacaggattttggaatcaaatacaatatggaaaatggag

SEQ ID NO: 25219 - DNA, 580 bp, Arabidopsis thaliana
gggaacgagcaaaggtcatcaaatgcgtggctttcgcggcttcatcctgcccgggttccgttgcagtacaagaaaagcaaacgtttgcaagagatcaatgagaggataacgaaaataaagagtcaagtagagccttatttcgaattcataacgccgagtaatgttggaagagataatggaactgatcggtggagctctccggtgtatgatcatactcaggtggttggtttggaaggagataaaagaaaaatcaaggagtggctctttcgatcaaacgacagccagcttttgataatggcctttgttgggatgggagggctaggtaaaactacaatcgctcaagaagtgttcaatgacaaagagatcgaacatcgtttcgaaagaaggatatgggtgtctgtgtcccagacttttactgaagaacagatcatgagaagcatattgaggaacttgggggacgcgagtgttggagatgatattggaacattgctgagaaaaatccagcagtatcttttggggaaaaggtacttgatagttatggacgatgtatgggacaagaatttgagctggtgggacaaga

SEQ ID NO: 25220 - DNA, 513 bp, Arabidopsis thaliana
cagagaaatacccattgattaaaaaaaatcagtgaaagaagctcacactcgaaatcgtaaaatcaagtaaatgcactcaccagatggataacatcgatgctgacttcgtgagattccactccttcaaaggtaaccaagaggacatttccagggacatctccaggactctgattgttaacaatctcatggcgattagagtactgaatatagacagttttcccacgaatctgtgcgggctctgaagatgaagcataatacgaaaccattgatatagcttgattcaagtcagcctgtaaaatcaaatgaatggttcatcaatagaaatcgccaaaacgaaagcttgaagagtcaaccatcatagctataaaacttgagaaacctattcgatactacaattcgagaaaagctcgattctagggtttgatgtttggcgctgcaattccaatttctctttatcctttcctaaaccaaatcccgggagctagaaattgggggactgtaagaacaaaaaca

SEQ ID NO: 25221 - DNA, 612 bp, Arabidopsis thaliana
gatccccgcaatcacggtaaacatttatctttcttaatatctcatcaagttcttgatcttctctgtgaacaacgaatattcgatagcacaggagttgatcggtatggggggaagaacatttttggtgcccggagagttcccagtcggatgctcagtattgtatttgacatcacatcaaacatcaaacatggaagaatacgatcctttaacaggatgtttgaaatggctgaacaagtttggtgaaaaccatggtgagcagcttagagcagaactcaacagactccagaagttgtaccctcatgttaacatcatatacgctgactactacaacgcgctgtttcacctttatcaagaaccagccaaattcggttagacttcttgatcgttttactgaacctaaacaaacaagtacattgatcagtttgctaaatattgagttaattatgcaatcaggattcatgaacagacctttgtccgcttgttgcgcgcaggaggaccgtacaactataccgtagtaggaaatgtgggactgatatagttgaaagttgtgatgatcttcaaagtatgtggcttgggaaggtgtcatatgactgaggctgcgtacagattgat

SEQ ID NO: 25222 - DNA, 568 bp, Arabidopsis thaliana
ccaacgaagcacgcccacctataccgcaacaagcagggaagggtctttccatgaaccctgacagtataattgataggaaaaattgtcaatactaaatcagtgacgacttagggtgtgtagattcagtggaggaatcaagaaggctaaccgaatttggctggttctttaaaaatgcgcaagagagagttgtagtagtcagcgtatatgatgttgacatgagggtagagcttcctaagtctgttgagttccaccttaagtttctcgctatggtattcgccaaacttgttcaaacatttcaaacatcctgttgaaggatcgtattcgtccttgtttgatgttttgtataatgtcaaatagactactgagcatccgatagggaactctccgggcactagaaaggttttacccccataccaatcaactcctggattcaacattaagtcccaatggaacaaactcattataaactctgacaaacaaatcagcagatagctagaaatctgttttcactcgttcttaagactaacaaaacgagaattcaagaaaagaatgtataccgttattgtag

SEQ ID NO: 25223 - DNA, 543 bp, Arabidopsis thaliana
atttgacaaacttatcaatccttgaacctacacaaccgggaaaatgaataacttgttcacactgattacacttggcttcagtggccaaaagatgatgcttacagtatcaagaacctatatttactttcacaaacctgaacacggctccaacgcaagggaacagcaacctttgccatattccggatatacaaattagtgaaaaggcggtggttagggaactccaggagaagagtgtctgtatatgttgtcttattgtggttgtcaatggttaagctctctgaaataacatcatacagagtcccagcagctccagcattttctggacaaccaaaactacgacctcctacaaagagtaaattcgaattgaactgtcacaaccacaaatacttaaacaaaaaagggaactatcaagatgagttgttatcatcacaatatctaatcaattgaaagcacaaatttagggaatgattgaaagaacaaactggagctaaccattgaaaaagatttttggatcagaatggcggctgtatatatcgacggata

SEQ ID NO: 25224 - DNA, 518 bp, Arabidopsis thaliana
gatgctcgcaaacggagcaccgtcaacgataaactttgcgccgtcaccaccagtctcagcgacgaactcattcatgtcttctcatagatgtgacaccgatagtactcacatgtcatcaggattcgagttcactaacccatctcagctctctggttcgagaggtaaacctcctttatcatcagcttcgttgaagagaagatgtaattcatctccctcaagccgttgccattgctccaagaaaaggttttgattcaacttctattattaaaaattaatcttattttagatctaaatcttgagatttgattaataaaacgttaattataatttgtgtaaaaaaatcaggaaatcaagagtaaaaagagtgattagagttccagcagtaagtagcaaaatggctgatataccatcagatgagttttcatggagaaaatatggtcaaaaaccaatcaaaggctctcctcatcctcggtaattattttttacattttttaccatcgatatatatactctacaca

SEQ ID NO: 25225 - DNA, 462 bp, Arabidopsis thaliana
aagatgtagcatccttcgcaataaaactcttcttcataccaataagcacaatcacggacacatatcctctcagaataagcgaactcccaaatcggatcaaaggtatcttcattaggaggttcatatgagaagagtgtttcaatcaagccttcacattccacatcaacatctggcgagtaattattgaaccacagacgatctcccaactcatcgaatatcatgtcgaaggtagctccagctaaatcacctctaccagcacacatttggaacatcgcatatgccacatttgctgactcatgagtaggcacaagttgatttaacaacagcaagagaacccgagatatctctctctcgagttatctagacgtaaagcttcataataaacagcttgatgattctcaacgtccaaacaatgtgtaaagaaggttctagcaaccccacaatggaaatatcttttggggc

SEQ ID NO: 25226 - DNA, 571 bp, Arabidopsis thaliana
gattcctgcaaaagaattatcacattctattccatgttctttgtgtttttttttcttcagctgttttaaattatatttctacattttttttctaatcagagtgaaaaagttgcacaactgatgctagagtcaagcacaagccatgcaattgtatgtgataagttaagaaaggtttatcctggtagggatgggaacccgcctaaaaaggcagttcgagtgttatccctcgctgtgccttcaggagaatgctttggcatgttagggcccaatggtgctggcaagacctcttttatcaatatggtcagtacacaaatctacccctaaaaaataaatagttgtgcttagcttatgactgaaaaactccccttggataataaaagttgcatcgttttttctggttagatgactgggcttgtgaaacaacttctggagcagcttttgttcaaggtttggatatatgcaaggatatggacagagtatacactagcatgggtgtatgccgcaacacgagtaatcaagttcttaaaacattttatttttgtcaacaatacaaacgattatttagttgttt

SEQ ID NO: 25227 - DNA, 875 bp, Arabidopsis thaliana
ttcacagcggcggcgacggcgtctccaacgacgccaggagcagcttgccatgtcccgagaccaaccgatgggatctttgctccggtgttgagttggaagaatccgatttcgtccgccattgtcagagctttagaagtgagacttagatctcgagaaccttttacgaaagacggaggaggtctgtgtcgacggagcgggaaaatcgtcggagttttataacaacagacggttagtattcaaacacgtggatataactaaacgcaaatacttgtgttttcatatttcatgtgatgagagtaattagtaattagtaattacgattagttaattcgatggatgtaccaaaatttggacaaactggtcttgtaatattacgaattaattcagaataatttgccaaagagagaatgatttatgaaactaaaaagggctttttcaacaatggaaacttgagataattttcgaataagaacagaggaaacgtgtctgattcgaagatacgagaagctataatctgtcaaaagagcaagaacagttgaaaacaaaatcacatcgactagtacaaaggattcttttaggcgactgggatcatcgcagggtaatctacggctgtgagtggtgcatctgctacgagagcagccggggcagcaacctgagcaggtgcatagatggcctcttcttctttaggagaatgaatgatcacaacatcaggcaatggtgtctttggtcctgatatgcccttagggtcccaatcaagcataaccttcaccttgattcccaacacaccctacatattcggtgtaacaacactgtaattagacgttgatgaattttcacttgactctaataagaacaactcagacgagactcacttg

SEQ ID NO: 25228 - DNA, 527 bp, Arabidopsis thaliana columbia
  unsure (1)..(527): unsure at all n locations
ccataccttaaggatatatactatggttcctaaaatagtttgtgagaaaggtcactgcatgcattgccctgttccaagcaataatcccaaccgattcatccgtagtaggagacaacaaatttctagacggatggccgaactaacttgtagtcaaaagctggaatcaatcgtcgggttacaaaaaaaggtaagagctgatgctgtctttataaaagagtaaaacgtacgtttataaatattttaaaatctgttttcatacatgtaggggccgtcaacaaacttccacatgcctgcatgcattcttgcaaaaactgttagctatatagctgaaggtgagattggtgagttaaagaattggattttatcctggagggagggaatggtagcagtattttcacctgactgtgtgaaatcggtaaggttggacaaaactagagattttgtatattggttcagccttgatagtgcnacaatatatttttttggaaatgtgtaaaggcaaaaaatccttatgcattgtatgtttg

SEQ ID NO: 25229 - DNA, 545 bp, Arabidopsis thaliana columbia
gcatttattactttgtttctcgaacctacagttgtgtctgcctcttctttctatctaacttgtctatgtggtgtctggttttgatttgcagactattcattactctgtttcgccataagaaagagaataaagaaacgttatggagaggccaagagcccctccatctcctttgaatgatgcggagtcattaagtgaacgtagatctcttgagattttcaacccttcgagtggaaaagagacacatggatcaacttcttcttcttcaaagcctcctcttgatggcaacaacaaaggtagtagtagtaagtggatggagtttcaagattccgctaagattacagaaagaaccgctgaatggggattgtcagctgttaagccggattcgggagacgatggcattagtttcaagctgtccagtgaagtggaacgaagcaagaacatgtctaggaggtcatcgaagaatctacatcttctgaatcaggggccttccctagagtatcccaggagctcaaaactgctctatccacgttgcagcagacttttgt

SEQ ID NO: 25230 - DNA, 533 bp, Arabidopsis thaliana
aatgacgtatacttccttgtgttttaggattgaagatcttaccgtctaaaattgttttcggaaaatcgctatacacgttttatattggtcaaaacgatttcacatccaatttagccagtattggagttgagagtgaaactatatcttccacaagtcataggccaaattgctggaacgattaaggtacaaacctcaccacaaggtttttggtttatagaatcaagtcttttataaaattaatactatctcgaaacatttgtatggatattatcttaacccacttataattcgtattctccatttggaaatccgatttttgtatggttcatatcctcctcttaagttatttgctcttgaatgtaggagatatatggaataggtggtcggacatttttggtattgaatttagcactggttggatgttacccggcgattttaaccggttacactcataccgatgctgatttagacaagtatggatgtctcattcctgtaaacaaagcagtcaaatattacaacacgttattgaataa

SEQ ID NO: 25231 - DNA, 570 bp, Arabidopsis thaliana
tacacaaacataatctctatatgactatatctatagccaccatatagggtctttgtcatcttccctcattcatctgggctccaagcattggcctagcgtcgttgtttctcggtgatatctcggatctaggcgccacaaagctcgtgaaggattcagaagcctgtgtgtttcttaatggaaagccgctgattgaggaggctgtggtgtcatcaaatctccagtcggttaggtagcctggctttgaagtgacatcactgacctcaacatctcctgaaagcatggccaccactcgtgacattggtggtctcaaggcatgagatgtttgtgtacacagcagggctatgccaatcatgcgtttcccttcttccatgttgaattcagtcagctgatgatcaataagttcaacttcacggcctttctcgtgtagattccatgcctgtgaacaagttacacaatcaatatcagcttttgctaaagggcataacccaaattagcctctcatggtcacatacattgaagttgtgttcatatcaaaagtgttgaagtatggacgtaccattaagaagatac

SEQ ID NO: 25232 - DNA, 716 bp, Arabidopsis thaliana
gttgaattcgatacgttaatggatgtgcaattcaaagacgttaacgggaaccacgtgggattggatctaaacgccgtcgtttcagctgcggtagcgatttgggaaacgtcgacatcgatctcaagagcggaaacccgtgaattcatggatcacttatgacgggtcgggtcgggttttaacagtttacgtctcttactcaaacttgaaacctaaatcgccgattttgtcggttcctctcgatcttgatcgttacgtaagcgattcaatgtttgttggattctctggatcaacacaaggaagcactgagattcacagtgtcgattggtggagctttagttcatctttcgaagaatcatcggaatcaccaccgccgatgcctaattctcctcctccgtcgtcaccgtcttcatcaatcacaccatccctatccaccgtccggagaaaaaccgccgatccatcgtcctcttgccgtaacaaactctgtaaaaaatcaccagccgccgtcgccggagtagtaaccgccggagcatttttcttagcattattcgccggagtgataatctgggtttactctaaaaagatcaaatacactcgaaagtctgaatctttagcatcggaaataatgaaatcgccgagagagttcacttacaaggagctgaaattagccaccgactgtttcagctcatcgagagtcatcggaaacggagcattcggca

SEQ ID NO: 25233 - DNA, 582 bp, Arabidopsis thaliana
cccgtattctaaagcagcgcggcgaacagggcgttagatgaggtatccgacccggtcaggaatacccccagccagccgaggaacggcgagaagaaggtgaatgcatgaccggtgtgcgccagtgccagcgccagtgttgatgacagtccggaatagttcgaaataaaggcgaatgcagcaccataccgatggagtagatgggcagagcagttctttcagcgtgctgccgaaggtgctgatagcgtcagacggtttcatcttcagccagacaatcgagagcagtgcagcaaacagaatggcggtgccggtggcagagaaccagtcaaacttaaacacggcggcataggctgtacctcgctgaccactggcggcatacgggcaaccagtttatcgaggtacggcaccggaatattgatcacccactcatacagcgcgccacccgatgcgaacagggctttaaacggcgggatactccacagtgttacggtagctgtcaggaacaggaacggtgtccaggcacgtaacacctgacccgcagtgtaaccggtgtgggccagcgtcatatcaacctgtgacgcccca

SEQ ID NO: 25234 - DNA, 491 bp, Arabidopsis thaliana
ataagcatttttaacgatttcaatattgtaagttaaaattatatattttgacttgctttattcaaaattaatgtattacagtttacatacatactgttgcttatatgtttcttaatagttaataccacatttattcttcaaaatgtaaaaagtcccgattttgattgtagttttaatcacggcttggcttaacgacagtataaccaccatccaccgccaaattctgaccacttatataagccgaatcatcagaagccaagaacagagccacttgtgcaacgtggctagctttaagcaccatccccttgagaattcccttggcgtcaaaataatcctccaactgctttcccgttacctcgtcgtggctagtcattggcgttgcaccgcgtacggtgcgactccattgactctaatcccatacttccccaaatcaccacaggccgatctaatcaggccgacaagcccgtgtttagacgccgtgtaaccatgat

SEQ ID NO: 25235 - DNA, 1224 bp, Arabidopsis thaliana
aataaaatcgtgtgttgttgttgatgttgatatagggtggaatcgacgaaggtgaagatccaagagttgcagtcatgagagagcttaaagaagagactggagttcactctgctgagattctcgctgaggtgtctttagcttcttcttcttcttcgtcttcttaaacattcaacaatttaagaattcgtctaaagaactcttttttgttgttgttgttactgtaggcacctcactggataacctatgacttccctcctgatgttagggagaagcttaaggtccgatggggatccgattggaagggtcaagcacagaaatggtgagtctttctgagattatcaagaatcatgtcatttcattacgggcttgttcaaataatgtgtttcctcaggtttcttctgaaatttactgggaaagatgaagaaatcaatcttcttggcgatggtactgagaaacctgagtttggtgaatggtcctggacttctcctgatcaagtcgttgaaaatgtacgtacagttttcttctctctgtttgaccttcagcatttagattccacgactactctttcactcatattcattctatttctgttatacaggcagtggagttcaagaagccagtgtacaaggaagtcatgtcagctttcgcttctcatctccagtagcaaaataaatcgaaaactaaactctctgttttaagtttttcgtaagaaactctgagaataagctcttcttgacatatttgctcttttttgaacaatctttgaatcaaaatacaattcttgttccctctcttgataaaagtaaagtgtgagatcctgtcatgttcttattttctcatcaaagattctcgctatttgatccgctacaaccttagcaacaacctcaggagcaaaattcttgaccatgtcatctcttccacgttttcctttaaccttagcctcatcagggttactcattacacgcctcattagaaccctcagcttatccacagatggctctgcccattgatgcccttcaaaaggaccttccttcacttcactcatctcctctaccaccaacgggtaaccattccgctctgtaagatactctgttggtcctgaccagtttgttgtgatcacaggcaaagacatagccatggcttccactataggtcgtccccatccttctcctcttgtaggcaacacaaacgcatcagccgctttgtacaaccgaggtaaatcaa

SEQ ID NO: 25236 - DNA, 541 bp, Arabidopsis thaliana
ggtcgattccctgacttcaacacttgtcattttctgctaattgctgattatcagtcaaaagatctttccaaaaatcgaaatcatgtgttattacttttgaaataggagttacaatcattcctcttttgtgtgtgttttactgtagtataagtctataagcatgtctcagtgtttccaacttcttttggaaagctaatcaagtctttcgaggttatacaacaccatatcttctagagccgacctgaagccacttcgaggtagacactgtagattctttatagcgtcatcagctttctcccgtagcgcaattcttgtgctctcttaatccccccaccttttgtcaccgcttcaatcgcttcttccagagaacccgcctcacaaaactctgactcaatgatctctcttagccttggctccctctcgagagcgaaaatcacaggtgctgttaagttacctttagccaaatcactccgctgctggcttcccgagctgctctgtcgactgagtgaaatcaaaatatcacaactatctggaaagagag

SEQ ID NO: 25237 - DNA, 519 bp, Arabidopsis thaliana
atacgtataggcgatgacgcccatgagacttttcccttggatatgctgagactctgtggaagccgttcgctttaacatttccgcaatgacgcaatccgaggtcttccaacaaccaaaacttcatacgatactcttcaagcatccgggcctctcaaaaaccctcaggtggattaaccttgctctaagagttctcataaacaaggatgcatttgtcatgtttactcaagacaacatgaactcgtaccacgccgtataaaagtttttgacaaaaatcttgaatagctatcaattctttggcagcgtactaccgtaagtcacgtaggacaccgttatgctggacccaagtgggggagaggagcatatatggtgcagattatgttcaggagaacacggagaggatccgggttcttaagctgaacatgaaggaagctcaggatcgacaacggagttatgctgacaagaggaggagagagcttgagtttgaaggtggggacagggtgtacttaagatggccatgtt

SEQ ID NO: 25238 - DNA, 913 bp, Arabidopsis thaliana
ctctagcggtggatcccattaatagccccgaagatatctctcttacgacgaccaaagtgctctggtaatccaaggtattttccagtgcctccttctttcctaattttcagaattctcttgacttgtccttttactgatcgtggggtttttgatgaaaaggtgacagaggatttgtgaaaattgatgctctgacctgaagctttaccatatcttgacaagatttcagagagtttgttgcagctttctgggtcagactttgagaagaacatggtatcgtcggcgaagagtaagtggtttacccgcggaccattaatggataccctgacccccgggagttgtctcagcctctgcgctctcgtacaaagacctgacaatacctccgtacagagaatgaaaaggcagggggataaagggtcgccttgtctcaacccccgagtaggaacaactttgccttggggggtcccattgatgagaaaggagtaggaaacagaggtaacacactcaagcacccaatctatccatatactatggaaaccaaatctttgaaggacttttttgaggaagtcccattcaactcgatcatacgccttactcatgtcggttttaaccgccattgaacaatgtttttttgcagatgaggtgcggagaaaatgaagaacttcatgagtaataaggacgttatctgatattacccgaccgggcacaaaggcggactgattctcagagatgagctttgggaggataagttgcatcctcttcgtcatgattttagcaacaatcttatagaagatgttacacagggcaattggtcgataatctgcaactttacgaggtcccaaatccttagggataagacggatgtgtgtttcattcattctgcgagggaaattcttggaagtgaagaaaagccgga

SEQ ID NO: 25239 - DNA, 531 bp, Arabidopsis thaliana columbia
tctacttaaatacgagcataatgttctgagaaaatataaagagcgagttttgaagaatcttacttgttaggccagattttcagatcgtcttcagttggccttaggatcaggtcaacaaaagcactagaacaagaatttaatggcaacggaggtgggttagcctcgacttcccagatcctatttctagcaaagccatgtgattcgagtgtaccaaagttactgaactgcacatacaaaaacagaatttcatgagcataatgaaccgtaaaatggaacaaccaaaggaagaaatataataacgtacttgtggaaaacataggggaatccctccacgtattggtttcgggggcttgaatatggcctgcagaattcataacacatggtttcatttctattatttgtagctaaaacacacaaataaccgagcaagaaagactattctagtatgagcaaattactagacttcaaagtaaaatgttgtctgttctgtcacatacttctttaggaaattaagcaaaaaatgaagtgaag

SEQ ID NO: 25240 - DNA, 527 bp, Arabidopsis thaliana
  unsure (1)..(527): unsure at all n locations
tgaaaatgatccatgaatttggttctattagttgtctccttacattacaacccgtcgcgaacaggcgatagataccttaaaccgtcagtaattccggatccagaagtgacttcagtgcggcgagtaaaagaagatgattgtctcatcttagcaagtgatggtctttgggatgtaatgacaaacgaagaagtgtgcgatttggctcggaaacggattttactatggcataagaagaacgcgatggccggagaggatttgcttccggcggagaaaagaggagaaggaaaagatcctgcagcaatgtccgcggcagagtatttgtcgaagatggctttgcaaaaaggaagcaaagacaatataagtgtggtagtggttgatttgaagggaataaggaaattcaagagcaaatccttgaattgaaaaacaaggtttggaagaaaagtgaaacacaaagttttgatggtgggtaaaaattctctttagtgaaacaagacagataaaacacnaggtaatacttacattgtaat

SEQ ID NO: 25241 - DNA, 481 bp, Arabidopsis thaliana columbia
gtgatcaaggaggtacttcggctgcatcccccactcccgctattagttccgcgactattaagcgaagatgtaaaattaaaaggatacgacattactgcgggcacacaggtcaaatatatttacgtttttttttttcttattataactgatatcaaaaacattttagataaaacgttttaaatgtgacatataggtgatcattaatgcttgggcgatccaacgagacactgcgacatggggatcggatgcacaagaatttaggccagaaagacattttgattcaacttgggattttgttggacgaaatttcaaatacattccatttggagcagggagaaggttatgtcccggcattggacttgggtcggtgatggcaagtgtgactttggccaatcttgtgaaacggtttgactggagagttgaggatggaccttcaggatatgataaccagatctagtagagggagctggaatcgatgttt

SEQ ID NO: 25242 - DNA, 802 bp, Arabidopsis thaliana columbia
ctatacgatcctgtccaccaattcagtcccactgagccaccagctgctacaactaaccaagcagacgttgagactatgaaccacccaaacccttactttcaaccacagctcccgaagacagatcaattaaacaacaacacacatatggccattgatgctaagctgttgcaggcacaatcacagtttggtccagcaggagctgcagcggttgcagtagcagcacaccggaacataggcacaattagttacagcgcagcatcatagacaacacttcagacagatctttaaccaccacatcttcctccaccaggtgattctctagtttttatgtaagtattattcagtccaggctctgatatgaactacgttgcaatgatataagaaagacttttatttagttgtaactctccagaacaagatcgccttggattagtctgattgcgggtcagtcccggttattgtgtcggttatcttgttggctccataatctttgaatttgccataagcgtagttcaccgtagagaagaatatcgtgggggggatatacgtgttaaacgtgttaatcggtcccattagtctttattgttcttcaacagaaaaaggaatctctttggttattggaaaatatggtcttgattggttaatatagacaacattatgccgaagaatgtggaagtaacaaaataaaacattggtccttagatttttcttctgtaaaccactctttctcagattatataattagtcaattttattcaatggttacaaaaagaaaaaaaaaaacttgccaatgaaaaaaagg

SEQ ID NO: 25243 - DNA, 473 bp, Arabidopsis thaliana columbia
caaaattgccgagattgaacaaccaaagttcactggatgagataactaactcttgacggtgttgtagccggagcacaagtttggaagaaaggacttcacgtgtagaaggctggcaactgtcagaaattgatgatttttctcaaagaagaaatgatacggaagtggacctgaatgctactgggtgttcatcctcttcaattcattgagatgagatcagatacggttgtcaattacgagaaactatcgagataccctatgaacagtctctgcaaatttctgaagaaattgccaccattggaccgataaaccggacaacaaatttccaggagaatctgggcgaaacattaacctaactgtcactctagaggaacaacctgtggagcagatggaaaacgaagaatctgattggcaacttatcaattgtgctccagtacatggagagatgacgctgaagaggaggcagatacagatgt

SEQ ID NO: 25244 - DNA, 564 bp, Arabidopsis thaliana columbia
acggtgtaaaataacttcgtcgtgagtcacaaggactttacggattctgaaatctttgatgccatatgtcaaattggtgatgataaagctcctggacctgatggtcttactgctcgtttctacaagtcatgttgcgatattgttagttcagatgtgattcaagaggttaaacactactttcggacatcatccatgcgaaactctctaaaccataccaatatatgtatgattccgaagataaccaatcctcaaacactattagattatcaaccgattactttgtgtaacgtactatataaaatcatttccaaatgtcttgttggtcgtttaaaatcacaccttgatgccattgtatttgattcccaagctgctttcattccgggagactagttaatgacaatgtgatggttgcccatgaaatgatgcacgctctgaaagcacggaagagaacttcacaatcttacatggctgtgaagactgatgtcagtaaagcatatgatcgcgtggagtggacttcttggagcaacaatgaaactcttcgggtttaatcgcaatggattagct

SEQ ID NO: 25245 - DNA, 555 bp, Arabidopsis thaliana columbia
tggagtactacacttacttcgacgaatcttgtatccaagacatgaactatttcgtcaaaacaatcaccggcatcaaatccaaaggaatcagaccagaccttatcggttccatcatcgctcattacgcttcaaaatggctccctgatctctccggcaatgtctccgccattatttcctccacctccttagaatccaagaacaaccacaatgacacacagccagagagcgtcactgcatctgtaatgaagaaacggtttttcgtcgaaacactaatcggaatcctcccaccggagaaagactctgttccttgcaatttcctcctccgtctcctcaggacagcgaaaatggtcggagctaatccgaattatttaacggagcttgaaaccagagtatcgtggcagctcgaccaagcttctctcaaggagcttatgataccttccttcagctacacgtctggtactttgcttgacattgagcttgtgacgcgtctcgtgaacaagttttctggattggatagtgaaggtgttaaaacgctgcggctcttgttaaagtggc

SEQ ID NO: 25246 - DNA, 487 bp, Arabidopsis thaliana
cttctcttcatggacttgatttgggccggtattgggccggagagtgagttgtgagagagatcgatgtaccggagcttggttgcttcgaagagacgaaccggtatggttttagagaaattgttgtgagctagatcaagccggtttagcgagttgagtaaaccgagttctgatggaatgtaaccggagagactttttccgaagagtacaagagttgtgactcggccgtttgtgcagacgattccggaccaatggcaaggagtcgggtcggattcagaccagtgggtcattactcgggtcgggtcgtaatcgacggcggatttgagagctaggagagataaaccgtcggaattgagagaggagcaaaagctcatgcagagaaagatggaagaaacaacaagtgaaagaatcgatggtaacttcattttttgcttaggatataggaatcttgaaactttttggttgttaaagagctacaaattacagatga

SEQ ID NO: 25247 - DNA, 546 bp, Arabidopsis thaliana
tgtttttgtttggtgcattggtgaacattagctatggggagtataagtctaactatgttactgacggggtttatgatcagtctagaggaagagttttggttgttgatagtagtagagtacattgtgggggagattctgatcaaggagtgggaagaaacgtatctgaaacagagaatttggggcctcctcgaaatagtagtgaacctctagttgcatcgctatttgttccgaggaatgaaaagcttgtcaagatcgatggaaatttgattattcattctgttttggcgagcgagaaagccagggattctgaaacaaagaacgaagaagggaaaagtgttctagcaactacaactaaaactttatctcctgcattgcctttacctgactccacaagcccaaggaccagggatgtgtctaagcacctctatagcgaaacggggaaaggcctgtcatcttctggttctgatgatgcttcgaacgaccaactcaaatcaacaatagccaatggtaaaatgcagcaatggtttcgtgaaggtgttgcaggta

SEQ ID NO: 25248 - DNA, 332 bp, Arabidopsis thaliana columbia
cattcttctccgccgtcgtcttcaccatcatcgttccactttcttcaccaccaccgtcaatcattgccaccgcttggccactcaaacttccagcaaaaaccgaagtcatcgtcgtcaccggaagccgaatcgtatccataattaccttccatttcatcgaatcgtcttcaacttcccaatgaggctgactctgtctctcgctatcaataaaacaccataacctgcaacctctaaaatctccggggaattcagcagcatgcgcggcggtgcgacctctcggactcaaatctggaaacggccagacattctagattgtcgaccatgaattcgta

SEQ ID NO: 25249 - DNA, 651 bp, Arabidopsis thaliana
  unsure (1)..(651): unsure at all n locations
cgggaaaaaacttgaaggagagcctgaagaagtatatgaagacactaaaatgtttgaggagaaaggcgatgggattatacagcatcagagtcatccacgtcaccaattgagacttgaaaaaatattccacgatgaaagccatcattgtcaagcgtgcagacgtccttcttatgatcatggtggtaatgtgtatcgatgtatgcaatgtgatgatttcatttttcatgaatcgtgtgcatatcttcctcgtactaaacaatttatgctacatgttcatccattgactctagatcccagttacaatttcatagattggttccaatgtgggaaatgttatcgttactcttgcggtttccggtgcatgtgttcgtgtgccgtgtgacttttttccggtgttggacacactttgtgcttctatatgtgagccgtttgatcatcactctcatccacattccttgttcattactagtggtgaacacgaaagcaaaatctgttccatctgtcaatcatcggagccacaacctttaaattgtttgaaatgcgattttgttttgtgcttttattgtgccactcttcctcataaagcaaggntcaaacatgatgagcaattntcacttttcttatgaagaagagcaaatgatgactttatgg

SEQ ID NO: 25250 - DNA, 659 bp, Arabidopsis thaliana
tcaagtgaaatttcaggtataacagcatattctctctctcctgcaatgaacgagccactactgccaccttagattcaccgggtagatatggtaaatgagttggaggtgcctgaccatatacaacctcaaaaggagtcatatggcttgaagtgtggtagttagtgttgtaccaaaactctgctaaaggtaaccagaaactccagagatgaggtctagcatgacacatacacctgagatagttctccaaacaacgattgactacctcagtctgaccatcactctgtggatgatatgcactagaaagcttcagagcgaccccttggagagaaaagaattccttccaaaattcgcttgtgaacactttgtctctatcactcacaatagaattaggatttccatggagcttaaagacattatccagataggcttgagctacagttgcagcactatatggatgagccaaagcaataaaatgagcagctttgctaaggcgatcaactacaaccattatcacagacttacccgctgaaactggtaatccatcaatgaaatccattgaaacatcactccagatcgtttcaggaattggtaatggttgaagcaaccctggatatgctgcgttatccggcttacatctgttgacacacattacaactccg

SEQ ID NO: 25251 - DNA, 567 bp, Arabidopsis thaliana
tctgtatagtagctccttgattttgtttttatcctcggatttgacctggttctgtttagtttgaatttttcttatagatcgctacttagatgaatatgatgaatcttatcctgttattttgatggtggtacctctctagattcgtggaattttgggaaatgaaaatgaaaaatggatagaaatcaagcaatatcagacgacgccttttgtgattttgaatctaagtagtctattgattgatttgatttaaacgtttatggagaacatagatttgattttgatattttggttttgattaggttgttgaggtttcgacttccaaaactggcaagcacggtcacgccaaatgtcactttgttgctattgatatcttcactgctaagaagcttgaagatattgttccatcttcccacaattgtgatgtaagttactacacaaactatgtagattcattttcacagtatttgatatgattgtgtgatctgactcaaatattgttcctttctctttttttctcaggttcacatgtgaaccgtgttgattccagttgattgatacactgaggat

SEQ ID NO: 25252 - DNA, 166 bp, Arabidopsis thaliana
gatgaacgtatcttcatgacaaggtatcgttaagccccccatcggatgatcaaacccaaactcatcttcagatttactgagcagagcttgaaaagaaggttggttctggtatgagagtggcactaagtatcttttcttctggctctctcctacgtacactgcaaga

SEQ ID NO: 25253 - DNA, 691 bp, Arabidopsis thaliana
gacttgtagtaaaagaagtggaaatttacctggagaataggcccaatcttgaagtctcccataatttcttctttggataccaaggttagaagagggagaagagcaaaaggaatttgtacagactgaaggacattgagccattcattcaaaacatccaaggaagcttcagaagtattgaacacgattgccacaatcattgtaggcacaatagcacagcttcttgttattactgccctcatccatttcttaagccggagattcagaaaaccgcccattataaactgtccagcatatgtaccagttatcgtactgctttgtccggctgctaacaacccgataccccagatataaagaatcggaagaagcccgcctccaaacttttcttgaagatactgaccagcattaactaggccaatgttattagctttctcagttccataaaacccctttgcaaagacagtagtcacaaacaagttaatcatgaaggagatgaaaagtgcgacggatgactcgatcaaattagtaattaagcgcttcttgaacccgggatttcctcttcggatcgattttcctcgattgtacaagagccgaatgcaaaaacacattgtgaggcattataacacagccaacaacacctacagcttgcctaattgtctttgagctaagtctcggtagtaaaatacctatccat

SEQ ID NO: 25254 - DNA, 588 bp, Arabidopsis thaliana
tatctccaattcttcttcttctgaagaagaaaacgaactcaaagatctctccactcaaaccctaaattctccttccaccgaggctccaactctcgattctggatctgagacaaattccgactcagataagccaatcgtcttaaccagtcagaagaagaaagaaggtactgattcatcagggacgaagcgagctagtgaaggaactagctcaaaggacatcaaaagagctaagaaagtttcaggagatgacgataacaaaaaatttcagagtttatggactaaagaagatgagatctctctgttacaaggtatgattgatttcaaagctgagacaggtacaagtgctcatgatgatatgaatgggttttttgatattgctaagagatcataagcttggaggtagtaagatccaattcggtgacaagattagaggtttaaagaagaagtattttggtgtaaggaagaagaaaggtttagacttggatcatgataagaaatgtttgggattggctaagtctatttggggacttgatggtaaggaagtggtggttcttggaggagattcggagacgtcgaattggtttgaga

SEQ ID NO: 25255 - DNA, 521 bp, Arabidopsis thaliana
tcgattgaatgaaaactttgaaacaatgtttcataattcatacaaaagcagttcaaatacaattcaaaagtacagaaacagaggacactgaagacaatttgactaaacaggtgaatggcttatgacaggttcataactgacaggatcatgactaaacctgatcccagcttgaccatgactcaaaaccacctcatagtccccagctttaacagacccatcttcacttgagacttgtcttctcatttcaacataagcacagtagtctacttcgtacactgttgtatctttatagaatgtcgaaaatgtagttccaactccttcccctgaaaaaattcatcaaagaggtttagaaggtaacaacatccaaagtgcacaaaggtcatcagagacggataggatagttcaatgtagagaagggacatggtttacatctgattgagattgatcaagatgacaaaggataggagggcattttacagatacacataagtcagaataggaaacaagagtcagaacttgca

SEQ ID NO: 25256 - DNA, 738 bp, Arabidopsis thaliana columbia
cgccattttcgccaaaacagggtttgttttgagaatttgttcatacgcaaaccaattatgttcaggtgcatacctaagtatctcgtagagagtccaaccctaagaagaacaacaacaatcgtgatatcaatttcagtataatcccataaaggagcaagctttgcagagatagaagaaccaatcaatcacaagagagataaagaaaaccctaagcttacttgccaatagtcatgatcaatggttaaaagcttagtaaccgcaacggtaccggcggcgagaactatagctgcgttgatacctcgactcatcagccgatctgtatcttctactttatcttctgatagttcttcctctgccttgaaattgtcatttttaacatcgattgcttctctgtcttcaatgatcgatttaacgatcaagtttcttctctctgtaatcaatcgtttctgattcttaaaagggttgattcggggtaatgggcctgcggttttaatccgtgaagaaaccttcccggagacgatgatggtggtgggacaacaacagagagctgccatggacttgcacttctcaaaggaagatactttttctcttctcgttggctctctcacagccaaaggagaggtttttagacttagagaacaaaaaagaagcagcagactttggtgaccaaacggtaggaactgagccgaaccgagtttcggttaaattaaaaccaataaccggtgggttttaatttgg

SEQ ID NO: 25257 - DNA, 1092 bp, Arabidopsis thaliana
tgtagatcttgcagagatcacaaacttgggtgatcacaagaaacttggagattccattgtgagtgttcttcaagaatgcagctcaatgggtaaccgttcaagggaattgatcgaagaaacggtaaattctcgacagagactgaaatgggagaagagtatgcctaaagaggaccttcatatcaaacaagcagcagctttagtggtcaaactcgaaggaaactctctcttttcatcaggagatatcgcgggtgcagcggaaaagtactcggaagctttgtctctatgcccaatgaggtcgaagaaggaaagagtagtgttgtatagcaatcgagctcagtgtcatctcttgctacaacagcctttggttgccataagtgacgctacacgtgcgctttgcttgcacaatcctgtaaaccggcatgctaagagtctttggagaagagctcaggcatatgatatgttaggtctagctacagagagtttgttagatgcgattctgttcatcagcgaatgttctcagtcgaatgatccggatctctccatgagacagaacaaggttcctgattacgcagagaggttggtgaagaaacagatgcgtgcagcttggttgtttaaagaagcggcattgaagcatggaggtgtgcataggaaaggtgaagagagggaagtgtatggaaatgaaacagatgattcggaatgggaaacagcgagtgagagtgatataggagatgatggaagggatcatatgggacttgatgatgaggaggaggaggaggaagatgaaggtcacggtgagaagtggaagaaccgggataaatcgagtgagaaaaatgagaaaacttctgccaaaggtgagattcttgcatgattatgatcaacacattgttgtcttgatttcaaattagttaatggtttattggtgacacaatctatgaatttgttcaggtatgaggcatggatacagcataaagcttgcagaagatgaaatatgaaaccttgaaacacaacaaggtcgttacaagaagttgaagaacagagaagacgttgaatgggtttgagtcttttttcaagcaagaaacttgcttcatggat

SEQ ID NO: 25258 - DNA, 734 bp, Arabidopsis thaliana
gaggctttctccaaatctgtaatcctcgagacatatagcacatgtttccccggccttgtggtgagcagaatcagtgaaggtgaagcaggggagtgtgtggacgagctttgcatctaacctgatggtcctggtgtgcctccctcgccattgggtccagtgtctgggtgcaaagaaggcaatcaacaggaaagtgactataagaaggagagagaagaaggagatggccaacacagtccaagcgctccctctgtctggcggattaaggcagcattcaccatctcggcctctcgcgtactttctcaaaatctcaccggcgacatttgaaacgaagactgcatcaactgtaatgtcctgagggttcaccttcactgtgcaaaacagatgttggtcaatctccaaacttatgggggcgttgactaaattaaataactccaatgaaattcagctcaaccctagctcatcaggagaagaaaagatggaattttaaacttgggtgggaggcaaaaggcttactgacgatgagatcttcgttgtcaatgttgtcatagacaatcacagcttgaaaacctgagttctgggcattgagcagcttatcctcaaaagaacattcgcctctgattatcaaagcgaacttagtagttctgtgttgcgtccagttggatgcggcggcgtggagaagcggtgacaaccgtcgagaggatctgcgacgtatagagctcacagattccgttttt

SEQ ID NO: 25259 - DNA, 1085 bp, Arabidopsis thaliana
aattgtttgctcttcatttacatgacgttatctaacctgcaatagaagtatgtgttggagatgcatgagtgtgtacttccaccatcaatatctcccgtcgtattatttccataattttactggtgattgagttaactgaagaaataccttgactcagatgatatctacaagccattgcagattatgggttcaagggttcagagtatgctgagattccttcacttgattgatttactcactctgttttgtttgacttcttctttattgtcgtgactcttctcgttcaattggattctgtctcctttgatggttaatataaagggtaagactttttgaattatttttgtaggcaatcggctggtaatggagctactgggtatggaagatctgatagcctctctcatcagacgagcttggctgggcattctccactggcgagggttgattctgaccataactctttgtacagtgagaagagagaacgctccattgtctcagataaggaaagggtgaatctcaggggcgtcaacaagtatgcattattatcgtaattcaattcacattttgaattcttctattaattacatgtaccttgttcatgagatttcatttcaccatatcatcttacccatatttagccactgttgtttctgatcattgtcaatgtacttattactctgtttaattcattgaaggtcaaatattcatgatgaattcaattcttcaagtctggtttcaaacacaaaaacaaatgcttcagttcgtggacctagatcaggatcgggttaccaccaaaactgtctccaggactccataacactccgtccccgattgaatgggatatctctggctgtacgaataagcctccaacattgtcaggagttacacaacgcaagcgtatgacatcaaatcgttcttcatcaccacctgtcactcagtgggccagtcaaagaccacaaaagatatcccggatagcaagaaggacaaatttagtgcccattgtttctagtcaggacgaagttccctactctgataatatatcagatgttggttgtagtgaaactgggtttggatttcaggggatc

SEQ ID NO: 25260 - DNA, 808 bp, Arabidopsis thaliana
ttcagataaggaaagggtgaatctcagggctgtcaacaagtatgttaacaaacttacaatcttaaccacatctgtcaatttttctcctgatctcatttgtcaaatttttagcctctattcttcttcctgatgattcttttttattcctgttactctctgctgggttcattgcaggtcaaatattcatgatgaatccaattcttcaagtccgacttcaaacctaaaaataagtgcttcagttcgtggtccaagatcgggatcagggctgccgccgaaactttctccggttgtccataacactccctctccaagtgattgggatattgctggctgtacaaacaaacctccattgttgtctggggttcccaatcgcaagcgtatgacatcgaatcggtcttcatcaccacctgtaactcaatgggccagtcaaagaccacaaaagatctcccgtgttgcaaggagaacgaacttggtccccattgtttcgagcaatgatgacattccgtcatcggataacatgtcagatgttggttgtagtgaaacaagttttggattttatagacgctcgcctgcagcttctccacaaatgaaaatgaaaggtgaaaatagcttgtctacaacagctttatctggaagtgaagaattcagcccccctgagatcaaatctaaagacaagggaaaacaatctgatgaggtaaatggtaaaacttctcagaatgttcctaaagtctccatccctggtttacaatcaagaaaaaacaaacttgcctctggagaagagcttggggatggtgtgaggagcaaggaa

SEQ ID NO: 25261 - DNA, 657 bp, Arabidopsis thaliana
ataatggtaatggacagtcatctgtagcaagtagctcagagaaagctacacgagctcagggaaagcttgtatttggggctaacggaaaccgtgctccaaaagaagctgctccgaaagtacgcattcagagtttattgataattgacaaaacaaaaactgtaaatggaattgagagacaaatgcatatgattgttcatctcttaattttttttttcaggttggagctgcaaaagagacaaagaaagaggaacaagagaagaaagacgagcccaagtttcaagctttctctgggaagaagtattcattgaggggttgatcaactcacacaatgggtctactcagtctatttatgacctctcatgttgtgtactaaaaatacaaggaaaacaaataagtgaataaatctctggctcctcttgacgcggcttgttttctttatcagattcaatgcaactttctacaattctctgctcttttatattcttactgtaggatataagattctgagcacctcactaacataatgtgttcatgaatagcaagccatgctctgtagctctttaccaatgaaccaatgaccaaagacatagatgagaaagatgctatgtctgagttataatatcctcaacacatctgtgatctctggtttctgagata

SEQ ID NO: 25262 - DNA, 496 bp, Arabidopsis thaliana
gagcacggtttgttttggacaggggaaaaaaggaaacacaatctgtgtgttttggttgcatttcattatactgaaagaaacagggaagagtcccatcaagcttgcaagaagctagcgtacttggcacccaggagaagcctctgaatgcacaagatagcgttcttggtcacctcagcgttctcgtggtttatcagcttcatcactcgctcttttgccttgaggtctgctacaatcactctccccgctgcatggtattgtatgaactgtgagatatcaaagcatgccaccgccaatgatctgggatcacttgaggtgtccaggattgtgaggaggaccctgagtatctgcgtccacaagtttaacaagtggttagggttgttgtctaaggccaaaaaggattgaaccagcccgctctaaaagcactacaagtgtgggtgttgagcagagaggaataaaagaagaatacctggaagtcgttctctcaaagcatgtgaca

SEQ ID NO: 25263 - DNA, 477 bp, Arabidopsis thaliana
gacaagaagacattttggtaccctccgctgtcgtccatgtcctccatgcagcagtccaagagacatggaatcttttcacacccattttaccttcacgctatcgcatcttctctcgattactcttctaccactcgatcctgtattctctgctataactctttaaactcgaccccatccctctccattcatattcaccaataaaccaatttctcatctctcttctcttaaccactcgatctcactatctcatctccaatcccgtctcactcatcttcttctccatcataatctctgtccatagctacattcgacctctcatctctcgtttcccatacactcgacctccataccctattcttcctcacaatgcactcgacttcaacgctggaagcttattaccattaagctcttctttctctgcatcactcgacttcaacgccatcattatcataccatcaccattagatccatcatctt

SEQ ID NO: 25264 - DNA, 580 bp, Arabidopsis thaliana
tgaggaggagattgcagagattaaagctggtcactttgaggaatccatgaaatacgctaggagatcagtgagtgatgcagacattcgcaagtatcaggcttttgctcagactctccagcaatcacgtgggtttggaagcgagttcaggtttccagatgcgccgacagggactactggagctttccctggagctgctgccacagttgggggagtcgacccgtttgccacatccggaggagcagcggatgatgatgatctctacagttgaaaggtctgatcagaccctgtgactactctctttagtctttaactttgttctgcttgaaaaactttcgatggtctttgttgtgttttatttataagtcttttgtatataatcgttgagactctagaacaatgatggtgtcatgatgaaataaatctagagaaatgagaacactgcattcatcccaaaggaaaccggatatacatacacagattttgcgagtacacagattctacaccctaactagaaagaatcatcagactgatgtaattgttgaaatatcttctttatatacaatagaagtgcacagttgag

SEQ ID NO: 25265 - DNA, 553 bp, Arabidopsis thaliana
catcagattcagattcagtaccagcaacctcatctactatatttgagggccttcctggacggcggggctgctttcaaaacaacaaggtacaaagcgtatagaagaccttgaaccgccacacacgtagttgcgagctgttcaagttccctctcttgaatggaagtcagcatcatctcgaaagacaaacgcccccatgggtaagacagaaacccctgcagatcctcagctatttcggcgtgatctttcgctatttttggatagtaagaggtaggcaacaaaaaaccatccacaagagccaaacaagcatatcttaaccttatttctctatcagttaccacccttttttaaacatggtaataactttatcaacagtaacattttcttcgagaccaaacaaggaattgtaataaggaatctgcttcctagctgtccctttcttttttttttttggaccgccagatactttccacacggaagccgagtaacgaacttgaactctcttaacaaaaatcggacaggagtccagcgtacacttccagattcattaggattg

SEQ ID NO: 25266 - DNA, 571 bp, Arabidopsis thaliana
ataagcagtagtttgtataatatatgcaattggtttgttatgacattatatgtgattctttttttttcttttttcttttaaaaggtgttaggaccaaagggtcatgcttcggcttcacaaaacacttggcctggtaaaagagtcggtgtccattcattaggcgaccacacatcgatagagattattgctcgtgatcgtcctggtctcttgtcggaggtttcagccgtactagcagacctcaacattaatgtggtggcagctgaagcatggactcacaaccgtaggattgcgtgtgtcctctatgtgaatgacaatgcaacttctagagccgttgatgatccagaaagattgtcttccatggaagaacagcttaacaatgtgctgcgtgggtgcgaagaacaagatgagaaatttgctcggacgagtctctccattgggtcgactcacgttgatcgaaggcttcatcagatgtttttcgctgatagagactacgaagcagtgactaagcttgatgattctgcttcttgcggattcgagccaaaatcacggttgagcattgtgaagagaaagg

SEQ ID NO: 25267 - DNA, 369 bp, Arabidopsis thaliana
tggacactcataatgcaaagtgtttgttgttgccgtcgctaccatttgagttgatagaagaaatactttacaagattcccgccgaatccttgatccgattcaaatcgacgtgcaagaaatggtacaatctcatcaccgagaagagattcatgtacaatcacttggatcactactcaccggaacgattcataagaacctatgaccaacagatcattgatccggtgaccgaaatcctctcagacgcactaatcccggacgagtttcgcgatttgtatgcgatttatgccatggttcactgtgatggactaatgctgtgtacgtgtcgagaatgggacaacagtctcgcagtttggaatccggttttgaggg

SEQ ID NO: 25268 - DNA, 521 bp, Arabidopsis thaliana
gaatccatatctccaagactatgaagaatgttagaatgatattacactataaggatgtagtactattatggacggtaaagatgagtcacactgaaaatgaaagaagtgggactgagaaagaaaccaggctgcatgcagttggatcgagatgaatgaaaaagtgtatcatttctttgctgaagacagatctcatccatgagctgagaaagtttatcagtgccttgctcttttgagtggtcacatggacgctggtcaatgattcttatgttgttgcatctgtcccaattagaagacaacatatcaggctaatgtccaattaacacatggtggatgctttcacagccgtttcatgcttttacaaaaaaaattggtggttctaatgcaacactggatcaaaagaactatcaagaaagcatgttccacatttaagggtttgaatggtgatggtagtcgggatggacaaatccgtcagaggtttagtccgttctatttttaggatagacaacaaaccgctgcagacc

SEQ ID NO: 25269 - DNA, 588 bp, Arabidopsis thaliana
gtatcaatagagttcccttcgagactagcaaaccattcgagggcgtcacgtacgaggttctctgtgggagcggtacgcttgggaaggtaggcgatgtacgtgtctcattccctgttgttgggttttcgacgagagtgtgcacgggtgcctgtaaaaaggcgacctgccggttgagaggaggtgagacctctatcgagacgaagctacgacgagtccttggagtgggatctgtcggggagacggtatctgtcagatctatggggatctgggcaggaatcccagtttcgcggggaggaatttccttaccatttctgcgaggttgcgatgcgcaatttcttggtttttgcttatgttgattaggttcaggatcattgcgcggagtccgccagttcgttggcaggtctcggagggagctgattagacgggttacccggttatctccgttagaggctgtatcgtgacgttttgttccccgtcccttgtttgcaagggggggaggatttggtcagatccagaagaattcgagttttgggagatgtctccgcattaatgtcatggatagcatcaacctggattcggaaagagaga

SEQ ID NO: 25270 - DNA, 620 bp, Arabidopsis thaliana columbia
ggctagtcaaatcaaagacttctagagcaagccaaggccaccgtctcccacccccgaagtaagaagaagcggttccacaaggagggctgaaaggagggctgaaaggattgatcaaccccgagcttcatcactcgagcctcgggaagtgatctccgagttgagagagccaaggagtaggcagagacgaggttctacacgctcgaccaactactcgaccagacagaacgagcaaaatcctcccgcgtcaacatctgccccttcttatattctatagagtatggacgattaagttttcatctacttcacctgaccgctgaggtaacaccaccaccaccattgtacataccatagcatttttatttttctatgtgtgttttgtgttttggtcttgaattctttctccgatttttattacacaagggactgtgtaatttaagtttcattttaggattgtatacagagtgtttgcatttaggattgctaatttgcataggggataatgatgatttcaaaccgttaagtatgttttgattcaatgaagtaagttcaatgccgaggttgttagttttcttttgcataaccgattggttctctgaagtaagaccgtccctgctttgaat

SEQ ID NO: 25271 - DNA, 672 bp, Arabidopsis thaliana
caagttgatgaaatatggctcggtggtgattgatgaccaaggcttggacacgcaacgaaacctcgcaacagatttctcaggcagtcttaggagtatctctgagactagatctagaggaatggacgacgaacctgatttggatcgtttactttttctttggtaggcttttatcttcctcttctcttcttgttgctccatctttggccaaaaccctagttttttcaggcttttcgacctcttcatattattctaactcatttttaagatatgtaaataatacgaatacacacgttggagattttatgtgattatctatagactatagtttccactttccagaagatagtttccattttgtttcaaaataaaaacggaaagtatatagaagatttcttgggattatagaaacttcgcaatataacgattttatattggattcacaatgtagcgataaaccaaatcattcatagatttttatttatttgctttgttaaataaataaaatataacatttaaaacataacttattaatcattaaaattataatttaccaaataattttttactttacttctcataacttataagcatattttttttacaaatttgagaagtagaaaaaaaaaaaaaaagttttactaatgatccattgatttcgaaatctggataatg

SEQ ID NO: 25272 - DNA, 1333 bp, Arabidopsis thaliana
taaccacaatcgatcgtaaaattaatttatgattttggtctggtgaaataaatcatttttaaaattaattaaagaaatcagctttgataattaagttcactcataaataaggtagaaaaatccattaaagagtgtttcaaatccatccattgatagaggaagaatggcatattgtttgtacaccaaccccaagaaaatcccgagtttgccctcctcctcccgcattcccaatatcaactcttctacgcttccaagggtaattctgtaattcacccatccccgaaacgaccgtaacgccgtttctagggttccgatctcgtgaagaccgttattattattactcattaactcgacactgttcgatccaaacgaagcaaagaacctgtcgctgccaccatcttctacaatctgattactcttcgatgcaaaactctgaagatacgctgattggtcggtagtaatcgtcgtcgttggtgacgtagaagaagtcgctcccatctgagcagctttttggagtaacgcagtcgccgacatatttgcaacagccacagaagcagcgtttgcgtcttgggtaatttggtcaacgctgctaaaaagagaaggcacggaaagagaagttgccccgttagcgttttccttactctggacgatattaatattattgtcatgagtaatgagtgaatcgctcgtcgttattaactcgccgtgattattcgcgtttccgaaaacccaattgtaatcctcttgcggtgaatgcggctgcggcgccatacggtcctcgatggtcacttgctgatgatgattaatatttcctcccgaccataaagagagcgtagacgctggtttcatgacgtcttgatgatcgaagttgttggttgtgattgggaattggtggtggtgatgatgttgcggttgcggtggtccgaacggaaacgacggtggttgtggtagtgatggtgatgggataagtgtccccatgagataatgatagtttagattactaccagcggttgcggcaaagcttttgagatgcgaggctgcgtttaccctagcggtttcttctgctaaagcgtcacagaacgctctatgtgtaatgaagctgtctctcctgttgaccaaattatacacaccaataagatcaatatcgtctatacacactcgctaatttatgcttgtgtttaatatgtatgtatatagtaatatagatagcaattaaggaaaaaaagataaataaagttgtatatcttactttaaccaaaatatgtcaatccaagaaactgtcttattcaagaaatcaagcagcacgtatgctcagagaatgaccaatatggca

SEQ ID NO: 25273 - DNA, 553 bp, Arabidopsis thaliana
agtgtacgttcattcgtaaatatcaccatttatgagacaaaccaaagacctcatatgtttgcatgtgttattttttagtgtacgttagagttgatatctcatgctagtgaacgtccatatctagttttccgagacaaagaaaaaacctctaagtattatatggtagatgcacgtgtacggagttgtggacgcttagattttaatatccaaatttacatttactgcagtgtctaaatatcatatgtgaatttggctgaaaaattctcaacttgagcaataatataatttcaacataaacataaacaacatagtagaaggcttatcataatttgaaacatgacatagcggataacataaacaaacatataaagtagaatggaataactatagcatttgactaacacgcctggcacacgaccagaggtaacagcggttgcaaacgttttggaaagctcctgataccatgtaacaatataaggcgcaaggaggcatactaattccatggctggtaggataagagaacgtaggaccatatgtattgctgtatggaggg

SEQ ID NO: 25274 - DNA, 545 bp, Arabidopsis thaliana
ggatccctatgactccagagacagttatcgattattacatggccctccttcgccatcatgtcagcataggccgccgcctcggccatgttgttcactccaggaacctgacaattcctccctttgacgtggcgaacaggattcgccaacccagcctcgtcctcaacgatcgggtgatcacggtcgtgagtgtaggactagtggaaagtccgcttcccgtggatcctcagccggagttggacgtctgcctcacttcctgagaccggtttgaagacctgcccccactatctcctctctaggagaggcgaccccctggtcgctcacgagcaactcagccgccggattcacctccggctgggtccgagctctcttcggagaggacggtgcgccatcagaacgaacaactgcagatggcccaaatacttgagcaaccagaatgttaactgactgacctgctgcagcagaggtcccggtgttgacctcaggaagccagggatgagatgttgaggcagatgcgctggaaacagctagaatgttttgagccgcgg

SEQ ID NO: 25275 - DNA, 539 bp, Arabidopsis thaliana
ggagactgatgaaacgcagcgtcataggtccctacatggtgtgtacctatgggcaacaaacgaaagatctcatgaaaagcatgcacgaggggcaatgtggtagccattgtagtggacgtaccctcgccctcagaattaaaaagcaaggttacttctggccaacaatgctagccgattgcgtactcattcactcaggtgcgataaatgccaacgacaagcacctactcttcatcaacctcccgaggaaatgtcgtaggtcccatggaagcctccggtgggaagaagagactaaaaaacctgctggtcctcaccgactattctaccaaatggattgaggctaaagccttccaacaggtaaccgagaaacaagtcgaggacttcctatgggaaaacctcgtatgccgacacggcataccttatgagatcgtcaccgataacgggactaacctcacctcgggaaaaatcaaagcattttgcgacaagtggaagatccgtcttccacatccatccctgttaccacaaggtacggacaggcagaa

SEQ ID NO: 25276 - DNA, 459 bp, Arabidopsis thaliana
caattctacaggttgaggcggcaggagaatccaaattagtgacagggatggaagttgaaatacctgagaagactcacagtgatcccccgtcaccatttcaagtagttaacaatgtaagctaactctagcaacaaataaaatgtactatttactgttcaaatgtataacatttatattatgcaggtcatacgggagttggataccaaagccgttggtgatttggctgcagctactgatgtggaggtaacaatttgtgtgtttcaattcctattctcggaatagcatatgtgtacattatatagacttgtgtacgtgaacttgcacaggtagtcatggaagagccgggtattgtcaaggggtctgtaggaactgaggatcctaacccagggtcagactcatctacttagcaagcgggtgggcgacttcaagaagtgcactaataagcacgggttcaaatgg

SEQ ID NO: 25277 - DNA, 565 bp, Arabidopsis thaliana
gtatcagctctagcatgtgggtactcgatctcatcagctctgtggcggccacaccgcttgaggatactcgacctctcttcttctaccgcggtcgcgtaaactacgagattgcagaagtcgtctgttcctgctgctagatcgagtaagtttggtcctcctctttctcccaaattcacgaggctcgaatgatgaatgcctcgcagggacatgcataatctcttgctcagtaggctcaggcctgcgccgacttgtctcaggcgcatcatatctcctcgagggcatgtcctgagggagctgtccatgcggaatagctgtagtggtagaggagcagcttagcttgtccttcagaaacttgatagctttgaggcacttggcaagtaacttatcatgtttcttacaccacttctgcaacttgttgttgttcctgtgagcttcactcaaactcttgctttccctcgctggaggtacatgctcactgaaatgagacatgctcgtgtcaaactccgcttcatctatttcatctgtctcatcaacttcttctattgtagctccttccgtgtgactg

SEQ ID NO: 25278 - DNA, 624 bp, Arabidopsis thaliana
taaggattaaatgaatgcgaaacaatgatccttctccatatctagtggaatgtgtatgatccccttcgtggtaaggctaagaaagatcgaaaaactaaagaacaaagatcttgattccattagttaggtaattttttgtgatttatgatcattcgccctccttattattgatgtgtatacataaaaagcatcctctaaatcaaatttcttggctaacacagatgacactagagctgagacaagataggaaccatttcagaccatggcttcggcaatgcgacaagcggctcagccttagccattgccacaccaaacacgggcctcatgtctatatctcctgcttctaccttctcccactcaaaacactgaaccaatgctccaacagcaagcgacactaccctcattccaagtccagctgcaggacacgcccgcctcccaactccaaatggcagaaacctaaaaccatctctatcgccaacaaacccttcaaatctctccggcttgaaaacattggcttcttccaaagctcaccgtcctatgaacagccaagcattcacaatacattatgtttctggaactcgtagttgctaagttgaactcttggatgacagtgaggaacaagag

SEQ ID NO: 25279 - DNA, 556 bp, Arabidopsis thaliana
tttaacgcgatgaacttaaattcagacactggatccaaagaagatactttttttaaagataaaaaatcatacgaataaacaacctgcttccacataggcttacgattccaaccttcagctagcttgcaccttctttgaagactgtaaaattggatgaatgtatctaactcaagccgcggaactacttaaaactcttaatatcatgagatagtgaaacttacttcaatgttagatctgtttcatacgaaaaatacaatccaggggttgtctcaagtgcttgtaacagagtcctaaaatatgtttcgtcctttttctgcaaaagccagtgaccaagttctttagacaacttaacttgttcataaactccaaaacccctacaaaatcgtatatcgattgaaattcacaataaccttacttcttgagcagtagcaaacctcaaagcctcattgcaaggtaagaatttcatagccgtaactctaaaaatcggtaaaccgagaaaattccaacttcctcccgagacgttataactagcaagtatgttcctatatatgaatga

SEQ ID NO: 25280 - DNA, 844 bp, Arabidopsis thaliana
tgaatcatcatatagctcttgtggtactgatggaatagctttacaggtgaaaccattgttccttctggtcatggactattctcaagggacaaaattaccatcattgatgatgtatgaaactgtattgctaaaaagcttctttgctggtagttgtatgagaaactgttactgtaagtcgaaagtttgcaaccaaaatttgcttccttctgatccagtctagatttgggtcgtcgagtcgcccatcatggtctaaggctaattcagaatcttctctgtttcttgcaggtctggttctaagaaaggaagaaaaatgaagcacaaagatttggataccattatataatttaggtaaccatttgtgcttttatgatcattcattcgccttattatcaatatttatatgtaaaaaccatcctctaaatcaactctcttggccaacacagaggagactagagctgagacaagataggaaccatttctgggcatggcttaagcaatgcaataagcggctcagccctatccattgccacactgaacgcaggcctcatgtctatgtcttctttctctaccttctcccactcaaatacattgacccaatgctccaacagcaagcgagactagcctcattgcaagtccaactgcatgtcacgcacgcctcccaactccaaatggcaaaaacctaaaaccatctctatcgagatgaaactcttcaaatctctccggcttgaaaacatctgcttcttcgcaaagctcagcgtctctatgaacagcgcaagcattcaccaataacactgtattttcagggatcttgtagttgcctacgttgaatctcttggatgtacag

SEQ ID NO: 25281 - DNA, 973 bp, Arabidopsis thaliana
gtataaatgtcttctcttcgatatagaaatcatgattttaatcatcgaaaataatcagatgttagaagttaactgtatcttgttcttagtttcagggacaaagagtttttgttgtcagtaacttcaagctctaagctatggctgtcaccaagatttatattgtgtgagtctttaaagtttaaactaatcagtgccaagttaaacaactggcgatcaatttcccgatcaagagtaatctgcgattttgtactactgactcacacaggacgagattgaatcctcgtaccagtttggttttgacgaaaaattgggttcttggacttttctgttaggtactattccttgcacggccacgtcgagacaatggcacgagaggtacttcggggagtaaactctgttccagacgtggaagcaacactttggcaagtgccagagacattaccggagaaaatattggagaaagtgaaggccgttccaagaccggacgatgtgccggatattcgaccagaacaactggcggaagccgacggattcatgtttggctttccttctaggtttggagtgatggcatcacaggtcatgactttctttgacaatacaaatgatctctggactacacaagctctcgctgggaaacctgcaggaatcttctggagtacgggtttccacggtggaggccaagaactaactgcgtaagaacatagtcctcctaacacataaatgttagaagaacacatgcaagtgattcatttgtaatctgcaggttgacggcagtgacaaaactggctcatcacgggatgatatttgtaccggttaggatacacattcggtaaaagtatgtacgagatgggagaggtgaaaggtggttcgccttatggctcagggacttatgcagctgatggatcacgcgagccaacagagctggagattcagcaggcaaattaccatggcaagtactttgcaggaatagcca

SEQ ID NO: 25282 - DNA, 486 bp, Arabidopsis thaliana columbia
taagtaataatcatatgccacactaatccgataggtgactaaccaattttcagcttcaattagaaccataatcatgataacaaagttatttcacctaaagctctgtaacgccaatgacgcattgttatcagcgatggcaattaccaaatttgcataaccaagtctcaggtggtcagggagttctttcacttgaccatagtccagcagtgcaacctgatgacgggaaacaaagattacaactcaaaatatatagacggtactaaaacgtatcaaaagaccacagtaagtcaattaagaaactactaaagaataactacaaacaaaagatgacttgcctctgaacctttaccaatcaagatattcccaggatgtggatccgcatgaaagaaaccactcttcagtatcatttggccatatgcttgggacaaactgtgtagtatattgctagaaaacaaaatacattttccaatgcagcattagacaaga

SEQ ID NO: 25283 - DNA, 548 bp, Arabidopsis thaliana
ggtgcaaaaagatccaaatgataacatcaaaactaatttatatgataactagataaggcccgcctaagcggatgcaaaataaatatatttttttgtaatattttactactaccaagcctcagctaaatcgtgagaagcttgtggtagagcaacgcattggtgaaatctcctctgtcaaacgacacaaccctacaattgaccaagtttcagcctaatcatgagaagcttgtggttgagcaacgtcttgtgagtcctcctctgaccaacgacccaactctgaaatcgacatggacccatcggttaagggttgcagcgggctgcaccactttgtttgtctcttgagctaaatctgtcattggagggtttgattctcatctctggctcgatccagctttagccggttatgcagggtacatcttagctgatctaggttccggtgtctacacttggccattgataactatggtgatgagtcacacctgtagtaggaacgaaatcgaagcatttcagggtcccacaagtggtcttggacaatcacatacggtaat

SEQ ID NO: 25284 - DNA, 657 bp, Arabidopsis thaliana columbia
tcgaaacgattttggaattgaaaatccaaactctattgtggatgttttaagtaacgaaactcagttatagaaaatcgaacccgaattgatcgtggtaatgtcgaaaccctaatttcgtgggtttagggttttgtagcacagttttcgcaaaaaaatgaagaagaaacaagaagagagttcgttggagaagctaagtacttggtatcaagatggagagcaagacggtggagatagaagtgagaagagaagaatgagtcttaaagcatcagactttgagagtagttctcgaagtggtggaagtaaaagcaaagaagataataagtctgttgttgatgttgagcatcaagatcgtgattccaagagagaaagagatgggagagaacgaacacatggatcttcttctgattcgagtaagaggaagagatgggatgaagcaggtggtcttgttaatgatggtgatcataaaagtagtaagctttctgattctagacatgatagtggtggagaaagagttagtgttagtaatgaacatggtgagagtaggagagatttgaagtctgataggagtttgaagactagtagtagagatgagaagagtaagagtcgtggtgtgacagatgatgatagaggtagtcctttgaagaaactagtggtaag

SEQ ID NO: 25285 - DNA, 559 bp, Arabidopsis thaliana columbia
ctctttctcttgatctctgttgttctgtggctgatgatgtcactaacaacgatgcccacttgcctccatcaatttttcaatctctctcatcttctttaatgtgatacaagttctcatcttcagtgtataagaatcataaattttgatcctttagcttctctgtttcttcttcttcttcttcttcccttgtaacagagagctcgaaagttttcatttttctttctttccccatctgggttttcaatttcactaatttactactcctgatttgggttttttgagattttgtggacttaaagctattgccatagtttgtcacacaaaatcacttcaaatttggaaactttttgcaaaaatgagatacaattcgatttggtacttatgcaagattccgaggaggaaagagatgatatttttctgctgaattaatgacgacgacgactactactacgacaagggttgcttcttcttcttcaacacggaacaatcgaattctgaaagatgcaaatggagatatcggtgagcatcttcgtaatcatatccatttaacgaattgtat

SEQ ID NO: 25286 - DNA, 805 bp, Arabidopsis thaliana
attagcttataaatcaattattcgtaaaatatgtgatcttgtacaattttatttggtaaaacttacgggaaaaaataaacagcttatgtgtcattgactcatttcacgatattatcaaacctaaaaaaaaactgcgttgacttatatgttttatgacttttcactatcataaaactgtacggaccaattattatttttttcaagaaaaatatattaacctataattgtagaaaattctagaccaaatcttaaattcaagacctgtgcgtgttttttttatatccctttcaattttgctatctagtttggtgtgttcatgcacgtaagattttgcaaactaaaccatattatattatatagtatatatctcatcactaaaataaacaaaattaatcaattgttgttttgtaaccatacgtaccgacagtagctgagttaaaggttgtcgttcctcctccaacacttttgcttccggtaataatcgtcttccctataccatcacctctcaacatgacattctttttccgaatctcaaggttctcactgtaaacgccttgcttcacatatataacgaacctaccactccccgaagcagcatcaatcgcttcttttatcgtcttaaaattgccagatccgtctttcgccaccactgcgttatcttttggcgtcgagctttgcaaaagtttccggcaccaggtttgaccacgaagggaaccgtctttctcgggtggggtgtagttgaaaggactttgttaatggcgagtgtgttgcatagaagatcgagacgttgtttgacacaaaggaa

SEQ ID NO: 25287 - DNA, 917 bp, Arabidopsis thaliana
gctaagaacctaatacaaccattttcatttacgcagatctggtacaccaacgtccctcataccaagcttgctgagtataaggggcatcaaaattgggttaaagttaccggtgagtatctaacttttcctggtggaggaacccaattcaagcatggtgctcttcattacatcgatttcatacaggaggttggtattcagatgtaattcttttgttagaaagtctgaattggattactgctttgtataatggttttattacccatacacatgtttcttttatgcatccacttgttttctactcccttattttgttagaaagcctgaattggtttgtactttgattactttaggggtaatatttgtgcttatgaagttccccttctgttgaaactttgatttacagtctgtccctgctattgcatggggtaaacgctctcgtgtggtcctggatgttggatgcggtgttgcaagctttggaggtttcctctttgacagagatgtgatcactatgtctcttgcacctaaagatgaacatgaagctcaggtgcaatttgctcttgagaggggcattcccgccatttctgcagttatgggcacgacaaggctacctttccctggcagagtttttgacatagttcattgtgctcgctgtagagtgccatggcacattgaaggttagcaacatagccacaatagatatagagtctttgaatggaaactcctcctggatcttaagtcttaacagtctctttcgagtgatccgcaaactttttggtatctgtgtcatgatgttgtgtgcacaatacatgggcaggtggtaacttccctggagcttaccgtgtatgagaccggtggttctttgtgtggctgctactctgttatcagagagccgagatgttgaattggaaggtgtgaaa

SEQ ID NO: 25288 - DNA, 541 bp, Arabidopsis thaliana
aggcgcgcctcaatgccaattagctgcctgagatgcaggagggctcgctgtcgatcgacacaacaaagatgtcgatcgacacccatgggagcagaatgaagacgcgattggtatcgaacgacacaacacatgtgtcgatcgacacaaacactagattcatgcagctattcctctagctgcggaaccacgtcgtactcttggggatttcaacaggcctgacctgttctatgctaatcgatcaacgattatgaggtgaacctggctactttgctttagttgaccaacatcctttccatggcttatctcatgaggagtcaatggaccatatcgagcgctttgaggtccttgttctgagcatcaaagctaatggagtctcaaaggactacctactgtgcaagctcttcccttattcacttgatggagaagccgcttcttggctgaaacaacttaaagcaggttcctcaagacttggagaagcatcaagatagccttcttgaataatttctacgatgatgttaagtctgatgagttgagaaacaag

SEQ ID NO: 25289 - DNA, 435 bp, Arabidopsis thaliana
tagtaacgtgtgctctaaaggttgctggagctgaggaagaaaaataagaagtagttagtatagtctggatgaaagaagatagcagtatatttgtgctttttgcgtgctctgaaatcattagttgtcatttcagagggatcttcggggacaggtaagactttgcttgctaaggcagtcgctggagaagcaggtgttccattctttagtatctcaggttctgactttgtagaaatgtttgtcggagttggagctagtcgtgttcgctctctttttgaggatgccaaaaaagcagcaccagctatcatctttatcgatgaaattgatgctgttggacgtcaacgtggagtcggtctcggcggaggtaatgacgaacgtgaacaaaccttgaaccaacttttgactgagatggatggttttgagggaaatgaagggatt

SEQ ID NO: 25290 - DNA, 833 bp, Arabidopsis thaliana columbia
tcgactctagaagagttcgacgcccggggatcgtgggatcagtgttttgtcagtaaatggtgcggttgctaacgttacgattctacctcacggttcaagccgcaggtcatgacgtttaaggtatatatttatatgataaacttggtcttgcagtgcaatcttataacctaatggttcatgtattggaaggatgcattataaagttggtctataaatagaattaataagttgtcttacatggataagaaaatgataacaacttggtgtaggaggagtatgagatagtatcgctgaccaataatacaatggcgatatctgagagcggaggagtgaaaaataagaccggagggtggcggattacgattggtggagctgctggtggacgtgtccatggtggtgctttggctgggagtctcattgcagcaagtccagtccaagtaagaacacaaagcatcttctttgtttatgcatatggttcaatgtttgaagctatatcttataattcctttttataggttgtgattggaagtttctggccgttgatcacaaattcgcgtcagaagaggaagtatgtgtccaaagctatggttgctccatccataacaccaaacttggtggcttcctcatccacaagaccggtccaacaaccagagatggttggcccttctcactctcagaagaggaacagcgagtccaacagaactatggttgttctttcagccacaccaccaaacacattggcttcctcatccacaggaccggtccaacaaccagagatggttggcccttctcactctcagaagaggaacagtgagtcaacaaaactatggttg

SEQ ID NO: 25291 - DNA, 919 bp, Arabidopsis thaliana
tcagcaataacatcaccatgagaattccaatcataaactttgcatcttgtaactgactcatctaatattgtaccctataagtgattcacaaatattagcatatgaaatttagcttgcaagtattgagaataaagtaagtaaactcctgagacctgggttacctttgaataagaacttctaattggagattttgataagttgtccaaaataactttatccgcttgccaatgaattttgagtcccaaagcttccccaagtgtgaacatggttggggtaggcctccatagtggcgaatcactatcaattatagatgtgactacaacagctgctgcgttaggaccaagtctaatgcgaccaatcaggtacaaaggatcagacgagcagaattctccttcatcgacaacaacatcttttgatgaaccccattctagcagctgacacctaacccctctgctaacatcacttacctcttttctagctaagtcagtgaccaatttttcaagtctagaatatggctaagcaattcggcttgtgtttcttctagcttttgcacgtgtgtgtctctagcctgaaggaatgctagtttggtagccgtaatccctctgcctaaacccctaactctcctaggtttatccttccccaacacttgactaactctcccagttttatcctccaatggaagcatccatattttcacattcagcaggctggttaggttctccagctcaagtggaagcatccatattcccacagtcagcaggctggtcagtttctacacctccaatagaatcatcaaaagtctcacggtcagcaggctgatcaggttcttcacaattttccgcctctagctcatcttctacatgagcttcaccattttctgcctctagctcatcttttgcatcagcttcaccattttttg

SEQ ID NO: 25292 - DNA, 594 bp, Arabidopsis thaliana columbia
ttttcgctggctaatgtggaaattcgaccatagacgtccagcgtccaaaaaagatgttcaaatggatgtctgatctacgaatctagagatttgtagacttgaccaagagattgaatatggtagattgttgcttaaaccctgttgtgctatgtttcatcaatgagagttgagatcaggaagtggtagagttataggggtctctgtcacgagagtggattgacccagtttttgaatctatcgtctggggtatctgcctttcacatgttagccacctgatgaaccctaaagttgcccttatcaatgaatccatccttaggacttctattcttcttagatttatttgttcccgccccctgattgcacttttatttacctgttatttgtatccactgttgattgcattttagttcttaaatttgttgcttgttggttctactcgacccaatgatcgagtagggcttataaagttctcattttcgttgtttgaatcctgacctagaattgttactagaaaccaaccatctttataatctggcttgacttagttgcttctgtacacatcttgattgctagcaataacagtggactggattg

SEQ ID NO: 25293 - DNA, 785 bp, Arabidopsis thaliana
taccatttagtgttgtttctgttttggatcttgtcagaatggtgtccttaaacacgttttgtgtgtaaatatgtacaggtcgaagtcaaaccagtatcccaacacgtcactagtccaagtcgagggagttaacaccactgaggaagtgtcatggtacaaaggtaaaaggatggcttacatctacaaagccaagaccaagaagaacggtagtcactaccgatgcatttggggcaaagtcacaaggcctcacggtaacagtggcgttgttcgagccaaattcacatcaaacttgcctcctaaatcaatggtaatccaaatcatttcagttatatatgtttgaaattgttgttatctctttcctagctcttctaatacagttggttgattgtttttttgcagggatctcgagttcgagtgtttatgtatccgagtaacatttaaagcagtgtgtactcgtcatcaagtggtttattatctgcaagcctttgtttatggaccttgtttattatttgactctttatcctgaaccttttttggagttaacaattttggttaaaatgagcctttttgataagtcgagttcacaagtttacccaaattttgcaaagcctgagcttactttgtgttgaactattgacggttacagaatgaaagtgagacacgtggctttcgaagctacacgtgtctgtaataaattggtaccattgggaatagcaattatctaatttctctcggctctttcatatttattgaatggtctttgaagaagaagaaggcgacgacac

SEQ ID NO: 25294 - DNA, 372 bp, Arabidopsis thaliana
tgaagtcatcgattccgaccttgaaggatggaaaccattttcttcagggaaatggaaaccattctggtctaatccgttttgaaggcacgcgaatataaaactctcacctggaggaaactactcagcgacatctttaaactgttacagaagcaaaatatcgaaaattaaccagttaagttagcttgtgggagtaaaatccagttttcattcaagcttcagtgtagttcaaacccgattatacctgcgctatgagcgacttgattgcctctttcgcggctcttgatttggcaggttcctcctctgctgatgctaaggcttcctgagtcttctttacagagttctgaagcgtctcttcttggaattcgcattttt

SEQ ID NO: 25295 - DNA, 508 bp, Arabidopsis thaliana
aaacaaacatgaaaaccacgaacacgaaacaaatatttatcctcttcacttcctctgtgtctcacgagtagtggtcgtagtagtagtacttggagctgaagaaacatgttctttgtttccttcatcagtgcgaaccctcaaagtgtgcttcaccgcatcagtagctcccatagccatctgtttcacctgctcaccggtctggcccaagatcccactggtcttctccttacctgcttctgcagtctctttggtatattcagctgcatcgtgtgccttgttcttgattgcttctccagtttccgacatgtagcttcctgtcttgtctttggactcttgagctctctcttgagtcgtttgtgcagcttgagacgtcttgtctttagctgactgagctgtttcatgagccttttgttgggctgactgggctgtctcttgagttttgtccttagctgcttgtgttttgtccccatcgttccatagcttcccagtttcacctacagtcaagatt

SEQ ID NO: 25296 - DNA, 570 bp, Arabidopsis thaliana
actccgcacattcttgcatcgatctttgtcctgggaagaaaggaatgcaattgttaccaacgtcaagaacacctttttcaagtaaacccctacaccaaggccctacgtgcgtgaaatagttatccgacaacgacaagttgacaagattgtcccggagcagcatgcatactgcctccgggacggcaccaaacaatagattcccagcaaagttgagctgctctactttctctaaacacattagggaaagcggcaaaggacccgtgagcttgtttccaccgatatcgatcactgatgctccggtgaggaacccgatctcgtgagggatacaaccctgtaaaatcgttattgaggaagagtacttcggttaaagttgacattgatcttaagatgcttcttgggagaggaccgttgaacttgttgtttgctaaagtcaagaagagaatgtgtgttgtacatcaccaggtatctccgggaggctcgcagtgaagccgttgtcattgatgaagagaacttcgaggttctgaccgaggatttgtggtgggattgaacagagaaagagttgaactggat

SEQ ID NO: 25297 - DNA, 552 bp, Arabidopsis thaliana
gtttagagagagtgatgatgatgataaaggagtaggactgtctagtgttgttattagggaggagactgttgtatgtgctgtggaagaaggtttgtcggatttttccttggagaagcgagacgatttaccgggaatgttgaagtggctggctttggttgcaacatctcctcatgatcctgccattggagttataccgcatagttcaaaatggaagcagtataacggtaacaagtgttggctccaagtggctagagcaaaaaactctttgctggttcaaagagacaatgctgaactcagatatagatatcatccatttcgggtaatgccttgagaacagctttattataatctttctttctatctaagtatgctttctttttctacctgtgagacagtttaactcatggtaaactcatgcagggtcccaaaatatacatcatccgtctatgtatgaagatgatcgaaagtcgatagggaggttaagatacagcataagacctccaaatttatccaaacagctgttcgagctcgtgttgcaatggaagcagtttg

SEQ ID NO: 25298 - DNA, 621 bp, Arabidopsis thaliana
taattaacacttatgttatggatcctgtaaataatgaatgcattaacttttttcaattaaaaataaaaacgaaatttaatcaaagtatatcatagagaataatatatagtggattctgataacttaatttgctaaaaaagttgtatatatgtagaccggcctcaattacttaggaatatatgtttattaaaccataaatggataaacagactggacgaacttatttcctcaaaccaaccgtacgtgggaatagtctctccggcgaggagtttacggtgtcggttagtggccggcgccagagctggtgggagaatgtttggcctggtcgctatcaacaatcgttgagcttgaacatatcctcttcacgtcatatctatttatatcgaaattggttacagcgtttaggcctctgaatttaattgccgcgatatcgtacgcctccgctgcttcttcttgcgtgccttcatcatagttacaaaatgtgatatttaataattcaaaggctatgatataattccatatgtatagaagtggtcatactaaatgtccaaggtcaagccttgtttcacaactcttcaattctggttgcaccttcatgttgatgatgctacagagtatcat

SEQ ID NO: 25299 - DNA, 490 bp, Arabidopsis thaliana
gcggccttaaggagttaaccaaaagggcggccgacgaagttaatgccttgaacgttatcgagctcggggacgatgatctgaacatgtccccagatcagctcggtttttcaaggcaaacctcccaagttgctccagtggcggactagcacggctcaaatgtcgacctcgttatcggaagtgattcggcggactattttgaaatattgatcgtggacccaattttcggggcgatctcaaagctcttatttaaccgtggacccactttcggggcggtttttgattttaacttctattttcgatgattttctatcttgcctgtttccgaagcagaatagttcttttttccatttatgagctttgtcattttttggaaaaagaaattggaggaagtcacccgtaattaagtaaattcccattttctcagttttggagaaaatgggaacattaatgtcttggaaaaggagaatgagaattgccagatcgcatttag

SEQ ID NO: 25300 - DNA, 532 bp, Arabidopsis thaliana
tgacgttatttacacagatcataatgggaagatcaacaatctgagctctcacatgaagaagctagatgttcaagtagctcaaaatgctcaatctatcaaaagacaagagggttttcttcctggcaccactgatactaatccaaggaagacctgtacacgatcatggtcagagctaaagaggaaagctggaaagaatggaatgctaaggacgagttagatcttgctgttgtagagttggtatcgacttacgcacatcagtgtcgatcgatacaagtgataataggtttttaagatcaattaatcctaaagcagtatcatgtcgttgtagtattgaaggttgtcaatccaaatgggtgtgatgctaacaatcaagatgtgatcagaagtcaccaagtaaagccaagtaagaagatgctgtaagaagaaagaattgtagaaattaagcatcagatgacaagatgctgtaaacaacagtagagtaaacaaagaatttaatcagataaagaattcccgaggatggggtaattgagta

SEQ ID NO: 25301 - DNA, 536 bp, Arabidopsis thaliana
ttctgatcgcttttggagtcccgatcacttctgatggtatcgagccgcgagcaatggatatcgagcatctaggtcactgcgaattcttggagtttgcaatggttgacgacttgcacaggttcaggtttgagcattctacagacaagagagctagcatccttctccccagccttgaggttacacggataatcgagggagataacattgatttttggcctgaggttggacgcctctactatgagaacgctccgccattggatgaggatgatcttctagaagaagctgcttcggatgggatggatgaagacagaggagtggagttcgacactagcatgtatcactttggtgaacatgtacctccagcgagggagagcaagagcttgactgactgcagaagtggtgcaagaagcaggacaaactgctcgccaagtgtttcaagactatcaagcttctaacagataagctgagttgttcctcctccacactgctattccacagggacacctcctctggagatgccacgaggagatttgatg

SEQ ID NO: 25302 - DNA, 518 bp, Arabidopsis thaliana
ttgttctgcatgtaacttcagcttggataagcgttggtttttaaacccaccagcacaatctcttatggatttgaagattcatgctcaccaactcatctttcgcccaagacttgattcttttacatgtaatgcttgattatatatgtgttcaatgtgatttcatgatacatcaaaagtgtctttcccttccacgcctcattaacatcaatcgacatgatcaccgtgtttcacgcacttctgttcttggtgttgtgaattctgtatgtggagtatgtcatcggaaggtggattggacttggggtgggtattcttgtcagaagtgtcctcactatgtcgttcattcaatatgtgctactagaaaagatgtgtggaatgggaaagaactcgaaggaataccagaagagacagaagatatagagccatatgtggtaatagatgacaacacaatacaatatttcagccacaaagagcattacctgagattccacgttaatgatcctctttgggaggaaacaagt

SEQ ID NO: 25303 - DNA, 507 bp, Arabidopsis thaliana
ctagctttggaaaaaggtttcgaagttcccttacactgcaccttatactcaatggtgtctcctacacgctgtagtggtatcaaggtcacatgagcatcttttgtgtctccatcctagacttccttgacatcactcaactcaatgcaatccttacacattcagcaccagactcatcttttgtgtctacagaaaatgcatgaccttcaatggtgggatttttctttgtccccttcatgtcaaactttaaagcatagtctccaatctgcaggttaattgtgtttcttctcacatcaattatagctccagcagtgtttaggaatggcctaccaagaatgagaggatcatgtggttccttatcaagttcaaggacaacaaaatcagtggggatgtaaaaatttccaactctaacatgcacattctccgccaaaccgactggaatcatagagatccttgacggcttgcaattggtgatacctaggcgttttgacacataaagaggtacaaatt

SEQ ID NO: 25304 - DNA, 518 bp, Arabidopsis thaliana
taattcacaggaccacgatgagcttgccatgagagtcgttccttgaaaggctttgaatcatctgcagtagtcgtattgggctgattcattttccaggccctaattttgccatccttgtggccggtccacacaagcctattgccgtggtcaaccaataaacataaggcaggcgaggtcggaacagattcatgaaacggggctgtatcctcatcccctcgccgtacctgcccgccaaggccacaaccgacctcgtatgcttcctccaagttccagaacctcacgccgttctcttgtcccgcccatagctgactttctgtgcaagcaatgtttctcagaaactttcccgtctgtgtctctcttaatggatgcggtcggagctcgagacatggaggccgtccgggattcaccgcggcacgcaccggcaccttgaatacgtcaaggccacctcctgcgccaatgaattctggaagggactcgatatcatcctccctgccgccgtcaattccaccgccctgtga

SEQ ID NO: 25305 - DNA, 550 bp, Arabidopsis thaliana columbia
tgtaaagttaacattgtttattgtgaattttacagtttaggagcgttcttgggtcacaacttgatgagctgatggaaaattcatcagaggttacagagatttcagaagagattgatgaaccggtgatgaagaaacgacataggagaaaagggagtccacatagagctccattcttctagggttttgtttttctttctagggttttaattccaaacgttatgatttttgatttttttagggttctaggaggcttcgtataactgagattttagacatctacatatacatttttgcagtcattttgtgaaataaatcatgtagttaagacttatttacaatggctgtcagtggattttaattttcccaaaatctctacacagtaactacacgattagttactaaaataaaacttccaaaatatttaatattatttaattattacgaaattatcatttttgatattatttttctgcatgactatgataattcgattataatcatcaacaacatagatatttgatagcattttattgggtgaacgacatgtgtg

SEQ ID NO: 25306 - DNA, 379 bp, Arabidopsis thaliana
attgtagttgaggaatttggtttgggcaacttctaagcacgatgtctaccttatgtcacaatatttggtgagccactattctactttgacatccggaaagcatgatgttctcaatgttcaaggtcatgtttccccatctgaggttagtttcttcctgaatgatataagattcctctataaatacctacatcagtttaatggttgttgtctttttcttgtgtgggtgcagaaacatcctggaagtttgttgaagggattaacaaggactcaattagtaaaattggaagttgaagattaatttttaattgccggtggatttcaaggagaacttatatgcaaggtaagctccaaaagtttaacaacaaggaattttaagttt

SEQ ID NO: 25307 - DNA, 733 bp, Arabidopsis thaliana
gtccacaaagctgtggagtctccagtgccaaggattttccccagttgggatttaatgagatctcttccaatacaaattcctctccatccatgggatgatgagttaggagctgtactatctaggaagtggcaggcgtggctatacttgcctagtagtactcgtgcaaggagactatcaggtttattgagtatccttcagctaatattagctggaagagcatcattaaacttctggatgtccctgaatccaaggcctccattctgtgtggatctggtgagtttcttccaagaaatccaagacattttcctctcttcagtatttgcatcccaccaaaacctcgtgagagctgactgattccactaagttttccactttcttgagctctgttacataatccggatagaacctcaatacatagaatgaaaatgtagggagatagtgggtcaccttgttggattccacgttgcggtttgacaaaacctagtgctgatccatttagtagataagagtaagagacaatttggatgcattgcatgatccactgagtccattttgagtgaaaaccgagtctctccaggacaacctgtataaaatcctattcaattctgtcataagcctggctcatatcagttttcacagccatgtagcatctgagttgagctcctgaagtttttagatagtgtaacgtctcgtgggtgatcagcacgttgtcattgatggctctgttaggtac

SEQ ID NO: 25308 - DNA, 432 bp, Arabidopsis thaliana
tattgctggagggatttacaaagactcaagtgagtacactcgcagtgagagataaatttttagttgccggtggatttcaaggagaacttatatgcaaggtaagctctagagttttacaatcatggatttttagtttttcacacaacaattacatgcattctaatcaaggatgttcatcttgttccaaattgattttattttcagcatcttgatagacctggtgtgagcttttgtccacgtactacttatgatgataatgctatagccaatgctattgagattcatagcaagcccaggtatttgcatgtcctttgcttgaggttgtatttgccaacttgtctcttctaactgattataggaagcctgtccgcctgcagtggggcacttcattttactgcgtcgaataatgattgtggagtcagagattttgat

SEQ ID NO: 25309 - DNA, 722 bp, Arabidopsis thaliana
ctaaagtcaccggcaaataaccttttaagcgtaattttaatgatgatgagcctttaccaatttcatggcggtgaaaaccatccacgatttccatggcatttttatccgtatgtgtgaccacaatgggttgggtaaaaccatctatttcaatggatttttgcagcagttttttttcgggtggtgccacgttgtttgggttgtaatcattaggcataagttggctgtttttaacccacagaacgcaatccactggctcttcacgaaaggggctaacctgatggatcgccatgcggatttcattaatcgctttgatgcgatcatcttccggcaagctggcgagaaattgcgttaaatcctgcgttaatcgttgttgcatagtatcccccattcctgacgttttccttttatccgttcgttataacgctgatagttcttcgattttgtggggctaaatgataatgcccgacaccagtaatcgttattgagtaaaactttgcatatccgccgccagatggggatatctttcgcgccaatgtccccttgctgggtttgtggaactcgatgccttttttctgataccagtgcaaataaatggcgattctattgcggtaatgctcagctgttttttccggcatgctattgagcagcaataatgcatattcttgccagtctaaatggtctggcttgaggattttccgatgcccatagacatgattgtcatg

SEQ ID NO: 25310 - DNA, 655 bp, Arabidopsis thaliana
gctaacctaacaggcattacgaatcaacaagttaaagccaaaacgctccctgcaaccaataccttggtacagggtcacgaatctctggaattagtggttcacacatttcattgaacaccttttgggcgcggaaatgtctgggctcaaattccagttgatcagaaacaactgatccagaagggatctatcaatcaatactcaatcacctagcatactgagaattctacactactctaacccatcctcagaaacctattcactactcagacatcataacagaaagcataaacgttgaacaggttgaagacatgataacaacagtgtaacagtagtgtgataacagaatgaacaacagtaaacgaaaatcaagaaccaaagctgaatactgaatagataaagagaaatccggataacaaaaagtctagagcacaaggtctgcggaaataaaaactaggtaaaaactgcttgtctgcgaaaatgagaagtacatgctacttatagccaaatatcccgaaaccctaatactcaaaacgacgaagtatttggacgggttaagaactgtactagcccaggtggcggtgtgagaggtcgagtgaatagctggagtcttctttcttcattgtgctcgagtgtctggttgagtgcggaatgaaga

SEQ ID NO: 25311 - DNA, 1044 bp, Arabidopsis thaliana
ctaaaaacaagcacatatcacatctaaccaagaggagaatccgaaaaaataaacctggctttgctgcaacccatctccggatccttctgcaatgtacataaataatggctaatgaacaaatactccaaaaaatccggtgatgcttcgaacaaaaactatcctacatagcacccgagttcacctacgcttgaaccgcacaaatcccctctcgtgtgatcatgaactcgcaagaactcccaggcaaataaggtgaaaacactatgtcaagccgtctcttagcacttctggacacagaacttgaacaattctcgtccttttcacttctatctttaacaatactaccatcacttcgtgaaataaaaaatctggaattcacacaattagcccaagccaagcctaaagaaggaacaactcgtcttccagacgaatacaaatacctcaaattcccaatcctcagcccacttaacccatcagaagtttcaaccaaatccgtaacctgattcgtaatcacaatagccaaatcaaacttgctagccaactgcttcaatttcccagatatcttgaaaaacaaagaagatctcttcttaagatcagacggagtattatcaaactccgatctaaacaatgccgctacagaatcaagcacaatcaacttcaacggaaacctagttttcgaattcccaacaaacccatctatcctaggcattatgtcgaacaggtggtctacagaatggacattttgtacaaacacatgatcacaaggattatcattgtaattcgcgtaaatactagggtttgattgatgaaacgtgtgcgagacgtgatggagacgacgaaacggaaatgggaactctgaatggagataaagagaagaactgttgagtccgctgtgtgaaatcggaagttgggtacagagcgaaacgtgaaggcagagctgtgtctttccgcagccactctccgcaacgatttcggttaaagaatcgcaggaaattccgcgcgaagacatccgtcgaggattcacagcctgtggttagttacgattcg

SEQ ID NO: 25312 - DNA, 576 bp, Arabidopsis thaliana columbia
cctagatcttgactaaaataaaccacataaaccctatatctttaatagaaaagacctaaccttgtgaagaaatgacgtcgtttgccggaaaaatctcgtcgccggaaaatacttgacgccgctaaagaacgccgtcgtcttctttagcagagggttttctcgaattttcaatttatcacacaagtaaatgattaaatatagatgaaaatcctcaaaacccaccaaaatctaacttgagttgataaatccagacatttattccttaagttgatatacagtatgccagctggaattatgcggtatgccagctggaattttacacatagttgtacagctgaactatcatacccatagatgtacttttcagtgttttcatatattgcagctgaactttaatgtacatacttgataactatgtcgaacccaacctaagtgtgagttattgtgcatattcagagttttggcagaatcatatttgatatacgaccatattcacgtgattcgcttcatttgaggtgatctcatagtgactactccttatcatataagaggttgtttatgtgacacataccatga

SEQ ID NO: 25313 - DNA, 577 bp, Arabidopsis thaliana
gatgtttatgttaaggttggtaactctattatccctgctgatttcgtggtcatggactatgagaaggaacccaaggatcctcttatccttggaagagcggttctagctacagctggtgttaggtttgatgtgaagagaggtagaatctatctaaaggtttgtgatttggagatggagtttggcatggatggttcagagcttactaagcctatcagtagtattgcctccagcacagacacacctcctcagaccgcccagaatcccaccacaaagccacacacaacgctccaatcagctttgctcgccaatgagagttgtagagcacgatgtcgattcacaccacactcctgtcgatcgacaccctcgggattcacaaacagtcgtttctgcacaatctcttcagcccacaccaattgaggacctatgtgataagttctcttctatctcttcttcgaagtctgcttcactagataacaagtctagagttcttcgaaagcttgtttctcctgttgttcttgcaggtgacgagaagagtgtcgatcgacacacactaagtgtcgattaacacacactgagt

SEQ ID NO: 25314 - DNA, 652 bp, Arabidopsis thaliana
cgtcaaaatctgcctccctgattgttcatttttcctatgtaacacaaatgttgtgtttcctacatgatgacttcatttttctgtggttatctattatccagataaatttggagctgctatgactctcgtgaaatctgacattggtggcaacataacggtaaaaaatgcattgtctgcccctttgataatcgaatagcacaaatctattttacattcacagtacaaactactgacaaaaatgcattgtctgccccttttctcgctcttcttagattgtaatgtgtacctctgatggcggagaataggctagtgaaaatgtcctgtagactgtagtagtgatatgacctctctgtattggattattgtcttcttacaatataactttattggtccgtctcttgtgtagaggttggagaagaactacttatctgatcccgacaagttcaagtacttgtacacctttgttcaagtcgaaattgagtctaagatagcaaaaggatcgtctagctgtacaaacggtcttctctggttaaccaggtaaacgatgacaacatgtcaacaatacacacctttatttcgaagagagcagcttctcgataccgatatatatcacttatgagtgaatctttcagagcaatgggattcttagtgg

SEQ ID NO: 25315 - DNA, 413 bp, Arabidopsis thaliana columbia
tcatggtcaaaaataacctttcacaatctgtaaaactccatcttgagatttaaaccaacaccctttgacttctaatgttcccaatgatattagatttcttgtcatattaggcatgtatcatgatatagctcaaattgccttaagcttactccctcaaaaaagagatcgtcgttaccacttaagggtcgaatttcattgagctctcgatgttcacacaatagacttatgatgattgataataagtttttaagtcaattgtcctaaaacaccaatcatgtcgttgtagtattttaggttgtcaatccaaatgggtgtgatgctaacaatcaagatgtgatcagaagtcactaagtcaagccaagcaataacaggttttggtgtgttctaccagtcctaagtgaacatgcagaaaa

SEQ ID NO: 25316 - DNA, 520 bp, Arabidopsis thaliana
agctgagacccaacgctcagtagctcgacgcaatgagaggagagctgagattgctagaggaaagagagcaatgaccatcagatatgagttgatcgacgaagatattgacgtcaagtatgagcccgagtcatggcacagagagacgaagctgttgaacaggcctgatgaagttacagtggaggagtacataagacttttcgatctaaacgacttctggggaacgaggtacctcagttatgagactttagcccagctgaggctaccggaggacgtacatagcttccaagaaggaaacaatagagtttctctccactctacaagtggagatgtatcagggacttacatcagatgagctggagagtgaagggttggagttgttgaccttttcagtgaacgagcatcgttaccagctatctatcaagagcttggtaggattgaatggttccccagtgggaagggaactaccccaagttcgagagggaagagttgaaggatttgtggttaacttcgggaacgatat

SEQ ID NO: 25317 - DNA, 465 bp, Arabidopsis thaliana
catcaaaggtactgtaagcctgaatgttctcagaatcatggtcttcagcctttttattggaagcgattagatggcttatataagaatttgcgatctggtgactgtggcccggtggcaatgtagttccttgagattcaagcaagtgataatcatctctgctttttgtaatattaaccatcttaaccatctctgctttttgtaatattaaccatcttaactttccttttgaatattatcactctgtaaactattttttgaacgtgtgtgttctattttgctttgttgaatagtaaacataatctaattgttgttgtatgaattatgtctatccttttttttcattactcccaaaaggaacaatctctattttatatgttatacatggatttaatgtgatatgcggtatattattgtgttccatccatatttttatatccataaggtatacgatatgtggattattat

SEQ ID NO: 25318 - DNA, 535 bp, Arabidopsis thaliana
cgtctccccggccgatcctactccgagaactcgtctggatttcgcctcgatagacgtctcacctcatatcaaccggcagtcgcctttttacaggcacctgtgaacgctctcgtcgaaaacctgacaacaggaaacgaaacaagcacaacgcctgccttcccaaggctaccggtcccacctttactaccaatggggtgttcgcccctaggtacacgtggactagaaaccaaacaaccgcatccaattctcgaattcccgggaactcaacgcaataacggacctctatcgctaatccgccatccattcctcggataccaggaagcgacctccttaacagtccccaagcaccggtcgacccgcgtaacgtcgcgaacatggctcaaatgcattcgcgaatgcacctagcagtgagcgatgctcccgacatagatcgcatgatcgaagaaaccaggcgcaccccgttcacggataggatcgctcgttttcgctccgagacgtcgggagatctgtttctcggagtacgacggaacgagcg

SEQ ID NO: 25319 - DNA, 427 bp, Arabidopsis thaliana
tgatattagatttccagatggttattcttcagatttggctagttgtgtagatccggataatgaaaagttttcacgcatgaagagtcatgattgtcatgtatttatggagcgactacttccatttatctttgctgaactccttgaccagaatgtccaccttgcactaccaggtacgatacttactcacttttgattccaacattttattaatctaatcatttaacttgcacatatattctaggaattggagcacttttccgtgatctatgttcgagaactttactagacaagtcgcgttcaatcatctataacttggaaaagatctttccaccatcatgttttgatgttatggaacacatacctatccatctcccatacgaagctgaattgggtggcctgtccaatataggttgatcatttgagaggt

SEQ ID NO: 25320 - DNA, 659 bp, Arabidopsis thaliana
ccacctcgtagaaaaccggcatgatcatctggcttactttctttatctccaccaactcattcaaacaccagcttgaagatgcataggtccgcgacaacactacaaccgcaatcctagattctctgatagctcgtacaagctcagaactgatcatttggcttctcttgatatcattatctatgaaagtacggattcccttacgccggaactccttgagaaggtggctgagaaaggttctgcggacatctttgccgctgaagcttggaaacacatggtgtctccaattgcaagactgcaatgacaaagatgaagattcttccatgagagaagctgaaaagtaagtatagcttataatccttctttgtttttttgtaaagttaagttaccacacagcttgagagatgatgatacatatctggacttttgattggcttgtcctcttcggatttgggtcaacacttgagaatcgctttgcgcgtccagaaggttgactttttgccttatgtttgcttctaccgacacgagttttagttttagtagtggaatcacaacagcattttagaaatgaaatccaacaaaagagattagtttgaatcaaagtctaatcagatatctgatcactagtttatagctaagccacatcaagtaacagcttctca

SEQ ID NO: 25321 - DNA, 957 bp, Arabidopsis thaliana
aaatattaatattaatattgtacagatagattactactagaattttcacattaatgcctacggtatccaacagcaagagactatattcatttaccttagcatgaaaatcttcattccagcatattttcttgccattgtcgactgaaccgtacaaaagcgcatctgatttatccccttgaaggattcccggtagaacactctaaaacacattgcaaagatactattaaaatgaacacaagcaagacacagacaatctcaagaataaggacttggaagttccagtatttgaacaaacctgagcaacaaccctatggcctctgtaatcaataatggccattgccagattatatagccctgggacatcagcttcttgatataattttgtgcctttcaaatcattgtttgcagaggcatacgtagcctgctcattctcaacaagtggcgcctcattacagttgttatgctcttcattatcgcaggttccttctgtgcatgaaaccttttcagatgaggacaccttctccgtcatttgattagatggacgtttcttggagagctgttcaatgtcggcatcaacagcaaaactgaaaaagatgttgttgtgcacatacctacaacagtggaagaatagcaagtgttcagaattgaaaaactcaatgcataaacacaaatatgtgaacatctagatcctctgtcatttgtccacgttataaaacacaaagggagttactaaactgccaaaatttcatgaacacaattagctagatcaaataaaataaacgaattggcacggagaatcaaaaataagggccaaacaattcacactgacatgtgcaaacactctggatcagttgggtttatgggtggtatacaccggctgattactccaatagctccgttaagtgctgcatcgacaaaatcagaagacactttgtaaagtgccctgtctcgtgctag

SEQ ID NO: 25322 - DNA, 469 bp, Arabidopsis thaliana
aatgtttttgctcttccatggacattcaggaaagcgtggatggagagatacaagtcagttgcagcgacgaactggacgagattgaagcagtgatgccactaatggaagttcttaacctgattgtctgtgcgatctcggagcctctctatagttcattttcctcttgataagtgtgaggagtcaagctagaggctttaaacaagctcacttgggaggaagtcccatgactatctctgtaaataaaaaatttcttttcttgttatttttgatttgtcttagttgtgtttgtagttctcaggaacaagggagcaacgtggagatagagtagaaaaacttttaaatcatcattttactcgaccaacagaagctacagagtcttacaaggagtttatctagtttacaatagatttcctgcagttttcccagtcaacagagtgtggaccacgcactgaggataggatagagagag

SEQ ID NO: 25323 - DNA, 617 bp, Arabidopsis thaliana
  unsure (1)..(617): unsure at all n locations
tgagaccctcccatgatgaaatcgatgcgtttcggggagaggtgctcggttgcgcttctgcagaatttcaagagccgtaatggaaacctcatgtttttcttatgcggggcggggggaggtgtggtgactgaccacctagatcgagttctgcaaagactaggtctatgcgttctcctctagaaggtgggggagagtcacttccctccggtgttcgttcccgtttcttttgcttgggagtttgctcctcctcctgttcgtcgggaggaggggtttcaactttggggtttgaaccttttttagtctttcccccagctgcgattaattttttaacggcgcgacactcctcggtggaatatcctcttttcttgtggtacttgcaatattttccgaggtcaagttctggactctcgttctcagctgcctcgtctattgcgaataaggtatgctacccctgcgtttggcttcctttttgaagggcttcttaattgcaaggggagcgttttgcgttttagattctctgaatcgtaaggccagcacactaagctcctcttcggctttggcgaagtggagagctttgtgaagggcatcgtctanagagactggttgctaacagtgag

SEQ ID NO: 25324 - DNA, 1241 bp, Arabidopsis thaliana
tttgccatcaacttcatcactgccagccctgtgaggctagctcctagtggcaccctcttcaaaggtaaatgacttcagtcttttatctggtgtcatagagaattttaactgttcatcatgctatcgggatcattaccgatcttgttctgttctattacttacttgttctggtgttttgatgtaagcagactctgtctttacctcctgcttctcccgatgaatcccagtccccgtcaacccctaatgtagctcaaaaggtttgttctctctcaaaccagaggttgttgattagaaacaaaatttcgttatacagagttctgacatttgttttggacagtcacggggcctacttcagcacactcaatctatgtctggtttgaaggtaaagatttttttatctcttccatatcccttaagttttgagcatcaatatgcgtcaaacttaacctaatacaattgtctattcattcggttcttaggacataaatgaaagctctagtagccacaacacgtcttcaaatggaatatattttgggggaaacggtgcatcaggatcgagttcgggcgtgcttggtaggttctcaatagcaagaataatgaggactcgtactgtggtcaacacagtgtctactaactgaagagagagtttgttttatctaattattaggattaacaaagaagggggcatgttgtatctagtagagtatttgaatagattttgcttcttatttttttttttgacaatgctataaatggtgcataatttttttaagaatgcagcttatatttgaatgggtttataggtcacaattagcagtttgttactgtttttttcgaatacaagaggtcgacgatagtttctttgattaggtatgttctgttgaaggagcttttggataatgagaagaggttaaaagttaacttgcaggaacatgagcccaaaatcttgctggaaacaactttcaacatgtctaatggctactatatctcttgctactataatggtcttgtatcgtcccagttactttgcttgttttaaagcataatcacatcataactctcacatttaacttaataaaagatgagatgatgtttctaaaaaaaaaaaagaaaagaagatgagatgataatgtcatagccaaatggaccagccttttattcaatacaaaaaaaagaaggaaaagtagagacggccatacaaaaccatcgtcgacctctctgtataaactgaattacgaagg

SEQ ID NO: 25325 - DNA, 472 bp, Arabidopsis thaliana columbia
ttctaaataaattatatataagataaaatattcttgtaagaaaaaatcatatatttatgcttgatttaggtaaagatgtttaggaaattagttcaggtaaataacaaatatggttagtttagagatattatgtatataaatttggtaattaaattaataatagtagagatatatgtcgaaacaggtgctttaaatgaattatgaggtgtgcaaattgtcctttaaccagtttaaatcggcctgaagagcttccttaaccgggctataccaccgttattcccgccatttaactcttctctgaaacttttttgggaaacacaaaaaaaaatgagaataaaaaagtgggatctcatagagactgattcacttctgaaacggagatggctttgtcgacgcgctaaaaccctaatggatttttttcaacctgccaaacgtctcaaagcttccccttcttcttcctcctcttatcccg

SEQ ID NO: 25326 - DNA, 826 bp, Arabidopsis thaliana
gaatataattataaaattaaaatattattattttttgattttgtagaaactttcacgatcctaagcgttggagttgctcttatgtctctaaattaataagttttaggtctctctatatacgaaagctacgatttttattggcatctataccaatatacatattttcaatttcaaaaacatttatattacgtcaactcttacaataatgacgtaggcttctagaacaataaatataaggatcaaataaataatttacatagaatgtaaattaattcctctcatttctgtgttttgtcaattctcttgtacaatacacataacaaccaaataaagaacatataacccaccaaaaagataaaatttggaattttgtttttttctcaatctatcaaaaaggaaacttttgaaatttggagatgaataataattattatctcaaacaacgattcttttgcctttgaccttagaagccattcttctctctttgttaatatcgtttcttctccttgtggttgagtcaggtgctccaatgggagccaaagggcctgaccaagtttgaaatggctctttggagtatgatgatgtgaatgagtttgtgctatacggtatctctgatggatccagtcgccttgaagatcccacctgaaaaccgagtgacccgtcttgatgcggtggaggaaacttctcgctcttgctctttgcattcgcgtgtgtgatcatacgcatcctctgttttaagagaacaagttcaaagtactcaagacattaaccaatcaaagattcacttctttttttgttttaaattcttacatcaatgttagactgg

SEQ ID NO: 25327 - DNA, 503 bp, Arabidopsis thaliana columbia
cactcgaccaacacagctcgttgcagagtactgggtgtggtcgagtgacaggtcaagtaacaaacagaaaatgtaacagggatactcggctgcacagtctgttgccagacaactgggtggtcgagtaccaggtcgagtaacagtaaagaattgcaggaactaagcaacagatgataagatgcagttaacaacagtagagtaaacattaaaatcaatcaaataaagaattcccgaggatgggtagttgagtagttttgtttcctcagtttacaggtgattgacatgcttaataaattatccctagacaacaagttccttaaccagatctaagttaacctagtcccagactcaatcaccattgacgagagctaacctaataggcattacgaatcaacaagttatagccaaaacgctccctgcaaccaataccttggtacagggccacgaatctctggaattagtggtttagacatttcatcgagcaccttttgggcgcagaaatg

SEQ ID NO: 25328 - DNA, 623 bp, Arabidopsis thaliana
  unsure (1)..(623): unsure at all n locations
acaataacgtcggaaagcagtttcagggaaaaggaatgtcaaatacttgggtttgagatgaaagtttgtattgtgatatacatagagtcaccgagcatctgaccaaagactgcagtgttcttaaaaggcctctcgcagaactatgggtaagcggagatcttttgaaattcaacatggaggatttcgtcaagcaataccatgagtcaagggataattccgaagctcaaaattctaagagaccaagaccggctagcgaagaagaaccaagaagttcaaaaggtaaaatcaacgtaattcttggaggttccaaagtttgccgtgaagaggtagattttcaaggcgcttcaatatcattcgaagaaaaggaaacacaacacctcaaaagacctcacgatgatgctctagtaattacgctggatgtaactaatttcgaggtttcaaaaaatcttgtcgataccggtagttcggtagatctaatcttcctaagcactttggaaaggatggggataaacagggcggatgtagtaggaccgcatctcctttagtagctttcagaagtgagtcagcaatgtctctcggaacaatcanactaccagttttggcgggaaagatgtcgaagattg

SEQ ID NO: 25329 - DNA, 810 bp, Arabidopsis thaliana
tttccttctctttgaaactcaatctcattgtatacatctatgattctgaattgtatctcgttagggtattctttgttgcttattggatttattttgaaaaatctacatattggatgacagtttattgatccatttacttgtttacatggcttttgatgcaggccagatagagaaattgcccaaattggttgaggatatagttcagacatcgataaacacaggtccacgaggtgtgacacgccttgtccaaggtgttcaagcctttgtaggggttggaggagagtggctaaatgatttatctaaggtggctgaaattatctttttgcttatgatgtcaaactatctttgattgctaactactctctcactcgctgcagtctacaagcgcgtctggtggattaccaagtgaattgcagcttggtctactgtctcctctatatttgaggaaactctttgaacgcatgggagctacttacattaagctgggccaggtaaatcatgttgctaaatgtagagcatattgtatcctctgatgatatcatgtaaatatctagaaccatgtgaactgtgtatgtctaaagtaagcttagttatcatattttgttgcttctctatatatttcctattctatccatttaacaatacttgtaatgtatctttgaatttgtagtttatagcatctgcgccaactttgttcccaccagaatatgtcaaagaatttcagaactgctttgacaaagctcctcctgtgccatttgaagaaatccgtaaaatcttgcaagaggagcttgggagacccattgaaagtgt

SEQ ID NO: 25330 - DNA, 948 bp, Arabidopsis thaliana columbia
gtcacttcgtgaagaaaacaacctaactcaagccatcgagtgtaaattcaaacaacataattgctctgttagtggtaagaatcgagctaaaagagtgaaaactaaggaaattgtttctaacctgtaaatcaactgacaaggagttgcagaacctgtccccaccgatccagacaatctgtgtgccctgtggccacaccagcgaaccactgttcctcattttccaaatcttagtaaatggggcggatggagcaacaacggttccatcaattacattcacatcaaggacaaaccgactgtctagtttagggcgagtacacctgagaggtgcacctccattggttgctcgtggcacagggtggctcaaccaaggattaggaaactataccaaaaaaaaaagggtaagaattcctcatagctatcagagaagacacatagaataaacaagaagaaaagtaattataaacttagaagaagagcaatacttgggtaaacggtcctctaaaaggatgcagatgttgaacggatacaggcttatccattcttgtgtaatccccctcgttacccatcaccgaatagcagatggtgcacagatcatagtcttctttactgcacaatattcacaagcgaaacatataagcacaataagttctagcatgtttatagtttctaaagtagtaagtagaaggcatccttacactttcgacttaaatctaggcccagtaattggaagaactccacatccgtcacaacggatgcccttatggaatacacccaatgaagtccagtaatcaccattggtgctctttttggaatgacaaacacgacgaggatgcttgttgaggttaactggatttggacaggagtaattcatggtactgccactaaagggacactcgttgaaattagcacccagtccagacgagtttggtacatgaccagaagtctttg

SEQ ID NO: 25331 - DNA, 2031 bp, Arabidopsis thaliana
taacaattgagttttctcacttgttttgctctttagattgtctttgagttcattcaggtcttgaagaagagcactcttttaagctgtgtgaaacttgcgccgttcctgtgaagaactacttttggcattgcagatttcagagagctgtgatttgtgctatcttaaaaacggacaagttctatgttgtggcggatgagatgagggatgctatctgggttgatgaattttctgaatgcctgtctctggccacggtcagatcagcaggctcgttctgcctcagattctggtggccgccaagagggtttgctctggttcagagactccggccagcacgtctttggtgacttctccatggccgtcgttcaagccaacagcttgctagaggaccagagccagctcgagtctggctctcttagctcccacgactctggtccctttggcacctttgttggcgtctacgacggccacggtgggcctgagacatctcgcttcatcaatgatcatatgttccaccacctcaagagtgagtcgctcaacctatgcttttaactcttgtttggattagctaatctagaaaggaaatatagaagcatttctctaatagcagcactagtccagaaaatggttctagttttgatctctcatcttttatgttatgcacagggtttactgcagagcaacagtgtatgtcatcagaggtgataaaaaaagcgttccaagccactgaagaaggcttcttatccatagttacaaatcaatttcaaactagacctcagatagccacagtgggatcatgctgtcttgtaagtgtcatctgcgatgggaagctatacgtggccaacgcaggggactcacgggccgttctgggacaagtcatgagggtaacaggtgaagctcatgccactcagctctcagcagagcacaacgcatctatagagtcagtgagacgggaacttcaggccctgcatccggatcatccagatattgtggttctgaaacataacgtctggcgagtaaaaggcatcattcaggtatttaataaactagagttggactaaatctgtttttgtatgtcttacaattcctgttgtctttctgagtggctttatgactatactcaggtttcaagatccattggtgatgtgtatttgaaaaggtcagagttcaacagggaaccactgtatgcaaaattccggctgaggtcaccgttcagcaagccattactgagtgcagagccggcgatcacggtgcatacactggagccgcacgatcagttcattatatgtgcatcagatggactgtgggaacatatgagcaaccaagaagcagtagacatagtccagaatcatccgcgaaacgtgagaacacacaccccactctgtttgtactactagactatatataaagaatgcacataataataaggactctttaatggcaggggatagcaaagcggctggtgaaagtagcgctacaagaagcggcaaagaagagagagatgagatactcagacctgaaaaagatagacagaggagtgaggagacatttccacgatgacataacagtgattgttgtcttctttgatacaaacctagtgagcagaggaagtatgttgagaggaccagccgtgtcagtgagaggagcgggtgtgaatctacctcacaacaccctggcgccttgcaccacgcccactcaagctgctgctgctggcgcctcctgactattgaatttttacggtgtccttaaaattctttccaagatccttcctgtaactatatataaatatatatatttgattattattatcattgactgggaaaggatatatcatcatcaagtgggaaaggatatatcataatcaagtggttagttttgtttgttccctttgttagctgtgtactggagaaagaaaggtgacaagaattcttcttcttcttcattaattttcattgcttgctttttaaggtattactgattcagactagagaaactcagcttattctcagaccatggccttacaatacacatggc

SEQ ID NO: 25332 - DNA, 671 bp, Arabidopsis thaliana
tatctctgtaaaacctcgcagagcatctgcacattttcccgcgcactttctcaatgtcgatcaagcttctcgttcttgttttctctcttctgataatcttcacgagacccaaattgatcgccgatcatcacttaactacaagaatctcgccgatttatccttcgatttctacgtttcagccttcgattccgccgtttttacctccatcgccgtcgcgcagagcacaatctccgacggtgaagccgtctttgccatttgtaccggcgttgttcgttttcggagattcctcagtcgatagcggaaccaataactttcttggaaccttagcgagacagatcggcttccctacggtcgcgatttcgatacgcatcaaccaacgggaaggttttgcaatggaagaatcccagttgattatctaggttacaattcttccccagtttctggatattgattatagtcccagttgattcttagaagtgtaagcgaaaatgttgacttcttgtgttcgattctttatacaattgagaggaacaaattcattgaggaaatgttgaatcattcgttttttgttgtccattgaaaatcttgtgaacagctgatcgtttaggcttaccattcgttcctagctatcttggacaaactgggactgttgaagacatgtttcaaggagt

SEQ ID NO: 25333 - DNA, 954 bp, Arabidopsis thaliana
tcaatctcatatcttcggtcctctggagtatctgcaacttttggctcttcgctttcaggttaccacgggaatgcatacgagacattgacaaactctgctcttcttttctctggtctggtcaagatttaaacccgcgtaaagctaaagtatcctgggatgatgtttgtaaacccaagaaagaagggggtttagggttaaggtctttgaaggaggcaaatgacgtttgttgtcttaaagtggtctggaaaattgtctctcatggtaattcgctctgggtcaaatggatagaaaagtttctattaaagaacgaaacattttggtttgtaaaggagaacacaacattgggctcatggatgtggagaaagcttattaaattcagggagaaggcaaaaaacttttgtaaggtcgaagtgaacaaaggtaactgcacttcattctggtatgatgattggtcaaacatgggtcaaatggttgagaaagttggggatcgaggaatgattgatatgggaattcagcggcaaatgacggtggtggaagcatgggataaacgccgacgtcgcaggcatagagctgaaattctaaatcaaatggaagaagcactagaaaaccaaaaacaaggagaagcgacatagatgacaaggttctatggcagggaaaaaacgatgtctacaaagcgagtttctccacaaaagaaacttggcaccatattcgttcaaaggcttctgaggtaaactggtatcgcaaaatctggtttcatcataataccccgaaacaatatttttgcgtctgctcgcagctcgtaatcgtctctctacgggagataaaatgcaccaatggaacaatggcgtctcggtaacatgcattttctgcaacaatgatctagaaacccgggatcatctcttctttgcctgcagctttgtctcacgcatttggaaagacctagcggcaaatata

SEQ ID NO: 25334 - DNA, 517 bp, Arabidopsis thaliana
gagaaagttcgtgagttgtctcactcctcgtgcgacggttgggagctggatggttcttagggaaaaggtcgtatctccagcaaacccgataagtggcgtttttctgccttgtaactcggaatcgaggtgccccatttttttgaaggcttcgtagaagaatacgtcaactgagcttcccgtgtcgatcattatactggagagttcgtagtttcctacgtcgattcggataacgagagcgtcatcgtgaggtttatcgaggtcggtggtttcactttcccagaatttgatctggtgatcaggtcccatcatcaggctgagatcctctcatgatgaagtcgatgcgtttcggggagaggtgatcagttgcgtttctgcagaatttcgagaggcgtaatgggaacctcgtgtttttcttttgcggggcgggaggaggtgtagtgactgaccttcctgtcctgccacccagatcgagttttcctgacctttctttgcgctctctcctagcaggtggaggaga

SEQ ID NO: 25335 - DNA, 579 bp, Arabidopsis thaliana
agattgtttcctttctctcttggagacaaagcccatcagtgggaaaagtcgcttcctcaaggctctatcacctcctggaatgactgcaagaaagccttcttggctaagtttttctcgaactccaggactgcgagactaaggaatgatatctccggtttcactcagacgaataatgagactttctgcgaacgatgggagcgcttcaaaggttatcagacgcaatgtcctcatcatggtttctccaaagcttcgcttctcagcactctctacagaggtgtcctcccaaagatcaggatgcttctagataccgcttctaacgggagctggtagagaacttagcttagtcggatggcaactataatgaagattatgatagaagcgtccgcaccagctctgattctgatgagaagcaccgcagggaaatgaaagccatgaatgacaaactggacaagctactgcttgcgcaacagaagcacattcattttctgggtgatgatgagacgttccaagttcaggatggggagactatgcagtcagaagaggtcagttatgtgcagacccaaggaggttacacaaagg

SEQ ID NO: 25336 - DNA, 604 bp, Arabidopsis thaliana
ggggagaagaatgttggcgattctaatcgatgaatgctcgaacctatagccgtggaagtcgccaaccatgtcaaactccaagaactcacattagcgcaaatgatccaagtccatcatcctcggtgctaaccctggttccttgagtggtactccacaagcttccagaattggcgtcacaacgccgcccatgcataacgcccacttcctatatccacacagatggatcaacagaggcattactggtggtgcgttgttgagatcgcctctcaagacattctttccctttgtccggcgcttgaacaagttgaaaacatgataacaacagtgtaacagcaggatgataagagaatgaacaacagtaaacaaaatcaagaacaaatgctgaatactgaatactgaatagataaagagaaatccggattacaaaaggtctagaacacaaggtctgcggaataaaagtagagaaaaacttgtctgcgaaaatgtgaagtacatgctacttatagccaaatattccgaaaccctaatactcagaacaacgaagtattgggacggattaagaactgtactcgactcaagtggtcgagtgcgaggtcgagtgaat

SEQ ID NO: 25337 - DNA, 651 bp, Arabidopsis thaliana
gaacttgatactgacgaagagtgtgcataatttttttaacctgtagacaaagcgtgcagtaaaaggatcaaaagtccaaatctccagttgcatatatatatatagaaagggtaagtgaaacctgacaagacgggaaacctgaagatcttgtgagataacagtgggggggaggaggccgcgtagatagtgagcgtcacgctctctgtggctaaaggcaaggcctttgttgtgatgtggatcacgcaacaacgtatacccactggcgacagagagagaccaaggagtgataggcatgtcctcggtggcggcatcctcgccgtagacatcctgaactccaccagatacggtggatttgggaacaatgtcggcggcggaggtctcgagagaggaggatgaagtggcagtggtctcaatcaaaacgctgccggtgggatcctggttagatccgagagaggaaaagactctcaaggaagcaggaggagtaattatagttctagggtggcgcagagagaggcgtgtggaacatccaggaacaaccgtcttgttctgagaaaccaaagcaatgagactttttcgtatataaaaaaagatgagacatggacgatggatggagaaggaatgatgtaaataataccagaaacaacgagggag

SEQ ID NO: 25338 - DNA, 603 bp, Arabidopsis thaliana
ccccaacgagttcctcttcggcttttgcgaagtggagagctttgtaaagcgcatcgtctaaagataccggttgcctaacagtgaggtcctcacggaatctagaggaaatccacaagccgttgcgaagggcggctatggctacctcctcgtttaggttcgcaatctttgatttgattgctttgaatttttcgacgtaagatcgcagggattcgttctgaagtttgggtgagaccccagaggtcggcttcagacgtcctgtttacgatgagtaccgagtactattttaagaaagcggcggcaagctggtcgaaggtatcaatagactagcaaaccattcgagggtgtgacctacgaggttctctgcgaagaaacagcaatgacctgcttcgttttcttagtccttcaggtacgctcatgttatagccagacggaaggcactcagatgagcctttgggtcgctcgttccgtcgtatcctgggaaacggaatctctcgacgtctctgatgcgataatgggtaacctattcgtgaatggggtacgcctggtttcttcgatactcgatctatgtcgggaggattctcactgctagatgcactcgtgaat

SEQ ID NO: 25339 - DNA, 806 bp, Arabidopsis thaliana columbia
ttctgctctctctgtagttcttaaacgtatacttaaccaagagaggcctactacaacattgcgatctgatcccgggatgccatcttctcatgctcaatccatttctttcatatctgtctttgctgttttatccggtaagcagcttaagctgttcactactcatcgttcgctatcgtggaactgtttacaacggattcactcgagtcgtgttttctgcagttatggaatggcttggaaccaacggtgtgtctttgtttcttagcggcttaatcctcgcattgggttcatactttgtaagtctgttataacaagtttcacctaattgattcaagcttttcattcatatatgaaatcatttagttgccattgatctcacactctctgcactatcacagatacggttaagggtttctcaaaaactgcacacaagcagtcaagtggtggtgggtgccattgttggttctcttttctgcatcttatggtacacaatgtggaattcgcttcttcgtgaagccttcgaggcatctctattagtgcaaatatctgtatttctgtttgcagctacatttgcgctactttcgcagcgtacgttgtacttaactggttcaaagacgagagataagcaataccaagctttacttataaagcttaaaattgtaaccctcaaattctttcaaaatatcgaaatgaaggattcagacccgtttgttaaaacaagatttaaaaataaggttcttaagatgtagcaggcaagacttacctagagtacattgaatgtatagaccaaccgaccaatatagtgctgt

SEQ ID NO: 25340 - DNA, 554 bp, Arabidopsis thaliana columbia
gtacctctgtccaaacttgtacacccgcgatcctcaataggatcgttggctaggacttggtccgagagaagaaggtggagtctcagacaagtgagaaggagctggccataagctcggacaaaggggaaatcatgcgggctaagctaggatcctaacggaatcagctgggtcagctcacctgaagctcaagctcagctggaaggagtgacggttactcaggtcgagtgacagtctagctcgggcagttggacgagtgacagttgagctcgaggcagctggacgagtgacggttgagctcaaggtaactggtcgactgtccgaccagctgggcggttatccggacggttacttgggcggttatggtcgaatggctgcttgcccaaagggtggataagggcgagcagttaagggcgaaggtaagggaatcctagacctcgagtctaaggattctaggatgcgttatagatgactcgggattccttgaaaggaacgactagttggctaggtagaatcaggtcatgtgcatcctacacaagactcggtccgggcaaggg

SEQ ID NO: 25341 - DNA, 538 bp, Arabidopsis thaliana
gtcttgaacagcttcagcacaacttttgcatcgttggtaggactagcaatagcttcgacccattttgatacgtagtttacggcgaccagtatatatttattaccgtatgaagatgagaatggacccataaaatcaatcccatacatcaaagatctcatttcttctgctgatgttgccttttctctggcatgaatcacactttaaaacaaactcctgagcgtccttaaacattgttggccaccaaaagcctgcttgaagaatcttggacactgtcttgaacgtcgcgaagtgaccaccatatgctgagccatggcaatgcagcaggataccttccacttcatcttctaagacacatctcctgtagatcttatctttacagagagtgtaaagataaggctcatcctagtagtaatggtgtatgtctctgaaaaacttcttcctttcataacttgtcaggttgggaggctctactctgcacgccaagtaattgatatgatcagcataccatggagattctcttcaacagcattcagttggt

SEQ ID NO: 25342 - DNA, 617 bp, Arabidopsis thaliana
  unsure (1)..(617): unsure at all n locations
caactagcaacgagggcactgagtttatccggtgaatcaaaatgcttacaaggctatctcatcatcatcccctatgcatatgcaacaatcctaaatgaaacactctagattcgatcctaaatgtaatgaaactacatgaacactcttttttttttgtgaaatcattttctgaaatttttcaatttttttttggtttttctatgccttagatgaatgcagactcaaaaatatacacaatgcaacacacacttcctgagccctcccccaaacttaaatcaacacagtccactgtgtgaataaacttggaagagagtactcaggacaaatccaatcacagaaacaaaaaatgaagaaacaaatcacaacagatgatgtaatacaatggtgaagtgaggcgcttacctcagtcgaagaatgaacatagttgctcgtcaatggctgcctatgattgctgcctagtatccagcaggtgggtactcgacctcatcagctctgtggcggccaacaccgctctgaggatantcgacctctctccttctgctgtggtcagcacgcggtcgcgtaaactatgagactgcataagttgtctgctcctactactagatcgagtgagtgtg

SEQ ID NO: 25343 - DNA, 585 bp, Arabidopsis thaliana columbia
acagtctgttgccagacactgggtgtggtcgagtatactggtcgagtaacagataggaaatgagacaactgtacttgactgcacagtctgttgccagacactgggtgtggtcgagtaattgcaaaaactaagaaacaggcaatgagaacgattaagcgataacgataaaacagagaaataatatagacgagaaattcctaaggatggggtaatcgagtagagtggtatcctagcctattcaacaacagatcaattcactcccgtgatagaaatcctcaagcaaagctagcctagactaattcccattaacggaatctaactatgcagacaataagaacagactgataaagtcaataaacgctctaaacagccaatcccttgggatagagacgaatatctcaggaactagtggatcaagcattccatcgaacaccttctgggtgcgagaatgcttgggatcgaattccagttgatcagaaagaaataagcagtaaacgcaactagtcctgaagggattcaatcaattctaaaacttaaccattctacagactacggattcacaactactctatcccatcctaagaa

SEQ ID NO: 25344 - DNA, 642 bp, Arabidopsis thaliana
cattcggtacttctagaaagcaacggctaacgtcctctacgcaagagagaagaccgaaccgattaacaatggcgagatagagctgctggatattgtcctaaaagatatcctagtctacaccaagaacaaagtacctataaagggtgacaccaatgatgcttcaccatcaatgcgtttattgaatcatctttgtggtttagcgaataagcagaagagaaccatttctataggaggagtgataacacctatactaatggcttgtggagtgccactttagtcgactccctttgcccctaaatggatcgacattcctcacctgagatgggctttgtttgttgagcatcagagtcatgaggggatgcatattctcaagtttcagcataggacggaaatggatgccaagcttctcttacccaaccaagagctaacaaccatcacagtgagaggtaacatcgatttcaaccgcctaatgaagaactcttcttcatggaaagagcaccccgacgagagaggcttcagcattgaagaaagggttgagagtgaagaatgagctgagaatgaagaccagaggagatggattgggagaactcaatgctagtaggtcccatttgaagacacaaacaccaccaagagtgagtaaga

SEQ ID NO: 25345 - DNA, 538 bp, Arabidopsis thaliana columbia
tacacggcccttccgtagcaatcttatacaatccgtaaagctgctgctgcacatcactcggtaccttctgcgaaagccgatctgcggcggcggtagtcacaaaaagagtggcggcgctaaaagcctcatcgagttccgtgctctcgacgccttcccaatcatcatcttcctcactgtcgtcaccggcaacgctatcacttcgggagctaccctgctccgccacaagcgaatccgcctcaccaccgaaaccaccgcaagaggaatcgagacgtcgcgagtcaactccttccggtttaatttccaattgagactcctctgggtgacgagtaagagagagattgtcttctttaaacgtgacgacgatcgagatcagcttagcgagaaggtaagagaaaatcaaacctaggatcacagactgagcaagttgagcccaatcacccattatttctaaaaacgaaatcgaattctcaaaaacgagaaaccaacgccgataattaagaccctagagaaatttcagcacagagtctcacgaggagga

SEQ ID NO: 25346 - DNA, 803 bp, Arabidopsis thaliana
cttctcattgtgtttggttttaggtaacatccttggttattagtatagatatattcttggtacttgcaggttcacataatattggagttgcaatggccactgaacatggccttgtcgttcctaatataaagaatgttcagtcattatctctgctagagataaccaaagagctgtcccggttacaacatttggcagcaaacaacaaacttaaccccgaggatgtgactggtggaccataactctgagtaacattggagcaattggtggtaaattcggatcccctcttttaaacttaccggaagttgcaatcatcgctcttggaagaatcgagaaagttccaaaattctcaaaagaaggaactgtctatcctgcatcgataatgatggtaaaagctattcttgttcattcatttcttcttagttacaagaattgttgttaataaccaaggtctgattattttgactcaggttaacattgctgcggatcatagagttctagatggggcaacggtagctcggttttgctgccagtggaaagagtatgtcgagaaaccggagctgctgatgcttcaaatgagataagaaggaaaggttcatgtttatttgtgaatcattatgtatgaaaccttcatgttcgaataagatcaagaactgagctagcagttgtaaactaaccaggaaggtaaaattctttcctattactccacaccaaactggaacatatggacactagctaacctcataagtcttaacacggaacgttttgtaaataatgaaaatgtatttatgaagacgacacgttaa

SEQ ID NO: 25347 - DNA, 579 bp, Arabidopsis thaliana
cacttaacaagcatgttctgagcttgattctcctgctgctgctgatagttaagaggcctcctgaatagcattatgtgcggctcaggtcgatgaaccgcgtaatgtacccatccgcggctttgctgcactcctatcgctcgccattcgttcttcgaaattccaaacatttttaccatcaccaccaatcaatacaacattgaagagattgcacaacacaaatgtctaaaatctctttatcactaaaccttacaaaatcccaaagcaaagattcaaaatcgtaacagttgcaatttggattcagagcaaagattcaaatcctaaacctaaacgatctctttttcgatttttccaaacttaatttcttaagagcaacaaattttcatagtcttcgatgatctaatcgaaggatttagaatcagaaatcagagaacaatgcggaaaaaaacttacttcggagagaagacgattctttggaagaagtttagcgacttcaggaggaagaacgacgtgcctgtatcgatcgattacgattagagaagtgagagtgaaaattggaggaagaagaagcgagattgaaga

SEQ ID NO: 25348 - DNA, 592 bp, Arabidopsis thaliana
  unsure (1)..(592): unsure at all n locations
tctaaatgtagaaactcaaagcgttgaaagagctatcttggagctaccttatcagtggggacttggaactcaggtacatggacgcatccttgacgacagatgttttcaagttcgttttcgctcggagatagatctacttaatgggctaagaagagcgccttgggtttttaatgaatggtttattgcacttcagagatgggaagactttcctacagaggatttccttacctttatagatgtttgggttcatattagaggaattcctttaccatatgtgtcagaaaggacagttgagatcattgctagtactttaggagaggttgtggctatggatttcaatgaagaaactacatcgcagataacctttattcgtgttaaggttagaatggatttcactgagccactacgtttctttcgaagagtacggtttgcatctagagaaagagccatgattggctttgagtatgagaagcttcacgangtttgcacaactgctgtcgagtgaatcatcaagtcagtcattgcccgtatgttgtgcacaggaggagatggataatgaacagatgttttggccctctagagaggtatgatg

SEQ ID NO: 25349 - DNA, 551 bp, Arabidopsis thaliana
gaggatcccctaacccatcctcagaaacctattcactactcagacatcataacagaaagcataaacgttgaacaagttgaaaacatgataacaacagtgtaacagcaggatgataacagaatgaacaacagtaaacgaaatgaagaacaaaacctgaatactggatactgaatagataaagagaaatccggattacaaaaggtctagaacacaaggtctgctcaataaaactagataaaaacttgtctgcgaaaatgtgaagtacatgctacttatagccaaatattccgaactgtactcgacccatgtggtcgaatgggaggtcgagtgaatagctggagtcttcttttcttccttgtgctcgagtgtctggttgagtgcggaatgaagaaggctctgaagcttgtcatcgagtatgcaatcgagtggtggtgatggtgatactcgacttccatgtggagtgatgaggtcgagtaatggtctggcaatgaaggtgaagacactcggctcggggtcgagtgatgtgatcgagtgatggtcaggtgatggga

SEQ ID NO: 25350 - DNA, 554 bp, Arabidopsis thaliana
ttttgtttcttaatgaagttcatcaactgtttcttgaaatgtctcgtaacagtttccggcgaatatgaagctgaagttctctactattaaagatgaaacacttctaagagaaaagaaggggaagggagtagaaactggaactagttctggaatgcttatgaagcctgatgaggtacctaaagagaagcctctagctacactagatatttttgctggatgtggtggtctatctcatggactagaaaatgctggtatgtatttatattctcatgtcatgcatatacttttatcttctaaacacttgaaaacttttattaagatgcatgttttgtgtaacaaggtgtatctactacaaagtgggcgatcgagtatgaagagccagctggtcatgcgtttaaacaaaaccatcctgaagcaacggtttttgttgacaactgcaatgtgatccttaggtaaaatagccaacggttttttctattcttgttggtttcagttgattaaggtttattaattgtagggcaataatggagaaatgtggagatgtcgatgattgt

SEQ ID NO: 25351 - DNA, 522 bp, Arabidopsis thaliana columbia
gcttcatgattcattacataggaatagatctgtttgcttagtaataatgaattgttaattaggattgatgatatgatgattgttctagtaatataggatgattgaattattgtacttgtgataactgatatatcccaattttcaccgattttatctatgttttaggtataggattttgagtctttgtgttatttctcgagtctttttagtgtcttttcaggtattctatgcaatgggacaacaatagagataagtaggaaaaggaagctaagaacaattttggttaatgaatcagcgaggagtgtcgatcgacactctcttggtgtcaatcgacaccagtttcggcccagcaaaagccctagacgcttttgagtttacagaagctcaagtttgccacagaagacttccctatttgcattattaatccctggacgtttttaggatctatatatatgttttttagacctaagtttcgtttacaaatcttttatcaagcttttgcaaaccctattatgagagaca

SEQ ID NO: 25352 - DNA, 557 bp, Arabidopsis thaliana
gaccttaacaaagcctgcccgaaagacaacttcccattaccacacatcgatcctctcgtagaatcaacttctagaaacaagctactgtcattcatggacgctttttgttgtgatgatgatgaaccctgaagatcaagaaaaaaccgctttttacacagaacaaggcatcttttgttaccgagtgatgcccttcggactcaagaacgccggggcaacctatgaacgcttcgtcaacaaaatcttcgcattacagatcgggaagacaatggaagtttacatcgacgacatgttggtgaaatccatgacagagaaagatcacatatcccatttacgcgaatgtttcaagcagcttaacctctacaacgtcaagctcaatcctgcaaagtgccgcttcggagtaagatccggcatcgaggcaaatccgaagcaaatcgaggcattgttgggaatggcgtcactcagaacaagcgagaagtgcagtgcctaaccggaagagttgcggccttaaccgtttcatctctcgctcaaccgaaaaatgtttagccttttacgatgtg

SEQ ID NO: 25353 - DNA, 563 bp, Arabidopsis thaliana
tagtgtcctctatcaaagcagaaggtgtaccagctgattaccttctttgcaaactcttgccccactctctagtgagcagaggaacatcatggttgcgtcaactagaaccaggttcactaaccaattggacttatacaaagaatgcattcatatatcacttcttcgatgaatccgtgacaaaggcacttcgtttgcaaatctcttcgttcactcaggctctagtcgagtcccttagagcagcttggctccgtttcaggtcttattagcgtgaatgtccccaacgtggcttccaagagagccaactcatcaatctattctacaaaggaatagccaagccataccggagtcaactcgatgtagtaagctattgtaacttcatgacaagaaccactagtgaagcattaagagaatcatgtttcagtaatctttgctcctatccaagccaccactccaccctctttagacagtcggctcgactccatgcttgcgcagattcttgcggaccaaacaaagttcgtggatgattttaatagcaagtacacagatcttaatgggaaaatcac

SEQ ID NO: 25354 - DNA, 575 bp, Arabidopsis thaliana columbia
tcgactctacccttacttagtctttctcatttctttttcttgtgtgtttcatgtgtttgtctaatcgcagcagaggaaacaaccaaagaacatgaacgagagtaagattgctggattctatttgtggaagatgtcaattattttggtggaagaggttatcagaatcagagatttaaacaccaacgaggctataaaggtgtctatgggaatgttcaacctaactacactcagaagtctcagttccagcaacctttccagaaaagcagtagtttcagcttcacaagaaactacgatcttgcttcttaccaagccccccctccacccgaaccaagaagcaagatagaatcaatgcccgaacagattctggaaggtcagaagaagatcttagagagacctatccctagatggactgaatacagactcacgccttattggcatgttgctttgatggaaagtgaagatgagttcctgaatgttgaggagagtgacgaatttgacgttgtagaggcagtgttgcccacactacccatggtgtcgattgacacatcacatatatacgagacacaagttgtgcg

SEQ ID NO: 25355 - DNA, 475 bp, Arabidopsis thaliana columbia
gtttctgatagaaagacatttacaacaatatggtctcgatcgtcacaatcggcaaaatcatgtatcaggtttccctactcatcgattttccgaccatcctcgttgtatgcttggccagctctctcccttaacactcctacagaaacaggtattactatcaacatctttgtgttgcaattgaatttttgaagctcctgaaacacaagaaaacgaaaaagaagaaaagaaaagtctagacttaaatcgacacctagtctaatggtgaagcaaagagatccccggcaacaccgccaaatttgatatagctcaaattgccttaagcttactctctcaaataagagctcgtcgttagcacttaaggatcgaattccactgagctctcgatgttcacacaatagacttatgatgatttcaattaagctagaccaatagattataaaataagaaataaagaaaagcaatataggtgaaggtg

SEQ ID NO: 25356 - DNA, 538 bp, Arabidopsis thaliana
tattacggtctccactgttcaaccattgaaccctactccactgtttccaaaacaattcttcttgcctataagcagcctcaagctcttgagtaatagacccaataagagaaggatcagggatatccgcagaaagagctgattccagcgcttgttgagcttttttaatcgcttttgcactgttagaattttgctctttagtccatttaattatactttgacggcaacgactaatcttgtaaagaacagaatcctgacgagccagttcccagacttctttaaccagtgcacgaatttcttccttctctcttaaccgtctatcatacctgaaaggcttcgatctcttcagtggtggcgctccaaagtaagtcaccagtggacggtggtcagaaccttcaaaacgcagatactcacatttactcatcgggaacaactccgaccatgaacaattgcctagagccctatccaatcttgacttgatgaaatgagagtatctagtacctctccaggagagcgagttccccgtatgattaatatccat

SEQ ID NO: 25357 - DNA, 406 bp, Arabidopsis thaliana
ccataggtaaaggaatacgaaaggtcaccggttgtacacgacttcctcaactttactcgacctcatgttctactcggttcaaattgtgaaagaagaactcgggaatgcatcgatttactcgagtactagattatactcgacgaacttggtctatttcattctctgttgataacgattctggtttcattgttttctttaagactaacctattgacatttgagttttgagttctcaatctaattacagtgacggttcgtcaatggatcctgactatcacatggatgaggctgagtcttcatcttcaaggccagaaagagaacagagagaatatgataacttcaggagaaaagctgaggtagctcgagggaagagagctatgacaaagaggtatgtgctgatagatgag

SEQ ID NO: 25358 - DNA, 516 bp, Arabidopsis thaliana
gaggctataggcgacgaagtgtcactggtatcttcatatttaggaggtacatcttcctttgacagcataagcagaaaccccatcagtagtagtatctagtgcattggcttcagcaacttccttagcaagaatctgcctatacaaatcagcagctctcgaagtatacttagcttcgattttgccaccatcggtccatccatgttgcttgaagaacacctgagcacggtagttgccaccaaacatcattgccctaagctgctcagggctccatgagtctaaactcgttgatcttatacgagtaaacatacaaaacaaaaaggttgtgtgtgttctttctttatgcttattgtttgatgcggaagaatttctattctgccatgattcggaaaaaaaaattctattctgccatccaaataaatcaatttttttttgatttatttttaagtagagaaatagagggatttaccaaataaccttgttcttttaggagactacatgacccaaccacatgtagac

SEQ ID NO: 25359 - DNA, 624 bp, Arabidopsis thaliana
gttcatcggtttgaacttcgttttgatgatggtcctccccttcttgaacttcactgtcctcagtgatcttttctgttggctggttgttgatcaatttccttccactatggagtgtgactgcgtgtgcatattccttgcaattgtgaatggcctttcctgggtgttgccctggatcctcatatttgcttcttaactcattgtaggaacagtcgactttactattaatctcagccaatcatttttccagaactagagctctggtagtttgaccctggatgatttgttgaagcattcgtttggtgtcaggatcttgggctgctggggcttgttgtggttgttgagtgaaccctggtgatgaattctgctattggtagcctccattaaactgttgtttagggacataaccttggttgtactgaacaaaaggcttggacggattctgttggggtggatacacttgatcttgggggttactacattagtgcttctggaggagaggtttgggttgggcttgtagttgttgtagcccttgttaaacctccttggttctgaatgtacacaactcttcagtttgatcattcccccttcttgcatttggaagtgccttcatcagtgatgtagtgt

SEQ ID NO: 25360 - DNA, 731 bp, Arabidopsis thaliana
ccttcctcgccctcacgataagtctctctgctacatgggcggtgacactcgcatcgttgtcgtcgaccgtaactcctctctcccttctctcatcgctcgtctctccaacacgcttctcgacggtcgttccttcaccctcaagtaccagttacctagcgaagaccttgactctctcatctccgtcactaccgacgaagatctcgacaacatgatcgaagagtatgaccgtaccatttccgcttccaattccaccaaaccttcgcgtctccggttgtttctattcacctccaagcctgaggctactcaatctatgggtcagatccttgagagctctgccaagagcgacgattggttcctcaacgcactcaatagcgccggtcttctcaatcgaggattctcagattctgatactaacgtcaatcgtttacttggtttggatgatgctcttgctctccgttctaattccggtgacaacaacaatcgagatggtgatgatggctctgttaaaagcgccaagcaacagcaacctccaccgccgcagcagcaagaacaacagcaaggaggccaagatgtgaactgcttaccggattctccgatgttagatacatcctcttctttcggctccacttcttcgtctccctcgctcgccaatttgcctccgatccgtgtccatgtagaggaaccaggcggagtaaggactttgccagatcagagaaatctgggaattgaag

SEQ ID NO: 25361 - DNA, 808 bp, Arabidopsis thaliana
ctagtttcttgtggaacaacttagaaacattttagggttttcttaatttgcaggtttcttgacaaatcggcaatccaaacacaagacgacaagctgaacaaagatgggtcgccggtggatgcatggaaactctgcagtatgcaacaagtggaggaagttaaatgcgtgatccgggtgcttccggtttggctctcggccgccttattctacctagcttacattcaacaaacaacctacacaatctttcagtctcttcaatccgatagacgccttggtccaggaagtttccagatcccggccggttcttataccgtcttcctaatgcttggaatgacgatattcatacctatctatgaccgcgtccttgtacctttccttagaaagtatacaggcagagacggcggtatcacacaactgcagagagttggagcaggactgtttctatgcatcacaagtatgatggtgtctgcaattgtagaacaatacagaagaaaggtagctctcacaaaaccgacgctagggttggccccaagaaaaggcgcaatctcttcgatgtccggtatgtggttgattcctcagctagtgctaatgggtatcgcggacgccctcgctggagttggacaaatggagttttactacaaacagtttccagagaacatgcgaagttttgctggttctctgtattattgtggaatcggattggcgagttacctcagcacctttttgttatcggcggtacacgataccacagagggattttcaggaggaagttggcttccggaagatttaacaagggaagattggagta

SEQ ID NO: 25362 - DNA, 480 bp, Arabidopsis thaliana
gagcttcatgctgctaagtgcacatccataatggaaaagatcctccacactcttcctaaggatgcttcagagacatcttccgcctcactcaacaagtatgtcaagcgagttgttgacaatgacgcaaagctgcttaccagagacattagtgcaatcatgctgcttaaggcccagcaaggcgaaggcacaggaggttagagatacctgagtacatccgcaccattactcttggtcacaccactaagaagcttgaagatcaaggtagctttgtccttgattgctctatctccacaagcagattcagccgctctttgtgtgatctgggatcgagcatcaacctcatgcccaagtctgtagctgagagactaggcatgactaactacagacctagtcgcatcactcctctcttcgctggatcgttccaagcgaatcccagaaggaatcctttaagatgttcttgttaaggttggtaacttgata

SEQ ID NO: 25363 - DNA, 518 bp, Arabidopsis thaliana
tcgtctagtttctacttttattttgttagtcacgcgtttcttgttttcttcttttctgtgtttcaggtgtatgcctaggcaaacaaggagcacaaaacagaaggagcttatcaacttgggaaaacttgaacgcaccaaccgaaaaactcaaaaattagcaatggctgacagagtcatcagagctgatgcagaagaagttttgagagatgaggatgggcaagcctacaatgaggctggtcagagattggatgatcatggactcatcctacctgatgacgtcgatgagaatcaggcgcgcctcaacgcgcaaatagctgccagagacacagcagggctcggtgtcgatcgacataatagaggtgtcgatcgacaccatcgggagtagaatgacgatggtgatggtgtcgaacgacacaacagaggtgacagcaataatcgagaagatgatcacacttttccctaaggatgcttcagagacatcttctgcttcactcaacaagtatgtcgaatgacttgtt

SEQ ID NO: 25364 - DNA, 584 bp, Arabidopsis thaliana
gggtacgatcccccattgcaattcccgaactcaacaacctcatctcttcacctcccataccaaagcaatctcgaatccttacaattctctctttatctccttcacttcctttcttatcaaaaacttttcgcaattcatttgtttcctccatcattccatctcctaacctactgaattttggttttgagtttctcccacttttgttcttgatgacgaacaagcgctcgctttgtcaaggattcgaaacaatgctctctccccatagaagaggtatccaacaccttcttcgcatgcagcagctcgagtaccttctgaaccatcacccttggggttgagcaggagagaacaagcaagtttcgaaaccgatcacagtgaatcgagccaagaggaggaagtgatgcaagaagaaaaactttcagccctctgtaaaggaattctcgaggaacaaggcagatatcactcgaggaaagaagcccgtggagaggaggttggaactggtagatgaaactccgaggaagatatggcttaccagaggcagatgataaatagagaaaggaggcactgatgatctggaataagaaagt

SEQ ID NO: 25365 - DNA, 476 bp, Arabidopsis thaliana
tacaggagatctccgcagaggggattgtgatgctagatgagatttcttcacaggagactttggaactactgctggttgcttctcaccaagagattatgcaattgttcctgcagattctgaacctttggctgcagataccttaatagaagaattataacctgaatgctgccttttgtatccctgttgctccattttgttgacttgttgctactgactttccccttgaggttgatgctgttggatgagttgattgagaactttgaagaggatctttctgaactgttgaatctatagtgttttcatagaaaactttgtgggcaggctgtgacagccccgaaccgtcctaggactaaggaacgaatccgaaagcgtcacgtatggttggctgaccgccgcagacgaatccgacaaaagatccccaaggccaggccgaccgcagaagaccgccctcgcgaccacgggagttagaggccttg

SEQ ID NO: 25366 - DNA, 484 bp, Arabidopsis thaliana
cccttcttcaggaggttctcgaaaaccttgatgaaatgctttccaccatcactgattactaccctcggaactccaaatctcgggaggattatggtcttgaacagtttcagcacaactttcgcatcgttagtaggactgaccatagcttcgacccactttcatatgtaatctacggtgaccagtatatacttgttaccgtatgaagatgggaatggacccataaaatcaattccccatacataaaagatctccatttccaagattgggttctgaggcatctcatttcttctgctaatgttgccctttctctgcttgagcgtctttaaacattgttggccaccaaaaatctacttgcagaatctttgacactgtcttgaatgtcgcgaagtggacaccatatgcagacccgtggcaatgtagcaggataccatctacttcatcttctgagacgcatctcctgtaaatcgtatctttatagagagtg

SEQ ID NO: 25367 - DNA, 610 bp, Arabidopsis thaliana
cccgggaaaattgattttacggtttcggtgagaaaacgtgatttttgcggttttggcgggaaaacgtgattttgcggttttggcgggaaaacacgattttgcgggtttgacgggaaaacgtgtttttgcggttttggcgggaaacgaaaatttacagttttggcgggaaaaaacgatttgcggttttggcggaaaaacgttgttttactgttttagcgggaaaacggaattttacagtattatcggaaaattttgattctgcggttttagcggaaaatttaatttgtatgtgtttaaaaaataattagagaataagatttaagtctagttgtgtttatctaaaaatacatctaaataatcaattaaataattagggtatgtttgtcatttatgaattttgactgaatcatctccatccaaatgatccaattaagtctagccaaatgagtttcaaaatttagcctaaatctgcaaactcatccagatagataatctgaatgaaccgttttttgcactaaacgaacatcaaaactcatctccatccagatgatccatttgactgatgaaacgatcagagcctaactagttatttgtagaggacggaaaaaag

SEQ ID NO: 25368 - DNA, 561 bp, Arabidopsis thaliana
gaaaccacggagagaatgaagttcttaaaaatcaagttaatggaagccacagatcgacagaaaagctacgccaacaagcgtcgaaaggaattggcattccaagtaggagatttggtgtacttaaaggcgatgacctacaaaggggcgattcacctcaaggaaaaagttaagcccaaggtatgttggctcgtacaaggtgatccaacgagtaggggcggtggcatacaaacttgaccttcctccaaaactaaacgcgtttcacaacgtctttcatgtatcacaactacggaagtgtttaagtgatcaggaagatgtacctctcgggtaaaggagaacatgacggtggaagcatggccggtacggatcattgaccgaatgaagaaagggactcagggaaaatcaagggatttgttaaaatcttgtggaattatggaggccgtgaaaaatacacttgggaaaccaagaataagatgaaggccaattttctggagtggttcaaggagatgggtaaagatcaacttgatgcggattcggggacaaatccaattcaagggggggaga

SEQ ID NO: 25369 - DNA, 508 bp, Arabidopsis thaliana
cgtctagtttttacttttacttttttagtcacgcgtttcttgttttcttcttttctgtgttttatgtgtatgcctaggtaaatgaggagcacacaacagaaggagctgatcaacttgtctgtttgggacttgggaaaacttgaacgcaccaaccaaaaaacttagagattagcaatggctgacatagtcatccgagttgatgcagaaggagttttgagagatgagaatgggcaagcctacaatgaggctggtcagggattagatgatcatagactcatcctacctgaggacgctaatgaggatcaggcgcgtctcaatgcgcgcaattagctggctcattgtcgaccgacacaacagaggggtcgatcgacaccttcgagagcagaatgaagacgcgattggtgtcgaacgacacaacagaggtgtcgatcgacacaaccccagattcctgcaggtatcctccagttgcggaccatgtcgtctcttggggattcaaaaggcttgactg

SEQ ID NO: 25370 - DNA, 661 bp, Arabidopsis thaliana columbia
agtataaatttttttttgaagagatatgaacaaaaacattggtcaaaaatcacagttgtaagattaggtgagtgcttttgttggttggaagaaacttttttttaaagcaaactataggcgagtatttttgttttccgggttaaaactctatatattattctatggataagcgctctcgtttaaagagagccaatcgagaaccgttgaacttacatgggaaaaatagaatccgcgagttcttgcacatttcgcaagataatctgctcggatattactagtacggggaacatgcataatattaaaagatacaagttgattcttaaaatactcgaaatcttttaactctgatgcaaaaatgggccactcctccggcgtattaaccatagtgagaagatcagagcaatccgtcttaacaaggacttccttgattgataagtctactaagcactttaaagcccaaactaatgtgtctagttctgcatgaagcggtgataaacaacgacgtgaacccttcaatcctaaatgaagcaatctttccccacgggtcaaaatccacccatgaccgctccgcgaatcagttatatgccaagacccatcaatgaagcagattggggaagccatatctatatgttgccttccaaacttggcttggtacttctgg

SEQ ID NO: 25371 - DNA, 1077 bp, Arabidopsis thaliana
atattcaatcacatacaaaacaaatttttgattaaggtaaaaacaacataattatacgtcatatacaacattttatttgtattattacgactgtcgttagagagccactgaaattgtagtgcggtgacattaacagtgtcgcacactatttgaatttagaacataaaatggattcatgcatatatgagagtatgacacgtcgaattggtgaagcgagcgatgacgtgtggaagaagagattcggaaagagaaggagcgtttaatttcgagatgatcgtgatcagagagagaccagatccttggaagaccgtgacattgccagtcacgtgcctcttttttgactaccttcctctctgctgctttaactgcagatgtacttatcatttattttcttactttaccatttaaataatatatcaaaacactgtagtttgcttagcattgttaaacaagactactcacttggtacttggtcgtggaatattatacggtatgcaatgaatttgcataataatctagattcggagcagtatcattaattaattttgttaggttaaaacgttttgttattaaaaatcgcttagaactgaacaaaaaccaacacatatttagaatattcattgcaacatctttgtagacaaactaaaggagcaaattcacatgtaaatctaaagaacaaaagaataaagcatagattaatcatacacacataataagaccgggaccaaattttcctcttttgccaagttcccaaattctctataaatacttcttgtctccatttcacaacagcaacgtggactctttctttgttttggctgactcttctttcaccgtttccttagagaacttattcatctcataaacaccacacacaacacacacttctctttctccttctctctatatattttaatatcaactttctagggtttccaagttcatatatagtgatgggtttctcaatgttcttctcccccgaaaacgacgtcagccatcattcctctccatatgcttctgttgactgcactctctcacttggaactccctcactcgcctctgcaacgaggatgatga

SEQ ID NO: 25372 - DNA, 602 bp, Arabidopsis thaliana
gaaaaaatccgtgaccgataccaccgtcaccgttaagtacctcttaatttgtcaaacactaacactacaagtttcggtgagcatgtactttccgacgataactccggcagcactactcccgaagttgataagcgcatgacatctaacgtggagatgatattttccggtgatgaaggatccgactttccaacgaactcgaccgtcgagatgaagcatcaacatgatcgcgccacttgaatggtcctgatcgagatagaaagcgttgtacggagccacaggaacggagtatccaccgacgaaaggagaccaaacgttgacttctttgtgtccttgataagtggtaagcatgggactcggcaaagtgatctgttggctgcggtaagaagcgtagacgtcaagacggtcgtagtagataccgatcttgtcgttagggttacgagaggagagagtgaattggaaatttgaggtgaggaggtcaggtggattgccggagacgttgaagttgaagacggtggcgtcttggaggacgaagcgtggtttcgatggttgaaggattgccaaactaggagaattcgacaaggattaagaggaggattattgat

SEQ ID NO: 25373 - DNA, 929 bp, Arabidopsis thaliana columbia
tattaaccattatttaacaatttgaagcaaattttaaaatgatgaaaggagtagagatgaaccagtccgaaaataagttctcttgtcttgcaaaagttgtttagacagagaaagtttcgcttgtcttgtcttaaaccaatgtaccaaactcatccatccaattagtaataggcacgtcagcattagcccgcggaaaccagaccatgtgagtcacacgtgatgtttttaattccttttatcgatagcctcaaacgcggatttgctgcgtttgctgaccaagtcgctctttgtttggccatttttaattgtgttttcttggagggtttctttctttgctgtctttgattcttttttaatgttctctacgtttccttagccttatttagaagacatacaatgcgtatgatacgcctctacgtacacatttacatacatctatatataaaccaacaaattatcgcctcctttttagtcacacatttatatcaacacctaaaagaaacaaaaaaacagaggaaaaaccccaaaaaaaaaaacagagaaagaaaccctaaaaaaaacagaggaataacttttgaaatctatggcaaagaaggtgaggaagcttcacgtgacggtgaagccggtgaggcttgatggtttaccggctattctcggtgatgaaacggcaggaaagaacctttccgcgatggtggaggtgaaatggaagggacctgtctccggttttggattgggcttcgtcccattctatcgttctaatcgaccggttaaccatacgagctctaaaccgattgctttaggctcaaaccacgtagaatgggaggaagagttcgaacgcgtttgttgcattgttggcccatggaacctctccttcaatgtcttctacgtgagttatcttaattattctctttttagataacaatttgatg

SEQ ID NO: 25374 - DNA, 599 bp, Arabidopsis thaliana
tataattatttaaatattaaatttagacatatattcgatactttattctatttttataataaacaaaactatgattttcatccctttttatttagcaacaaaactatgattatgtgaccaaatttactagagaaaaaagtcaacaaaagtcaaagcaagatactgtaataataacaacgaattaatttcaaaaaaagagctatcgacccaccaaccctaaaaaaccttgacgccgttttcttcttcgatcttcttcttcctccagagaaaacaacatggccatggcaacaaggactctaggctttgttttgcctacgagcttatcttcccagccttccttcgaccgtcgcggcggtggatttagggtttctgtcatccgttgctccacttctccactcacttttcccacttctggtaaattttgccttcatttccgtttcaaaattgatgaaattgtgtattgtcccattgggttttagttcttgaataaagggtaaagcttggatttttcgtttgatcgagaaagtctctgtcttaagaattagtgcaaaccttttagtgaaagttttgatttttgcacatcgtaggtgttgtggaga

SEQ ID NO: 25375 - DNA, 597 bp, Arabidopsis thaliana
atgttttaaaaacgattgtaaactacgcaaacagttatgcaaatgccttgcaaatgccttgtaaatcattctacgacagttaattaagctttaaaaacgattgtaaaactttattacctgttgtgagatagaactctctcaaggagaaacggataggttgagaatcaactctaaaccaaagagttgatccttttgtttttactctctgcttcatgagatagtgaaagattttccagaaaatctgattcccttcttagccttcatttttggtcccaattcaactagaggaccaagaaacactcgcctaaagcttcctctactttactaactaaattccaatccgagtattgttgaacggttcccagtgtaatagattcttcaccttctctgtatatctgttcaggcaatgtaaggatttcactctctgaatccatctgcaaaacatgttatgaaacatcgtcagatctactataaaatcgactataaaatcgattataaaaacggttaccgtcggatctatcgatatctctggggattgtttgcgtcgtagagaaatgatctgaatccttcagcgaagaacaagtttatcggagagga

SEQ ID NO: 25376 - DNA, 569 bp, Arabidopsis thaliana
atctcctggatattcggcaggtcagttccgagatatcaggtcctctccgcgaatatccccctgttagttcctaggttgttattcgcttatcttccttcatcaggtgaacaggcttattaggcccaagtacccattcgcgtatgtggactcatcagttgcataggtcctctacttggtgggctttgtgggctggcttggtatttttgcaggtggattcctggaggggaatccagctccaacatttgccccccaacccattgagtgagtaggcgaactcgatgaaggtaagattgcgaaaatattctagatgagatgatagatatgataagatcagtcagttttgaggataaagtcaataaaacgatttaatttcaggttcctgaactgaaagatattgagtagatacgcgagataagttgcggttgacgtggatgactgagatcgagcgtctcttcagcgccccgcatctgacggtccagatcaggcgcggggaagagatctctgtaatctcgaaaatcgtgatgatgattgctactttaaataacttccacctctccacttgattttat

SEQ ID NO: 25377 - DNA, 571 bp, Arabidopsis thaliana
  unsure (1)..(571): unsure at all n locations
tcgagatatgatgcaaaatgaaaaccggttagtgagctatagagaactcgaaagttctttttatgtagatgtatatagtaaccacacaaacaagatttgacatgggtggcacctttcttcagtgaattggtagaacttgggcatactaacaaggaatccggaaggcaactctttgctggtactgacgcaaagcctgctatactgtttcctccagtggcaacagctcaatggcatgaacaggtaaaatctcaaaacaaattataaggctaattcttagagatactctgtatataatgatctaattcattgttgtagataagtcgccttcatttacttttgacggtaaaagaatctgcaatggatgttccaacaaaccttgaagcacaaaggaggattgccttcttcacaaattcactgtttatggatatgccacgagctcctcgtgtcagaaatatgctgtccttcaggtatgtgctctggttatcctatttttgaacagaatttatgctcctttgaaggataccatgtgctatcaatantctccaatttaaatttttctacaattgaggga

SEQ ID NO: 25378 - DNA, 548 bp, Arabidopsis thaliana
tttcccactgaaacctgcgtttttgtctcttaaaaactttttggaaacttatttgtttctttcttaccaaataaacagcaatggtacgtttgttttcacattccaagtctctcctgtgtatccacatgaagctccaaaagttaaatgcaaaaccaaggtaggcctctcctccttttacatgccttatatagtttacagcttctacttcaaaatcgtttgtgttgtagaaactctttgttggttttcttgtttaggtttatcatcccaatatcgatttggaaggaaacgtttgcctgaacatcttgcgtgaagattggaaacctgttcttaacattaacacagttatctacggactcttccatctgttcacggtaattaaccggacagttcgatcaaacaaaggtttttgtgttatttggtttctgaactgagtgattgttttcacacaggaaccaattctgaagatccttgaaccatgatgctgcagcagttttgagggatacccaaagctctttgagccaatgtcgcaggccatgacaggtggatat

SEQ ID NO: 25379 - DNA, 548 bp, Arabidopsis thaliana
ccttcggcgccttgagttcagaccagtcatctgaagttgggatgatcggctccccagattcgttggcagacaaggtcgagtggctggtcgagtatgtcctcgagtgtgcaggttgaactcgtgttgacccttcttcgctcatcccaaaatccttgccaaggtttagatcaatcttccctttcttgacatcaatcattgctcctgcagttgctaagaaaggtctccctagaatcaacgggtccttgggttcttcatccatctccaggactacaaagtcagttggtatctccacagcttcgatcctgattggtaggttttcgagcaaaccatgagggatccttactgacctgtcagctaggatgagggatatactgcaggatttgtattgagtgaacccaatcttttgacgacagagagcggcatgagattgactaatgctcctaaatcacataggcatctgttgaaaccaatggacctaaagagcatggtagagtgaatgaacaggatcacttagcttcttaggaatgatcttcttctgtatgatagca

SEQ ID NO: 25380 - DNA, 547 bp, Arabidopsis thaliana
tgtgcaccatatctctatgtaaaaacttaaccaaaaatatatcaaaaatctaaatgggccgataaaacaatagataataaatttaaagcccaatgttctgataaaacgttcatacatgggcatcatgatcacaaaaggctcactataatttaagaaaaatctaaaccccaaaacccaatatgccccagaaatcgagcaataataaaaaaacaattctccctttttagtgtcaacaatcgtgataaacattttatcccttttttctactgcttatagaatttcttctatttcttataaatcaggttctaaaaaagattgccgatgttatggtagcgaaagatgggaccggaaattacaacacaatgaatgcggcacctcaacacagccaaaagagattcgtcatctatataaaaagaggcgtttatgataaaatcgttgtcattggaaatacaaaatccaatttaactcttatcggtgatgccaagatcaaccatcatcacagacaatttaagctctagcgatggtaaaagaacgttcacaccacaac

SEQ ID NO: 25381 - DNA, 652 bp, Arabidopsis thaliana columbia
gaatgaaatgaataaaaggagaaatacttaccagtgggttgcctcccactaagcgcttgtttatagtcaatagcttgacattgcagttgcttaattaacaggtgggtcctgaagatccaaaggcttttctactggaatctctgtccattcacagcaaatggtttgccattgttatttttgagaatgattgttccatatgacctaaccgagtgaactgtgaggggacctgtccaacgagaagacaatttgccaggaaataatgtcaatttagaatcataaagaagtacctggtcattaggctcaaaggtccgagtaaggatcttcttgtcgtggtagccttttgttcgttccttgtagagcttcgagttgtcataagcgtgaattcgtatttcatcaagctcattcagctgatttgatgtcgaaattcatcatcttgactgcccaagctgcttgctctaattccactggaagatgacaagctttaccatatagaagatgaaaaggtgtgcttcaagcggagttttgaaagctgtcctgtaggccacagtgcatcatctaacttgtaggatcatcctttttcgctttaccactgttttccaagaactctttgatttgctgttagaactacacttggcagcttgttgtgatggta

SEQ ID NO: 25382 - DNA, 477 bp, Arabidopsis thaliana
caacatctgacccgagcattgagaagagtcatcctagtagagttcataaaaaaaccaagcattgaccttggcaaagaagaacatgtcctccccatacaaatcggcacggatcacgacgacgctccggacgacagccaagacgagtgcagcttagagttgatagaacccattaaaagctacatatccaaagggaaatttccctcggacaaatgggaagctcggaaacttaaaagctcaggctgcacatttcgttctggtagatgaaaaactctacaagtggtgattatccggacccttaatgacatgcgtggaggctcgtgcggaaatcattcctgggaagagccttagccatcaaaataaaacgccacggattcttctgccgacaatgatcaaagactgcaaaattttttcaaaacgatgcaaaaaatgtcaaaggcacgcacttattattactcgcatatccatagtcgcatttat

SEQ ID NO: 25383 - DNA, 548 bp, Arabidopsis thaliana
tcgaacaattcttcatagtccgaatcaatctgggaggttggcgaaatgggcagtggaattaagtgagtatgatatagagtacaagagccgagtcgccatgaaagctcaagttctggccaattttttaacagaattgccggtacttggcgggcaggagcaaccagaaaatcagacttggaagttacacgttgatgggtccttatcaaaacatggatccggggtggggatcaaattggagtctcccacctactgtgattcacaactggttgttaatcagttcaatggacactatgaagccaaagattcaaggatggaggcatatcttgaggtggtcaaagatttggctaaaaattttaagaagttcgagctcattcgcataccacgaggagaaaacacaaccgcagacgcacttgcagctctggcgtcaacgtcagaccccaaagtaaaaagaatcattccggtagaatgcatttcgacgagaagcattaaggaagaaaaagaaacactcgtcattacaaggtctcgagctgcagcccgggatcgcggtg

SEQ ID NO: 25384 - DNA, 639 bp, Arabidopsis thaliana
  unsure (1)..(639): unsure at all n locations
ttcgcatttgagaagttcagaaggtatttggttggatccaaggtcacggtctatacagaccatgcagctttgaggcatctatatgcaaagatggtgcatcttaccatctttcaaggatgagaattgaagaaccttttccgatagacgactcaatgcgagaagagcaactcatggttgtagaattctttggtgggagttacagcgggaaaaagttccaccaactgaatgttgttgaggaaaaatctccatggtatgttgatcacgtcaattatttggcatgcggagtagagtctccaacttgaccagttatgaaaggaagaagtttttcaaggatatacaccattactactgggatgagccttacctttacattatctgtaaagataagatctataggagatgcgtctcagaagatgaagtagaaggtatcatgctacattgccacggctccgcatatggtggccacttcgggacattcaagacagtgtcaaagattctgcaaacaggcttttggtggtcacaatgtttaaggacgctcaaaagtttgtcttaaaatgtgattcatgctagaggaagggcacatcagtaggaggaatgagatccntcaaaacaatcttgtaagtggagactttaatgtat

SEQ ID NO: 25385 - DNA, 1680 bp, Arabidopsis thaliana
tcccggaagaaatttatatgacggttccaccgggtgttgaaaatgtggattcttcaaaagtttgcaaacttaaaaagtcgctttacggacttaaacaagctcagagatgctggttttcaaaactctccggtgtcctctgatccggccgccgttgttgtcgttccagctcacgtttctccctctaatgcccaatcgactgtccctgtgacggacttggccataatttctgcagatctgacagacccagcgtcgtcgatttctcagatctcctttgttgctcctgtgatagcctcacccgcttctgcagaaccaactttaacaagtgtgaaagggccaagtgtcccagtcactactcctactgcgccggccatgaaagtggctagtccagaaaccatagctcagaattctccgacttcagaaccattatgggtcaatcttgggaatgtcacatctaagaagctgcagaagcaaggtgaaccctttcttctaccctctggagaagcgtgtgttaaatacccaattctgtcattgagaagaatcgcagatcttgggattgctttgttcttggccagttttactcggatcccccttcccagggcatcatccacaatattgtgaatgggatttggagtcgccaatacagagatgtgtcagtttcaaagatgaaagggaattctttcctttttcgtatcccgaataactccacgcggaaccgtgtcatcaatcaaagactttggcaaattgaaggtcagactatgtttgtagcaaaatgggaaccaggtgttgtccccgaaaagcctgagctctcatcggcaccaatttggctggagcttcggcatgttccgttacaattctttcatgaagatggtcttggacgaattgctgggctggtgggggatccgcaattccttcacccatccactgctaacaagactaatttagaggtggcaaaggttttcacaattattgacccaaggaaaccgctacctgaagctgtcaacgttcaatttgattccggagaagtaaagagagtccttgtctcaagcccttttatgcctccggtttgtgagcagtgtaaagaaataggccatcgtgcccgacgctgcccgaaagctccaatctcttgcgagaattgcaagtcgacagctcataacacaaatcagtgtcctagagtcaagacctctacaactaagcgcaaataccaaaagaagaataaagatgctgcttctgctgctcctgcagtttctaaacttggaagtccaggtttggatgcgtccccagctggcaatgcaattgctaataacttcaatcctgtaaacgaaactctacaagaaaaaaagtcggacatgcttgtcggtgactcgagtgggttgtctgttgctactaaaagcatttcgcctcttgtagctggaaataaggtcccaagagagacttgttctgaggttgaacaagactcctcggatactctatcctcagagcctgatgaagaagtctcattgggagacgagtttttggatttcacagatgtgctgcctcgcaggcggcgaacaggtttgagaggcaagggcctcaaatccacataattttatgtgtacaaaccttttttgttggaatgtccgtggctttaatatagcaagtcatagaagcggatttaaaaattgggctagaggtgcagaccct

SEQ ID NO: 25386 - DNA, 601 bp, Arabidopsis thaliana
tcatagtttcgacccgcatagaggtcagactacttagcttaagcttgtccaagcatattttttcttccccagagaaatctatgaacttgttcataaaacccacaaaggcattgtaatcttggaactcttcagagtccaaatccaaccgaggaatcaaaagccagagacttttccacctactggacaaagaactagtcctaacaatatcctttattgggagatacaagagtatctgagttatcagagaatcaggtaatttgcttatcagatcctctccagccatgaagtaagttccctgcgaccgttcgccgtatttcgctttcatatattgtaaatagccttcgcaaagcatatttgctcacaaaattgaaccgaagattccacagagacaacctcgaatactaagtatacaacaaggacgcaattcgcacgaattcagacacaaatcatcacattccagtgttaaggcttctaaaatcggagagtagcgaagtagatgaagtcacctgacgggtttaagtgtttcgacgggggaggaagacgcagtcgccgtcaagttctccagaggtaaagcgagacggaggaccggagagggctatgg

SEQ ID NO: 25387 - DNA, 669 bp, Arabidopsis thaliana
tctcaaactcttgacgatcggattgaactgttgtgaacccgacgtggagaaaaggttggacataggacaggctgtggagaagatcgaagagttgaaggagcgagaaggggatgatgacgacttctactcaacgtatgtgagtgaaactgatggtaggtcgtctaaaggagagtcatgcgagagtatcagctttgcatgagaaagagacaagggtttgatcttgtgctgtatacaacaatgagacttgatggatgtgtagacatttttactaagggaattgaagtagatgaaagctgaacctgtgttatagcatataatgtatctgcaacaaacatgacacacaaatgcatgaataccgctgattattgtacttctctcttccatctttctgtagatcatgacatgatttcttcacatagttaccatatatggcatgtaaatagatcttgcaatagacccattaaataaaaatcattgtcaatgactcaaggctttgggcaaatataactatacccttactattaatcatgagatattaataaaataaagtcttgcttgctttaacgacaagcggactaaacatactaaatcatgcagatttcatccaatatatgattaagtaaatgtaacatgccattctcaggaaatgagagaagtttgaggggcaaa

SEQ ID NO: 25388 - DNA, 455 bp, Arabidopsis thaliana
ctctctgttcttctccgacccaatcgtctggtaaagctcctcgctgtggacattgtaacaaactgggtgggactcgcggtccacaccgttcatgtaagctgcagtggcaagatcctccccaaactcctctccaaggatcgaatcaatcttgttttgctttctccatttgagggttttcttcagcatctcaaaggcttcgttgactttaaagtctcttgctctcaagaacttcaagaggataacatccgtgctttcagctcctttgcttggaagcaatggcactccccaaagctcgatatccttatccaccgactcatcttcatcctccacctcaatagtctcagctttcacttcttcagtaacaacatcctaggttttcttctcttcttccttggtgtcttcttctaccttctcaacaacagtagtcacttcttccttggggattatctcctctg

SEQ ID NO: 25389 - DNA, 1537 bp, Arabidopsis thaliana
ctttacattctggcatgtttcttattttcttacttattgtatatcgtgtggacccaggtggaccaactcctgtcctcgtcaaagccgaagttccttggtcagctagaagggaaacctttctgaaaatgatcgtgttctgaagactgtgaaagggtaatgccgttgtgacagttattagttgtctagacttttgtataactttcctttactgccaacatgaaatctttaaaatagactatgcacacttacaaagatatacttttcttgtccaggatactgaacaagctaacccctgaaaagtatgaccttctcaagggccaacttattgaatctggcatcacatctgctgatatcctgaaggtgtatgctatgtctcaagcatagatgaagtcttgtttgaatcatctaggctgtttgtgtggctaacccgtgttcttttctttcatttgtagggtgtgattacccttatttttgacaaagctgtccttgagccgaccttttgccctatgtatgcaaaattgtgctctgatatcaacgaccagctgcccaccttcccacctgcagagcctggggataaggagattacatttaagagggttctactgaatatctgtcaagaggcatttgagggcgcttctcagttgagggaggagcttagacagatgagtgctccagatcaggaggctgagcggaatgacaaagaaaaattgttgaagctcaagactctaggaaatattcgtttgattggtgagcttttgaagcagaagatggtcccagaaaagattgttcatcacattgttcaggttaacacctataagcttacacattttcttagacttcttttattttggtatctagcattaacctttcttaatttgttctgtgcacaggagcttctgggggccgatgagaaagtttgtccagccgaggaaaatgtcgaagctatttgtcatttcttcaaaactattggcaaacaacttgacggaaacgtgaagtcaaaacggattaatgatgtatatttcaaacgcctacaggctctgtcaaagaatcctcagttggaactgcgtctgagattcatggttcagaatatcatcgacatgcgctccaatggctgggttccaaggcgggaagaggtattctaggttttacaaggttgagacttgtttcctgctccattgtgtagtgattctaatgttctatttacattactcgtgcagatgaaagcaagaactataaccgaaatacatactgaggcagagaagaatcttgtctccgaccaggtgccactgcaaatatgagaaggggtatggtttctagtggtgggcctgtgagccctggccctgtctaccctggtgggcgacctggtgcgggtggcttgatgcctggtatgcctgggacgcgaaggatgcctgggatgcccggagtggacaatgctagctgggaggtaccccggacaagatcaatgtctagacgcgatgggccaggacctctacattctccagcagtgagcaagtcggcctcaatgaacacgaggctc

SEQ ID NO: 25390 - DNA, 733 bp, Arabidopsis thaliana
  unsure (1)..(733): unsure at all n locations
gacaataaaacagagaagaaaggctccatggctttaatggtgtgagtaaaggaaacagaaactttcccaagactcatgttcgtaaacagattaccaagtgtgtgcacaacagcaagcggcaagatggcagctagctatcaaggtaaacatatcagagtgagtgacaaatctcaagaacaagcagcttttaccagcctccattaaaaacacacacacacacacacacctgagcaccactgatctttggtctcttgtacaggttaagaacccacatgatagtaatgagcacactaccaacagcaaactgaaccaaagtcacagtcattggagcatgtagagctttcaaaacctgcaagaataagaagaaacaagaaactaactattgattccctcaaaatcaaacaataaaatcaactaatcagtgaaacacatctctctcctgtataagatataataaaatttctgaattcttcatcctaatcaaaacatgattgaactaaacctttacattttttgatagaatcaaaagttagacttctaacaatttgccaaatcacaataaacactgaaattttctgaatcagcagaacaaaatatctctcaaatttctgaacacttcatcctaatcaaaacacgattaaacacaaaaatgaatctcaatcgttaagattagttcaatctattgaaactatgaacttacaacaattagccanaacacaatgaacagtaccaa

SEQ ID NO: 25391 - DNA, 544 bp, Arabidopsis thaliana
tgaacattcacaccctgcaaaactgagattggttgttaggaactgcaaacatttgagaaggatataaaaaaatagaattgtaatatataataaactcacagctgattgaatgcatgaaggagtgaacttgatgccttccgtaaagaaagtcacatgagccatcagaacgagagacatcaatgttataaattgagaagagagtgatgttgtccaacatgtcaaagaaaaacacaaatcagaaaaagagctcacctccccatgaaacaaagcagataataaaacagagaaaaaaggctccatgggtttaatggtatgagtaaaggaaacataaactttcccgaggctcatattcgtaaatagattaccaagtgtgcacacaacaacaagcggcaagatggcaactagatatcaaggaaacatatcagagtgagtgacacatctccaaaacaaactgaacccacatgatactaatgagcacactaccaacagcaaactgaaccaaagtcacagtcattggagcatgtagagcttttaaacctgcaag

SEQ ID NO: 25392 - DNA, 828 bp, Arabidopsis thaliana
atcccctaccaaggatccataggcaccatactttcaccgttaagtaaacgccttacattagcaacgatctctctagggttatagtttggtatgaacgtgctccacccagttccaatgccttcagcgccattgacaagtacagttggaatgatgggcatgtacctaaccaacattaacatgttaagttaactagtcttaggaaaaaaaacaactaattaaggagcgcaaagaattaccaagttggctctatcctttgcccgtcttcattcaagtaatcaagaaggagatcatcatccttgggaaacaagatccttgttactggagagagcttagtgaaaatgtatcttgcactagctgaatcttttccaccctacaattgtgtacactatgatgagtacaagcatagataaatgacaacagttggtctattagctatacttaccgaagttcgtgtaccaaattgaccatttggtagaagtaagttgatattgttgctgcccacgtaatcctgcgccatgcctatgatagcactggcaagactctgctcgccatgatgataagctgacagcaatgatacataaccaacgagctgggcaaccttcatttctttacgagcgattttcttgaatgcaacgaaaagtatctttctctgacccggtttgagcccatcaaccattgagggaattgaccgttgaagatccgccatggagaacaagatcagttctttgttcacgaagtcactgtacgtaactttcggttgtctctgatcaagatgattgccaggctgaatggaaaataggaaatcagaacaggcagatgtagtaagca

SEQ ID NO: 25393 - DNA, 948 bp, Arabidopsis thaliana columbia
aagacagaattcccagtaaccgtgtctctcttctgtttccctgaaacaatgaaacaatatatccataagacatgattgaactctgcattgctcttccatgaacaaaactagaagtatggaaacgttcttttttttttccagtttttgaggcaaaacacacaagtaagaatatcagattgcaaaaataagatgtaccttttcccggttgcaaagaagctctagaactcgagatccaactgcatacccagcatcctctagtctgagagtcatcataaaagaaaacacattgttaaggatggaatgtaaatgaattagactaataaaaaaaaatcatatgtatttctaagaatccaatcagctcaccttctttcaagttcagctatattgtcaacctgggtttgattgtactgaacgagctccgagaataagaaagcaaatgcggtcaagctcacctacaacacaagtacagttccaaaacgactaaccaatcagcagatgctcgaaatcgaatgatcacaataaagagatcaaagaagaagaagatcaaaacccgagagatttgaaatcgaaccctcccacaactattagatccggatccaaattgaacaatgttctcaatttccatacttagttcagtgtaaaagtttctgaggaaagctccgaaattggaagagaaaagtggatctacgtagcgaaaacgtacctcttgcttgcgtttgctgagaggcttgtcaaggacgttggagtactgtttcattttcccgactccgatcatattcttcggttttccggtgagaacgagcttcccagaaccagaaccctaaacacagaacctttcttagttttccggtgaaagaatctgaagatgcttttgtttattgcaccatggtttgtcttttggtcgatgaaagtcaaaaaaagagttatttacattttgttatataattt

SEQ ID NO: 25394 - DNA, 545 bp, Arabidopsis thaliana
tggacgatgagtctggttattagcaataaggactccatcaacaatcaaaagaagagctaggggagttttaaagggtcatcaatcccttttaaagtttggaacttagaagaaacatcgaccagtattgcattcttatctttccctatcaaaacatcccagtatcattcgtcctattgacacgtttatggaagaagtcaggttcatactcctccagaaattcaccacacgacaaaccagttatagaaccaaactcaactaaagagaatctaagtggttgtccaccaaaaatagtccacatttcgtatttatgttttgtaaccaactgtctacataacaaagcatgaactattttgcaagagattggacattcgctaacccttaaactaaacagagacccaaaacaagagtctaagatggtttccatttccttggtacctttcaaaacgtcacatatgatagtgagaatgtcgggtctggagtagatattgcgacgagcatcaaggtaacggtcggtttcaaaaagccttggagggagacgagtgttg

SEQ ID NO: 25395 - DNA, 559 bp, Arabidopsis thaliana
tgttttgtctttaaactcaaaaacttaagacaagaaaaagaatgggttcatggatacccaagttgctgctgctgcaacttgtgcttctgttgactaagcatgctgattcaagttctatcatcaaatatcttcctggttttgaaggccctcttcccttcggagctcgaaaccgggtttgttcctcttcatattagccttatgatgtatgactctgtgttctctaagttttggagttaaatcattaaggtacattggtgttggtgaggaagatgaagatcaaatgttctactacttcatcaaatctgagagcaatccaaaaacagaccctcttcttctctggctaagtggaggacctggttgctcttctttcagtggtcttatatatgagaacggtaaatcttcttttactcattcttaatattcctctgcagaatattaagtgacttgtttgaactgaaatagaaacaatcagggccacttggtttcaaggttgaggcgtacaatggaagtatcccacgttggtctctactacatattcatggacaaaggttagagaaat

SEQ ID NO: 25396 - DNA, 544 bp, Arabidopsis thaliana
ttcttttcttcatcaatgaagaaaccgcaagtctcttcataaaactgaaaatcaagaacagtgagtggttctatatcaacttttaagaagggggtccacaacaccacttagggctcaatcttagttataatccaaatctctatcacagggattgatataacaccgagagtttctcttctttaacgcaagatagagtttcattattgttatcatcctcatgatgctgaaatggcagaggaagaacctgtccaaatctctctgctgtaaaatcaaaacatattaagaaatatggggtttgaaatggatcacaccctttcattctttcttgagtccaatagtaagtatttccggttattaatacttaacccaaaccagagaagtgtttggattgtgggttaaccggtcgaactggagggtccgaattggacgtgaaaacactgaaaaaaaagtaatctatttgtgtatcagactgtgacacataacaaaaaaccatataagcttttgtactggcatcgatattgttatacaacggtcttgttgatat

SEQ ID NO: 25397 - DNA, 564 bp, Arabidopsis thaliana
tctctgatcaaaattaaaaaaaaactttataaagtttgtaagaagttaagctctgaccttagctaaacgctcctctctcctagcatgcttcctttctcggctagccttgttcttcgccctcttagcctcaaactgatcagacagagtcttctccctagccttctcagcctttgacttgtggatactctccatcaagacacgcttgttcttgaacacattacccttaacacgcatgtacatgtcatggtacatgtgcttgtcaatcttcttcgtctctctgtatttcttcaacagacgcctaagaacacgcatcctacgcatccacagtacctttgttggcaacctagcttcacgggtacccttcctcttacctatttaatcataaacacaggaaaaaaggcaagagtaaacaacgctaatcattcttcaaaatcacgactaaatagagggattttcagagttgtgaagtatataccgtatccagagtgacgacccttcatcttggcaatcttcattttgcgagctctggaacgagagtgaatcttggttggcttcatgatgatg

SEQ ID NO: 25398 - DNA, 908 bp, Arabidopsis thaliana
tgggatatgctcaaatcacatctagatctcatgattcatatttctataccattctttcgattttgatcttgtttctgtctacacctcctgtaaaatatattttttacacaaaatgtatttaaaacccattatacaaaataataaactccagtaaagtgaagaattacaagtagaagaaaaaaaaaagacatctcgtacaaagtcagaattgagagagccctaaacacaaggaaaaaaacaagatcaacaagaaaaagtccactttgtttggttttagacaaaaacagtaacttacttttttggtcaaactctgtagaaagaatcaatctcccttgtaaatctcaccctcctgtcaccatcttccctccgtcactttcccaatttaatttataatcagaaaccctacatatacacctaggtttagggtttcgctttttcagagaaaaatagtttctttttcttcaagttaaaaaaaaaaaattattaatctggtacgctacagtgcaccgaaatcccatagatgtataatactctgagccgttgatgaagctgacgcaaccgccacatgtctatcatcggcaacaatggcgtcaacttctcctactctctccctaatactgtacagatactctcctctctctacctcccacacgcgcattataccacctgcgcacattagcgcgtgcagtctattaacacaacccattactcttctctgcgccgctccactaacacggaactcacacaccgtttgttgcgtgttccccttcgcacgctagcgtttcctctactgtccaatctaacgtacgcttcgtcgttggcatcgaagcctgtcactattagtcctctacgttgctcttcgtcttctccgatgatcactccttggtttcttagatcgatcaccatga

SEQ ID NO: 25399 - DNA, 887 bp, Arabidopsis thaliana
tgggaacaagaagaggttagtaatgaaaataattgggaattggctgaagaagaaagtgttgactggagagggagaccttccaaccctaacaagcatggtggaatgagagctgctctctttgttcttggtaatattaaaaaaactttcttagtgttaaacatttgtttgtagccttagatggatcatcttgtttttgtatcttggtccataagaactccactttttatccaaactttggtcccactatctaagattatatattccatggaccttggcaagggttagatttctcgatttaattatgtcttattgatttgtggtctttcattctatttttttaggactacaagcctttgagataatggggatagcagcagtagggaacaaccttataacttatgtaataaacgaaatgcatttccctttgtctaaagcggccaatattgttaccaactttgtcggtaccatctttatctttgcccttctcggcggctatctctcggacgcctttctaggcagcttctggaccattatcatattcggcttcgtcgagctttctgtatgttcatcatctctttccagtacttttttgacatatatgtacatacaattctccaagttacttggcttgcaatttaaaattaaaatctaaaccactttcgatatgggatttctaaccaaatctgtttttttacacgtaagtaatttacgtgagtatctccaggcaaacatgccttttgtgtgtgatcccattacgatttaattaactatttacaaaaataccagcctataaacatcaccaattactgttttagatcaaagtttctcattccgaaaactttctaataattttttttccttttcttttaacgatgtattgccacgtg

SEQ ID NO: 25400 - DNA, 442 bp, Arabidopsis thaliana columbia
  unsure (1)..(442): unsure at all n locations
cttcgaaaaagagtacttttgttgctgaaaattgacctttctacccttttgtacttttattgctagtcgttttaaatgaagttcaaatgtttattgctgggttttttttatcgcttgttgcagggtgttgatgttccagtgtttgccatagctggaaagtgggaatgttcacaacgtctaaaaagcctccagtagctttaagtagcactgtcgcgccgaaaagtttcttgcttgtaaaggagacaaaggcacatttaaatttttgccactctattgagcccagtgttggtggggacatccaaaaatttgattggcgtgacgttggggaaagttttggaactgccaaatacattccaagggagctggagagcgttcgtgttgagtctcaagtagttcagtttgttactgctcgnacacagagaccaatggtgacgtagatgat

SEQ ID NO: 25401 - DNA, 1009 bp, Arabidopsis thaliana columbia
tgtacttttattgctagtcgttttaaatgaagttcaaatgtttattgctgggttttttttatcgcttgttgcagggtgctgatgttccagtttttgccatagctggaaagtgggaatgttcacaacaaggaaagtgggatttgtgatagaaaatgatcgatttgccaggagcatatgcgttaattctgatatgacattttatgagctcgaagcggctgtagctggtgagtttcatgtcgatgcaaatgcttggattactaacttaagttactggcttccaaagcagctgtcaatattttcaacgtctaaaaagcctccagtagctttaaatagcactgtcgcgccgaaaggtttcttgcttgtaaaggatacaaaggcacatttaaatttttgccactctattgagcctagtgttggtggcgacatccaaaaatttgatgggcgtgacgttggggaaagttttggaactgccaaatacattcaaagggagctggagagcgttcgtgttgagtctcaagtagttcagtttgttactgctccaacaatagagaccaatggtgacgtagatgatggcgcagggaaatacttttcaagtgaggtggagggcgttcatgttgagttggcagtggttaagtctgttagtgccccaacaacagagacaaatggtgaagcagttgatggtgtagaggagtggctttttcgaggaattaggcgtcacgacaaagctctgtggactgaacctgcgtatgatgtttgccatgatttagatatggcgggattataagtccagctgatgcaggcacgccatctttgagtacagacattgatggaagatgcgaggaagatttctttgccaactactctgaggatgaggttgatcagagggagctagaggctttagaaagagctgaagcggaaaaggctcgtgttaaaggcattagtctccggtactgcttagtcccacggcttcccatctaacgaatctaatcttcaatgaggtttgtaatct

SEQ ID NO: 25402 - DNA, 908 bp, Arabidopsis thaliana
ctctttttcgaagtacactggcaaagtacctaattcaaagttttccagtttatgaggaggataaaataataaatgttatttctgaatattaccaacaaatctttacctcaattcctggagaaaaaaatcaattgtcaatacaaccctaaaaccaagtatctcccaagatatgaatgacaaactcatactaatgccaactccttgtttctctattcatcctgacaaggccccgggtcctgatggcttctcagcgagtttttttcaatctaactaggacaatatcagcgaccaaatcatctctgaagtccaagctatctttattacatgtcctgccaagaagaatcaatcacacccatgtcaggttaataccaaaggtgccttgcccccaaaaggtttcagactacagacccatcactctttgctctgttattacaagatcatatcaaagattctagccaagagacttcaaccagttttacatttgtgtatctcttaaaatcaatcaccttttgttccccagcttgctatatctgataacgttttaatcacccatgaagctctccattactttaaaacctcaggagcaataaaacgttgcttcatggtagtgaaaactgacatgagcaaagcctatgacaggctagaatgggactttatccaggcagctcttgaaagaatgggattccaccctcgtctgattcaatggctaatgcagtgtattaactttgttacctattctttcctcctcaatggtcaggctagacgactagtcacacctgaaaggggaatcaggcagggagacccttatcaccatacatcttcattatctgcagtgaagtgctgtctggactgtgtaacaatgccctcagccaaggtaacttaattggcctaagagtttccaaaccgca

SEQ ID NO: 25403 - DNA, 549 bp, Arabidopsis thaliana
tgcacaactgttaatggctcgttcaatgtcatccaatgcttcactcgatctccaaaattcttgaaacaaatatccgcataatcacggaaatcattcacaatctccgcgccaaggaaccctccataagcatcttcaaggctttgcggtgtgtcccaatggaaaatggtggcgaatggcttaattcctttagacaaaagctcattgatcaagttgttgtaatagtcaataccagcttggttgattcctccttttagattctcacgtggcaagatcctcgaccacgagatggagaatctataggcatcgaaaccaatttgatgtagtaaacccacatcttccttgtaaagatggtaagaatcacttgcaatagatccattgctaccatcttttatcttctccggatatttctcagagaatgtatcccaaatacttggacctctaccatcttcatgggcagctccttcgacttggtaagctgacgttgcagctccaaaaataaaatcttttggaaaatcacttcttcttaatttaggtgttgaggagtgtttc

SEQ ID NO: 25404 - DNA, 907 bp, Arabidopsis thaliana
ctactccaacagttgttgagtggtgtctccaccagttaagaaatcatggctcaacgctgcaaaaaaacatatcttcacaaaacaaaagtttgtggtagatgcagttgatggtaaagaaagagtgattgttccgaaagaggttttttgcaggtgcaaaacctctctgggaggattttttggttggtcgattccttagtacgaaggccccgcatgtgggaaagattcacatgattgtgaataaaatttggagataatttaaacttaattgatgtgtatgaagtaaacgcaacaacagtcaaatttcgcataaggaatgaggcaatgaggaggagagtgctgaatagaagaatgtggaacattatggacattccgatggtgctctcgaagtggacgccttttcaagaagattctcaaccagctatgaaatccattcagcttttggttactctcacagatgttcccccgtcaatgttcactgataaaggtttggaattcttggctagtgcagtgggtaagccaatacggttacatccaaaaacggaagcttgtgtgagttttgatgaagcacaaatcttaatagaagcagacctaacaaaagatctacctagagagtacgtattcacgggtgaggaagaaggagagctcgatgctgttattacatattcatatccttggctgcctccgagatttaatggatgtggtaaatggggtcatcttaaagaaagatgtttatctattgagaaaagcagcacggggaatagtgattttgtaaccattcccgcagttgcttcagaaccagttcagccatcctctccaattacgggaaaagctaaggaagttgttcatgtaactttggatgaggtcctaagatcaatctacgcccgggggaagtgaggtaggagagaga

SEQ ID NO: 25405 - DNA, 917 bp, Arabidopsis thaliana
tcctcccttgccgctcgcatggtttcttcgtctgcggtcaaagcccctgtttctctcgattttgagacatctgtcttcaaaaaggagaaagtttctcttgctggttacgaagaggtttatctcatttaccctcttattcatttctgttctaatttgtgcttattctataatcattttgatgtgtattgattttgttagttgttgctaatgtttggtttctgctgatctttgttttagtacattgtgagaggaggaagagacttgttcaagcatctcccagatgctttcaaggggattaagcagattggtgtgattggctggggatctcaggtacttaccttttttggtctctttatctgtagctactgtgcttcttgtttgattgctttttaaattgcttacgttggattgcgaataaggaatcttggttctgtgttgtgatacgaaattggtcagaaaaaggatatgaataaagtgttttcattttcatacttttgatgcatttgagttggtggaatgaacaagattaatatattgtttcatattctttttattcagcatctcttctcttgtaataaacgctttatctatatatgcagggacctgcccaggctcagaatttaagggattcacttgtggaggcaaagtctgacattgttgtcaaggtatttcaactgcagagttggcttcatacttgtatttgtttgctttctgttgttacgtgaaggctctgttctgactttgttttcgttttaatatactattacgtagattggtctcagaaaagggtctcgctcatttgaggaggcacgtgctgctggcttcactgaagaaagtggtactttgggtgatatatgggaaactatcgctggcagtgatcttgtattgcttttgactctgatgctgctcaagtaagt

SEQ ID NO: 25406 - DNA, 870 bp, Arabidopsis thaliana
gtgatgatctatgttacggcaatcaatgcaaggacagacaatcatatcaatgtctcccatcgccgcagccacatttcagacaaaatttgtagctcctctctcatttactaaatcaactctttaacaaagagtcaaaagggaaattaaaaaaaaaaaataaaaaaaaatcctaattacagagcttataaataaaaaaactaacctacagaggtgcacccagtccttgtcaatcattatatattataacagtgttttgaaacctttatatagtaccataaaaacaatttcagatttaataaaatactctttagacatcataaaagccatttatattcatacctattagcaaatatataaaacaaactcatatatgaactcaatcaaacaaccaatgtgaattgatcttagaacagatcaataaactgcgtcaaacacaatcaacataattgtaacaaatcaaacaattataaataacacaaagcagacaaaacccacagtaatgtacaagagtgaggagaagatggtacaaacctgtcgtgtgagaagagactaagatcagctccaaattcccattatttcaagcaccaaaacttgcaaaacaaaattacataatcagtatatcaagtgtcatgtgtttgatttagaacttcctaaaccaaccaattgtgtcagacaataacataagcaatacttgtcttagtttacaaaattttagaccaaatacttcatatctaactagctacgcctaaagcaaaccaacaaataccaatcttggaagcaaccaaatacttagattgtagcacgccaagaacaaggacatgcaaaatgacattgtgacattctagacgaccaattgtgttagacatacag

SEQ ID NO: 25407 - DNA, 515 bp, Arabidopsis thaliana
tgacaaccaaaagaagcaaatagattcatcacattagccacttaggatatatcctgatcaaagcaatgaacccaactaacaacaatagctaatcttcttaccagacatgcgaccatgagagccctacttgttccaccaagtgaatcctgcagtattctagtcaatttggtttccctgtatggcactctagggaggttattattcagtgcataaaccacattggacaatgcaaataatgactgattaatcttggcactctcttgtaaacggatcccttcattgcctgtccttctattgtcttcgttacctgctcaagccatagagttttttgttaatgttgcagataaaagaacatgtagatgctcctcttactctagcaaatgcttggaaaatggtaaaaaccaacctgcaagatcaatcagattgattttaccagtgacaagcccttgtgaggttactgagatcacaagcactccatggcttctactagagacatcatttaaaccagtgtgtgc

SEQ ID NO: 25408 - DNA, 620 bp, Arabidopsis thaliana
cactcattgcgcttattaagtcgttttagttaacttaaagcaggacatagcgtaaactggcatagccaatgccactgctttaagtagaacttctttaccacccatggacaaagaccttgcaaaccaaccagacaatctagccttcaacttgtccttaatatagtcaagaagctggattttcgagccactaaaacattccgggagacctagataggtacttgctccgccttcattcatgattcccatctttgttttgataagaagctgcagaacagaattaactttggagccaaaagttaaagaagacttatccaagttgactctctgacccgtagcatccccatactcctttaggatctgttgtagcgtgttaatctgatcctcttctgctttgcaaaggaaaagactgtcatcagcaaaaagaagatgatgtactgctggaccttcttcagagaattggatccatttatcagaccattgctttctgctatattcattaggtgagtgagacttcagaacatagaacaaagagaaaaggtgatagggggtctccttgctcagactctacttggtttaacatccaaaacttgacattgatgagacgagaagtaccgatgtac

SEQ ID NO: 25409 - DNA, 785 bp, Arabidopsis thaliana columbia
attaccggaaatttgatatgtcttccgaatgtaaactatggtgctagagtttataatgacaaagtagctaacttggtcaatcagtacaaccaaaggcttcccaatggcaaattcgtctacatcgatatgtataactcacttcttgaggtcatcaataatcctagccaatacggtaaaacattgagtaacacacgcaaattttgaatatatatggtagaaaaaacaagggtgctaatttctacattgtaatacatttcagggtttacgacggcaaaaccatgttgttgctcggtgatgactccgattccgtgtttaagatctggtagtcacgtgttctgggactttgcccatccttctgaaaaagcctataaaactgttctaccttagatcctcagtaccatccaaagcaacctcgcctagtcactaattttctctttcttttttatatttagacatgagaaccatgaaccttggtttgaatatgattagttcctcgatcgacgatgagccgcttgtaggtctctattgttaagcttgatttatgtgttctcatcaattaatcagaatcagtgataatttcatttgcaataattttggtgcttcttagtttaccagaccagataagttatgtgtttggaaaagaagaaaaaaatactagaagaagataaaagatttccatccaacacaaatacaaagatcaacaaatgagagacatctacacagataaatatgttattaattttggtttgtttagtgtacgcaatattttcccagaaattgtggtg

SEQ ID NO: 25410 - DNA, 668 bp, Arabidopsis thaliana columbia
tacgtggacttctccggtaaccaatgacgtgcaccgagacaggtttacggggttgtacatccgccgcacgtttacatgtcgggtcaatgagtatccagctcaaggagagactctcttccaagtcacttttccacgtgtcatccttacattggtccgtaaccaaaactctggtcggaattagttctttcggttcgacaagatcgacacgcataggtgagcaaaggaaccaaccagagactgtctctgtaacatgaacccttgagaaaatcacgtcatctttgtagaatatatcaacggctgagattaactccgaggtatcaacggacggtgggagattgatcccaacatcatgttcaagaaacggaaaggaatcggaaaaaaacgtccggtgaacgtcggggaacgttgagatgatgctttggacacgtgtatccgaggtagaaggccatgtagcggaacattgttgcctccagagggactcgtcggagcaaaaagagcttaggttggatccaatatcacattctggcagcgataggaggaaccgacgcagacggattaggatgttggaccgtgccacatcggaggacacgtggttgatgcccggactctgggaaggtaatggtcgaaccaccgttgacgaagacgaagacgaaagcacgagataaaga

SEQ ID NO: 25411 - DNA, 1052 bp, Arabidopsis thaliana
cagcttcagtgtagagagacttctcatcgttccaaacacgaacatagagctcttgtcctaaatacctcctcgaccatatttgtgaccttagattccacattcctttgttatccaacgacaccaatatcgttgtccacgataacggatacaccttcatacacacaatcatcgttgattacttattagatatttagattcaatcatattgtttctaaataagattattacctgaaaagtgtgtcttggaacagcatcaaccaagttgtaacgtttcctcatggtcacgttccatgtccctgacccgtatctgtaaaaggtaatcaattacgtacggtttaagttatgaataaccggaaccggtttagataacagagggcaatgtgtttgcttacccgacagcataggcgctagtaccgtccatgtgccaagattgaattgatctttcgtcgttttggaaaacgatttcgacgaactcatgaagttcaacgtcgataaccgatgtaccaatatgagccggtccggttgttggagtgctaatgattgtcttgaaatcgaacacgcccgagatgttgtaccaatcagcgagtttcaatggtgttgttgggttgatgtatgatattcggtttactgtgtaccgaagcttcccgtagatcaatgtggctgcattggctaggactagagttcggtttattggtatggtcccgtaatgaaatgatccttgtgggtttggccttgcagcatttgccgtcaaattcatcctaagaatcagaaaaagttaaagtcaaattaagcagaaccaatctagacttgtacggttcgatttagttcggttatgttaggtttggtattaatacctaatggttcttgcttgtttcatggaccaatggatatggtaagtaggaccaatggggagaggccatatgcagcgtttttggagccttggtaacggagactcgcggttgtggttagtaccggttttgtaaccgggttgaggcccgatgaaatagccctcacagaagcttttaaagtgacaggacggtcatggactgaca

SEQ ID NO: 25412 - DNA, 3761 bp, Arabidopsis thaliana
ttatcttttggatgtgatggaaacacacaaaaaggagaggcgtctaaaggagcagtggctgaagcttactttagagatctttttacttcatctaatccgggtaatttccaggagatcttccatgacttccaaccaagaatctcgtcttcgatgaatgaaattcttaccaaggaggtaacttctgaggaaataaaagaggcggttttcagtattagaccttcaagtgctccaggagctgatggttttactggtcttttcttccaaaaatattggcctctgattggtgagcaggttacaaaggaggtcaaagactttttcatctctggttcctttccggttgaatggaattacactcagttgtgtctgcttcagaagaaggttaatcctgagaagatggctgatcttagaccaatcagtctttgttctgtcctctacaagatcatttccaaagtcttagtcaaaagactgcagcctttgctgggagagatagtttcacctaatcaatcagcctttgttgaagaaagattaatatcagataatattctgatagctcatgagctgattcacggtctgcgcactcacccaagaatatcttcagagtttctcgccttaaagtcagacatgtcaaaagcttttgacagggtggaatggtcttaccttcaagcgttgctttctgctttgggttttgctcctcaatggatatcctggattatgttctgtgttacatcggttactttctcggttctcatcaatgatcaagcttttggaatgattaaaccaagtagaggtctgaggcaaggagaccccctatcactttttctctttgttctatgttctgaaggtctcactcacctaatgaatagagcagaaagtaatggtctgataaacaggatccaattctctgaagaaggtccagcagtacatcatcttctttttgctgatgacagccttttcctttgcaaagcataagaggatcagattaacacgctgcaacagatcctaaaggagtatggggatgctacgggtcagagagtcaacttggataagtcttctttatcttttggctccaaagttaattctgttctgcagcttcttatcaaaacaaagatgggaatcatgaatgaaggcggagcaggtacctatctaggtctcccggaatgctttagtggctcgaaaatccagcttcttgactatattaaggacaagttgaaggctagattgtctggttggtttgcaaggtctttgtccatgggtggtaaagaagttctacttaaagcagtggcattggctatgcctgtttacgctatgtcctgctttaagttaactaaaacgacttgtgcaaacttaacaagcgcaatgagtgatttctggtggagtgctttagaacacaaacggaaaatggtttgggtgagctgggagagattgtgtttatcaaaggctgaaggtgggttagggttcagagacattgaagttttcaatcaagctttacttgctaaacagacctggcgtattcttcagaatccggattgcctttttgctcgcttaatgaagagcagatactttcagtgggatgacttcctgaatgctaacatcacctcaagaccctcttatgcatggagaagcattttacatggtagagagttgttgtgcaaagggctgaggaaaatggttggaaattggaaatctctgaatgtttggattgactcttggatttacgataatgggttaagagctcctcttatcaagaacccgatcattaatattgatttaatggtagaggatctcatcgatgtggaggctagaggatgggatagagacatattggaggagcttttctatcccaatgatgttcagcttattctctcaaaaaagcctgtggtctcaaaagatgatttccattgttgggagcatactaaaagtggagattactcagtcaaatcgggttattggtttgctagcagatctcccaataaccaggtttttcttgatgcaattgtccagccatctttaaatgccttgaaagagcaagtctggttggtccaatccgctccaaaaatcaagattttcctctggagagctcacagctcggctcttccggtggcaaacttgctgttaactagaggcatgaagattgattcgaggtgtcaaatgtatggacaagaaggtgaatccataaatcatgttttgttcacttgtcctgtagcgagacaggtttgggctatctttctgtttcctttccctgaaggcggttttagtgaggagtctgtttacagaaattttcaatctctctttgatataaagaagaatggaaagataccgctaagaaacagaagatgttttccttggattctctggagactctggaaaaatagaaacaagttctttttcgaaggggcaagttactgtccagccgagactgttgttaaaatagatgaagatatggatgagtggttcacctctcagctcatccctacttcggttgatgtggaagaatcgatctctaggttagaggtaaagaaagaatgggaacctcctcctactgattgggtcaaatgcaacattggtcttaggtggtctaataagcatggtttcgctggagcttcatgggttgtgagaaatgcgtcgggagtcgttttacagcacagtaggagagctttccttgatgtgaaggataaaaaagaagcaactcttaattgccttacttgggctattgacaacatgcactctcttcatttaggcaaaattgtttttgctttggaagctcaggatattgttggagcttttcgaagacccaaggcttggccttcctttactcatcagataacaaaaattaactattttttggagaagatagtggactggaaattagtgttagaaactgtggaaaccaatagaggagcctcgttaattgctcaatcggttgtctcagactttagactcaactcttatgttgcgtctggacatccattctggctcaatggcctttttgttgaagagagatcctcctcttgatcctggattctccttttgtccgctgtccactttctttgactatatttttttggtagattaggattattctcttctaaatcctaatcttctcatcttggttttatcaagattgaaatatgatgtatgtgtaacattttaaccatcaatataattattcagacgacaaaaaaagaaaaatttgttaattaactctatttttctagccaatcaaaattatctaataaaaaaataaacgcatttaattgtaaaatcaaatcgtaatcactcttttataaaaccgaaacaatcatttaaatacatttaattataaagcataaaccctattttataaaccaaaactgatacataaactcgtttaattttattttttatatctttggatcgataaacctcgatctatacccaatccctgttatgcgggataacatgatttagtgaaatcaaacttcggtaaaaaaggcggaatcaaatggacttaaccactttaattataaaatctatgtataattttatagtttcatctcgccatttttctagttcaccttttcaaatttttttttgtattttatttaccgaatgcaaactaaagatcaatattttattttattttctgaattcccagtcaattctgagtcatattcatagcaacttggagctttatactaggaaagcgtctagattttttaccttattatcaccggttgaaagaaatcaaacgaaattaaagaactatatacaaacacttattt

SEQ ID NO: 25413 - DNA, 836 bp, Arabidopsis thaliana
ggttctcttaaatgctgttgtaatttttgcatcaatgtgaggttatctgttatgtttacaaacatggctattgtctctcaaattattctcagaaattcttaacacatgtctgagaattgtaaatcttgattgaagaataaacttggatatctctcaaattatggttgttatggcatcagggataactgggaagatggaaatccgggatcttggggaacgagtcctcaatatcaggtaagatttatacatctattgttttgctttcaaccttattattggcttaatgtctctgacatatgtagtcgtgttaattacgcattaaaatcgtttgtgttgcacttgtttccagccgggaagtcctccttcacgggcatatgaagcaccaacgcctggctcaggatgggctagtactcctggtggtagttactcggatgcggggacacctagagaccatggttcagcttatggtaagatgcgtgtaatctttttcaaaatgttgacttttctagtctggcccgtctttttcttacataccttgtcatgcagctaatgccccaagtccttacctgccatcaacacctgggcaacccatgacaccaagctcggcttcatacttacctggtactcccggaggacaaccaatgactcctggaactggcctcgatgtcatgtctcctgttataggtattgtctattgtcggggtaatagtcaaaaggataaatgtttagtatagtccgaccttgcatcttccttctctcagtcccccttagttagaagtttccgtttctatggttgttttcttagcttattgtaaatgcaacaggtggggatgctg

SEQ ID NO: 25414 - DNA, 780 bp, Arabidopsis thaliana
tcaatgtcttcttgtgaccgcttcaggtttcgtgaggagacacagtaaagtcaatgtgtggaattaaaatacaagtcaatgcataaaatacctaaacaagaaacggcacttttttccagtgaataaaggactttttattagatttttcacaaacaaattcaatgaatcacagcacgattaacaccacatttatcctaatactaataatcacagaattatggatgctgttgcaaccagtctttaatggcggaacgaagaacaagattcgggatgagattgcgattctcgagcctaagatttgtcattggtgatttttcacctccgtgattgagccatcttctgaactcatctgcttcataggtgtaaccatcggctgcaacatgaggattttgcataatatcctacatttcacgagcaatggcatgaaaaatagttagactgcagatcagcagcagatatcaaaatggaagataagttataaaaaaaaaaaacaggtatggtttagaatacttgtcagcttagaacactaaagttgagatattgaacagaagccaagtcaagatctgaatagaaaatatgatatctcgatggaggctttgagtcctaacctttgaaatgggacatatgaaacattggggaggctcgatggaaacagaccactgcaacgggattgatgactcaccttctccaaagctcttaaaagctcttcagttgtcttgatagcttcgtctcgctctgtctctaacagacggcaatcagcataatgctgttctttaagtt

SEQ ID NO: 25415 - DNA, 1433 bp, Arabidopsis thaliana
catcttttatcattataaactatttatgatctcatcaatcaatatccacaatttttaaaaagaagaataaagacaaatccattgcttaatggttaattaacagtagtagcagatgacatatagaccacaagtagcatacacaaacagagacaagagacaagacatggggtaatatggtacagaacctgacatgaccaaagaaatgttcggaaggaaaattaaaagtctctttcataaagattggagaagcaaactactaacactagatttaaagatattgataaaaatgtggatgttttttttttacctccaagtctgtcatgtagaagcttctccttccaatcgaagccttttgcagactttttcatcactttgattgtttatgttcccaacttggctctctttcacttccattgaacatctcttgtatggcttaaatcctgtctgtctcgttttaagactcttgcatgttccaacaccgatcattactactccttcttggtctgcagcacaagaatcctggcttttgaaattaggagccaatggcattgacgtgtcactttgttttctattcacattctctgccacttgaggaggcgaaaagctttgaggcaatctttctcttgcaaagagagcctgaaacgctatacgaccctgaaaatattttgatagtgttagttcccagaagaactctgcaatatccatgaatcattggtttttgttttacctcttcggagacttccttccacgaatcagtagttgcattgttgttgctgttgttgtctctcattttaatcttacggttatttaactcaataacatctggctgattctcatctgtctccttcacatcctctttatctttctccattttatctaatgcatcagtttctgcgtcactccctgaaggtgtatttgagccacaggatgagcggtccacaagatttttcttctgggcagtgtttgagtcatgcacagcggcagtaacaacaacctcctcaattttatcatcattggtttttgagtcggcatttagcttggttactccagtctcatctgaatcatcagatgatgaagctggagatttcgaagccaagttttgatcttgcagagctgtgttttgtttctcaaacggttgagtattttcaacggtatccatttcagtcattgctggagttggaactgcaacagttgagaatggaacacatgttattggagctggagcgcatacaggaagaagtccatgagaagcccaccaagcagttgcagcagctactgtagcagcggcaatggcagttatacttggaggagaagagctcattggggttgatgaatcacagaattccgacactcgcataaggccagaccgaagcagcgaatgtagctgcagcatgagctcgaggattctgtcagagagttgacataataagatt

SEQ ID NO: 25416 - DNA, 516 bp, Arabidopsis thaliana columbia
ttcaaacaagaaaccatcttttaagggaccaaatcctgcagcctttccattttcgattacattttccaacaagcaatcagaattgactgaaactctactatttagaatcacaagcaatacatatttctctgaaactaaacacaaaatcaaagagttttgtggacagaattcatttaggcatatcatcgaacacttggtatgcaatatataataagctttatatcttgagtcaaaagctaatgaatccaccattgactatactacaaaagctaatgaattgataaaaagcagtttctaaattccaacttctacaatttcaacattgtttgtaaacgaaaattacataactttacctattagagaataaaatgcttcgaaattgagaagatgatgatgttggagacgattaaggagagagacgacggtagtggcctcaaaacaacgccggtaactatgagatcgatgaagaaacgatgctcgtgagagagagaccacagaggggaataatgttttttg

SEQ ID NO: 25417 - DNA, 1232 bp, Arabidopsis thaliana
aattcagcaggaagggaagagctttcttactacttgggctcagccacatttattcaaccaagaatactccagccttgcagaatacagacatgtttcagagacttataatttcccggctgatgagggtatgaaagattttgtgggtcttcccggtcgtgttttcttgcagaagtttcctgagtggactcctgatgtgcgtttctttagaagagatgaatatccacgcatcaaagaagcacaaaagtgtgatgttcgtggttcacttgcccttcctgttttcgaaagaggtagtgggacttgtttgggtgttgttgagatcgtcacaacaactcagaagatgaattaccggcaagaacttgagaagatgtgtaaagctcttgaggttttgcctctacctcaaactactctatagatcccgcaacgcttacctcacatgtttagacccatacaaccagtaaacctcatgcttgaatgtatctttcactggatggctttctctgtttgctcattattcaattcctcacatttgtccagtttgttttttggttttctttagagtccaacaacatcttctgcatacgtttgtactttgattgttctacatctttctttctgcatcatgtctcctcctgtcagtcattcagccataatcttctttgattaatgtctgtgataacagtgagaagttttgtttatgtgccacaacagtctaaagacgctgctgttttgcaggccgtcgatctaaggagttcaagtaacttgaacactccaagctctgaggtgcattaactggattcttagttcattcagctcctagaaacaacgatatgcattgctaaggtcatactccatgtttcagtttctgcaggtctatagtgatttctactgtgctgcattacctgaaataaaagatttcctggccacaatctgcagatcatatgattttcctctagctttgtcatgggcgccgtgtgctcggcaagggaaagttggttcccgacattctgatgagaacttctctgagtgtgtttcaacaatcgattctgcttgttctgtccccgacgaacagagcaaaagtttttgggaggcatgctctgaacaccatctgctccagggggaaggcattgttgggaaagcatttgaagccaccaaactcttttttgtgcccgaagtggccacatttagcaagactaactacccccttgcacaccacgccaagatatctggactac

SEQ ID NO: 25418 - DNA, 625 bp, Arabidopsis thaliana
tttggcatcacgtcacgaacgagtttggctatgtgaagtatgcgaacaagcaccagcacacgtcacgtgcaaagctgacgccgctgcgttatgcgtcacgtgcgaccgtgatatccactcagctaatccactctctcgccgccacgagcgcgtaccaatcactcctttctacgacgctgtaggtccagcaaaatccgcttcctcctccgtcaatttcgtagatgaagatggcggtgacgtcactgcttcgtggcttttagctaaagaaggaatcgaaatcactaatttgttctccgatcttgattatccgaagattgaggtaacgtcggaggagaatagctccggtaacgacggagttgttcctgtgcagaataagttgtttcttaacgaagattacttcaatttcgatctctctgcttccaaaatttctcaacaaggattcaatttcatcaaccaaactgtacgaatctctctctatcttcttaagcttccatggatctggaaaattttcagatctagatctgaaagtttggatctgatttgagtttgtgaaatgttgttaggtttcgacgagaacgatagatgtactgttggtgcctgaaagtggaggagtgaaggcggagat

SEQ ID NO: 25419 - DNA, 908 bp, Arabidopsis thaliana
tgaagaagaagaaacactaactgaaatgttttcttgaaattttttgaaaggttgatgattgccttgttggatctcagccaagatcatttgagaaaccgaagattgatctatcttcggaagattggatttatcacatattccagtgactggtatgttccttaaaactccaccatgagtccaacatctacaacaattcttgcatttgtagcgcggttgagacttcttgttgttgttgaagtagctgaatctggtttgatcggaataacaccttggacacactcgcggtgggggcatcacattcatttcattgtcttcatttgtaaaaacattcaaattattcatttctctcgagaggttgtttattttaatttctccaaaaacgcgaagacttaatttataagatcttcttgttactatgatcttttctgttgtggaaagtgtattcttatataggttcttggggcgtgaacatttaaggagagttagtcaaagatagtgtttaataaaatctgaagatctatctacacaccataaacgttagggtaagcttagtaaaaaaactaagggttaattcttgtcagtatgtgaaaattttgataagctattaaatcagaaaattaaataaacaggaaagaaatctagtgaaaattgagaatgtaattaacaattaattaagtccaactatataaatatatgacatggatatttactataggagatagtatgtgaaaacatgtacgttcacgtgctgtatgaatatatgtgtgctcacgcgctatctaatgattagaaacataacctaagactatgaatggaggcagcggacaaagcggtctaatttgtctgcggtttagccatctcatttttggtacggacaataaccgctgcagccaaatttatttgtatgt

SEQ ID NO: 25420 - DNA, 903 bp, Arabidopsis thaliana
tgttaattattataaaataattccagggctacacttttctagtatgtatatttcaatcgatagatcaggtagacaaagattcttgctctttcaaccgttaaaataatataagtaaaattaatgttagaagaaaagtcgaaagaagaagcagattataatcactttaacaatcttatttctgagcaatttaatttaaaatgtaaacagtacaagaagtagaaacaacactgaaaatgggaaaattcaaagaatattaatcaaagaaaaacatggaaagaaaatttaaaacattataaccaatcgaagagtggatagatatatcaagcacatacgaaaccagaaggaaccttcttgccacaaacattgagaagaaggctgagagagacgggaacattaagattaatgcctaaaactttagcctttagggcggtgcagagacaagcggcagctcaagatcaactaaaccattgaggagcgaacaacaaggcttcactggtggtgttcccaactgaattttgagaagatccttgagaacattggcgcaaacgccgagcttgagagtgtctttagggcagcttccggtggacttgggcttaggtttgggtttaggggtggaactgcagccaccgccacatgcggtggttaaagtgaaaaaaagaatgttgaatgtgaggaaaatgacaagagaggctgaaatttttgaagccatttctcaaaaaatcaaatttctattttaggtaagaagttttaagatagaagtattgccaaaagagagtggtgaagataaatgaagagagggtgtacgtatatatattagggcttcaaggggttggacagttaattaaagctgtcattactgtataattttgaagaattattagacaaatttatattttagtaagt

SEQ ID NO: 25421 - DNA, 1205 bp, Arabidopsis thaliana
ctttgcaatttccttaccaaaaaaaaaaataattaaaattttatttaccacggtccgtggtctctttttgaagtttcaacactttcaaactttattcttaaattattacaatcacgattaaaatgtgaaagcaaagttaaacttttatttttatacaagtcatttacttcagtcaaattttcttcgcgtcaagttttccttgtaacttatttgtgactactattgttttgttcaaatcttctgtgcaatgtaaagttatcatttaagaattaagataatatgtactactacaaaatcataacaaaatgataaaacatcaattgttcatgaaggtgtattaactgcgttgaatttttactagctcatatttagtgtcttaaagagcgcatgcaatatcgtagttaagactgggaggtaataaacttagatcagttgatgttattgtccgaagctaatctttgtttggccgtctgacgtggcacgtaaaaaccaacttaaaagcttcctctatataaataccaacaagctcttcaatcccaaaacacatccattccattaccaaagtacaaaacataaactccttctgtctctctcctctctacctcaatttaattctcctgatttgtttttttttccaccaaaaaaaagagataacaaagaaaaacaaatagctaaaacatatggcggtagactccaacctctcttcgcccttgggacctccggcgtgtgagaaggacgcaaaagcccttcgtttcatcgaggaaatgacccgaaacgccgacaccgttcaagaaaaccttttggcggagattctcgctcgcaacgctgacaccgagtacctccgccgcttcaacctatgcggcgccaccgaccgtgatacctttaaaacgaagattccagtcattacatacgaagatctccagccagagattcaacgcattgctgatggagaccgctctcccatcttatctgcccatcccatctctgagttcctcactaggtttgttcaccatactttgttctctatctttactttaccgattactaaatcaatcaaaatccataaaccaataactcctaaaaacatttttccagctctggaacatcagccggagagaggaaacttatgccgaccattaaagaagagctcgatcgtcgccagcttctttacagtctcctcatgcccgtaatgaatttgtacgtca

SEQ ID NO: 25422 - DNA, 1357 bp, Arabidopsis thaliana
tcagtaataactagaaaccaatggtccacataaggcccatattcagcccactagtgaccgacctacccaccggccatttactttatcctcgctagtcacagtatcgtttccatttaagtttgctcctcatggtggtggtcctaaaactcatctacccatacttcttcaccacttttttcattttattttgcaatagaaccactctctgtgtcagcttatggatttgaatggttacgacggttggggcgaacaaaaccgtcaatggatcagatcgttttttgttttatcattcatcaaaaatagtccgcagtggtccggaccaaaaaaaatagaagaaaaccgctgcggaccatctgcagaccgtttttacatacaaataaacttggtttacagcgatttatagtccgccccaaaaatgagatggagtaaaccgcagacaaattagaccgctttgtccgctgcctccattcataacctataaatcatataaaaaagttcgtagacaaatttgctacgcatcatttgctaaaataaaacacctgttgccaaatgtcgacgatccagaattatgattacaagtatcatcatcatacgattacaattatataaagaaataaagaacacacagaactataatgccaagtaatttcatcagaaataaaattacgttgtttggctaagattttaccacgtgtcaacttttcattcgatctagatggatacccatggaccccacatggatagactcattgacacgctcatgtgaagccaatagtaacaccaaccacaaaagaaagagagagagagagacactgaaacatagagagaagaaaaagaagaggtttagagagagaaaaatggcgtcaaagctctgcgattcgtgcaaatcagcgacggcggcgttatactgccgaccagacgcagcgtttctatgcttaagctgcgattcaaaagtccacgcggcgaacaaactcgcgtcacgacacgcgcgcgtgtaggatgtgtgaagtgtgcgagcaagcaccggcacacgtcacgtgcaaagcagacgcggccgcgttatgcgtcacgtgcgaccgtgatatccactcggctaatccgttagctcgccgtcacgaacgcgttcccgttactccgttttacgattccgtctctagtgacggttccgttaaacacaccgccgttaatttccttgacgactgttacttctccgatatagatggtaacggaagccgtgaagaagaggaggaagaagctgcttcgtggctgttactcccaatccaaagactacaacgacggcgacgcggggatcgttgctgttactcagctgaggaaatcagggagatagtcggagatg

SEQ ID NO: 25423 - DNA, 953 bp, Arabidopsis thaliana
cgaccaggtccgatattgctctcacattatcaccactataaaatcttcgagaaaccgcaaaatcccatgtatttttcgccaagtcataacacggctcgaacgtagctaaccctccatgagcataggtatacttaatcttacagttgtttgtcccaaccatgtggttagcagagagtttgtttgcagaatcaatcacaaggctcccatcgacaattgttctgttatcagctctgctatgaatgtaagtcaaattcaaaggcttctctgcaattcttactgtgttcatgaactgaaacctaacatcctgtaaaccaaaatcaccaacatagttaagcacatagattcttaaatgtctgcctgcaaatctctttaaacttgtggagaatctaaaaaccctaaactccagaatcctaaatcctacttcaattcaagcattagctgcgtaatttctaggtttgtttgctttgacttgaatcctaggtttaatcgtaagcaatcaatctcatttccatgggaattgaaaaatttctaagatttgtttgctttgactcaaatcaaaagagttgttctgacctttttagggacgttgtactcgacgatgaaggaaccaggcttctctacagcgagagcgagaccggtcaaagtaggaccggcgacgagagtagcatcggtcatggtggcgcgtagcttaatatcgccggcgttgaaagcaagtgaaccgattccactggttttgtcagtatcgtacttgcctttgatagaagccttcatcgccattttcgcacagtagagatagagagagagagagagagagagagagagagagagagagagagagagagagagcgcagaggttcggtgagagcggcgaaatatcgcgataagcgctgactgtgtataatactctccggcgcgtgctccgcgcgcgcatgtgcgagttcgcatgtgtgtaa

SEQ ID NO: 25424 - DNA, 812 bp, Arabidopsis thaliana
gtgccaccgatttccgataagtttccggcgaaaccattgttaagcctcttcgacgatgacgacgacacaagccttgaactgaagctagttccgtcttctatctctcgtcctcttcctcctcctctgtcttctttttctccaaatcagtctctctcgtatctatcgagtgtttgcacactagataaggtgaaattggctttggaaagggcggagaaagatacaaagaaacgctaatctcctgaagatgacggcgtttacgatggaaccgcttctgccaccgtcgcggcgtctcaggtggcggctggatgtccagggtgcttatcgtacgtgtttgtggcaaagaacaatccgaaatgcccgaggtgtcattcgtttgttcctttgcctgccatgaagaagcctaagattgatcttaacatttcgatgtgaaaaaaactttgggggatagaattgaatggttttattttgtaggttcgatttctgtaaatgatagataaaatcagggggtttcattgaaaagaaattaaatgcagaaaggaagagatggatgttattttgtaaattgttatgtaatggattttctctgatgaatgaatagttgatctttaattatttgaaaaacgctctaattaattagatactactagagagtaagaggtaaccaaattatactcttatattatttggtcaacatatttcattatatttacttcaactgtactggtatttatccgcatcttaaagacccaatgtttttatttgcatattaaggaagcacttaagcacgggttagttcaagttagttggagaaa

SEQ ID NO: 25425 - DNA, 1180 bp, Arabidopsis thaliana
attacataactatttgattcatatatgaagtatgacccttgttataacatcatttatcgttagcatgtatttgatttttactacacgaaatacgcaagtaaataaacagtttctttttaaagtaaaagctatctcgcttatagctttttttctttcttaagaatacaatatgaaaactcaaaaaaactaactcttgtaaaaagaaaaagaaaaaatccagagaaactaagagctcaaaccctaaaaaacattttattgtattaaataaaacaagttattatcattaatcgcacacatgcaagtaaagaaattgttccaaaagagatcatgaaaccaacaaattcttaaaatatgaaaccttcaaagctatcgagagactctcatcactttacatttatcaggcgggacatttgaatccaggtggtggattttttccacaattaaggagaacttcaagagctatggggagaatgacgtctatgttgagaagtttagctttaatagtggtacataaacaaacggctgcgtctagatcaactaaaccttcaacaactggacaacacttttccttggcgcttttcccaattccaatgtgaaccaaacctccaagaaggtcaacacacgagcctagcttcaacgtgtcaattgggcaagttttcggcatagttgtaggtggcgttgcgatgggtgtttttgcgattggaggagttgcaattggtgaacttgcaacaggtggctttgtcataggtggggttgcaacaggcgacttagcgataggtggagttgctacgggtggtgtggcaacgggtggccgtgcgccgggtggctttgcgattggaggagttgcaacaggtggagttacggtgggtggtgttgcaaccggtggttttgcaacaggcggagttgcaggtggcggcgttgcaacaggtggttttgctataggagaagtagcaacaggtggagttgcggttggtggtgtcgcaactggtggttttgcaataggaggagtaccaataggcggcggcgcgattggtgactttgcgatgggtggagttgcaataggcggtgtccaataggtggtttacgatgggaggagttctacaggtggagttgtactggtggttttgcacgggcggagtttcataggcgacgtgcgactggtggccttcgataggaggag

SEQ ID NO: 25426 - DNA, 606 bp, Arabidopsis thaliana columbia
cataataaaaacttgtagaatgaaaaaatgaaaaatcacataatgaaacaagaaactatacgcttacttattagcataatatgcttttatttatatttttagacgtaagatctacattttcatgaatcttatgcatattttctcgattggttcttgcataatcgtattaaaaacccgttattcaaccattatccgtgttacgaataaagtatgaaatataaatgaaatatggaggcaacagaagaagaaaagtttaaatgtgtgtcaaaattgtaattttcagaacttcagccggagaagaaagacatgagcggcttcgtggtttcaaaaccggagcagagccatcatcgtctcttcgatttcgcaaagacggccataatcaacatcttcgcacatccttatgccactgtatctaacaaacccgcttcctctcaactccatttcatttacaaagtcttatcctttatgtctctctctctgcgtcttttctaggtttgcgaattgtactgtggcggcgtcccgaaaccgacaagtgggaagctgctccgattggtcactacatcggaattggtattaatatactcttacttacatactcagtgttat

SEQ ID NO: 25427 - DNA, 554 bp, Arabidopsis thaliana columbia
cggtgtagtggtggaaggaggacagagagctcttaatacagccaccaccaccgccgttcataacaccgtcgtagacgccggaaacaggaaacttttacagcaacaaccacagacgcaacagacacaaagctgtcatcaacatcaccaaagtaataaacagtcgttgaatcagcagcaaggccatttcggcaccgttgagcgtcttctcgccggtggaatcgccggcgcatttagtaagacatgcaccgctcctcttgctcgtcttacaatcttgtttcaggtatagtttttacaagttaatgtgaaatttaagaaattttcaggcatctgaatttgattcttggtatgattgtgtaaggatccagttatgatataaagttggaaactttgacttaccctaaggctatttgaagctgaattgattttattgttgtattgacagatacaaggtatgcagtcggaagctgcaatcttgagcagtccaaacatttggcatgaagcttcgcgtattgttaaggaggaaggttttagagcattttggaaaggaaacttgg

SEQ ID NO: 25428 - DNA, 621 bp, Arabidopsis thaliana columbia
ttctttccccattgcttaaccaaagtaccatcctttattccctctctgatgttctgattcaatcttaaaaacctcagcttgaatttttgttgtggggttttggttgggtttgtgaattttagatgcaatgtggcaaatgaacttgggatcagatgatacaatgggtgttgatgggtcttatccggaacgtcacggagagccagattgtgcttattatataaggactggactttgtaggtttggttcaacttgccgattcaatcatcctcacgaccggaaactggtactgactctgtttctgtgtttgttctttcctctgtatcttgttgactcaaagtttgtagctttgagggtctgtgtgtgtgtgtgattacaagctgatgaatagtctcgtatccaatttctaggttatagcaactgcaaggattaaaggagaataccctgaaagaattggtcagcctgaatgtgaggtagctctgtttcgaattactatcatagtaatgtcttctagttatcacattgtctcaaagcttctatttttgttgttgtgtctgtgcagttttatctgaagacagggacctgcaaattcggagtgacttgcaagtttcatcacctaggaca

SEQ ID NO: 25429 - DNA, 577 bp, Arabidopsis thaliana
tggtaaggacatcttgaaccgagtaattcgaagatctctcaaaaccaaaatttgaagatgtacaaagcaactaaaagatcacaagaaataagtttttcaaagcttttattatacaaaatgatgatagaaagatgtgttcttgagaattaacaacatcacattcacaataggattggatttaagaacaaaagctaaagcaagagaacaacaatgaaggtactttgcctgttcttcggatttgttcagcttgtttctctgttttagctgcctgatgatccttctttgcttcagccgctgctcgcttttcctctgctttgcgctcgattgtagcgagtttcttcatcaaccggtcttgtgctcgtcccttaatcctctcaactttaacctacaatatcaagaactccaccatcatcattcatgtttttccaagtttgttcacaatcatgacttgaacttacgtagctatgttagtgtagtttacctcggttttcttcatctcggcttcagatttcgccttctgatgattctcccatgcttgaatcttcatctcttcgcgtctgaacctggagattacaga

SEQ ID NO: 25430 - DNA, 358 bp, Arabidopsis thaliana columbia
aaagaaagtcaacaagtaatctctctttcaatatacaaagaaagcaccttcacttaacccacgtttcagtaaattggattgcaaaaagaatagaccctgacaatacctaaacaatcacaaaagtagcaatctaagatgctttatacgagttatcaacctcctaggcaatcatagactacctttctatattacgaaagatatcagtgcagatgaaaaaaaaacatacagcttcacacctccataacagcgtgacaatccataacaacctcaaggactgcatcaagtcctcctagttctcgcagtttctccttgaaattccctccagtcttctttacagaatcagatgtatctggatggg

SEQ ID NO: 25431 - DNA, 575 bp, Arabidopsis thaliana columbia
ttccgtatagattctgtctctagtttaaactcagatggtttggctttactctcgcttctcaagcactttgataaagtcccacttgaagtagcttcgacgtggaaggagaacacatctgaaaccactccatgtaataataactggtttggtgtcatttgtgatctttctggtaatgtcgtcgagacccttaatttgtctgcttctgggctttcaggccaattaggttctgaaattggggagcttaagagcttggtcacattggatctcagtcttaacagtttctctggtttattgccttccactttaggaaactgtacttcacttgagtatttggatttgtctaacaatgatttttctggagaagttcctgatatttttggtagcttgcagaatttgacgtttctgtatcttgatcgcaataatcttagtggtctcattcctgcaagtgttggtgggttgatagagctcgtagatctgaggatgtcatataataacttgtctggtaccattccagagttgcttgggaactgtagtaagctggaatatctggctttgaacaacaacaagttaaatgg

SEQ ID NO: 25432 - DNA, 576 bp, Arabidopsis thaliana
ggtctagagagttaggaccgtcttcggatatttcggataagagaatctattgggaagaatcgagtcatgattatggagtgtttgtgaaggaattaggtgtgttgagaagtaaagcagatggtgctagatcaagagaagaagcttttgatggacatatggcgattggtaaggttttgtatgagcaccagttgtttaaagaagctcttgttagttttaagagagcttgtgagttgcaaccgactgatgtgagacctcatttcaaagctgggaattgtctttatgtattggggaagtataaagagtcgaaaggacgagttcttgttggcgttggaagctgcggagtctggtgggaatcaatgggcttacttgcttcctcagatttatgtcaatctgggtatctctcttgaaggtgaaggtatggttttgagtgcttgtgagtattatagagaggctgcgattctttgtccacgcattacagagccttgaagcttctaggtagtgctctgtttggtgtaggagagtatagaactgctgtgaaggctttagaggaagctatatattggaaccggattatgc

SEQ ID NO: 25433 - DNA, 502 bp, Arabidopsis thaliana
catagaatcgcagcttctctataatactcacaagcactcaaaaccataccttcgccttcaagcgcgataccgagattgacataaatctgaggaagcaaataagcccattggttcccgcccgactcagcagcttccaacgccaacaaaaactcatctttcgactctttgcatttccccaaaacgtaaagacagttcccagctttgaaatgaggtctcacatcagtcggttgcaattcacaagctctcttgaagctaacaagagcttctttaaacaactgatgctcatataaaaccctaccaatagccatatgtccatcaaaagcttcttctctagacctagctccatcagctttacttctcaaaacacctaattccttcacaaacactccataatcatgactcgattcttcccaatagattctcttctcagagatctcagaagacggacctaactctctagaccatccagcatcagaaaacgcatcaacattgttattgttat

SEQ ID NO: 25434 - DNA, 544 bp, Arabidopsis thaliana
tacctccctaccaatgattgcaatagaaggtacggtcaataaccatggaagtggtcctaattcagcaacttggataggttttgtacacagtaaaatcaatgtagctgcaaccataagctgaaaagccaagacatagataaatcagagatatgtgtatctagtctacatagatcactttttcaactatataaagctttggtgttaaaaagcttaaaggaagacaagtctgcacaccttatcagcaactggatccaaaaaggcaccaaacgcagaacctaacctcatctgaaatttgtacatgatcagacccgttaagattgcaatgtgaaatgcggtcgaagcacagatgatggtaaaaagaaagaaccttgcgggcaagatagccgtcaagccagtctgtaatggctgctgcaatgaaaatgcttgttgtagcagttgttcccaccaactatcaacgtaaaaggctatgagcaaaaacaaacgaatgaacaattttacataagatacaatccaaaaaaactagattagaacttaaagtagtgga

SEQ ID NO: 25435 - DNA, 421 bp, Arabidopsis thaliana
gctaaagcgtggtctacaagaatgtgtctaagtttctgcattagcgggtaagtgaggctgcagggatcgtctgcgtatgagaacacgtactctcggtcaaccacttggaggacatcacgttctgtgaaccttgacggatgtagctccccgttggcaccaacggttaagactcggttcgccacctgactcactgctgatttaaccgccttcttcagattctcttcaagatgtcttagatcaacggcttggcaaagcgcgactaagtaggttgtggacattagcttgaggatatccactgcttctgcagttttcctgctagagattagccctagggaattaacgtcttggttatgctgctctgcgctttggacatggttggtcacgggattagccaggaactgaagctcggagcaataagaag

SEQ ID NO: 25436 - DNA, 553 bp, Arabidopsis thaliana columbia
cattataatctcacagctatgtctaacatcaaatgatcaaaattatcaatatcacagcaacaaattattccataagacattgaagaggaatcatcacaatgcagaaaaaacttgggatctgggtcacatgctcagctatttttattcaaagcacttaaataaacatttgaaaagaagagaaaaactataacaaccaaacacacctctctttgtaagtttgtgtaattcatcatcagcagcagcacaatgcggtataagtggaatcatcaggccttgacggtttcttctgcagcagcagcattagtctttgcttgcttctccttgtagtctctgaccgcggacttgatagcgtcctctgcaagcatactgcaatgtagctttaccggtggcaacgtaagatgcttagcgatttccctgcaaatttaagaatcccaaaacaatgactcattcatcaaaatgttaaccatatcattagatttgggatattcaagcactagaacagagttagagatgacaatcctgacgatatatctaagagacatgattttgatgg

SEQ ID NO: 25437 - DNA, 634 bp, Arabidopsis thaliana columbia
cgtttactaaatcaccaaattaaccattaacaacatgttcaggtaaacttcttgctgctcaagtaaacagaaaaataaaaataaaaaccctagaggacttcttactctgtgccttttagtctgagaaccctaaactgctcaggagacagaaccgcacgccactcctcgtcttgtttctggaaagatccagttgctggaactgctgccgcggtcattgctgccatgacgggaataggatttgtttatctaatgatgcttgagaggtcgaagaggaagaaattagtttttcttagcaaaaaaaagaaattagcttttgaccttttgtttgaagttttgtactacagacctggtttaatggtgattcaaagtgaaaatgggtcggggtataaataggcttagagaagcgtatttcttaaagaactgatgagaatcttccaaagagactatactaaacaaataacaataatacaaataatttaggtaacagctcatttacgcaatagatctagatctataataattaacatgcagcaaggagagagagagagggagatattacaatcgaggttgtgcatgtcagcatgtagacttttgactgtgtttaatatcatttgatccgttgcgaatcattgtt

SEQ ID NO: 25438 - DNA, 788 bp, Arabidopsis thaliana
ctccggctaaaccaacgccacgagagctcaagcctctctccgacatagacgaccaacaaggactaagatttcaaattccagttatttttttctatagacctaacctttcaagtgatcttgatccggtccaggtgataaagaaagccctcgccgatgcgctggtttactactatccgttcgctggtaggctccgggaactttcaaaccggaaactcgcggtggactgcaccggtgaaggcgttttgttcatcgaggctgaagctgacgtggcgcttgctgagctggaagaggctgatgctcttcttcctccattccctttcctagaagagcttctctttgatgtggaaggctctagtgatgtgcttaacactcctctgcttctcgtccaggtcagtccatagcttttcgttttttttttgttttgtttttttttgttttagagaagaatgaaacagagtttagtttgatgtaaaaggagttacgtgtaggtcacgcgattgaaatgctgtggatttatcttcgcactccgcttcaaccataccatgaccgatggagccggcctgtcgctctttctgaaatcactatgcgagttggcgtgtgggcttcacgcaccctcggttccacccgtatggaaccgacacttgttgactgtgagtgcttcggaggcgcgtgtgacccacacacaccgtgagtacgatgatcaggtgggaatcgatgtggtcgccactggacaccctttggttagccggtctttctttttcagagcagaagagatctccgctataagg

SEQ ID NO: 25439 - DNA, 1739 bp, Arabidopsis thaliana
tggaatcgatctagcgaacatatactaatcaaaaggacatgcctaaaatgggaccctctttgcacaaaagaagtttcaagatattattatacccacaaaaccaaatcttctttaatcatgtctaaatcattttaggcactcttaacaaaacaataatgttatcatccaatttgtctacactttggtattgattcgttacaagtgaatgttctagaccacgtttgttgatctattatgtagttttgtattcatcctagctacatttatatatatccacttatttcttaactacggtatgcattatacatgtttgtattaatgtcgccgataaaagtttcggacccatagtgatgaataatcattctcgattattattgttaaataaaacactacaaggaataagatagatcaaaaacgaaagctcctttgaaaacaatctcaaagaacaagaaaatatgagaagactctttctcttctctctcctctttttattcttttactcatcctcctcctcaagatcttcatcagaatctcacatcttcatctacggaggatgttcaccggaaaaatacacaccaaacacaccttttgagtcaaaccgcgacactttcctctcctctgtcgtcacttcctcctctgacgcgtccttcaacagctttgccgtcggcaacgactcctcctcctcctcatcctcttccgccgtcttcggcctctatcaatgccgtgacgatctccgatcatcagactgctcaaaatgcatccaaacctcagtcgatcaaatcactctcatttgtccttactcttacggcgcttctctccagctcgaaggctgcttcttacgttacgaaacaaacgattttctagggaaaccagacacaagtcttaggtacaagaagtgtagttccaagagcgttgagaatgactacgatttctttaagcggagagacgatgtgttgtcggatcttgagtcgactcaactcggttacaaagttagccggtccggtttagtcgaaggttatgctcagtgtgttggtgacttgagtcctagtgactgtacggcttgtcttgccgagtctgtcggaaaattaaagaatctttgtggctcggcggttgcagctgaggtttacttggctcagtgctatgctcgttattggggctctggttactatgacttctcttcaggtcagtccataaattaaaatctttatttcatttattagctattgctctaatttacgtaagttctttaattatattcgtgaatcatgcttagtgccatgataatataattgaaaattgtagtaatgaactgtatagaaatgtgtgagaatttgacaaaatttaaatttccgccgcttataattgagaaaatcacaagtctagtcgctccttggtagcacgagaaagttgaagaaatcataaaattttcgttgcttttttttttttgtaatttccactggaaagacaccattaagtattgaataaaatagaattaatcttttgaatcattcgttggaaaattcgagtatcatgattataatatcattggtcagaaaagaatgtttttgcaatatattattcttttctttataggcatagccacccatgtccccattttcaactttattttatatattctttatagcttgatcaatatcacatagtccaaaagtcattgcatcttagaaaatctaattcttagcttgatactatattgtccttatcttatgtactttaat

SEQ ID NO: 25440 - DNA, 568 bp, Arabidopsis thaliana
tcactatacagcattgtagcagtgatgaagtggtatattgcagccattggagctctttctggatcaaagaagatatctgcatcatctggtttcaaataccatctctctgttcttccgttcttgactttatcctctcttgtttcaactccaaagatgattgatccaacgaatgacattagaaagacaagaccaaacattaagtagatgatcttgtccattgtcctctcgatcctacttctctttgatggtggatcagttgaattctgtatcacctatttacaactcaataaaaaaaacagagtgagaacagaacaaaacagaatgagaacagaacaaaacagagtgtgtacctttgtgtcatgtccggtgaaaacgacagctccgtacacatactctgtgtttctaagcttagaatcacggagaagaatctgttgaatcgacaatggaaatctctcttcttcaagagccaaagttccaacgaacacataaagattcacatttggatcttcacatctaacaacgcctctaaaatctttaaaatcagaatcttgatttaacaatgaagaag

SEQ ID NO: 25441 - DNA, 765 bp, Arabidopsis thaliana
gaacatggtgatcatggagtcgcttcgactttacggaccagtgtcagctttggcccgagaagcatcagtaaatataaagttaggtgacctagagattcccaagggcacaaccgtagtcatcccgcttctgaagatgcatagcgacaagaccctttggggatccgacgccgacaaattcaacccaatgcggtttgcaaacggcgtttcccgagccgccaatcacccaaacgctctcctagcattctccgtcggaccaagagcttgcattggccaaaactttgtcatgatcgaagccaagactgtgctcaccatgattcttcaacggtttcggtttattagcctctgtgacgagtataagcacacccctgtggataacgtcactattcagcctcagtacggcttacccgtaatgcttcagcctctggaagactgaagtaaaatgcccaaataaatcggatgtcttaatgaatatacctcacgtgtgtgacaagtctcctccatataggccggcttattgctgatggtgggggcttaacaaatcatccttgttaagttattgggcttttactatctcagtttggaacccttgatgggctaaatagttattaataatttaatatattgtgacattgcatgtataattgaaaagtggaaggaagtgtgtaacggttatgaattcaaaagccaggctaaagcaacttgaaaacatgagtaatcgacaattcagaaattataggaatctcgaacctcctttcgttcagaaaa

SEQ ID NO: 25442 - DNA, 547 bp, Arabidopsis thaliana
tgaactttagagatataaaagaggagaaaaggcgagacttgccagtgttaagcgcaggagcagctaaaccacagcgaacgttaacccagaaagaagggagataaccacagtaaaacagaccaaacattgtactactcagctgagcaaaacgtggggatcctctttgtactaacaatgctattgcaacaacaaatgctgcagatgtcaccaatatatcaatgttaccaaagtacctaaaaagatatttcataaaatcagtcaaggagaagtcatatcacatggataacaagacaagcttcgacgtagagcgttttagctaaactcacagtgtaagtatgggcataagggcacatataaccgagcaaactcgagatacatatcgtggaggaggagtcattcctttagctatgcctctacttctaacaagctcgaaatattcgcgggaacgataaaaacagaagatgctaaagctacagtgaaacccatcctccagctaacacaacacatccaacaggtaaaccaatgccaataccaaagatcactcttt

SEQ ID NO: 25443 - DNA, 865 bp, Arabidopsis thaliana
aggtaaacacaaaggagaaacatcagaagtgaaatctacagttcgtccttggtgttctcttcttgttgctcaacgggttcggcttcaatgtttagaccaccagccaagtcatctgatttcgtctcagttgcctcactggtctctggttcctctgctgcctcgatttcctcgtcggctactgcatcagggctgatgttcagaccgctcttgactgagttataaatacgggcagcaaagtcttttgggtcggtgagtatgaatccactctcgatcaaagctgtctggtacatgagctgtgctgtttccttcacactctcatcctgagagaatttggtatgttagtttatttctctaatagacagtaagtaaaaaaaagaattgatgggtcttatgtttgttttacctctgggtcacttgcaattctatccttgagttctttgatgatagggtgtcgtgggttgatctcgaggactctctttccgcgcatgtaagcttgcttattagcatccgagagagtttgggactgcatgatcctctccatattagcactccatccaaacttggatgttacgactacacatggagtgtcagccaaacggttgctgattttgacatcgtctacgttttcgctagcgagatttcctttccaccactttgttagctccttgaatgcttccttcagctccttgtcttttgaatctttcccaaccttcagtccttccttggacacattctggaactttttgtcttcgtaatccatcaggtattgcatcaagtattcatcaactgggtctgtgaagaagatgacctgggaacacaagtatgagaacgtgttatgcgagttggagatcatttaagaagaata

SEQ ID NO: 25444 - DNA, 559 bp, Arabidopsis thaliana columbia
agattggactaccctggagtcggacccgagcacagtttctttaaagacatgggacgggctgaatactatagcataaccgacgaagaagcgttggaaggtaatgtaccgatgcatagtctttagttctgtatttgaaaatctgttctttgtttcataacttacctttgcattccctttggtttgtggtctgtagcgttcaagagagtgtcgcggttagagggaatcattccagcactggagacctcacacgcactagcttacctcgagaagctatgtcccacattatcagacgggacgagagtggtcttgaacttcagcggaagaggagataaagatgttcagacagtggctaaatatcttgatgtttgaagagagaaacacttatgtttgtttttcagttattcagacagaatgaaatcctttttgtacttgtaatctgtttgtactttacttctctctggtcagtacgtttccaacaaaattggaaatagaaaaagattacgaagagaacgaaatttgaataaatgtattatcaataaaataaaacacatttcatatt

SEQ ID NO: 25445 - DNA, 575 bp, Arabidopsis thaliana columbia
ggtataaagaaggatggtttactcacgcgacgcctagacactctttttgtgtgtggctagcggtactaaatcgactcttcacaagggatcgtatgagaatgtggaatgtgggagcaacgcttgttcaaccttgagttctcaatctatacgggagaagtaaaagattttctcatagtaatatacattcaggatctcaagagtttaagtttacgagagatggagaaaactttgtgagcctccatggccagtgtacccttgtaattaattccattggaatgcatattagagtacaggaatttcgaataagaaaatctgattttgtaggagcttccatggcgagggtacccttgtagaagatatttttaattgggatgatggaggctttcggaaggtcatgacaataaacgtaggtgaagaccgtaaagtaattacttacgttcagtttgagtatactagaggtggagaagggataatccctcccgcggaactcgaccgcgtcatgagatcaacagaaaaaggttacattccattaatttaattcggatacgtgttttctttgcaatactgagacaaaa

SEQ ID NO: 25446 - DNA, 558 bp, Arabidopsis thaliana columbia
  unsure (1)..(558): unsure at all n locations
nnnnnnnnnnnnnnnnnnnnnnctaaaggtctttcatttgttgccaagtgatctttgttacgtcgaatatctgatttaagttttgacatcagtgcttttttttcaatattaaaaattgcttcatcatttctccatgcggtaagatcgtgggtgtatttttcaaataaatcctcttccagttgatataatggcttcatcagcagtttatcaaccgtactcttacgttcacctgattcagccagagtcattaagaaaagtgataccgggccacgtagattattcaatcggcaaacatcaatccggttctgacaggcaagagaaattaccccaagagcagaagcagcaatcaaaccttgaggggcctgcgtatgctgttccacttcataaattgcattcctgataattttaggaaatgcatctacagggaaaggacgaccattgaacatgcaatgcctcttatttaattaaattaagaaattgtttagcaaatatggctattccgctattaatggcggaaatagcaggatgtttacctccgatgacagcaattgagtatga

SEQ ID NO: 25447 - DNA, 534 bp, Arabidopsis thaliana columbia
aagataaacccaacagtgagagagttacattaagaatgacaagacaccaatccaaagcataattaccatttgatcagcaagcataagaacagtcttcaagctaaactgcctcttgcaataactaaacaaatcttcaagacttggaccaagcaaatccatgactaagacattgtagtccccctcaacaccataccatttcatatttggaatcccagctacattaacgaacatacacaagaaatgaataaccaaatgagaattcaataacaatagagataaacatttcattgcatacttccaccctgaagaactctatatatcctcgactcatatgacaattgcggatggcagtcttcacactttcctgcacacacacaaaaaaaactaagttttgatgatccaagttgggactttgaagagatgaaacactcacaagcttaatagcaacttcttcgttagtctgaacatcagttcctgcaatcaaaacagtctcatcaaacgactattgaagagattttatatgtatagagaggg

SEQ ID NO: 25448 - DNA, 459 bp, Arabidopsis thaliana columbia
ttacaaggttgctacattcacatgatcatgtctaaagaatgttatgacgaaaacaaaatctaagtaccatatctataaagttaagaaacgtgtacaacacattgaacattagatgaatgttactacaagacacaagccactgaaacaaaccgaaaaaaaactcaattgcaaaatccaaactaactgtcaagagtaacattctgcatttcaactactagctcagcttcacatcttttatccaattcagtttccatatgtttcaaggagtttcgcagcttcccgcaagctcccgaaaagccgtctgaagaactcttcaaacgctcaacttcagtttcaaattcgtctagatttcgctgtataaccttcactgtttgcttcatcttgttcatctcctgcggtggatagacacaagcaccaagctcatcgatttgtaaccagttccttgacacagcttcagta

SEQ ID NO: 25449 - DNA, 613 bp, Arabidopsis thaliana columbia
cttcggttacaacgcagtctgaagatgaaaaattgagttctgcaaagggccaaagatcaaagagaaagagaccttcaagcttagtggacatggcttcattgaaagaagacggtgaagctacaacacattctcatcaggataattcaaggaacgacgagatgatggatgctaactggattttgaaaaagttgggtaaagattcaataggaaagagagtcgaagtccatggatctcaaaactcatggtaagtttgatcgtcttaactaataaagctcttgtggttggcctgcttattgcatccattaatctaaatgtctaaaatgaataatacatttactgttaaaggcgtaagggaacagtgacagacgtttctggagacacatccacattgtcggtttctctagatgatggaagcatcaagacatttgaacttgggaagcacagtgtccgcttcataccgcaaaagcaaaagaggtcaaggagctgattggaccatcgagcagcgctttagtcactaactttctgcatgcgagccatgaagaagatttgattgttggggcattttatactatttaagctctttcctggtggtaattatcagtaagatggaaag

SEQ ID NO: 25450 - DNA, 490 bp, Arabidopsis thaliana columbia
actaagaccctgagctgcaatattaacaaggacagttacttgatgttctattaaaagaacacaggaaaaatggaaaaacaagaagcacataatctagggagtttgggaagttaaaatggtgcagcatgagcgagcggcccacaagtgtccatgagtgagtgatagcgagagaaatgtcaagtttctccaaatgaaatgaaattttacttgttcactagcattgataacatcttgaggtggcatctcttcagtccctatctcaataataaacgatcttggatcttcagaaacctgtaacgattgaacaccacatagacaacaaaaaaggaaactatatcgtatttgacatcttcagaaatatatttctatatcaaaatacccagcttttgatgcgtaaatagaccatataagcaagtaatgctgaagatggcgacaccaaaaattttcacaaactaacatctcacaagtcacaactcatcaaaaggaaata

SEQ ID NO: 25451 - DNA, 635 bp, Arabidopsis thaliana columbia
gttgctattgatgtagctaaagctcttgcttatcttcatcatgattgtcgatctaagatcttgcatctcgatgttaaacccgaaaacattctactagacgagaatttccgagcggtggtaaccgatttcggactctctaagctgattgctagagatgagagcagagtactaacggatatccgtggtactcgggggtatttagcccccgagtggcttcttgaacacggtatttcggagaaatccgatgtgtatagctacgggattgtgttactagagatgatcggaggacggagaagcatttcaagggtagaagttaaggaaacaaaaaagaagaaattagagtatttcccaaggattgtgaaccaaaagatgagagaaagaaagataatggagattgttgatcaaaggctgattgaagttaatgaggtagatgaagaggaagtgatgaaattggtgtgtgtggctttgtggtgtatcaagagaagtctaagaaaaggcctgatatgactatggttattgagatgcttgaagggagagttctgggtgacgagccactggattcagatgttgttgtggtcgacttttggcggctgatgatgatgatgcaagtacaggtgtcgacgggtagtaaatat

SEQ ID NO: 25452 - DNA, 1456 bp, Arabidopsis thaliana
tcattttttaacctgtcagttgtgtaatcttatcagaagctcgattcgctacgtacatacctgcgcgagtaatttacaacagatcccaaatttaacagctttctctaaattacccaaatagaacaatcgattaggattattctttgttccgattgaaacgaaaacaaaactcaaatacaaacccaacgaagaggaactaaaaccctagaaaagtagagaaggggggaaatctcaccggtgctggtacgtgagtcggctccgaggacgacacctccattgtaagtgacgccgatgatggtcgttcccatggagtgaggtgcatcgagattgagatccattgctgtagaattggaaacttgtcagaaacgaaacgaatcgctgagttttgcgagtataaattagattccggtgatgactgatgagaagaagaagcttgaaaaagaagaagaactctggcttataccccaagtcggcctctctcctttcttttttttggtttactttttttttttgttttgttaggcgacagataaaaaacgtgaaagcccaatatctatttgtcctcatggaccttccaaataaaagcccaatacatatttgtcctcatggcccttccaaatacaagcccaatacctacttgtccatggatcttccaaatacaagctcgatacacatttcagttatttgctcccacggtgaaggaattaggaatgttatcaagttttctctaaggttttgcattttgttgaaatgtgacgtatgttgttcgatcttacgttagtttataaactttgttttagctttaatcttcttcaaaaggtgcacaagtaggcactcgttaggacaacacacaagacaacaaagttcgaaacacacaaagattacacttctctactcagaaaacaaacttactttgttattattattaaaaaaaagacctgatttcactcatctctaaagccaattaagaagaaaactacaagagttatattgtagtggcaacagcttctggatgatgaggtagtatctgatgagccgtggggacattgttcttcgacttgttagctacacggcttgctcttgattccttcaccggtgtcaccttcttagtcgaggactcggccagaaccttcctcacctcgtttgccagctctataacatagtcctcctcatgccctgtgtgaaataaaaaatggcttaacacatcaaaaacaatgtctctcttaaaaccatcaaggtcagaacctttgactacaaagcctgggcagatgttctattcatataaagacttcaaatggagcttggactaaccaatgtcgtgcattgccttctcgagcaggaagagataatctctgttgttaccacatggtccattggctgtcgcgatttgtctttgaatatcaaaataacagctaagtgtgaggcaagaactggcacataactaaaggacagaaga

SEQ ID NO: 25453 - DNA, 903 bp, Arabidopsis thaliana
gagcggtcaaaatcagtggacgacgaagacttcttatcatttaatatctctccatcatcatcttcttcttcagcatcaaatccaaattcggatcaaacatggcttctcactcgtcgactctcctctcttctcctactttcgctcctttctcctctcatcgtcttcattattctcccaatccctctactctcagattctcccgtccaatcagaaataaacctaatctcgccttgcgatgttcagtctcaattgagaaagaagttcccgaaactgaacgaccctttactttccttagggattctgatgacgtcactccatcttcttcttcttcttccgtcagggctcgtttcgagactatgattagggctgctcaagacagtgtttgtgatgcaattgaagctatagaaggcggtcctaagtttaaagaagatgtttggtctcgacctggtggtggcggtggaatcagtcgtgtgttgcaggacgggaatgtctttgagaaagctggtgttaatgtctctgtggtttatggtgttatgcctcctgaagcttatagagctgcaaagggctcagcttctgatcagaaacctggtcctgttccgttcttcgctgctggagtcagctcggtaatgaatctctcccttcaattttacgattcttggaggttctcatgttttatcattacgatttctgtgtgattctaggttttgcatcccaagaacccttttgccccaaccctgcatttcaattatcgctatttcgagacagatgctccaaagggtaaaacagctaaagtctcagtgagattgtaaagttgttgtcttttgtttggacaacagtcttaagtttttaattttcaacggcgcagatgttcctggagctccaaggcaatggtggtttggtggt

SEQ ID NO: 25454 - DNA, 909 bp, Arabidopsis thaliana
tgatgatgacgacgatgtcaatgcatccaaaactctgtcaaaagaaagtcattcatcctcctcacagtgacatcatccaaaacctaatctcatatcatctaaaccatagagcaaaccataatcctctgtctcctaatacataaaggccaaaatcaacgagaagaggtgtggtgtgtgtttcagtgtttgttcttgatcttaacaccaagctcacctgcaatgataacagtagaagccatatccagaaacatcccatgttccactactcccggtagcctcagaatcgcatcactcactgctcccaaatctcccatatcctcttccacatgcatatccactatgtaattcccattgtctgtcacaaaggccttccctttctctcccaaccgaagattcgcttcacacccgtatccttccagcagactccggagcttctccgccgtgaacttccagcaaaagggcactatctccaccggaagagcaagcttgcttccaccaatatgcttcaccatcttggagtcgtcaacaatcaccacaaacttcttagaagctccttcgatcatcttctctcgaagcagagaccctcctctgccttttaccaggttgagaaaagggtcgacctcgtctgcgccgtcgatggagagatcgatgacagggtgtgcgtcgagatcagagagagggatgccgagagacagagcctgctcctgcgtcttcttagacgttggtatacaacgatgttctcgagtttgccttgacggagaagctcgccgattcggtcgacggcgtgtttggcggtggaccggttccgagaccgagaaccatgccggactcgacgaattccacggctttgtaagcggcgatacgtttgagctcgtcttgtgttaaattcatgggctgaggcggtgaaga

SEQ ID NO: 25455 - DNA, 408 bp, Arabidopsis thaliana
cgccagtgtgctctaaagatggctgaactctgcgccctgcataagcgccctcgccgatgtgccggtgaatcagagtatcgctatcacaggttcagtcgatcagttcggtcgcgcccagccggtcggtggtttaaatgagaaaatcgaaggcttctttgctatttgccagcaacgtgagttaaccgggaaacaaggtgtcattatccccacagctaacgttcgccatttaagtcttcacagtgaactggtgaaagcggtagaagaaggcaaattcaccatctgggcagtagacgatgtgactgacgcactgccgttattattaaatctggtgtgggatggcgaatgcagaacgacgctgatgcaaaccatccaggaacgtatcgcgcaagatgcgcaacaggaaggacg

SEQ ID NO: 25456 - DNA, 845 bp, Arabidopsis thaliana
gcttgccgctgaagttacttattcgaagagtgaaatgttcccagtctccaatgtgttcgccagattctccccaacgggattgaagcggctttgagcttggctcttgacgggccgttgaacggataaaacatccacacggctatgtctgtgaatgttccaccgaaaacaggttttatgtgcagatacacttccatgctctgcaaatcaccacactggactcgttttcttgggtcagaagcaacaggtaggtctaaccaatacagaccgtcgttgaattcaccttggggaaggtttaaaccgtttggttcaactggaactgggtttgattcatcacctttcttgtaaagcaaggcaccgttgctgaagaaccagttgacagatgatgggagatacttctcatctttgtggaaatagatccaaggggcgtaagtttgaaacagagcgtcgatctggggcttgcttggcatacaagaagaatcgaagttgttgtttttcagacaaggtaaggccggatttggagagtttgagaagaacgtgccaacgctgactccagaggcttgtgttcctctgttaacaggtttagaactcgaaacgctaaacccattagtttcccatatcagagcgtcaggctcggattgatcggtcaggtcggaacggacacaacggatcttgtctagaggaggtttctcatccgaggttgtcacgattagacccactgcattgtaaccatcaggtggtacaggctgccaaaagtatcctgtttcaaccttgttgttctctacctttgtagatttgccgctccaaaggagaagataatccacggcggtcttaaagagtcgctgaga

SEQ ID NO: 25457 - DNA, 827 bp, Arabidopsis thaliana
tccctaaaggaaacctaaggttacgaaacatcacaaaacgaaaaaaggttttattttcttaaagaggggcatgtgagaataaaaggtgcaaaaacaatattaatgcccgcttttgactcgagtcactcgaacaattttcttgcccaaacgactagactatctaagatgctgttttgaaccttttattttcttgtcacaacaaataacgagggataacaggaattataaatttgtaaatatgggtcaagtgacaacgaagattaattcctgttacaaacaaagagattcaaaaacagtaaaataattaaatgacagagattcaaacttcatcacctaaccaattccgcttcaacttcggaccagtaggtccttcctctccaaaaacttcgttaggcaatcctttaatcgcactcctaaacgtagtcttaagactctccccaaccataatcttctccacacctctaatctcattttcatgaccataatcaatctttggtccccaatgtctcatataattcaaccaagccggctcctccaattctcctctcatatactctgctgcaacaaccctgaacctaaccgccgtatcaatcactttttcactctttccagtatcgttcctgatccccacattgtctttgccttgcaacacaagtcccggttttgagtacattgcgtgtccattcaaagaagcgtaacgcactggtttgtttccccgccttgaaactcgatctcggaagcatcagcccagcttcctccgctgtgttgcgacagatacatccgatgtagcttgcagctgaagttacttattcgaagagtgaaatgtt

SEQ ID NO: 25458 - DNA, 544 bp, Arabidopsis thaliana columbia
cggctacacagctaatctagaactggatcttgtatgatagcagcgttggaggaagagagcgttttttcgacaaagccgtcgcggttttcaatagtgagcccaaggtcttggtttaaggataggtatgcaagagcgtatcggtcatttacgaggagaggaggtgtgatatttgcaggggacgagtatggagagagtgtggtgtggaagattggaaaaggagcattggggggaacaatggagtgggagattaaagggtttatttggttgacttactggccaaataagtacaagactttttaccatgagactcgtagattggagtttacacagcttcttaatctcaccattgcttaactttaaacaaaaacatgttattacttctttgtgatctcaactttacattggtaaaggaagagacttcaattgtcagttagttatttggtaatttatctttgcattaggtacttttgataagaatcttaaacagaagactgacaagagataagtgaaactcaactgaactttgatttctcaacttaagatt

SEQ ID NO: 25459 - DNA, 660 bp, Arabidopsis thaliana columbia
  unsure (1)..(660): unsure at all n locations
attttttctgaaaaaaaaatacaggtttaaaatgggttgggtaccaaataaataaaacccatatgggtttacctcattgggtaatgggtacctacgggttttttaagtcctttttcaggtgaatcaacattttctcgtcaaaaaagatttcacattttttcgccaaaaccgcgatttaacagtttaccgccaaaaaagacattcaacatttacccgctaaaaaagacattcaacatttttccgccaaaaacgacaatcaacattttcccgccaaaacgcaattcaacattttcccgccaaaaacgacattcaatattttctcgccaaaacgcaattcaacattttcccgccaaaaacgacattcaatattttcccgccaaaacgcaattcaacatttttccgccaaaaacgcgattcaacatttttcgccaaaaatgatttcacattttcccgctaaaaacgcaatttaacatttttccgccaaaaccgacattcaacattttcccgccaaaaaggatttcacattttccgatcaaaaacacaattttaacatttttccgccaaaaatgatattcaacatttttctgccaaaacacaattctacctttttctcatcnaatatatatgtaatacagaaataaatcaatttaaatatattat

SEQ ID NO: 25460 - DNA, 614 bp, Arabidopsis thaliana columbia
gacacgaactgcaaaactttcataattgagcatgttctcatatggcaagtagattccgtcctaatgaagagtcatcaatcaacgggaaccaacaaaccgtcattttcggatcagacagcttaagtttttggattaatgtattgaatgtggtaagtttaagctatatacctgaatgatgactggaacacatccttgtaagatactatcttccatgcgtccactccaaccatctccagggaacgcaccacagaagattgaattggctatgtccttgtggtaattgtcggaacgcaatggagttacaatcacatcttctgcgtgctgcttcccaagcttaccttctttgttagggctagaaccaaactcttctgctagcttctgcctgattcccatgctatacctgcattagatgttatgggaccattatatacatctccattaggaatgctgtttgaagcaagctcgactttcccaaatgatatcaacatgagtctttaagttgaagacttacgaatcttcaggccttcccttttcataagcaggtccgagatcccattgaagtaaaacaatgttttccgcttctcccgtggcctaataataaggaacaagacaac

SEQ ID NO: 25461 - DNA, 575 bp, Arabidopsis thaliana columbia
ttgtgggcccatgcttcgttcgcctacaatagctattggcaacggaccaaaagtacgggtggctcgtgcacgttcggcggcactggcatgcttgtcaccgttgatccaagtaagagaaatatttgtttatcaactattatttattggtaatattcatttttttaaacaatgttattgaatggcaaacaggctttaacgggtgccattttgatttcttctgatgcatgaagacgaagacagctctcactttacattttgttggatacgaataatatcaaagaaatctagatataatatgtttaggtgggtcgctcacttgtaagttgaaaccaattaaagcttatttcttgggaatggcataattataaatcttatgctaaatacgtatattgcttttgctaatggaattaggtcttctagacttgtggtacgttgcatctacttaactactatcactaataattcctttatttatacacacatcccttttctcccacaatgatttagtagctttgaaataaagtaatatacgcattctcagtttctcccacgacatctttttttatttatagaaa

SEQ ID NO: 25462 - DNA, 1241 bp, Arabidopsis thaliana
aaaaatagagattctcttctaaaatatcatcaaagtacaaagaatttaaagccgaaagaaaaattgtttaaaaagattcgcagaaaaaaaaaaaaaaagggtgaggcggtcacttcactgacgacgtgtgctatacatacacagtcaaatacaaccctttccccaaaattgaccccaaaaccaaaaacaaatcagaagaaaattaaaataaacctaaaagagcaaatttttattcgcattgctctcaaaaatcatccatggcggccacctctagcatctcttcttctctatctctcaatgctaaacccaacaagctctctaacaacaacaacaacaataagcctcaccgtttcctccgtaatcccttccttaacccctcctcctcctctttctctcctcttccggcttctatctcctcttcttcttcttctccttcgtttccgctcagagtttcaaaccctcttaccctgttggcggcagacaacgatgattatgacgagaagcctcgggaagagtgtggagttgtcggaatctacggtgactcagaagcttcacgactctgttacttagctctccatgcgcttcagcatcgaggtcaagaaggtgcaggtattgttaccgttagtaaagataaggttcttcagaccattacaggtgttggtttggtctctgaggttttcagtgaatccaaactcgatcaattaccaggagacatagccattggtcatgtcaggtactcgactgctggttcttctatgctcaagaacgttcagccgtttgttgctggttatcgatttggctctgttggtgttgctcacaatggcaatttagtgaattacacgaaattgagagctgatttagaggaaaatggttcgattttcaatactagctctgatactgaggttgtgcttcatttgattgccatttctaaagctagaccctttttcatgagaattgttgatgcttgtgagaagcttcaaggtgcttattcgatggtgtttgtgactgaggataagcttgttgctgttcgtgacccacatgggtttaggcctttagttatgggtaggagaagtaatggagctgttgtgtttgcttctgagacttgtgctcttgatttgattgaagctacttatgagagagaggtttatcctggtgaggttttagttgtggataaagatggtgtcaaatgtcagtgtttgatgcccatcctgagccaaagcaatgcattttcgaacatattt

SEQ ID NO: 25463 - DNA, 558 bp, Arabidopsis thaliana columbia
ctgttgttctcttcagaggagaaaagaagaaaactaaggtaaaattctaaatctgcattttgctgagaagctacttaagaactattttgagttatattggctacctttttcttgatcagatgctgaagaaaacacgagaccctcgatggaacgaggaattccagtttacactagaggagcctccagtgaaagagagtatacgcgttgaggtcatgagtaaaggaaccggctttcactttcgatccaaggtaaagatctcatgcctgttaaaatctctgttaaagcagacagagacatttcaacttattatacctttgcttaatctctgtataggaggaactaggacatgtagacataaatctggacgatgtagttgacaatggaaggatcaaccagaaataccatcttatcaattccagaaacggcattattcacattgagatccgttggacaactagttaacaaaactgataacaattctggcatgaagttttgttctagtatggcctttgtaaaatcttgcatgtacttgatcaaaatcatataattttaataaaa

SEQ ID NO: 25464 - DNA, 594 bp, Arabidopsis thaliana columbia
atccccagcactctagagctgctctacaagctggtattgataagcttgctgattgtgttggtctcactcttggccctagaggtatttgttaatattagtagctcctttactctttccatcttcatctgtgttatttatctttcgacttatcttggtgttttcatttgttattcttaagggaggaatgttgtgttggatgaatttggaagtcctaaggttgtgaatgatggagtcaccattgctagagctattgagttacctaatgccatggaaaatgctggtgcagcgcttattcgtgaggttggtgtagctttgttattgtctctgttaatgctatttatacggtgcggtaatctggtgttgttatgtggtaggttgcgagtaagactaatgactctgctggtgatgggacaaccactgcgtctatccttgctcgggagataatcaaacatggattgttgagcgtcacttctggtgcgaatcccgtttcactcaagaggggaattgataagactgttcaaggtctgatcgaagagcttcagaagaaagctaggcccgtgaaaggtcgtgatgacatcagaggtactaactttg

SEQ ID NO: 25465 - DNA, 524 bp, Arabidopsis thaliana columbia
gtttcaagtcaaaagtaattgcaaacctcaaatttctctcctttaaaagattccaccaaacttattttccaatcccaatcaaaacatcaacttctaagagaacaaagcaaaatagaaagaatatgaatgcatcattaccatctaaagcacggatagcatcacgggcatccctaggatcttcgaaatctagaaaagcgtaaccaggtggtctacgggcaacccaaacactgcacattacatatgaacattagagagatgcaaaattggatacttttaacttcaaaagtgacaaaattgtagcgcgaactgattgattggattgattcttacctcctgacaactccaaaggcacggaactcatcctcaagttcacgctcagtaactcgcgggtccaaatttccgacgtacacacgtgacattacttctgtaacctgtcaatggcacaataaaccaaggtcaacataaaggaattctaatcttttctagtaagacattcgaaaggatttgaattcatcgagaaaaaa

SEQ ID NO: 25466 - DNA, 617 bp, Arabidopsis thaliana columbia
gtgaaggtaaaaataaaacgtatgtaaagatatgttggtaaagaggaattggtaccactaagtaagtacacgactccggtttcttggggcaggtgaggcaaggaatgtccttgagggcatcgaacgcaaaatctacgttttgactcaggatcgagttattcttctcgaagaattctttcttcgtcttctccaagatgtttggaagtgcaaacttccaatttaaacaaggcaacacattagctattgcgcattacacgttgcatttgtgcatgtgtcatatggaacattaagtttcataagagacaaacctgtaggattgttgatggatctggacttatgtcgagatgttccttgatggattcaacgacctattgacaacaaggtattgctcgatgttcaaacagactcacgtctacaaaatgttaaattaatatcatgtccagtaggacattgtttacttctaataacgtgtgatgattgagaaattgaaaaactgaccctagttgttttgaaaacgtttttgggatcgttcattgcgatccaacctattcgccagctgggaacgagccatcccttggatatggaccagagtgtaccacaggagtaatggatgaaat

SEQ ID NO: 25467 - DNA, 659 bp, Arabidopsis thaliana columbia
cgaaagattttattaattacaatagtcaatctttaataagtttcaagacgacatttgaaagaacaaatgtatacattaactccgcccttggaaagcttaagaatggaagggagcttgcatctagagttacacacaaagcaaaatggtctacaaatagaggtgttggataccacttttgtggtcatgagatgagaaccatgcttgatatatgagaagtctccaacaacgcaagaaatatgtaatgtagtcccacagtcattgcatgtatagaaccattcctttgaattcacttttgtttcacatgcctcacaccagtattcaccatccacattcatctcatcgaaagacaagaagagaggatgatcatcgtacctattattcattacctttcccggtaatatagcacatttgcctcccaaaccatagtcacactcgtcacatctaaagacggaatccttcttcccacatctactacaatgcgtatatgtagtagaatagtaatataacgaatgttgatggcttttgtactcaagtgtatctgaaattgcagcacatcgtacatctataacataatggccagattgatacatgaaaccgttgaattcttgtaacaaagccacattggaaaactcgttgcagatgtagtagtgtgatggaag

SEQ ID NO: 25468 - DNA, 555 bp, Arabidopsis thaliana columbia
cgaggaagcaatagcagcaccaaccaacgatcacaaagtagtcttgaaaatgtttaagtccattatttttccgagatatggtatcccgaaggtagtgacaagcgactatccagcgaaaccacagccaagggaacgggcttggcagaatcagcggggaaagaagaccctgttgagcttgactctagtccgactttgtgaaatgacttgagaggtgtaggataagtgggagcttcggcgcaagtgaaataccactacttttaacgttattttacttactccgtgaatcggaggcggggtacaacccctgtttttggtcccaaggctcgcttcggcgggtcgatccgggcggaggacattgtcaggtggggagtttggctggggcggcacatctgttaaaagataacgcaggtgtcctaagatgagctcaacgagaacagaaatctcgtgtggaacaaaagggtaaaagctcgtttgattctgattttcagtacgaatacgaaccgtgaaagcgtggcctatcgatcgtttagacattcggaatttgaagctagaggt

SEQ ID NO: 25469 - DNA, 563 bp, Arabidopsis thaliana columbia
tgagattagttcggagagtacgactccgaagctgtaaacgtcactcttctcgtttaatcggtaacattggtaatactcaggatctacatatcctggagtaccttgtggagcagtggagatgtgagtttgatccatcggaaacaaccgtgagagtccgaaatcagctactttgacttggtaattgctatctaagagaatgttagtagtcttaacgtctctgtgtatgatccctgaatcagagaattcatcattagtaaactaatctcattgtgtgtatgtgtcatgtgtgtgtgttcagtatgtgttacctgaggcgtggagataggacaaggcgctacgggtttcgatggctatttggagtcgagcaggccaacaaatagggcgagattgtgcttggtttccatggagatgttcagcgagtgtgccattggagatgtattcgtatactaggagtaactctctgctatgtcttgttgtgcatccgtatagaatcactaggttcgggtgttttagggatttcaagatatcgatttcgttcttgaattgtccacgcgttttagtga

SEQ ID NO: 25470 - DNA, 1030 bp, Arabidopsis thaliana
taaaatgtgtaatattttagttttaattcgaaacgagattcatgaacggaatatattgtttgggaaacatgaggttctaatttaaagtgaagatggtctttagacctacaagagttaggtagttacgtgactctttttacacagaattttggcttcttgtttcacctacacggatctaacattatctaattagggcaaactttgcatacttagaaccctttctataacagtaaacactaagcagtataaaaaaaacaaatctagccaacagaatcagattgatttttcttcatgactcttaaaacgtgtaattcaagatttttcatgggttgattaggtaaaaagtaaaaggatttgacaataattaggcaacgatggaaggtaagattatttgaccctctgactaaaaaaaacaacccgtttttccctatcaaaattgttaattatgattccacgaattctgaaattatcaaaatctaaactcatttatatgaagataaacaacaatgcaaagtgactttcaaactgttagctcttacaactatttaagtctaaatctccaaacatatattaaaaagtgtgatattccgtcgccggaaaagcagatttcggccactctaacggccatgagtgaaactggttcaaaccgttcaatcacagaatctttacggtccagtcttggtccactcgaacacccggtttgcggatagtcaacacctttgtacccgaggaagctacaagcccacccattcgcagaggtcccatctcaatctctgccttttgattcaacggttccaccaacgcagattttggacctgagctgtgtcccaagaggataattctgtcgatcaagcattgggaagagagacgagcttctggaggagctaagttcgttgatgtaagaacaccctttgagaagacgaagcgacgatggatgtaagagcctcgtctgaattcaaagcttttgccgtcatcgatgtagagttcacctctgcttcttgagaactgttcaaagctactacctgaaggg

SEQ ID NO: 25471 - DNA, 641 bp, Arabidopsis thaliana
cctggcattaaagtggggaagaacaatccaagaattaaccacttactatttgcagatgatacgatgttcttctgcaaatctgaccctcaagactgtgaaactcttatgctcatcctgcagcactatgaacaagcttcgggccagtttattaaccctcaaaagtcagcagttactttctctgcaaaaacatgtgtagagacaagagatagagttaagctattactcggaatccaaaaagaggggggcttgggcaaatacctaggtttacctgagctctttggtagaaagaagaaggatttattcaccctgattgtcgacaggattcgccaaaaggcttgcagctggtcatctagattcctatcttcagctgggaagttgatcatgctgaagtctgttctagcagcaatgccaacctatacgatgtcctgctttaaactaccctgctctctatataagcgcatccaatctgctttgacacggttctggtgggattctagtatggacaagaagaaaatgtgttggatctcctggctaaagttaacaatatctaaaggagagggtggacttggtttcagggacttacaatgctttaatgatgctatgttggcaaaacagagctggagaatactcacaaagccgca

SEQ ID NO: 25472 - DNA, 986 bp, Arabidopsis thaliana
ctctagaccatccccatggcgttgtcccaaagaatattagatgaataatccatttcatcgagacgagaattgatcctatttcagtatcatcgtgttccgttctcatctcggctattacaatatctggaagcgagtgtatctgcttttttcgaaggatggcttaatatctttaaccatgataacatgatcatgtccttgtatctttatccaactacaccctaggctgctttagtgactccctctttcctcatcgactttcgtacattcatcacatcctcccattttccgagctcagcgtacatgttagaaagaagaacatatggtcctgaatttgatggctctacttctaaaagcttcatctgcaacgtatttacctaacgtaatgttcctatgtactttacaagcagcaagcaaagaaccccatataacagaatctggatgcataggcatctcctcaatcatgctctttgcttcttcgagaaatccagctcgaccaagcaaatcgaccatgcaagtatagtgatccctaagcggagcacaccaaaatctctggtcatagaagaaaagtagtgccgcccttcttcaacaaatccagcatgcccgcatgcagaaagaacaccaatcatggtaatgtgatctggtttttctccagactcaagcatgtctctgaacaactcaagagcctcatttccataaccattttgtgcaaatccaataatcatcgcgttccaggaaacacaatctctatccatcatcttccagaatacaagataaccctcttctacacaagcacatttcacatacatatctatcgaggaattgccaacgaatatatcagtctcttcaccagattgcaacttaaagccatgcttcaagacatgcacgtgagcctgcatactgagatgtaactccgcaagatctgcacatgccttgaggatattagccaaggaatagtgagttgagcatactgattcctcttcaagaga

SEQ ID NO: 25473 - DNA, 732 bp, Arabidopsis thaliana
atgatatttaaataagtgtcttctatagtcatgtaaatttgttatctgcggtcagaccctcatttgttcactacaagaaaattagaaacacttgttcttgctttggctcgctgcaaataataagcttaccactggtgagtgtatatcatattggaacaagtgattaaatccattgtgtgtttcttgtcaatcttcgatggagacttgggagcacttattcttcacttgtacattctcttcacgtgtttggcaggtgctaattcgtcgactacttcaaaggagttacacaaacagttttatggaggtttaaggctctactttcaaaggcaatattggttttattctaaggcttctcttccaagcaactatccactcactttgattggaacggaacatacgcatacatggtgtgatcacaaatgcaccaaatcaactgatcaagtctctcgatcgcttgttacacaataaaatttcctctatcaatctctttgatctacacaaacatgaaaatgttaagatatggttcgactcagaaaactaaaactctattttttttcaaaacttttcaaaccagcgttcgattttcaaaaagatacatttattgtaataaaggtgttttagttgaataaattttacattcactatataaaagcaagtgtaactagcaagatcgtgaaagatcgatagatactccataacaagcaaaagatagtatcaatataggttgaagat

SEQ ID NO: 25474 - DNA, 607 bp, Arabidopsis thaliana columbia
tcgaattcgagtactactagtatctctaaaccttcttcaacatcttcgaaatcatcatcagcctcgggttcgcgtgtagctaatggaactcttgctcctaactcaatagctctaataggaatactaatcaagggaagaaaccattgggaggagatgctgttgtacaagctggaccgtttccgtcttctggtggggtttatgaggctttgctagctttagagatgttcctatatcggagaaaccgaatctctttatcgggaagttgagtatgtgctgtgttgtttttgactttagtgatccgtctaagaaccttaaggagaaagagattaagaggcagacattgcttgagcttgttgattatgttgcatcagttggttttaagtttaacgatgtttcgatgcaagagttaacgaagatggtagcggttaatctgtttagaacttttccttctgcgaatcacgagagtaaaattcttgaaatacatgatatggatgatgaagaaccttctttggagccagcttggcctcatgttcaagttgtgtatgagattctctcagattcgtggcttctccgatgactgatgcaaacttgccaagagatatattga

SEQ ID NO: 25475 - DNA, 1270 bp, Arabidopsis thaliana
attcagttgtgtctactttgagtgtttttggtacatttggtgcgtttcaaatcatcagcgatgttttctcttagaaatcttccttcgcttgcaccgtttgtctcagcctacgcatcattgacgggatacgtcatgatgatcaaaccatttcttgagatgacaattccacctccgttacaaaactacatgatctcttatctcaattctttcttgcactctactccatcgactctcacgctcatcatcgatgaccatatcaagaatgggatgtataacgagctctacggggctgctcaggtttatatttctaccaaggtcaaccacaacgcggaaaggctaaggatctctagagaccgcagtgagaaaaacgtcaatatacacttcagcgtaggagaggttgtctcggatatctaccaaggcattgaggtcaagtggcggttttgtgttgacagcaataagagcaatatggttcattattttggggaacattttaagctaaaccccgatcgggagtgcgttgagcttagctttgaaaagaaacacacagagttggtcttgaattcttatataccttacgtggagagcaaggcaaaggtgatcaacaacgagaggaaaatcctcaagatgtactcctactgttgtatgtatctaaaatggcaatccgtgaacctcgagcacccgtcaacatttgacaccatggctatgaacgaagagctaaagcggtctgtgatgggagatcttgaccggttcatcagaaggaaagatttttacaaaagagttgggaaaccttggaaaaggggttacttgctgtatggaccacctgggactgggaagactagcctagttgcagccattgctaactacctcaagtttgatatctatgatctccagcttgcaagcgtgagggaggacgctgatctaaggagattacttctcggtactaccaacagctccattcttttagtagaagatatagattgcgccgtggatttgcatacaaggttgcaacctaagactcaagatgatactaaggtttggtctttattttcattaaaaactagtattaatttataaatcatcatgaaatgcttgcaaccaatacttggatcctatgtgaatagggatcatcaatgttgacattgtcagggctcttaacttgcatagatgggttatggtcgagctgtggagatgaacgcattgtaatcttcaccacaacccacaaggagaggctcgatccggcattgcttaggccaggacgtatggatatgca

SEQ ID NO: 25476 - DNA, 598 bp, Arabidopsis thaliana columbia
  unsure (1)..(598): unsure at all n locations
nnnnnnnnnnnnnnnnnnnnnnctaaagaccgtcgccagttagaagtttgtgaggatatttgtcagcaaatccgcaatggctctacggcgattgctggaattatggcggaaagtttcctgcgcgaaggaacgcaaaaaatcgtcggcagtcagccgctcacttacggtcaatccattaccgacccgtgtctgggctgggaggataccgaacgcctggtcgaaaaactcgcctctgcggtagatacccgcttctgaatgcgtgcccattcctgacggaatggcatttctgcgcaacttgttgtcttctcaacaaattactgcttgctctggtcagccataatattgataataagaatcattgttatatcaattattattaatttttatgcgttatacggatagcagaaaactcacgcctgaaacggatgccaatcacaagaccgcttccccgcagcctattcggcgaatttccagccagacactgttaggtccggatggcaaactgattatcgatcatgacgggcaagaatatctgctccgtaaaactcaggctggcaagctgctgttgaccaagtagcctttaactcgagcagctgac

SEQ ID NO: 25477 - DNA, 1088 bp, Arabidopsis thaliana
aaaataagctattataatgcaaaattatataatatattttgtgtcggagagcaagactacaatgattcctattcctaattatcatacaacaacaacatcaacagaataaatctgatctccagttttcatattttagctgaagtctgattttttttttccggatgatttcaataatacaaaaatgattaaggtttatgtggtgttgtgattagccttggtcatcattgaacgcgtcttgcaataaaacttcaagtagagcaacgtgataacggcgttaagaacagagttaaacaaccaagcaccgataccgttacaaccgccgcgtttgaccaggtgtatacagagtacgcctacgtggcaaaccgtcatacaccctaacagaatggcttgacagtttccgacaaacggaaaacacgcgccacgcaacccaatctccgtccagaacctgtaaccgtacacaacggcgtacgaaacggtcgttaatagtatcgctaccacctacagaaaccaaaaccaggaagaacggttcaaatttataaattcggtaattgattccggtttaatgtgtggtaacccggttattttatacctgaaaggattgggaatattcgagccagaggaaggagatacagagaagagaagactggttgataagctggaagaagctgagtttacgacgtcgtatcacggagaagaaagtacggaacaagtgaaggaatcttgagaggtaaaacgcgtatgaccagaagaacacgcgtcccgaagcgcgtgtacctacgggaaagcagaggaaccattggagagcagtggtgcgggtgcgacgccatagccaccgcgtgtctctgatctctgctgcggcggagaggaggataccgacgaatatgacggcggagattatggaaatggttaagctgtgtagagctgggattggaccgagggagaatccgcggcggcggttagagagggagagggttatgaggaggaggaggtggagagtgacggcggcgatgatgtaagatgagacggcggtgaagaggaaagaccacgtggaggcgtaggattgggttggactccaacggaagttaacg

SEQ ID NO: 25478 - DNA, 572 bp, Arabidopsis thaliana columbia
ccatggaaccttgacgcagatcctgaatttgctggatgggatgaaatgttctcggcaaattcgtcatgtgaaaacgatcatgtaaatcattccagatcatagtagcatcatccaagttcaaaatactaccatagatctgctttgaaacagcattcaacaaccagggacttaaccatactgttacatctagaccagatccgagagagaggagtaccttctgcaggacgaggaagagatccatcgatgaaagcgattttgttcttcgcatcaagagaaatcttcatcgcagagctccattgagtgtagtttgtaccatctagacgatcagcaaccaaagtcagacccggatgatcagcactgtgaagaaagaacggcgagtgtggactatccacggcatcgatctcagagatggagcgaatcggaacaacaggagctggatcgggcgagtttgagctcatcggagctttcaacttagtccccgagctactagcacaacagatctaccagacgacgagtagattacgaccggaactccatatcgatctaaacaccacacaaaacacgccaaagaa

SEQ ID NO: 25479 - DNA, 1006 bp, Arabidopsis thaliana
gacgcatcaatgatgggatacgtcatgataatcaagccaatgattaacacaattattccacgtccagttcaaaacttcgttttctcttatctcaagtccttcgctggctctcgttcatcgactctcacgcttaccatcgatcaaatgtcctcgatgtatattcccgacgagctttacgcagctgctcaggcttatctctccaccaagataagtccaaattctgtcaggctaattatggctagagaccctgcggagaagaaagtcaagttataccttagcgatggagaggttgtctccgatgtctacaatggcattaagctcaagtggaggtttcttgctagaaacaagaataatactatggttgaagagtatggacaaagctatcagggaaacattcaacgagaatctttggagctgagcttcgacaagaaacacagagacttggtcgtgaactcctatataccctacgtggagagcaaggcaaaggaagtcaacaacaagcgtagaatcctaaaaatgcattgctactcgcacatggctcaaacatggcaatccgtgaacttcaagcacccttcaacattcgacacgatggctatgaacgacgatctcaagcgttctatgattgaagatcttgatcggttcgtcggaagaaaagatttctacaaaagagttgggaaagcttggaagaggggttacttgttgtacggtccaccagggactgggaagtctagtctagtggcagctatggctaactacctcaagtttgatatctatgatctccagctcgcaagcgttcagggagacgcccatctacgaagcttgcttcttgccactaataacagctcgattcttcttatagaagatatagactgctccgtggatttgcctacaaggttgcaacctccaaccgaaacgagccaaccgctaggtgctgtccaggtttggtctccacgatggatttagttttgagttttatatcattatttttcgtacaaacaatacatga

SEQ ID NO: 25480 - DNA, 452 bp, Arabidopsis thaliana columbia
tgataaaccttcgacgcaccgccggttgccagcaccaccgcttttgcgtggcaggtttccaccgtttctttattacggttccatacccacgcgccaacaacccgtcgcgtgcccggcaggcctaattttgtcagaaacaatcagatcaaccgcgttgctgcgctccagcacgcgaatattcggatggttcagcgccttgctcaccagcgtggtttctacttctctaccggtggcgtcggcggcatgaagaatacgacggtgacgatgtccaccttcacgggtcagatggtaactttcttcgccattcggttgaatgtgggtatcaaacaacaccccctgtgtcgattagccattgcacacaggatcgtgcattgctggcgacaaattgaactgcatggcgatcgcaaataccagccccggcaatcaatgtgtcttccacatgcgaggtcaat

SEQ ID NO: 25481 - DNA, 313 bp, Arabidopsis thaliana
  unsure (1)..(313): unsure at all n locations
tagtaaccaccgtgctctaaaggttgcaggcgtgtcttgagacacacacaattatggctaaccccaacgagtggtcgcagttctacaacaataaccaaaccgtcttcacaacttctaccaccgcttcaaccgctgtcacaaccaccactgccggtgataccacctccatagactctcgtctgagtccagagactgtccgcggaattttaacccacgtanaangtccagagcctcacgtagaacaccaacaacgcttctcaacaccgacacttccaacttccgtgccatggctcagcaatacactggcggtcca

SEQ ID NO: 25482 - DNA, 591 bp, Arabidopsis thaliana columbia
tcgccatctatgcgttcacaacaggtgaactaaagtttgtttggtctcttctgagtgtttagcattatctataaagtttatttaattcttcttaattttcgtacaggtcttccctgacacacttcttgatgcacttctaaaagcaatgctgcatccaaatgtggaaacccgtgtaggagcgcatgaaatattctctgtaattctcttgcaaagttctggtcaatctcaggctggacttgcatcagtgagagcttctggctatcttaatgaatcaagaaactggaggagtgatacaacctctgcgttcacatctgtcactgctcgtttagacaagctcaggaaggagaaggatggcgtcaagattgagaagaatggttacaataatactcacgaggatcttaagaactacaaatcgtccccaaagtttcacaagttgaattccataattgataggactgctgggtttatcaatctagctgatatggtacatgtttccttgcttacaattggatgttgtgtgctaaaggacatcatatgtgtatgcaattgtctgatactgtttggtgatgcagttacatcgatgatgaagtt

SEQ ID NO: 25483 - DNA, 555 bp, Arabidopsis thaliana columbia
gacaccaaaggagagcgccatggtactccagcaggttaggctctacatactctttctcttttcttaacttatggattcagtttctctccaccattggatcaataacacattactgttgtgaattacagagaggcttttggcagccacaaatccaactgcccagaaaagcagaccccatacgctattcgcaatgggccctccatccagtgctcctcaagttaatggtctaccacgtccgtttgctaacggcagcatgcaacctgtcccgattcccgctccccgtcaaccaccaccacctcctccacaagtatatcaaactcagccaccatcctggccatctcagccacaacaacacagcatggtcccaccacccatgcaattccgtccacctcagggtatgcctctcgcaccacctcctcagtttctaaatcaccaacaaggtttcggtggtccgaggccgccgccaccatctcaagccatgggaatgcccaacatggaggatggccacgaacacatgcagcacaaggtggaccacacaacaaaacaaccacatac

SEQ ID NO: 25484 - DNA, 604 bp, Arabidopsis thaliana columbia
gattctggttaattgtgaattaaacaagagtccaaataataagggtaacggatttaatgtaaaaatatagttttttaaaaaacattacagagatttctatgcacataaattaagttttgactggtatatcgtgtatatgtaaaaatcaaattttctggtaagaagagaaacgccgagacagaggtggctaatgtactccttcccctggagctacggctcgagcattcaacaaaggttgaagagctttgacaacgatactcatattcggcctaaaatctgcttcatattgcacacacaacgcagcaaccgcggctaactgcgaatcatcatcaccataacttgaggttaagaacaatgaatgcagtctaaaacgtaaacacaatctgaggttatgaaaagtttggtttcttaccttagcaacagcttttggagggtaatcgccaccgagtcttgcatcaacgcattgtttaaccttgtcttcactcagtttaggtgtagcctgatgtatcataagtaacagtttacatggttgatgatcatgctatatatatgaagataaaagatgtgatcggatagagagacattaattagtacccatgtgact

SEQ ID NO: 25485 - DNA, 506 bp, Arabidopsis thaliana columbia
ggtcagactcatccccttgcaatatttttatgttcaacttacaacagttattgtttcttaattaatgatctacatatttgataaacaaaagtttctcaaacaatagttacatcgcacttgcacgaagaagccatgttttgtgcacatgtcttcatattttctaataattttaaaaatcgtgtggacaaaactctaatgctaatctaaaccgtatattatgttctaattttttcaatatgaagttggttttgtgtgattaaatgaaataaatatgaacttactaaatgtggctgaattgaaagttgtccatccatcaacgacactcctgtttccggtgataacggtctggttgatgccgtcaccgatcatcatcacatatctcttgtgcttgggaacttccacgtagtcctcgtacaatcccgccgttacgtagatctagaagtaaccgttactaccgtcagtattatttggtgcagctgcaatggcggcgtttatggtcgtgaagt

SEQ ID NO: 25486 - DNA, 1203 bp, Arabidopsis thaliana
  unsure (1)..(1203): unsure at all n locations
ttctcgaagctataagcgttcggtgtacggggatagaatttttttctttcatgtataaaatggaacactactgtcttggtttctggatttttttgttctcgaagtattacaaaaaattgtacttttcttggttttccacattttgttttctctttactaatcctcctcttcaattgacctaaataattagagagtgttgatttattttttaagtggatatagaaatagagtagtgaataactttcacaaatgaaatttacatgatttgatgatataaagttgagaagtatacggtcatggacacgtgtatacttgtacacgtgtgagaaagaagttacactatcgaacttgtaatcccccatacgtatgaaatttggaaaacttttataaacggtccaatttcaagaccatttacttatatttatagtgatcgtcatacacactcttcgaggaaacaaatactttgactgatactatgacaccaccgcctaattcaatcagctcacgtaacgtggccgtgatcggagccggagccgccgggcttgttgcggctcgagagcttcgtcgtgaaggtcacaccgtcaccatctttgagcgtcagaaacaagtaggaggactttgggtttgcactccaaacgttgagccagacttactaagcatcgaccctgatcgaaccgtcgtccactcgagcgtctaccaatccctccgcaccaatcttccacgagagtgtatgggttacagtgacttcccgttcgtgacccgtcccgatgatgagtccagggacccgagacggtacccggatcacagagaagtcatgaggtatcttcaagacttcgccaaagagttcaagatcgaagagatgatccgattcgagacggaggtttttcgtgtggagccgacgcgtnagaatagttgtaaatggagagttcaatttaggagctcaagtggtgtctccggcgaagatatattcgacgcagtcgtcatttgcaatggtcacttcactgagcctcgtcttgctcatattcctggtaagtaatttaaagtgtaattagtttgcagttaaaatgtaattagtttcttaattgtgtagaggtgccaaatgagttttaaatagaaaaaaataaatccaaaaataaaatcattgttaaatgcataatcatgtaagtggtaactatattatcaaaaaaaaaaacttatatatat

SEQ ID NO: 25487 - DNA, 504 bp, Arabidopsis thaliana columbia
gcatcttcaataaagaaattttgaacgtctttgatgtatcacacattaacatgtaaaagttaaaacaaaagaaaaaagcatatgacagtcagaggaacaaacctttacatgagaagtaataaagctcgctgttgttttatttagtgaactcactctcacaactctccgacacaatctcaaccttgtgcgcatctaataatccatttactttaatgtcacatgttacggccacttccttggctcgtttcaccaagcccgtgccgaaacccgcatctagccccatcgtcaataccaaactaaccacttcaggcggcagaacagccgcgttcatggacctatccagctttaggttgaccgtatgggatcccgacacggctaatgacagctctgggaaattccttggcctaggttcttgtttttgtacgtcagtgagacgagacctttgtaggtcaccacatggtggaggttgggtctttgatgtcacatgatccgaaatggcgagat

SEQ ID NO: 25488 - DNA, 890 bp, Arabidopsis thaliana
tcttagttgtctttatatttcattttactaccgtaggtgaatccgtaggttgtcgtaacagccatatgaatcggatgcaaccattttagacgagatatggacttcttttgcaatggttgctatgtctgtactaatgtcgtttccactagcttgacttcctataactatcaccacctacaaaacatgtcaaacaacaatcaatgtagataacttaaaagaatctattagtataattaagagctaagattatgaagaagataataaattttgcaaatacctcatctttgaatggatctggaattcgataattgtggctatggatctgctttcctggccatgactctatccctaaaacactaaaaccaagatacttaagagactaatcaaccattaattaatcacacttttaagtaaccaaaatattacttaccaggaatatgagcaagacgaggctcagtgaagtgaccattgcaaaccacgaccgcgtcgaagatttcttcgccggagacaccatttgagctcttaaactgaactctccatttacggttattctccggcgacggctccacacacaaaacctctgtctcaaatcggatcatatcttcgatcttgaactctttggcgaaatcttgaaggtacatcaagacttccctatgatcggggtaccgtctcgggtcgccgtcactggatcgggtaacgaatggaaagtcactgtaacccatacactctcgtggtagattggtgcggagggactggtagatgctcgagtgtacgatggttcgatccgggtcaacgctaaccgagtctgaatcgactcgatcagtgtaccccagagtccacaacatgtttccacgctcgaaaccgatgacggtgtgacctcacgacgaagc

SEQ ID NO: 25489 - DNA, 942 bp, Arabidopsis thaliana
ccttttgagacaaagcccagtgaagggtaaccggctctttaaaatcagttgccacatgaattttcgtctttccggaaagtttagtaacaaacacctatttagagggagtaataacttggcattagaagatactgatggatgtatatctaaccggaatagaaataaaaaagagagcaagatagtgatgctatccactgaccaaaatcgcactgccttcaagcttgaatgttttcttgctaaagactggagtggtttcttgttcctcctttgctttggcgtatatctccagagttgttaaggaccgtggttcagatgaggatttggattctggttcaacaaaatcagcaacatgcttatagataagcttagtcaggtcccttcccttgcgctggatcttgtcagtgttataattttttttacgctctggttgcttggaaacttttttcttttcctcccgtccactggatgatgtcccattagattttggggatcattactgttatctttcttcaacagctttgctctgagatcttccactgaagcacctcgcatcatttcctcccgtagctccgtccgggcggcttcatactcctcctattgatcagagacaaattattctgcttagctataaaataatggatttacacaaaaatgcagagaacttgatattgatgcaactgagatatatacaggttcatcagataaagcaacaaatatattttcaagagccaccagagccaactaaaacgctattaccaaaaaatcaatcaagagcattttcaacttagctaacctatcatcaatttgctgatcagtccaatataccagaatctgcatctaaatcaaaattgttggaaatttgtactggtgatggaatcaactaaatggctggtgagaatcatgattcctctttatgtgaattgtagaacaacataaaaggtg

SEQ ID NO: 25490 - DNA, 563 bp, Arabidopsis thaliana columbia
gggggaagctggtgtaccgttctaccaaatggcaggatctgaattcgtcgaagttcttgttggagttgggtcagctcgtatcagagatctgtttaaaagagctaaggtgattggacatatgtgtatttatacatttctgtgcagagatgttaaatagtatttgatgatgtctatgtccttgtgcaggtaaacaagccatccgttattttcatcgatgaaattgatgccttagcaactcggtatacaatattttcgtcccttgtatctagattttgatatactaccttccttgcataatttttcaacttgagacggagtttaactgatatcgctctttatattttggtattcgttagacgtcaagggattttcaaggaaaactcagaccagttgtacaatgcggccacacaagaaagagaaccacattgaaccagctactcatcgagcttgatggttttgacacaggcaaaggtgtgattttcttgggtgccacaatcgcagagatttgttagacctgctcttctacgtccaggtcgatttgatcgaaaggtttgtgattacaa

SEQ ID NO: 25491 - DNA, 1012 bp, Arabidopsis thaliana
  unsure (1)..(1012): unsure at all n locations
tgatcggtccagaaggcgatctaaccgaaacaactgaagagcaatgtcaccgtctctccctaaaaggtcctcttttgaaaatcgaagagatggaagccatcaagaaaatgaactacagaggctggcggactaaagttctggatataacttatgcaaaagaaagaggtacaaaagggttagaggagactttggaccgaatttgtgatgaagcaaatgaagcaataaaggagggctacacattactggttttgtctgatcgaggtaattgacatccttagaaactcttgactctaggatctgttattcatctttgatcagtctttgccatgttcttactttttttttttaatgtcttcactgtttagctttctctgcaacacgtgttgctgtgagctccctcatggctgttggtgccgttcatcaccacctggttaagacacttgcgcgcacccaagttggtttggtagtggaatctgctgaaccacgtgaagtgcatcatttctgcacacttgtcggatttggagcagatgctatctgcccatatttggctgtagaggccgtttatagattacaggttgatggcaaaataccacccaaatctaatggggaattccattccaaagaagagttggtcaagaagtattacaaggcaagtaactatggaatgatgaaggttcttgccaaaatgggaatttctactctagcctcatacaaaggtgctcagatatttgaagctcttgggctttcatctgaagtaattcagaaatgttttgccggtaccccaagccgagtggaaggagcaacatttgagatgcttgcacgagatggacttcaattgcatgagttggcctttccaacccgtggctatgcccaggaagtgcagaagcttcagcacttaccaaccctggaaactatcactggaggaaaaatggagagattcatctcaacgatcctcttgcaatagccanattacaagaggcagcacggaccaacagtgtggccgcctcaagga

SEQ ID NO: 25492 - DNA, 771 bp, Arabidopsis thaliana
gctgtttgacatccagccatgaaattgacagctgatcttgagaaagatccggtagctacgtagcaagaagacatcgatccaactacgttcatcatacctaatgctaccatctctttgttaccgtcgatttggtagtctttcattgcagcaaaggttcttccaatcgctacagcttcctgcgaaaacagattgaaatattcgggtttcaatgaggaactttcgtttaagagagattgaagtatgagtcattggtttgtacttactgttaaagcgaccatgccagcgactacaccgatgcggatgcccttagcaaggttatcaccagtgaagtagattagatggaacgaggaagggttgattccttggtcaaggtgtttcacctttattcataaaaaagaaaagaaaaaagaatcatattaggtattaccacaacgacaaattgtttgaaacgcaagaaactagttagagggagttgagatcttacgatttggactccttgtttgtcggctcgggttatgtagacaaagaaggtggaaacgataactgatatcaatggcgcaatagctggtacccagaatagtttcttgctcttcttcccctgtttcagcatcaagtcaagagaggtcagaaacagatctaaacaaagaataaacttagatgttttgttaatagatatatgtcttacaatgatcttagacgtgagaaggaaggtcaagaatgatgcaccaatgagtatagtctgcgaatccactgcatagccaaatttatatg

SEQ ID NO: 25493 - DNA, 585 bp, Arabidopsis thaliana
ctgtgtatcgcttatgcaacactaatcgtgtctctgtggaattctttcctgcatcctttcaggtgaaggatctcaacacgggggtcccattactccaaggcaaaactaaagatgagttgtatgagtggcctattgcatcgtctcaagcggtatctatgtttgcgtctccatgctctaaagctactcattcttcatggcattcccgtctcggccatccttcattggcgattttaaattcagttatttccaatcattcacttccagttttaaacccctctcataaacttctttcttgctcagattgttttatcaataaaagtcataaagtgcctttttcaaattcaacaatcacttcgtctaaaccattggaatacatttattcggatgtgtggagtccccaattctttctattgagaattatcgctattatgtcatctttgttgatcatttcacccgttatacatggttatatcattaaaacagaaatctcaagtgaaagatacgttcattatcttcaagagtcttgtggaaaactgttttcaacaaggattggtacacttatcagagaatgggggcgatttgtgg

SEQ ID NO: 25494 - DNA, 633 bp, Arabidopsis thaliana
ggactttattacttttattgataaggcaatctgagcaagagagaaatttgtgagatgggtttaacactgagagagaataatttgaaatgacagaatttaaaattgaaggagccggatggcctaaacgagcatgccaagatgaatgagtagctttcgagcttggagacgcaaacagagagaccggttgagacgatgctatgggccactcatacaactcatccttagttttgccttggagtaatgggacccccgtgttgagatccttcacctgaaaggatgccggaaagaattcgacagagacaccattagcattgcataagcgatacacagaaattaaattcttgtgtatattaggaacatataaaatgttgtgtaaatttaagggacgagattttgtggatagagaagtagaaccagtatgtgatatggggatagtagacccatcagcaaccatcacatcgtcaccaccagtatagggctgatgaagagacaaattgttgaagtcggatgtgatatgatgtgtagcaccactatcgagaagccagttgttggaggagtaaggagagccaagtgcgagatttgctctgggctgccacggagtgaacggagatggtggttgctgtgaattgacac

SEQ ID NO: 25495 - DNA, 996 bp, Arabidopsis thaliana
taagtaggattaataatcctctcttcatcatttcctcactaacttattttccctaatctctttcactcaaccattacgacacatcaaaaaaaaagggttaagagacaaaatctcaaccacaagaaagagccatgagaagtactgcggctcgttcctcttccccaagtttcctccatagcctcttcttctccacagccgatctcttcatcgccggtaccttaaacccaaaatccaaaaatctaccaacccttttcacgttcttcttgttattattgctgctactggaattctcaggatctctcttgattttgttcttgacatttcctggttcacctttggcaatcttgacaattcccggttcacatttggcaatcttaacattaactggttcgccttttccggtcttgacatttcggctctcaagaccaagattgttattacttttgctcttgattttaatatcatcttgtctaattccaagagctgcttgtctcttctttctgctcttgataccacacgcattgcacaatgactgcaaacaaagtcaatccatgatcagaccagagaacaaatagtgaacaatcatcaaacagatctaaaattaaagagacataaccatctcttagtaaaaaaggcatcataaaaacagtgtaacaataatcttaacctgatcaattagtaataaggcttcaaacacagaatcaaaaccataacatagagatcacataacaaatttaaatatcaaccacagattgacacaaacctcgcatacctagactatgtatacacatgatcacatcaatgagacaaaacccactagcaacagagctaagcacacaagatcaacctacattttaagtggattcaagtacctatttgactagatctaacacatgagaccttaaagcttggatttttaagggtttaaaagaaaatggtagagagagatcatgatccttactttagggccagcaggtccaccacgccaaagaggag

SEQ ID NO: 25496 - DNA, 1009 bp, Arabidopsis thaliana
tggttactagatcataatcaattagaagttcaaggcagttttggtgggattctcatagacataaaaagaaaattgcagtcagtttgataatgatcgagtgacattgtatttttgcttatcaaggagtctcctatattatgcatgttttacaatagtaatatgcaaaaatccaatatatgtcaatcaacttcgtcgtcattttttatcgatttaaaatgcataaacaatttgtgaattcattgcgtttctgtgtatattcttgacatgatcatgatcgggcctactggatctgacttatgatattacatccagacgtacatttggtctttgtgtttattacttgtatgatattagtagaaaatgtcatctcacaaacggaacggtcatagttaaaaaaaactttctccactaaatgttttataagaaaagtaatatgttactcgtagttaattttctaacgaatgttatatacaatcacataccgatacttttgtctttcttttcttaaaccgttattgtactaaatgtaaaacttgaagaaacattcaccgaagcagagaagataaaggtaacaacaaaaacaaacttatcaattctttgccccttaagtattgataattaaccatccaaatgaaaaagattccaatctttgtattatttctttgttttctccatcctccgatcaataatcacgtcttctccttcttcaccggaaccctaccgtcagtaccagcaagcattgcgtacttatcctttcttgtgaaattggtgcactcaaaacctaaggttcctcccaaaaccctctgtatgtaattcgcaacctctatcggagatttgcctcctttacacgtcagctcagctggaatctgtttgaggaacgtgatctcatacgtcggcctcgggttcatgaacgcaaagtaaggatcaagaagcttgtatccacgtgtggtggtaccattgaacatgctctgctttgtgttgatcgcacgggaacgatccggtccgtgag

SEQ ID NO: 25497 - DNA, 1601 bp, Arabidopsis thaliana
cgtggcgtgagaaatatactctgtttgtcggtagatggagacataaatatgcactttgggaagtgtagtagccaagaaacacacaccgttgtgaccggtcgtcaagtttgttttgtgtgtaaggtctcagccaaggaaaacacaaacaaccaaagacacggagcttctcatagtttggtggcgactcgaatagcttgtgaaacggtgattgcatagatagaaccgccgtgggcattctattgttcaaatacacaactgtcgaaaaagcatatgtccagtactgtttcggtaccgatgcggtggacatgagtgtgaggccggtctctacgatatgacggtgtttgcgctcccctagcccgttgtgttcagggatgtgtggtggtgtggtgagatgagtgatcccatgagtggcgaggaattgccgtaatgccacaaatttacccccattgttagagaacaacgtgccaatgcgacattgaaatttattctcaacaagggctttaaacgctgtgaatatatcgttgacatcgaatttgcggacaagtgggtacaaccaggtgtagcgagtgtagtggtctactaacaaaagataatatttgtggttatcaatagagtgaatgggtgaagtccaaacatcagtaaagacatattcaagagggtgatgagagacaattgaagtttgtggcttttattaacaaggcaatcagaacaagaatattgtttttgtttttgtggagaagatgaaataggaagcaaaaatttggaaataatagattgcgaaatagaagaagaaggatgccccaatcttgaatgccaattgataagactagcttttggaccaaaagaagacaccatcgctactggttgagaagatgtaacaagctactcatacaactcattcctagttctgccttggagtaatgggacccccgtgctgagatccttcacctgaaaggaagaagggaaaaaattccacggagactttattagtgttacacaaacgaaacacataaataagatttttctgtatatcaacacataatattttatcaagaagtaaggagcgagtttgattaggaagaaaattggaacccgtgtgagagatgttcattccggaaccatgagcaataagaacgtcatcaccgccattgtatggttgatgcaccgaaaggttgttgaggtcggatgtcaaatgatgagtggctccgaaatcgaagagccaattgttggtagtgtacggtgagcctacaacgaggttagctcgtggctgccaagggcggaacggagtggaagccattaaggacgtggatgtttgcagcgattggatttggggacatagtcgagcactatgaccttgtgtgttgcagtattggcaattttgggaattgtttcggagtccatggtgtgttgttgttgttcttcttgttggtattgttgtagtggttgttgtgttaactaccggagttgttgtgttgagcaacgttggcagagacaagagcaaaaacagatggagcggcctgagttttagcaaggagcttggcttcgtagttcagcagcctttcttaaacttcattgatttgtggtgttttgtatttggctgc

SEQ ID NO: 25498 - DNA, 602 bp, Arabidopsis thaliana columbia
  unsure (1)..(602): unsure at all n locations
gcgactctatccctctgctgcagtgcagatatgagccgcagcagttttacaaaccacatcacgattactttgctgacactgtaagtctttggttctgttttcatatatatatatcattagtagattggtaaagaaagcttttgctctgattaaaaaaaaaactaaaaagaggctacagtatttaacttttggtttggtcaataatgtttagttggatctgtacttcatcttctccttcttcatcatcttagaacatttagtttggaagtacgtttattgtgggtgttcatcatatttcctcgtttcttttcttatggttgctacacagttcaatctaaagcgtggtggtcagcgcgtacaanctatgcttatgtatctaactgatgacgtcgaaggaggagaaacttatttccctttggtataacactttctctctgttcatgcaaatttcagaaaacaaaataaaccaatggtgtaatatctctctctctctacttgaaatgcaggctggtgatggtgattgcactgtggtggcaaaatcatgaaaggcatctctgttaaaccaccaaaggagacgcagttctcttctggagcatggtttg

SEQ ID NO: 25499 - DNA, 455 bp, Arabidopsis thaliana
taggttgatcttcttctgagagttcaccatacaaattatggtgagcctcactgggtattgctatgaaggagataattaggcccttatctatgagtttcttcccaatggagacctaaaacaacatttgtcaggtatattgttctagtaatctcatcgcatttggtcatgaaactcagaaatagccttgaatgggtctaaaagatctaatatacaggaaaaggaggtaaatccatcatcaactggagtattcgtctacaaatagccttgaacgcagcactaggtttgtactaacttaaataccgtagaataagatgtatatcgactcattttcaggtttgcggtaaatcatttgatatagctggctccattgcaggattggagtacttacatattggatgcatacgccaatggttcatagagatgtcaaaactgccaacatattgctagatgagaat

SEQ ID NO: 25500 - DNA, 452 bp, Arabidopsis thaliana
caaactaatatgaacggaattgatatcttgtcctacagttttttaacatagtacgaacctagtgctgcttccaaagctattcgcagtcgaatactccagttgatgatggaattacctccttttcctgtatattagattgttagatccattcaggtcttctgagtttcatgagcaactattagacgtgacataattaagaaaatatatcacctgacaaatgttgttttaagtctccattgggaagaaactcatagacgagggccaagtaatctccttcacagcaatacccaaccaggctcaccaaatttgtatggtgcactctcagaaggagatcaacctaaaaaagactacgtgttaagaaaatgttgaaatccgtaacctttgggaaacagatcatagtatagttgggaagatacaggaatatgggcacctctgctttgaactcttagagc

SEQ ID NO: 25501 - DNA, 558 bp, Arabidopsis thaliana
tagtaacggccgaccagtgtgctctaaagcggcggtaatcaagggcgctaagcgaatcattcaggtttcctcatggcggcgcgctgggcgaactcatccatctttttctgatcgaggcggttttctgcaagcagtgccgccgtggattgccgttcctgcagtgtctgccaggcctgcaaacgttgttttttttctcgccaactgttcagggcaatgtcaactttctgcgtccactgattaagttgctggcgatgctgagtaatggctttttccagcgtctggataaactgctgatagttgatccagcggttgctggttatcccggcactcatatcgctgttgaggttattgcgatattcattctgataatcaatcagcattttgagctgttcttccgcctgctgacatccgcgacgcatttcacccagcaggcgcgcggcatcctctacctctttttctgccagatctttcagggtcgccagcgcaccatgttctgccatctgccgttatctcctgggttatgacactgtcgggaaaatacgcctcagccctggagag

SEQ ID NO: 25502 - DNA, 593 bp, Arabidopsis thaliana columbia
tccatggagtgataccaattcagctaaccatgatcatcactcttaagaagctgtatctatgcgagaattatcttttcggttctatccctagacaaatcggtaatttgagttcactccaagagcttgtgatctacagcaataatctcaccggtgtaatccctccttccatggcgaaattgagacagctccggatcattagggcaggacggaatggattctcgggtgtgattccgtctgaaatcagcggatgcgagacctaaaggtacttggattagcagagaatcttcttgagggttctcttcctaagcagctcgagaagcttcaaaatcttactgatttgatactctggcaaaaccgtctatctggtgagatactccttccgtaggaaacatcagcagactggaggtgcttgcgctgcatgaaaactacttcacgggatcaattccaagagagattgggaagccacaaagatgaaaaggctgtccctttcacaaaccagttaaccggagagatactcgcgaaataggcaacttgatagatgcagctgagatagattttcggagaacagttacaggtttcatccaaagagtttg

SEQ ID NO: 25503 - DNA, 612 bp, Arabidopsis thaliana columbia
tattcagctacataagaaaaatatgggattagcagggatgaataatctaagaagaaatggatctttataaatggcttttctgcaactttcaacaattaacaagaaagatatatttacaagtgatatgttagaaacatgtagcaatcagtgtgcctaacctgttatatcaataatcaaaagaaaaggaggattgtatgtttctcttaccttgagcttcttaagcgttttcgacaaggatctgaaaatccactggataaagcaagtttccagtatagcccaagagagcattaagtaattcattccattttcagagatgttcccaaattgcatagccaacccgagggattcacttataacaaagcataagacaccaataagaagcatcttcaatgttatgccacctagggtaggtctcactatcccaaaccctgaagatatgaccaacagtagaagccgggagagtgccttcctcatggaagaaagggttattgcccatactgtaactccataggacttgtacagctgagtcgagataaacgaagtcaaggtagaggaaggccaattcacccatggtaaatgcaattacaaagttgatatgactatgcgactgga

SEQ ID NO: 25504 - DNA, 647 bp, Arabidopsis thaliana columbia
cgttaatatctgcaatagagccaaatcagaaaacataattacattgttggtaatatgattatgtggtttctttcgagattttaatcgataagttaagagttatgtaccttcacacgtcaaaccgtcgccttggaaaccttcaggacatttgcagccagtagatacagagtcctaatttttcataaataacaaagagatgattgaactgaaaacaagaactttgtaagggagggtttggcttatgacaagagaatcactaaactgagcaagcagagaaagttaagccgttccttgtgtcagaccagcaacctccattgttcatagtacacctcgcaggcccataagctgcaaagctcaatcacaaaccagagactattcaagaaaccggtctcaacatttgagagctatgttgtgtgaaatgtgtgaacaacttacgtgtacatgaagtgtacccgtctcctttatattgaacaccttttacaaccggacactcgcagagtcttcctctgaatgtgtcctgatcaaacaaaaaagattcaagtattataggactagaaaatatctctctagattttcacattttctctagttttcaaaacaattccaaacaaattgatactgatatcaatatagtggtgagatgtgat

SEQ ID NO: 25505 - DNA, 608 bp, Arabidopsis thaliana columbia
tgtcaaggtttccccaccaataatagtagcaataaagtcgctcgttgcattacgttgatcagatgttaatgtttgggttccgattttattcgtttatatattataacttattatataaacactatagttcaaagttattgaaaacaataacgaaaactaatccagtaaatccaagcttatcacgactctaaaaaaagctctatataggtcaacttttacacttgacctctacgtcacacgattggggatagataaaagataaacagagcaaagtcactgactactcaattcagtctatacaacatacaacactttatatcattttgcttcatcatcaagattcttcttctccggatcagacctcgtcggacagtttaggggagcaagaatccacggcctcagccaccgtcagaaagattttgtcgtgtcctatcaagtccgcaaagtgagaaacatgtagcttatttatgaccggcggtcctggattcgctagaaccaacttgttttggcacacaaccaaaagaagtgttagtctgtttcataataacttctttagaatctaggcttagctttggtttatggtgtgtactgaatgtccgtttttggag

SEQ ID NO: 25506 - DNA, 670 bp, Arabidopsis thaliana columbia
gattatatgacattaaatttatatagattattttttctttgggcaactataaatatatatagattattcagtcaaagtaactaaaaaaaacaaaaaaaaatctagttaaccgtcacttaacacgtgtcataatggggcagcatgtgcatgtccattgatgtcattcacccttatcaccgctattttcatcaagaacaaaacaaacagaatcacacaagaaacagagcaacaacacatattcaacaaaaacaaaatcgccatgagatcgagaagtaaccttataggtctcataaacttcttcactttcctcctgtcgattcctatcctcggcggtggaatatggcttagcagccgagctaactcaaccgattgcctcagattcctccagtggccactcattatcatcggaatatcaatcatggtcatatctttagccggaatcgccggagcttgttaccaaaacaagttcctcatgtggctttaccttttcaccatgttctttgtaatcgctgctcttataggattccaatcttcgcttacgtagttactgataaaggctcaggccggtttgtgatgaacgtcggtatcttgattattactcaatgattaatctggttggttaaagaccgtgcacagataatggatatggagagatacggatcgtgtgtag

SEQ ID NO: 25507 - DNA, 612 bp, Arabidopsis thaliana columbia
cagtgtgctctaaagagcaggcaaacgtgggcctacggagccagacgttgacgggcaaagtgcatacgcgccacgcgccagtttctgagcgatagttttatccgtgccgtgttcatccgccatacggcgcagcgaaactgacggcgagaaacgcacaaaactgtcgcgaccgagccacagtacagcgaaaaatttctgtacgccgttaagcattacgcaacggcgggttcaattcggcctttttaaggccccggcgcgcgaccaaacatcaccgacactggcaccatctgcacatccagatttgggttgctacggtgcaaatcgagatagtcgtggaacagcttaatagactcttctttcggcgtgtaataggtgaacacacgcggcccgccgtgaatgaacacatagcgcggcagtagcgtgccgtcgatttccagcggctctaacgggtcaggcaagtcatgtgccagacactgggcgcgcaacgtcagcaaatctgctttcgagttgtacggtaaaacgtacataattggacgagaggtaccagccccagttccggggcaggatctgccggaatagacttgcttgttaccaggatgcttaatggtaaat

SEQ ID NO: 25508 - DNA, 610 bp, Arabidopsis thaliana columbia
  unsure (1)..(610): unsure at all n locations
nnnnnnnnnnnnnnnnnnnnnnctaaagccaacaaggcatcgtgatcgtgtggcgggatcacctgcacatgcaacgtcatcaccggcttctcgcctaccatccatacatgtacatggtgcacattgcggacttccgggatttcccggcacatacgacgcttcagttcagcgatatccagcgataccggtgcaccttcaagtaattcattcacgctatctttcaacagtcgccacgcgctacgcagaaccagaagcgacaccagtatcgagagaatggggtcagcaggtgtccagccagtccagataataatcaacgcggcaataatagccccaaccgaacccagcaggtccccgagcacatgcagtgccgctgctcgtacgttgaggtttttctcttcgctgccgtgatgaagtaaccagaaagaaagtatatttgccagcaacccagccacggcaattgccatcatcatgccgccctcgaccggacgcggcgtgcggaacggttctatcgcctcccagacaatcaaaatggtaattacacgagggctatggcattcacaaacgccgcgagcgtggtcagtcttagccaacgaaagtgtggcgaatggtg

SEQ ID NO: 25509 - DNA, 443 bp, Arabidopsis thaliana columbia
atccacaacgattatcagcagagttgttaacttgtgtatcgaacaggatttgtataatcactagaagtatacagaggtagaatgggatcatgattagccgtatattgctccatagattccgtttctacaccaacacacaatttacacaaagacataactagaacagaatctactcaataaatcagccactaattatgttgtggaaactgatctattaaacgaaaatcccagaacacgaatcttactcacattaaacgaaaatttgtatgtgtatcattggattgcgtagaggacaagatcacgggaaaagtacctgataggataagcttctcctaagcaaggcaatggctctcgttgagaaactggcaggaccaggatccgccattgatgaaggtaacaactacgcttttctctgtgtattagaatctgttttggagggttag

SEQ ID NO: 25510 - DNA, 646 bp, Arabidopsis thaliana columbia
gagactttctatttttgctataattagatatgattggttttgttaagttttattggctcaataatgtaagcaatgataatgttgtctctctgatcatagaaaaaaaggctctatcttaaatgtgttgaagagtagatggatatggtatcatgttatttaatactcttctatgggacaaaaacttaagttttgtttgatggaaataaatctcggtattggtaatgaatttgaagctgatgaatttgtacttttgaatgcatcaagctaagcgccttcttgttttactgtttcaatctatcaattgttctatatagaagtgtttttagttctttgatgctgaaagtgatgtacttttctgttactgtcaatctctttgcaggtaaaggttttgccacaggaagaattagcctaggagaaatagaagtggtgaaaatcccaagttccatcgagtttggagctctgattcatcacacgacaaatcaaaacgtgctacattttacagagccgatgacattccagaaggattccattgcattggtcactattgccagcgaccgatcagcccttgagaggttatgtacttgcagctcggactagcaagcagtcaatgctgatgatttccgcccattgaaagcctgtgagttat

SEQ ID NO: 25511 - DNA, 568 bp, Arabidopsis thaliana columbia
cataaggtaagaaagttcatgtaaaaagaaaatgcactaataatcattcacaaacttagcagtagattagcgatcgaaaattgatgtcaccaaatttaacaatctttaaaatgacatcttttaattaacgacgttcattcggagacaaaatgaatttcatcaaaaatgagtcactaaactatttttcaaccactccactaaaaaagttaaacctcattcaaaaactgccacgaaacattcccaccaacaaaagataacaaataatatagactccctcgccttgttgcttcccactacaaaagtaacaagaaaaattgttacaataactaagcatagtattaacgttatgctatatatacaaatctctcgtcggaccaaatattcgcattcatagatttcattacaaattaacgaactattcacagaaagaaataaaacgagatgggaagtggcatgataaggacattggttattctagcaatagctttattcatgatcggttccgacaacgtccacgtggcaaaagcccaggtctgtggagctaacttgtcgggactgatgaacgaat

SEQ ID NO: 25512 - DNA, 797 bp, Arabidopsis thaliana columbia
cgttgagaaggagcaagggtctgtagtcaaactcaaaaaaatcgctgaagcaataaccagggttcgcaagagatatgtatgaaactgcaacaaaacaggtggattctctctcgcataatgtccttgactatggagattaagaatgtcacacaaagttagtctttggtttaacacaagtagaagattaccagacctgagcttcaaggttttcatgagcataaggagtttatcactgaaattgatagatttcacaagagagaactcggtgaacaaaggagacggagattggaaggtgagaaagctgcggtaatcaccgtaccttggtgatgagatcataatgccgcactttctcaacctttgtaaatggcttcgataaagggatctagaaaaaagagtagaatccctaggtgactctaataaccaggttctcaaagaaggcttgtacaagcagagcaacgatgattgattatggattaattgacatctaacaattattttcagcaatcgagacaaacgttggcagagaaaaaacaggggaaagtttagccaaaacttgggcctaatggataaaggaggtgggccgtcacttatgacaatgggccaagagagaaatgggctgaaatgggggaggcccaataacaggaaccctagtgtctcagtggctgcgatgaagagttggtgactgtggcggcaggacttcggcgagttgaagatcagagtggaatgaagcttcaccggatgttgtggcacaaaagtggtccagagactcaagatagacgagtgacggtaccatttgg

SEQ ID NO: 25513 - DNA, 631 bp, Arabidopsis thaliana
taatgcattaaaatcgccaattaaaaaccaaggtgtatcccgagtcgtaccaattcgtgttaatcgttcccaaacttgatctctattttttggtatcgggtctccatatacaaacataagacaaatagtttttcctttataaactggttcaatatcaattaaccgattactttgaaaaatgattgagacataataatcattattataaaacagagctaatcccccactataaccaatagggtcaaccattgttaaatttttccaagtgaccaacaaatattttcatatataacgtagattattttgtttccgagagaaataaaaaatctgatcgatattttttccaaaaatcccttaaatatccaatggttgccatatttcctaatcctagacaattccaactcaaaaaggttctgaagttctgcttattcagttttctctctcgggcaccattttcgaggacagcttcccaatcaaacttttcgacgccggtgagcaagatgctcaccggcgtcgggagatcccaagtcgcttcaatctctattatctttgcatcacttttgtaactcttctaagcttttctctccatcttcccgaccaccacagcaaccctccattaaatccatctttg

SEQ ID NO: 25514 - DNA, 584 bp, Arabidopsis thaliana columbia
gattctgtcttctagaagaaacatattaaccagattcggtttaggaatcgctgcttctttccttctccttactcttctctcccttactagttcctccttcaatgtacccttcgtctctcctctgcttcaaggtctcaaaagctccaatctaaacaattcttcttctgtcaagcaagtgaacgagaagcctgaagtagtgaatctcaccgacaaggtcccagatgtcaaagttccaagctttgtggtcccagacgctggttcgaagacacaactttgtctgaagaaagtaaagttccaagctttgattctggacaaagatctggagaaacagttaagaactcgagtctggctgaagagggtaatggttcagttgcagatgaccaaaatacccttgaagcaaatgcgacaacaagtgtgggaaacagctcgagcttggtgtctgatttgggaggaagatttgttgtacctgcaaacacaagcaaagagaatggctctgtgactgaagatcgaagcagaggttcgtatgaggattgtgatatctacgatggaagttgggttagagctgatgatgagacaatgccgta

SEQ ID NO: 25515 - DNA, 1265 bp, Arabidopsis thaliana
ccggttaaaattccggaaccggtacgtagcttccctacttttggactcagagcttaccaatataagtaagcattatgatattattacctgatgcattgtctttagctcacaaactggggttattgtcttgtctttgtctcataagctggtttattgtctcgacaggttctactttgatttgtctgccacatatgtgggtgttggtatgatatgcccatacataatcaacatctctcttctattgggtggaattctctcttggggactaatgtggcctctcattgaaaccagaaaaggagattggttcccttctaatgttgactctagcagcatgaacggtcttcaggcttacaaggtaaattcctccatctctcactctcttacacgccgcttctgctgaaacaattgtccttttgcttcttcaggtgttcatagctgtcgctacgatcctaggagatggtctatacaacttttgcaaggtgttgatccgaaccttttcaggactgatctcgcagatccgaggtaaagctggttcgagaagctctcttgcacacaaagaagaccctcctgcttcccctgcttccccattgaccccaaggatatcttatgatgaccaacgacgaacaagattcttcctcaaggatcaaataccgtcttggtttgctgttggaggctatgtggttatatctgcagtgtctacagctatacttcctcacatgttctctcagctgagatggtactacattatagtcatctatatctttgctcctatcttagctttctgcaatgcttacggagccgggctcactgattggtcgctagcatcaacctatggaaagcttgccatatttacaattggagcattggctggttcggatcatggaggtcttctggcaggcttagcggcttgtggagtcatgatgaatatagtatcgacagcttcagacctgacgcaggatttcaaaactggttacctaacattgtcatctccaagagccatgtttgtgagccaggtaattggaacagctatgggctgcttggtttcaccctgcgtattctggcttttctacaaggcgtttgatgatcttggtctaccaaacagtgaataccctgctccgtttgctactgtgtaccgaagtatggctaaactcggggttgaaggcgtctcgtctctaccaagagactgtcttatgctgtgctacgtgtttttcggtgtggccatactcattaacttaataaaagattgtcttggtaacaggtgggga

SEQ ID NO: 25516 - DNA, 1177 bp, Arabidopsis thaliana columbia
tcaattatctaaaaatagcataatcataggaaaacggatagcaaggataagaatcaaagaaaacaattctcgatgcgttttctctctcgggtaccattttcgaggacaacttcccaatcaaactttccgacgtcggtggagctcttactcaccggcgtcagaagatcccaaattgcttcaatctctattatctttgcatcacttttgtaacccttttaagcttttctctccatcttcccgaccaccacaacaaccttccattaaatccatcttcaattctcggagatcacttaaccatacccttcaacgttgcttcactccgtcgatctacttcagtggcaactgtcgacgattattaccccgccctagtgctaacgagatctctcacttccaaatctgcagttcctcaacccaaatggtaccgtcactcgtcgatcttgagtctctggaccacttttgtgccacaacttccggtgaagtttcattccactctgatcttcaactcaccgaagtcctgccgccacagtcaccaactcttcatcgcagccacagagacactagggttcctgttattgggcctcccccatttcagcccatttctctcttggcccattgtcataagtgacgacccacctcctttatctattaggcctaggttttggctaaactttcccctgttctttctctgtcaacgtttgtgtcgattgctgaaaataattgttagatgtcaattaatccataatcaatcatcgttgctctgctggtacaaaccttctttgagaacctggttattagagtcacctagggattctactcttgtttctagatccttttatcgaagccatttacaaaggttgagaaagtgcggcattatgatcccgtcaccaaggtgcggtgattacgcagctttctcaccttccaatctccgtctcctttgttcactgagttctctcttatgaaatctatcaatttcagtgataaattccttatgctcatgaaaaccttgaagcttaggtcttgtaattttctacttgtgttaaaccaaagactaactttgtgtgacattcttaatctccatagtcaaagacattatgcgagagagaatccactgttttgttgcagtttcacacatatctcttgcgaatcctggttattgtttcagcgatttttttgagtt

SEQ ID NO: 25517 - DNA, 448 bp, Arabidopsis thaliana columbia
caactagtcggaaatcccttttcactcctacgtacttggcatacttctgcaacatagttcaacatgaatataagcaatgccagcaacaaaaatcaaaattcaagaatcaagaccatgtcgaagtgtcggtaaactcaaagaaatcagagtgttagacatattattacctcattgacaggagcttcattgtctcgaaatacagcatcatgactgtcaatctcttctccgaactctgtttttaacagatctccagaatttccaacaacagcgcatttatgaaactgccgtgggtgaaaaggaggcttcgctggaagaatcacattaagatgctcttcacacaatgtacgattataacacttatcagctcccctgaaacccaacaagatcaaagagttctacaagaaagatcaaacaacacaagcagaccattagacaaagacgtttagaa

SEQ ID NO: 25518 - DNA, 1542 bp, Arabidopsis thaliana columbia
taaattactttcattgtgattctaacatcgacgctactttctcgggcaccattttcgaggacagcttcccaatcaaactttccgatgccggtggagctcttgctcaccggcgtcggagatcccaagtcgcttcaatctctattatctttgcatcacttttgtaacccttttaagcttttctctccatcttcccgaacaccacatcaaccttccattaaatccatcttcgattctcggagatcacttaaccatacccttcaacgttgcttcactccgtcgatctactccagtggccactgtcgacgattattaccccgccctagtgctaacgagatctctcacttccgaatctgcagttcctcaacccaaatggtaccgtcactcgttgatcttgagtctctggaccacttttgtgccacaacctccggtgaagcttcattccactctgatcttcaatttgccgaagtcctgccgccacagtcaccaactcttcatcgcagccagagagacactagggttcctgttattgggcctcccccatttcagcccatttctctcttggcccattgtcataagtgacggcccacctcctttatccattaggcccaggttttggctaaactttcccttgttctttatctgccaacgtttgtgtcgattgctcaaaataattgttagatgtcaattaatccataatcaatcatcgttgctttgctggtacataccttctttgagaacctggttaccaaagtcacctagggattctactcttgtttctagatccctttatcgaagccatttgcaaaggttgagaaagtgcggcattatggtcccgtcaccaaggtgcggtgattaccgcaactttctcaccttccaatcaccgagttctctcttgtgaaatctatcaatttcagtgataaactccttatgctcatgaaaaccttgaagctcaggtctggtaatcttctacttgtgttaaaccaaagactaactttgtgtgacattcttaatctccatagtcaaggacattatgcgagagagaatccacctgttttgttgcagtttcacatatatctcttgcgaaccctggttattgcttcagcgatttttttgagtttgactacagacccttactccttctcaacatcattatgtcttgtgacaatgaccaatcttccacttcccggatcgaccgaggttgtgtctccgatttaccttcttctcgcatgtggcattgtgttctacaactcttgtctccgagctagcatggttttatcatcggactattgtacttctatctttattgcttttatctttgttgtactaaactctgagaatgatattctcctaagctttgtactaagtttgagtgattgaatgaaaccaaagcttattgacaaaaaaaaagaaagattgaaagaggagaagaagaatcaatacaaagaaaaaatcgagactttataatttatttattaaaaaagtggagtctcaatttagtcgaaaaagtgttgcaaagtaaattgtttggagggaatattgagc

SEQ ID NO: 25519 - DNA, 2004 bp, Arabidopsis thaliana
tgagagtgagctgaaaaagcttgtggcaccagagcatgtaaatttctcctttgggttcatttcattggtttatacaccactctgttttccactgtccaaagtagcattaaatggaaagatgcataatattctctattttgttgtcctaggtatgttcttatgagagtatgctagctgggctgtatcggctcaaacatttagggatcacccggtttacattacctgccagtatatcacatgcattggctcagctcccagacgaagctattgctcttgctgctgcatcacatattgagcgggagttgcagattactccatggaacctgagcagtaattttgttgcttgtacaaatcaggtgggcatcacttatctatatttgggagttagtagtttacccagccagtgggttttatctgtaatttatgttaggaacttgggagttagtcatcactaatcagctaatccgtaaaagtcgtgtcgtgtttattcttggttctcttttatagataagccagggtgatgcattattagttctttgcaaacaagactagaaactatttcagatatatcttctctagttttgttaagaacctttctgaatcttgtcagtggaagtggatttgatacttctgatcagtcatcgctcatgcttttgtacttggccggttcaatactcacatgtctgattttcatttgtgggtttgagtaggacagagcaaatatagagcggttggaaattactggggttggtgatccctctggacggggtctaggatttagctacgtcagagctgcgccaaaagcaccagctgcagccgggcatatgaagaaaaaggcagcagccggccgtggagccccaactgtcactggtacagatgctgatcttcgcagattaagcatggaagcagctcgagaggtacacttctttggttcagctaaaaatacttacaagttacccattttcttctaaactattactaaattaaatcccatcgaaaatttgaacataagagatggtttggctgttatctttgtaggttcttatcaagtttaatgtccctgatgagataattgccaagcaaactcgatggcatcgtatagctatgatacggaagctatcaagtgagcaggctgcatccggtgttaaggttgaccctacaaccataggcaagtatgctcgtggccagagaatgtctttcctgcagatgcaacagcaggcccgagaaaagtgtcaggagatttgggatagacagcttttgtccctttcagcttttgatggtgatgagaatgaaagcgaaaatgaggcgaatagtgacttggactcctttgccggagatctggaaaatctacttgatgctgaggaaggtggggagggggaagaatctaacatttctaagaatgacaaattggatggagttaaaggtctcaagatgagacggcggccatctcaagttgagacagatgaagagattgaagatgaagctactgaatatgctgagttatgccgactgctgatgcaaggtacatgctttcaactaagcatttgtgctattagcttaaggttcattttatcaataaatcactgactggtgatgcttatgtagatgaggatcagaagaagaaaaagaagaagatgaaaggtgtgggagagggaatgggctcttatcctcccccacgacccaatatagctttgcagagtggtgaacctgtacgaaaggccaatgccatggacaagaaacctattgccatccaacctgatgcatcgttcttagtaaatgagagcaccatcaaagacaacagaaatgtcagtacaaatttgaaattgttttaaaaccttttgctcttgctttctttaattattgtgtcaaaccatgatgtcttgcatgtcttgaccaactcgtatcttcattggcaggttgattctattataaagacccccaaaggtaaacaggtaaaagagaacagcaattctttgggccagttgaagaaggtcaaaatactga

SEQ ID NO: 25520 - DNA, 574 bp, Arabidopsis thaliana columbia
gagtcggggacaacgaataaaattaatatatataaaagtatataacattataatgtttgtgtgtccttaaattttagacactgtgtcttaagtgtctttgtggaaacatttttgaaaaagatgtcttaaaattaaagacctttcatatttaactattaatattttgttgtttaaattttttaaaaatattgttagaagacacctcttttatttgtgcaataaagatgcttacgtacataaaactttacaagagtttttcacacctgaacgggttacacacttacaacaaacacacatcctctaaaacatggacgcatgtttaaactctctctcacaacatacaagaacaaacaaacaaaaaccaaaccaagattttaaaaccaatcgactggtcaagtagcaactaacttatttccaatccagaccaagaaattcgaatctgatccattttaagtggagaggatgttaagaagagagactctagcttgtatcattaccttgaacaatccttcaagtccctcttcaagctcttccatggctgcctctacaccttcggatctaccaatgcacattg

SEQ ID NO: 25521 - DNA, 444 bp, Arabidopsis thaliana columbia
gaggtagaggaagtgtgctctaaaggattgctttcaaggttgaaggtggcgaagtgccagtcgccgacgtagaagtcgatcatatcgacaacgaagctgtgccacagcaggtcgaacaggttgcccagcgcgccccaataatcagcgcgtaagcatattgtgtagcttctgcatggccttcgagcgatacatcatcactgtcaggatcacgctaatactgatcgcaataccgggaaagaagcaacgctgctcagtgccgctatcgacaatgatactacacgtcgcgccatagttacgcgcatgatgcagattaagcgacgggaacagctggaccgtatcccccagagcaaagttctggaggatcaggtatatgctgcccagatcgataatcagcacgactaccatcagccacagccagcgtagccctgttgaatagatcgattg

SEQ ID NO: 25522 - DNA, 779 bp, Arabidopsis thaliana
cccttaaactttaacaaattctaacttttttaaatcgatcggtcttacctaaaatatttattttattttttcataagtttgggtattgcaaatattacactcaatctaactgccacctcatatatattacgaaagcaatgtttatctttctagtagaaaagttctttctacattatatagtagaatagaagatcactcaaattcttctactatattatcactaaaagatataaagcattggatggggccgggctcccagagccgtgggatccccaaccccacccccaagatccccaaggggagctaaaaccaccagaattcggacctccagggtttgaaccgccagagtttgaatcaccaggagttgaacctgggcctgaggtagaggtgctagagccatcagatccccatccccagccgttgccgtcactagaactccagctccacgcctctgcaagagaagaggagagacatgcaatggctataacaagtaggaaaaccttcttttgcgaaccagagagagccatcgtttttcttcttcttatgagttttgtttaattatagaacaaagcaatatgtaaatttgctttcttacgagatgagtatttatagaagaaatgggtggctcatagacgtatgtttaacccatttaattaggaaacgaaatttggttgaccaaaggtttcgtttgccattttattctccctttgtttttttttaatattctaatttaataatgaaaaggtactctttttgtttttggcactgaaaatttatta

SEQ ID NO: 25523 - DNA, 1134 bp, Arabidopsis thaliana
ctcaaactttgggctactatgcccatgactaaattgcctttgcagagaggaacgactatgagtgtcactaatggatctttctcttacacaaagaagcatacgacctgctcagaaatcacaaatcgaaaatgatgaaattagacgtttcaaaagtcagctgatgcgagcttaaaatgaaatcagaaggggatacgtcaaattaccaacgatatcagtgctagaaactccttcagtgcgcttaatctgcttgtaacgaccagccttcttagcaagtgcataagcatcagtaccatcaggaagaacacaaggatcatcaccatggataatgtaatcgatctgatactcatcgaacaatttcttcatgaaatcttccgtaatagcgtaaggagcatcagatataacttcatccacccacttcacagctttcaccattgtcattctatacataacgaaatcaaaatcaaaatcaaacaaaacgcaattgaaatcaccagaaacaatgaatttgtaatctcgagaaagagaaacctttcatgaagaggagtaacaggaggtcctttgttggctataatttcttcgtcggaaacaacaccgacgaccaattggtcaccgagagcacgagcttgacgaagagcgttgcagtggccatagtgcatcatatcgaagcaaccatccatgtaaacgcgaacaggttttcgttttctcaaaatgcgccatggacaagacaaacctaaacctaatcctaacggaagctcacctttaaggaaaagatgaaggaaagaagctccgacggcgaacgcagctcctccgactatacaacttccgacgatcttctctttctcccaaaccatttttgcttacgaacacgagaatttcgaaactctctctctcagatcttttttttttttgttttcttcacatttccagacgtctcagatctctcacagatgttctcttctctttggaactagagactcggaatcagaatcctacggacaacaaaatatcttcaaaccggatcgtaattgtgtgatttagtttggttcgttttggtttaaagatatcatttaagtttcgaaggaaaaaaagaatcaaaaaccggtttcgagttttacaaaagtgatcaaagcagca

SEQ ID NO: 25524 - DNA, 515 bp, Arabidopsis thaliana columbia
gatccacatcccatggagaagactcgaaatcatcaatcaaaccaaactcgaaatcttcagtttcgttttctccttgtttcgaaacctctgtgtttggtaacaacgttgattggattttggtttcttcatcgagaaacaaaaggtcaggggcaatttcggtatcccaaaaacattcgccggcgagagataaatccggtaacagatacggatccgggaacaccaaacccgccgacgattcttcttcttcttttataaccgtcgactttctctccggagatagctcgatcgcttcaatctcatgctctgtttcctcgttgacgttgaatcttagaacagaggtcggtgaatgaaggctctgctgagaatctctaccgtaatcgcaggcggaaaccgtttggagatcgataaccggcgttggcgtcggcggagttaggaaattcgtgagcgctttaggtcctttgagatgaatcgcggctctatcgtacgctatagcagcttcctccgccgtgacaaaa

SEQ ID NO: 25525 - DNA, 524 bp, Arabidopsis thaliana columbia
ttgtgtgattccgttgaaaattcccattatgttgtttagatcggtgttttaagtaatcgaatcttcgctcttgttgttagtgtatgccacgatcgtgatctttttttttttttgagatttgtcatgttgatttattgattctgtgttcgaagatcttggggatcttatttctggtttgtatcgttgcgtttatttgagatcaatcatgcatgaatctgttttgttttacatacatctttcttaaatttgtgatgtatttatttgtttggcagagagaagaagacttagaaaaatggctgttcaacctacaagaataggtctagctggacttgctgtgatgggtcagaacctagctctcaacattgcagagaaaggcttccaatctctgtttacaacagaactacttcaaagttgatgagaccgcgaacgagccaaaaaggaaggcaatcttcctctttacggcttccatgaccccgagtcttttgtcaagtcattcagaagcacgcgttattatcatgcttgtt

SEQ ID NO: 25526 - DNA, 501 bp, Arabidopsis thaliana columbia
taattagctgtacgttttagtgcaacttcgtgatgaaatcatacaaaaacagcaatcagatcaaaacgcataaaacgtctaagaggtcaaacgcgtttatgttttgacaacaaagtctcaagagtctagactgccttttattgacagaagaataaacttaccctactcttctacacgcgtggcaagagaatgcttgaagaaaactcatcagatccattgtttggtgctgccttaagtcctagaatcgaactgatcacattgtatatctgaacattctcaaaagaaggcactttccttccttttgagaacataggaccatgcccgatgaatatagttctcatcgaaaagaaggcattgtcatacccgtgagctccaccgcattccttggctttacttttcttctgctccaccttgaagccctcatcgactagtcctataataggcgggatgcggtcactgtctacataatgcagcctgctaggtaaatcctctttgagataa

SEQ ID NO: 25527 - DNA, 544 bp, Arabidopsis thaliana
agcttcgtgaagccgttgcagcaaatgcagactggcttatctttaagtttgaatctctcataaactcattggactaaaagcctctatagtgattattctcgtttagctaaactcattattcatatctccaaatttgtacccttttatgaatttgtatcaaataccaattgaatcaacaaatgtttttgccaactttagccgcttgatatgtttgttcaagcataagagcgttgttataacaaaatagtggtctttgtgaagagaaaattaaaccacagactaatcaatcttggcggtagacatatctggatgtccagttaacgaacaaagccatagccaccaccaccaaatccaccgcgaccaaatccaccacgagcatatcccccacgaccaccaccataacctccccttcttgcaaaaccaccaccacccccaccacctcctgaatcagctggatgcactccaattattcgcccatcaagctcctatttaagcaggaaactctataaatggcggattgacataatcaagcaaagaaagaaag

SEQ ID NO: 25528 - DNA, 1729 bp, Arabidopsis thaliana
ttcaaggacccttctatgatgcctacggatgtcgggtgaaacatttagaaacacaaaatgctaaaaaattgtcacatgacagaaagagacaattcaaagattttcatatcgttcttaagcaatcattagtaaaaatcatgcaactatttaaaaccattatcagatattccaggacgtcagaaaaggtgttcaagcccaacatgttatagaaagaattcttcagatcatgcataggagaatacctgcatccatgcacgtttaagcagcaagaaaaactgcctccaccaaccatctgttctctcaacaatggcttttctgcgaggtctcatgccgttctttgtttcttctttcatgctgaggggagtggcataaagaaccgatgatgaacgctgggagaatgcatcaacaagagcatgtactctcttctgcgaagagtagaccgtttccgaagagctatagtcaacagatataagatcagcaagaaactcagcagggttcacatgctcagggcaaaggaacctgctcaacgatcagaagaacagttgtcagtggataatcctaaagcacttgcttaatggagacatgtgacatataaggggaaatgttcataaacccaacccgaagttcccgaaatatgtcagaggttcttttcctgcagggccggcatagactagagttccttctgtaagtaacacaatgtcgtcaaatttagcgtacaccgaacctctaggctggtgtatggagcagatcacagtatgtccatcctgtgcaagcttttgcaatgtctccatcactttctcagcctggaaggatcaagccctgaagaccacaagaatattttatcatcctctaattcttttttaaaacaatccatcaatgttcagaatcagacagactaggcatttaccagtggtaggttcatcagcaaatatgacagagggactagcgatcaattcacacgcaagtgacagccgcttcttctctccaccgctgatcccacgaactttagcatcgccaacacatgaatctgcacagctgacctgttggagagccacaaaagacgatcaagaaacataattccaggatttcaatctaccacaatatcatccaaaatgcagagatcaatgaaacctcaccagaccaagtttgagcaagaggttgttgacatactcatccctctcctcagcagaagagatctccggaagctgaagctcggctgcaaaagaaagtgtttcctgacagttaactgagaaaagaagagatcctcctgtctcacaaacgcaagcctgccattgcaagaaactctctcaaacaatgatcagattttcacacaaatatagactttgtataactcataggacatacttataagctttgctagagctcggtttgccattaacctccaagagacctgacaaatgcaaacgtggagataaactaagctgtcctgctaaaacattgagcaatgttgttttcccagaaccagaaggacccataatcgctagcaacctcccaggttttgcttctccggatacatttttcaacaaaaacctcacctgagaatcacataatcaaccaattctgattcggctattaacgtgaaattggaaagactaatatacgcgcaatcgaaacatgcaaaaggagaagaaatgtgctcaccgatttggaggacttatcggagagcgagcaggtgatgttcctccacggattgtcacggacgaattga

SEQ ID NO: 25529 - DNA, 599 bp, Arabidopsis thaliana
ctcaatttagtagtaccctcccaagagtatatcaagtagtgaccattcgattagtttatggttaagagtttaatggaaatatacgttctatattagtgtgtttgttagtatgtgttagcttttggtgtgtgttaatattctgaaaaactcttctaagttagatccttagattaatttatgaagggtaataaacatcactctcaagtcttcagaattgtcctagagattcactaagtagtttgctagtgagatacttggcaaaatcttccaagaggtcttgtagacaacctttgctttgattccgatttcagtcatcgttgctttttctctctcagcctctcaggtgactattgattccgctgctgctgcaactaccgtcccttctgttgccttctccgacgggtacttccctttttctcactctggttccttcttcttctttctctcaaagtttagtcctttttcttctaattcttgatttaggaggaaactgagtggtactactactcttcttggctatgttggtcgatcagctaacacgcttcctgatttctatggccacgatgcttttgattcttccagattgatgaatgggtaga

SEQ ID NO: 25530 - DNA, 541 bp, Arabidopsis thaliana columbia
tgccgtgtatttggtaaatgtcttttatgtagttgaagatattcgggtactcccgtaagagtctcttgttgcatttgaagtgaactgcataaacctggaacgcagaaaaagatgatgtcaagaacctgatggattttctatttggaaacaaagaagacaagttgactcatatacctcatcaaatcttatgagagtgacgaataatcggatatctgcttcagtgaaagtgtttccgcagatgtatcgttgttttccgagtacttcctcacatctatctactgcttcatataactggttcactgcctggagagaaaagggatcaatttttgaatccctgttcaaatgtttaagacattgagggatatatacctcattatagggttcttgtttccttgcaaacccacatttataaacaccgttgtttattccgttgaaaacccatccgttagtctcgttgattacgtctctgagatgagaaggataaaggtcaagtgacggggttttcgcaataccattgaactcagtgttgaacatccggatt

SEQ ID NO: 25531 - DNA, 588 bp, Arabidopsis thaliana
aaaagtaaatgctaaaaataatgaaagtaatatacaaagaaacaagtcaatgagaaactaacttggggctaacaactgaaccggttcggatcctaaatctctgctctaattaaggccctatttcttcaaaaacttggtacagcttgtggggactgaaccagctggtttaaaccggtttcgttgtcactggttggctccttcttccgcctcatctctatgactttccggtggtggttcgagtgcagctcactcgagaatgtcgggctacaagcgggtctgtattccggtagcaacctacccgacttgtaccggacaccgcacgcattgcacagggtcttggctcccattggcccggctctccactgcggagttttctgaacgccgcagtggctgcactttcgctgaggttgcagctgctgcagctcaccggagaaaacagactcggctgaccttttcttatgcttcttgggaaacggtggcctctctgacgtgaccacaggctcgagcagctcagcgccggagaaccacgggctggaaggacccgaagaggaggaggaggtcgaaccggacgaggaaggaccgaggagg

SEQ ID NO: 25532 - DNA, 531 bp, Arabidopsis thaliana columbia
gctctaaagaacggcacgccaatttctgccgccacggtttcgacccaggcggtaagttttggcggcgcaatcagcgacttgtcgcttaacaccagcatcggcacgttaccaatctggcgatggttagccgcgccataatcaaagtttttcgcccagcaggcggtatcaagcacaatggcgacgtccggcgacaccgcgcgggtggcagtttgcccgccgcgtaatcccacctcttcgctggaacttgccaccagccacacttccgcaggtagttcggcgtcgtgcagttcgcgcagtaacgtcaccagcagatagcaaccgaggcggtcatcaaaggctttccccatcactcgctggtgagggagaacctgaaaagtggtatcaaacgtgacgcgatcgccgggacgaattcccgcctgcatcacttcgtcataggagcgcgcaccaatgtccacgcgcatggcgtgtacgtcattccctgccggtcgccgtcaagcaggcctggaattttgcactcttcacgggtggtga

SEQ ID NO: 25533 - DNA, 820 bp, Arabidopsis thaliana
ataataaataaatatgtcaaaaaagttttttctcccaatgttatacaaagttgaaaataaacatgcaaaattagggaaattttattaactactgtaaataataatctcaatttaacaaaaaactgtctttccatattatttaaaaccttagcataattttaaaaaaattaagattcataaaataaaataacgtaattatatttttttttaaatggaaaagtatcaagaggttgttcaaaaagtgaattttgacgtcagcatatttgaactctctctcatgactcatcatcttcttaaaacctaaccacacgagtcacgtctctttctctctcagtgattttgttatttattctctctttgaaacgttttcgccgaagaagaaagagcaaaaacatgaggagcgatgatctttacatcaccaccgtcccttgtttcttcaaatgtccaatttcacttgatgtgatgaaatctccggtgagtctctccaccggcgttacatacgaccgagttagcatccaacgttggctcgatgatggtaacaatacttgtcccgcgacgatgcagattcttcagaacaaagaattcgtacctaacctaactcttcaccgtctcattgatcactggtccgactccatcaaccgtcgagccgattctgagtctccggaatccgatactccgacgcgagacgaaattaacgctgcgattgagagattccggatcgagaatgatgctcgttcgaagattctccggttcgcgagagaatctgatgagaacagagagtttctcgccgggaaagatgatttcgtagcgatgcttgtgg

SEQ ID NO: 25534 - DNA, 621 bp, Arabidopsis thaliana columbia
tcccccatacataccaatcaaggtagtgccaacaaacaaatgcgactcaagcccatgctttaaagcttgacaatgcatctgaaacccagttcttaaagaccggaaattctccaccgccttgatgacaaacgcgaaggagaaactatccggaaagacgaaacctttcctcatcatttcaacaaacaccgcaacggaattgtgcggctcatcggattcagagtagcctcggacgagagtgttgaacataaacgcatcaggttcaggaaaacagagcaagagacgacgagcgtaaggtaaagcgtcggatatagaaatcgcacaatgtaggataagttttccagtgaagtaagaatcagtgtcgacgccgtatttaataaacaagccatgtatttgtgttaaagctcttaagttcttgcagctattaaggagagagagacaatggtgaattgctatagtcatcgtcacaaaccaaaaaaaatataagctggaatttttatttatcataatccagatgaaagctcataaaccctaattagaccctgaaaaaagaaagaactcatctttctttttgttgttttacaatcgaaaatccacagaaaaagtgaccaagatgatgaatga

SEQ ID NO: 25535 - DNA, 433 bp, Arabidopsis thaliana columbia
cacttccgacgtcagaacagaactgtaccctgttttcatgttcctgtcgaatgatctccatgtccctgagaatgcgttcagaagagtgatcaagaaatgtccaaggctccttattagcagtgtagaagaccagctcaaacctgctctcttctacttgcagagacttggtctcaaggatcttgaagctcttgcttaccaagatcctagcttgttggtgtctagtgttgaacacactctcatcccaaagcttaggtaaaattttagccgttttcttcaatgttactagtgattagattagagaatctgcctttagtgttgttactaaggacatttcattttgttggtcagattcttggagagtatagggttctcaagaccagaagcgattggaatgatcctaagatgtccagcattattcacattcagcatagag

SEQ ID NO: 25536 - DNA, 572 bp, Arabidopsis thaliana columbia
ccagaaaaatttaggtttaccttattgaacaacattttgctgatatagttttcaacaaaaaggtcagaggtgaatgaacgccagagattgtctactctattctatttcaatggcgctgtatccagcttcttttctccctttattcaactcattatctaatgatttttctgggttccctgcaacagcgtgtgtcccagctagaagaattgcatctgccggatgagtctcacccatttcagccaatctcatcatcacactttcccccaaatctgcattcccgtatactctacaagcagctagcagagcacgccaagccgttgaatcacttgtgatcggtaagttccttattaactcatacgcttcctctaactgccccgctcgacctaaaagatcaaccacacaaccataatgttcaactttgggcgtgaagctgtaagcctcaaccatcctcttaaagcatctgattccttccattaccaaccctccatggctacaagcattcagcacaaccaagaaggtaatctcattgggtctcactttgcagttctcttcctccatcttattgaatagtg

SEQ ID NO: 25537 - DNA, 225 bp, Arabidopsis thaliana columbia
gatggatcggctgacattcttcagcctgagttagaagatagggacagtagttctgttctaagggatactgatgccttggaaattcatcctccatcatcagaagggagcagtagaggacgaggcattacgatatctacacccaatggaatgacagaaggaaagagtcattccactatggatgatagttcatcaacattgatctaatgaatctagccgatcgggggc

SEQ ID NO: 25538 - DNA, 636 bp, Arabidopsis thaliana columbia
gtatgttttggttgtttacaagtaaataatttgattcaagtataacataacaattaccatgttcaatgaacctagcatgttctgtaagataattttgatgagactttaaagttgaagttacaaattgagtagagcaaataggaaaaaaaaaattgaattgtcgaatttgattatacctactcttgttgtcatttcgtgatattgaagaatatttctaggtggtacatttattcaaataaaacaaattctaaaaattaatacttgaattcaacatcataaaaagtagaggtcagatattaaaatgaaaattcctaattgcaaaaccatcttaaaatagaaaacataagatagattcaaaaatatttctgtctttttgttgatgcgaaactttacaaacttcaacacataattacatcctttatacaagtaaaggctagattagtaattaattaatttctaatgtcccttatgtaatcactatatataacgtacattctcaacctgataatatcactgagcctcacatctcaacaatgtatacgagtatatttttcatcttttcctttctttctgtgtcagaagcggttgtgagaatcccgttgcagatagatcatgcattgtctacaaacaatgatg

SEQ ID NO: 25539 - DNA, 571 bp, Arabidopsis thaliana columbia
cgttttagctaatcgcaaagcacctgcttcattagcaacctgcaagagattgatgtgcatcttcatagtttgagtgataggttaactacttactgaactgaaataatcctgctttagaacataactaaatcatacctgtttaagttttctaaactctctcttcgcaagcttctgtcgccaacgacactgaatagcaataatagatgactgacggtgcctgaatgctgagcgaaacttatggattctccaatgagcctaaaagatttatcatacacaatattaaagcacaaaaaatgagttagagactgaaatcatgaatgagaggaaactagacgactctagattaccctatataagaacttaattcagtaacagaaaaagtcttaatgcacatgtaccatacaaacttggagatcgtataagtacctgaattagagaagcagctcgatgctctttctgatgtgaaaactttaagcgagttgagtcagcacggatgcaagactgtaatacaatggcagctgatacaagttttcaaatgcacatcttgacagcacctgcgcacatggttttg

SEQ ID NO: 25540 - DNA, 156 bp, Arabidopsis thaliana columbia
cccactctaagaaccttggaaaataacctaggaaataccatttggaacatatgacctggcaaatatttcatgacaaaagcaacagcaacaaaaacaaaaattgacaaagggaacttaattaaactaaagagcttctgcacagccatgaaaactatc

SEQ ID NO: 25541 - DNA, 392 bp, Arabidopsis thaliana columbia
atagtttccaccgttctgcatattgtaatttgcggggttcactggaaatctttggttgacgtttgcagatgttccttgaccgtaaccgcctggtgttgctggaatgtagtttccatggtatggaggcgcctgtgctccatggacttgattgtaactagcctgatatgaaagcactgcataatcttgaccttcccaatgttcagggataggagttccttggccttgattgttatacccctggtatgaagtcattccacaatttggacatcgacattgtccagaaaatggagttccttggccttgattgtaactaagctgatattggggccattgaattccttgaccttaatggggtccaggataccactgtccaaacttgtcaggaccatagt

SEQ ID NO: 25542 - DNA, 492 bp, Arabidopsis thaliana columbia
cagaacttttagaaaaaatcttcacaatctggtattttcctatgttgtatgctatttatctaccatgagttcatatgtctttggtgagagacttacagtagtgtgtctaatcccagtagacttcccgagcaactcatgctccttaagaaacaaaagttctccatgtatgggaagaaaatgttgcggcttcactattttaaggacctcttccttcaaaatagggaatagttacaatcattagaaacaaaattttcccttagatattcatcagtttgcaaacagggaactattgcctttacacctttacatatgcgctaaaagcctaagattgatgaagtgaaaagaaacagaaaggaaagctggcaacaaaacttctgaaggtatcaacagtcttaagagaagcagcagcttaccaattctccacggtaggcatgaccagatgtgtggagcatttcattcttacccatgataatatttggcccgatatctgct

SEQ ID NO: 25543 - DNA, 110 bp, Arabidopsis thaliana columbia
atacaatgccagttgatctacttgatcttcactcaaaaaggtattttcgattttgatcagatctttgcggcccatctcgccagaaggcaggttcagaccaatggtgatgc

SEQ ID NO: 25544 - DNA, 488 bp, Arabidopsis thaliana columbia
tagtaacagaaaaaataaactaaaagtggaaacattatagtaatttgtgtcctagtacaaagcaaagagagcagtaacaaaaactggagaagaatgtgacctcgtaaagctccactcttaaaacttcaatcctctctcctttgagaaaagaagggagttttttctcatctactgcagaccatggcattatagctgtaaaccccttttctgtcacacgctgccccgtacaatggaaagtttctccaccaattgacaattccactttagtcctgagatacccatccaagagaataccacatttaaaatgtgcaaagaataagctgtaactgacatggattaagctacaaacaaggctttatttaccttatgtatttgcagttaggtgaaacagtgccaagaaaatgttgacagacatactgatagagtcgccaagcatctcctccgaccatgacctcggttgctgctctcattggggtgataggaggatg

SEQ ID NO: 25545 - DNA, 602 bp, Arabidopsis thaliana columbia
tcatttattttgatgcaactgagtcagaaagaaactaatcaaacagttttgtgacattgtaaatgcagctacaaagggaagaagaagatcatatgtgacatttgatctttcgttatactagccagatggatgaaaacaacgcggccaagttaaccggtatcaggcagattgtcaggcttaaggagattttgcagaaatggcaaaccgtcaccataggccccaagtcagaagttcctccattggcagctggaaagcaagcagtggcgatgatttcgcccgccatcaacaagaggctattagatgtcaagaacggtgactcggatgaggaaacctgtcaaagtcctgagccgcctcatgatgttcctaaagggaatcttgctgtttatgttggaccggagctaaggaggtttatcataccgacaagctatcttagccactctctgttcaaggttttgctcgagaaagcagaggaagagtttgggtttgatcagagcggtgcctcaccatcccttgcgaggtcgagactttcaagtacttgcttaagtgcatggagaacaatcttaaagatcttcatcctgatgacaactctggtaagcccccaa

SEQ ID NO: 25546 - DNA, 502 bp, Arabidopsis thaliana columbia
aattcaacttagcaaccgaattagcaatcacctgtaacgcatagagaaccagaaaaattaagaaaacaaacaagcaacaatgtaaagaaacagacagaaactatctgaaacctgctcatctcggttgtacaagcagtcgagtagaagagaacgatcatcggcatgcaatgcttgtctcagaagaacgttaacagaagcagcagtaggaggcttatcatcgccaggagcagaatctctattactctcctcactgttaaccttttcgccatttaataagtcaagactctcaagtttatcacctatcgttggctcatttagagtatcatctaccaatactccatctctatcttcatcaagacctatatatcaccaaatacgaaccctactataagaccggtaatgaaatctctatctgaaccaatccagagtattatactcaacagtctataaaccttcaatttcttaatttgataaatcttaccggaatctcgtgtagagggta

SEQ ID NO: 25547 - DNA, 323 bp, Arabidopsis thaliana columbia
gactctagaggaagaggaaaacaatataaacaattcggatcccaatttgtacccgtttcagtttcacgaactctgtcatcgtctataaatgtaaaaaaaatctcaaactttctctttcttgactctctctcctaaaaatgtctcgattgctctcaaaaaccctaattcccaacggaagattcctcctccgtcgtttcaacgagccggcgattacgacaccaccaaacgtcgtctgtttcagccgccgcttttcatccatcccacaagtcatcgagcttgaaatcgattctagaaacgaagcggcacagcaattctcaaaaagc

SEQ ID NO: 25548 - DNA, 549 bp, Arabidopsis thaliana
taacgaccgccagtgtgctctaaagagacgacgaccgtgtttcttgatcagagaagccattggttcggtcgaggccagggtctcgagccactgagtgtgcctcgcatggatctcaagatcaagaggatgcgagaagaacttggggtcaaagacgggcggcgcataggggtcgctggaggccaggtggacgtggccgcgcgagaagggacggttcagaacggagacaatactaacgaagcactctggctcagacatgccgaagatccctttagggctcggacccttttctggcgtgatctggaagggggcgagggtatattggccgctgggctccgtctcatcctccaacatctggcgcaggatgtggtactgagcctcacagccgggacgccgagggtactggtcgtcgtcgaggttttgcttgaggagcgccttcagctctccatcctgcagcgagggaagcgtcatgtaggcagacgccaacgggcagagtccgagaggaccggcacccgaatgctgctgccaggcctccatggccatctgagccac

SEQ ID NO: 25549 - DNA, 607 bp, Arabidopsis thaliana
cgtcggtaacctctacgacataaaaccggtccggttcagatgttactacgagtgggctcaatcttatggaccaatcatatcggtctggatcggttcaattctaaacgtggtcgtatctagcgccgagctagcaaaagaagttctgaaagaacacgaccagaaactcgccgaccggcaccggaacagatcgacggaagcatttagccgcaacggtcaggatcttatatgggccgattatgggcctcattacgtgaaggtgagaaaagtttgcacgcttgagctcttcacaccgaaacgactcgagtctctcagacctatccgtgaagatgaagtcaccgccatggttgaatccgtcttcagagactgtaaccttcctggtacgtcttcgttgtttaggtcaaactttttcgatgaaagagaggaacattatctgccattaaagaagttttaagtttatccatataaaatacgactttgtagtaaaatgctctgattaaggaaagttcgatttatacaaaatcggaaagatttttcttttttactcaaaatcgtaatttatgttctttggaaagaacgaaatttatgccagatttgtctttttatacaa

SEQ ID NO: 25550 - DNA, 497 bp, Arabidopsis thaliana columbia
cgtcgcagccagtgtgctctaaagccgcgttcttaacgaggatccattggagggcaagtctggtgccaccaaccgcgattaattctccgcttgagacgttgcccgtctataccaacgtgtttggtaagattggtctggtcacgctgggcgttgcagtagtgatgctgttgatggtgccgtggctgaaacgcatgattgcgacgccggaaagccattaattattcttgcagaaagcaccgtagcgttatcgctaccctgttttagttttacactggcgtacctgcatagatatcaaagcgatgccctttagtgactaccgcgtttggcgtggcgacattcgccagcggtggcgcgtagtccgggcgctttaccaccacgcgtttggtcgccagcaagcgtgcaggctccagtaatccatcggcatcaagatccggtcccaccagcgactgaaagacacgcatctcttttttcactagcgcgcttttctgcttatgcgg

SEQ ID NO: 25551 - DNA, 347 bp, Arabidopsis thaliana columbia
ccgacccggtctcgaagtgcgatccccgagattagaataataagtcacaatcatgcctttcacttgatccatattctcaaccctaacaccatccgcccttctaagatatctgatgagctaggacgactctatggaagaaacgggtattagcatccccttcctgcagccacttaattcttgacttttgtctactatacgtctccaaagccttagctcaataattccagtttttcctagcgacatactcagcccggaacagagaatcagacggatccgtcaataactgagactgaattccttctagcttagacaacgcctcacgcgtccgctgttgtatattactgaac

SEQ ID NO: 25552 - DNA, 514 bp, Arabidopsis thaliana columbia
catttcttgtcacatatatgcatcaaaaaatacatatttcacctctaaagtacgccgagagatgatcatatgtcttacacaagatatcgcggttaaaaaatcacggatgatatctctcttgcgtaaatcccccggttccaaacgactgccgccaaacttaacattaaattcactatcaatatcaatcatcgacaaagaagtcatgttcttgactacaatcgtatcagattggtcatcattaaaattcaaatactcaagtctaggagcatcaatctcaaccgaaaaatacgtacaagaaacactatactcaaacgtaagacgaaagcttctaagactcagagacctcacacgaagaaactgcagaacatctagattacaaaaatcaataggcctaatcaatacaaaatcttcaagaacaggacaacctgagataatcttctccatgatcaaaggatcatcataataccaaacatcttctaaatgcattatcttaagagacggtagtgaaacaacg

SEQ ID NO: 25553 - DNA, 613 bp, Arabidopsis thaliana
tgcgaaggttttttcaatatctgaatccagattatagctactacactagaaacacagaagcaacagatgttgttaaaacttgggatagcgagaagaacaagctgaagatggatttggcaaagattcagagtaggatatgcttagctttcgattgttggacagcaattgctggtgaaggttatataactctgactgcccactacgtcgacgaaagctggactttgaatagcaagatcttgtcattttgtgacatacctcctccacacaccagtgatgctttggcgactaaaatccatgaatgtctaaaagaatgggggaattgaagagaatatatttactcttactctagataacgctttagcgaatgacaccatgcaagagatactaaaagagcggcttaatttagatgacaacttgttatgtggaggtgaactctttcatgttcaatgttgtgcacacatcctaaatcttattgtgcaagatggactaaagattattagtggtgctttaccaagatcagagatagtgtcaagtgcgtgaaagcttcaaaagcgagagggcttgcattccagcaatgcgtagaaggtgatcagggggtagttttgcgctggat

SEQ ID NO: 25554 - DNA, 614 bp, Arabidopsis thaliana
tctagacccgcttggtgcatgtggtgatctgaacagaaatgttcttgctcctgctgcaccttatgtgaagaaagactatctctttgcacaagaaactgctgacaacattgcggctcttctttctcctcaatcagggttctattatgatatgtgggttgatggagagcagttcatgactgctgaacctccagaggtagtgaaggctcgaaatgataactcccatggaactaactttgtcgactctcctgagcccatctatggcacccagttcttgcctagaaagttcaaggtcgctgtaactgttcctacagataattccgtcgacctcctcaccaatgacattggcgttgttgttgtttcagatgaaaatggggaacacagggtttcaatatttatgtaagttgacactcatttagcctaatgtgctattatatatatttagtgtcaggcttgtttgcccgccttttctttcagtattctttttctggatacttccttggtttaaactaatgatgataatgactcatcttgtaggttggtgggggtatgggaagacacacagaatggagctacttttgcccgctggcagaccaataggttatgttcaaaggaag

SEQ ID NO: 25555 - DNA, 565 bp, Arabidopsis thaliana columbia
ggaagaagtgttcattgtcagacactccacatgttgattgaagtcgtatctacatatctcaaactctctcatctcgatgtactgcaaatgcggtgatttgaaggatgcttttcgtatctttgaccagttttcaaacaaagacgttgtttcttggaactctatgattgctggttacgcgcacacggccttgcaatgcaagcaatcgagctctttgaattaatgatgcctaaaagcggaacaaagccagatgcaatcacatatctaggagttttgtcatcgtgtagacacgcaggtcttgtaaaagaaggaagaaagttcttcaatttgatggcggaacacggcctgaaaccagaactcaaccattactcttgtctagtcgatcttctcgggagatttggtctgttgcaagaagccctggaactgatcgagaacatgccaatgaaaccaaactcagtcatatggggatctctgctattctcttgccgtgttcacggcgatgtctggaccggaatcagagctgcagaggaacgactaatgcttgaacctgattgcgccgcaagcatgt

SEQ ID NO: 25556 - DNA, 1176 bp, Arabidopsis thaliana columbia
tgaagctttgtatatgcttgatccaccattacattgttgacgtatcccagatggatgagcggatgctccgaattataaaagcgcttggatgtagcagcactgtgctaaaacgattctgtgggaaatctgatcgtagtctgcttacaattgtatctcgtgctaggtctctttgttcggatgaaaggattggtattcaagtcgatgttgatcagaatgagattcgactgtatgcgcctcccctcgacatggaaaaagtgtcagcccttgtgaacgatgcattggaatgtgaaaagatatggatgcataatgaatgtttggagaagtatctatatcatggtcggggacaagtacctattgcactgtttggatctggtgctcagataaagcatcttgaagttgatcagagatttctgacagtcgatgtacattattatggcgatgatgttgttgatgacagagagcttctgacgtttctggagaagaagattgatgggtgtatctgctctattctacaagtttgctgcgaacaagcaagactgtgatgagaaggagaagtggggtagaataacctttctcactccagaatctgctatgaaggcaacagaaattcagaaatttgatttcaaaggatcagtgctcaaattatttccatcactgtcaactggtggaggaattttcaagatgccttatttctcttccgtgacagctaagattcgttggccgagaagggaaagcagtggtagaggatgtcttaagtgcccttccggagatattcaccgtatacttggtgatatatccagccttgagataggaacaaattatgtccatattcagagagatcaacagtcaaatgattctatcttgataagtggacttggagatctttcggaagcagaagttttagatgttttggaattcagaacgcagagaagagatctgaattttttcatattcagaaaaaaatacagtgtgcagtgcccatctcctactgcttgcgaagaagagcttcataagagaatatttgcgcgcatgtcagcaaagaatccagagccaaactgtgtccaagttcaagtttttgaaccaaaagaagacaattacttcatgcgagcgttaattaagtttgacgggagattacatttcgaagctgcaaaagctttgcaagagttaaatggggag

SEQ ID NO: 25557 - DNA, 525 bp, Arabidopsis thaliana columbia
aaagatacatacagattggtctcttgtgtgttcaagaatgtgctgaggataggcccacgatgctatcaatctctgtcatgttcgcaagcgacacaatagagatcgctccgcctggaccgcctggttatttagtccgtaaaagtcaacttgagactggttcctcctcgtcacgaaagaagcgaaacgaagaatcttggactgtggcagaagtaacctattcggccattggacctcggtagtccaacgacgtgtttcgcaaggaactttatttatgggagaaagattctaaaagttgtttccccgtgtaggaagtatcttggaaattgattaaaaaaaaaaaaaacataacagagtactgtaatttgtattttatattgttttagcctgttttactataaagaaaacataacttaatgacgtttacactaacttagctaaaacctccataaccaaagcttcactctctaagcttcttgagtctttggttgacataatcaacaaatctccacctcgacaaacggttac

SEQ ID NO: 25558 - DNA, 599 bp, Arabidopsis thaliana columbia
gtaaagtgcaagagagagttttacgtgttcgggtctcagtgtgaaaccctactcacgccgggaaacttattgtcccggaatccactagaatcagtccttatatacagttggctcttactagagcttgtacatacacaactcattaactacattcaaccaaacacgccattccatctcatctactctctgcatctttgattctttgtcccctgtttttcatgttttgttcgaacacttctacaaagaacaaaacgacacagaccttttaaaggaaacaatgctgcaggcgtgcttcctcttcaacgacttgtacgagatgggcttcttgcgtatgggcctgaagttttctaactttgaatcaaaccttctgattctttgagagtcttctcttgccttctcttctcattcatgaaactcgaagacaaactctcacagtctatattcgttgtttatgttttaagttttaactaaaaatgttaaaagcgttcagtcaaggtttaggtttggtttgggcctagtcttaagatttttgtttcatgaatataaaagaaagaataaaccaaaagtaaacctacattcaaaaaaaaaaaacgatgaaa

SEQ ID NO: 25559 - DNA, 571 bp, Arabidopsis thaliana columbia
tcaaagagaaaaatctggttaactccaaacaactaaaggtccaacgtttactacatgccataacttagtattgtaggtaaatgagatactagtagagaatgttggagaatcaaagtttagttactatcggaatcgtttcctgagtccacattcatcggctgagggttcttgtaatcactgatctcatccttgtatcgctgcttgtcgacttgagccttggcttcatatggctctttatcatcagctatacatacacacggttggggaattaaaacacattcacatgataaagtaaaaccaagtaatgtatttacttttgaaaaggatcttcaaattttttaccagacatttgacgccacttatctccaagcacctttcccacctctccaaatgctattcctgggtgttccttctttatgttctgttcagttcacaaatggaaaatgacataatcaggaatgtgctaagtttgtctgttaattgtttgctctcatgtatgtaatagaccgaggatacccatttcgcaacttagcctacatcatagaggtaaaagtataagaaaggagagaag

SEQ ID NO: 25560 - DNA, 665 bp, Arabidopsis thaliana columbia
taacgtccgccagtgtgctctaaaggtgtggtcgtactatggtgcactggtggtcgcagaaagaacgtggcggcattgtgtcagtgtggaactgtgcgcacaacgtcggtggtggtattccgccgctgctgttcctgctggggatggcctggttcaatgactggcatgcggcgctctatatgcctgctttctgcgccattctggtggcattattcgcctttgcgatgatgcgcgataccccgcaatcctgtggcttgcgccgatcgaagagtacaaaaatgattatccggacgactataacgaaaaagcggaacaggagctgacggcgaacgaaatcttcatgcagtacgtactgccgaacaaactgctgtggtatatcgccatcgccaacgtgttcgtttatctgctgcgttacggcatcctcgactggtcaccgacttatctgaaagaggttaagcatttcgcgctagataaatcctcctgggcctacttcctttatgaatatgcaggtattccgggcactctgctgtgcggctggatgtcggataaagtcttccgtggcaaccgtggggcaaccggcgttttctttatgacactggtgaccatcgcgactatcgtttactggatgacccggcagtaacccaaggtcgatatgatttgtatga

SEQ ID NO: 25561 - DNA, 436 bp, Arabidopsis thaliana columbia
catatgaaaatctggtacataggcaccctccatgaaggattgctcaagctctactgcatgcttgatgcaaggatcctctagtgtagctgatgacagtaattcaagctcggtgtggaattcagcaattctattttgtaccagcagcctcagaaggttaagacccaggataagattctcctgtggagactgaggaatacggttcctggtgcagaggactagacgatatgttagacccgcagataatgtgtaagataatgttcagacagttggttctgtctttagctggcatccacatagtaaggtttcagctgggagaaatctctctcacaagcatcttgatgctcggttttgacgcgctagaacaacagcatgcgcctaaatgtccctagaatacaccaattgtcaaagttttagaaacggaggatcgataagaacg

SEQ ID NO: 25562 - DNA, 544 bp, Arabidopsis thaliana
gcagttggatgagaacacatatgctccaacttctcaagagtctaagatctcggacacgaggaaaagacatgaccgactcagaaatcataagctgggctaacaggaaagtcagaatcatggggcggaaatcgcagatcgaaagcttcaaggttccatcttttacttttatcaaaactcaaaaaaaaaaagttcaactgaacaagcttatgttgaacaaaatctgtcttgctaaacttcaataggataaaagtctatcgagcggattattcttcctcgatcttctatgggcggttgagcaagagttgttaactggaatcttgtcaccaagggtgaatcaggtccttactctctctaactacactcacaacctcttcactctctttctcttctctgttcaaactgaatttgtttaatcgttattttttcgctatggaaactttgtaacagacgatgagaagagattgaatgctacatacattgtcagcgtacaagaaagcttggttgctcggttttcttgttccagaagatatcgtggaggtaaaga

SEQ ID NO: 25563 - DNA, 581 bp, Arabidopsis thaliana columbia
atccggaagggaaaaggtcatgggatgttatgtataagttcagtaataaccagacaagattctgtgctggttggattcgtttggctaaagaacttggtttggagatcggagatgtttgcactttcacgctcatcaaacctaccgagatgcttgttagagtctctaaataagagatgatgaagatatgatattagtttgataactctctcaaaatctagttaatgtgttaggaatctttactaattatgggtcttattaacttgttacatttgttgtttctcttaagactttttatgttagtacaagtatacaatggttcttctatccggtttggaattacaaattctcttaaccgagtattagatccggtttgatttggtttatagttaattttaaccaatatattacaattttaatagaatccgatagaaatcttcacatcaattattaccaaacacaaaactgatggaagctcctagaggaaatctgagagcggtggctcttatcgccggcgataacaacgtccgaggctgtcttcaaattcgacaagacatttccggtctttctgcgtcgacattttt

SEQ ID NO: 25564 - DNA, 616 bp, Arabidopsis thaliana columbia
tctctttctcattgccctctgctctcgagatagtttcaatttgttaatgttgatcgtctatatattaattgtatacacatataggtgcacatatcattggcgggtaaagaccacatgagagtaacatacacaacagacgacttgaatgtggcatcgatggtggagtacggtaaacatccaaaaaagtatgacaaaaaaacggccggagaatccacttcttacacatacttcttctacaactctggaaagatccatcatgtcaagattggtcctcttaaacccaacaccaaatactattaccgttgtggtggtcacggtgacgaattttctttcaaaactcccccatccaaatttccaatcgaattcgccgtcgctggtaaagtccttctttaactcactagtgttttgtcattcctttggaatggaaggtctaattgcatatgagttttaagtacgtgacttagagagggatgatatatatataactttacatcttagtcatgttttgcaaaacaaatgtgtgcatagagatattgcagattaaagtgagattgacccaatattttatatagaaagattagtatttttcttattttcgatttgtgatttgtcatac

SEQ ID NO: 25565 - DNA, 511 bp, Arabidopsis thaliana columbia
agaggatcagaacagcctccaccaccacctgctcctccttgttgctcaccttgtgatgaatttgaagtggtctttagattcacatcaaccatgtcatctgattttgttgccaatgaatatgagtctaccccgggtaaagctgcagcaatcttccggaacaaagcctgcaaattgaagagatttggtgtgtttagaaatcagacaacaagaaacactcaaatgaacatcactccatactctttgttgaagttttgtcataccttaatgttgaagttttctttggcactggtctcaatgaacatcactccatactctttacccttgtcttctccttcactgattgatacttgcctgtttttcattatatcaagattgacatatataagacaagagagaattatatagtccatcccatccaattctttgcttaatgtttgtatttacggtttttcaacaagatcagttttgttccaacaagaacgatgataacattgctttgactctttctctg

SEQ ID NO: 25566 - DNA, 867 bp, Arabidopsis thaliana
agccgttgctgtgtgagatcaagaacgtgaagatcctcagctgataaaccagcaggacctattcccccctgcaccacagaaacaaatcagtagcaggttcatttacaaccctaaatgataaccttgaattgctaaactataatccataacaagaaaatacaaaacaatttctcccctacctgaattactaccatggtcccaacagcagtagcaacatgagcagctcttggactaggtggttctccataaggtgtaagcctataccatcatttcatcatattaattcaacttcacacttaacaacaaatcactagatctcctaccttaaacagcacaattcatatcttctactcacctcgaccacttattagaaagaacatcataacaatgaacatcagcggttgcaccagctaaccctgcataggaaacattactcttatcacatcagggcaagtctaaaactgatgcaaaatcatactctaacatcaaggaatgatttcagaaactaaagcttatagctttatacgaaactaaagcaacgagaaatcgaaaaacatacgaatgccagcacttccagctgaagtaggtgttcccgttcctccagaattaccctcaagagcagtagcaccaccaaacaagatcagtctcgggccaatataagaagacgtcccttcttcaccaacagcaggaaccgccgtcagcgtatgtccacatctaggaccaggaccatcttctttcttctcgattatagcattcacaaccgaatacgttggcgcacatgtcggaccaaccacctgcgttacctgcggctgttgctgctgttgttgttgttgctgcgaaggaggaggaagagaaggagtcaaagac

SEQ ID NO: 25567 - DNA, 587 bp, Arabidopsis thaliana columbia
  unsure (1)..(587): unsure at all n locations
tnnnnnnnnnnnnnnnnnnnnnnnttaaaggctgatgccgatggcgaaaagcaataggtacaatgcgagatgtccagctcttgcggcaagacgagtcatgggcgaataactcggcagcggacccggcggtggagatatgacacgccacagaacgcgaataaccagccccatcattaacaaaataccgatgcttttatgcagttcgggtgctttgtgataccagccatcgtaataactgagcgtgaccatccacagacctaaagcaaacatgccgtagacaataattgcgcttagccaatggaaggccgcagatataacaccatagcgttcaggggtatttgtgaatgacataagtgcatccaaaaccgaatttgcgagagaaagaaaatggcgtgtcggagaatgaattgcaacacaaaaataacaaattgaatgatatttatttttatttcaataattttgaattaataatgaaagaatcttcataagtttagtgggttcacatcagagatgtctggtgagtgctgtagaagcaggaataatctcattcgaattttcacgctaaatgaaagggagattaaatattt

SEQ ID NO: 25568 - DNA, 471 bp, Arabidopsis thaliana columbia
caaacataatataagctttattgccagaagtttcacctaccaaatctggatacgcttttaaaagattactcaacttcttctctttaaaccccaccttctcaaggagctccattgtctcaagaatccggcgccagttatatgtttttctaactgacaaataccgcgcaacgcaatcgcatcctaagtttaatcccttcaacttatttaccacagaaacaaactcacaatcaatgccaccaaccagaagcaacgggcaacaagtaacaagcttaatgactatagcctttctaagaaccaagatctcataaggttcaagtttcgatgccaaaaccccattctcgtatacaaaaatctctcttgcttccttatacaaacgaccaatcttgtcacggggaatcccataatagctaagcacatgaaagttctcaaacatggtactgccatcactcaaagcaccacattccgttgaat

SEQ ID NO: 25569 - DNA, 316 bp, Arabidopsis thaliana
  unsure (1)..(316): unsure at all n locations
gggcagcaaactccaagcataagttgatgtgatgagggagcttagtctcattggtaagatgaacaggagtgtggagaagagagcaggaggtgcgcaccaggagcttggctgcatcaaaaggacagcaggtgaacatttcatagagttgtttttggataattcccgagtaaggtcangtaggaggcanatgatttgagaggaggaattagctgtaccaacagtggcttcaagtgcctgcaaggtgcttgagggacgcgagcaaagtcgttgncgcagatggtccttggatcaacgacaccaggggagaggtactttc

SEQ ID NO: 25570 - DNA, 539 bp, Arabidopsis thaliana columbia
tgtgctctaaagctggccagcggttgatgatgaaagtttattggcagcgctggaaacgtggctgctgccacatatgactggcgtacattcactacgcggcctgaaatcactcgacatttatcaggcactacgcggattacttgattggggaatgcagcaacgtctggatagtgaattgcctgcgcattacactgtgccgacgggaagccggatcgccattcgttatcatgaagataacccgcccgcgctggcggtgagaatgcaagagatgtttggcgaggcaccaatccgacgatcgcccaggggcgcgtgccgcgtggtgctggagttgctttcacctgcccaaagggcattacaaatcacacgagatttgagcgacttctggaaaggagcgtaccgtgaggtgcaaaaagagatgaaagggcgttatccaaacatgtctggccggacgacccggcaaatactgcaccgacgcgacggacgaaaaagtattcgtaaggttggtttctccctctcactgtgggagagggccggggtga

SEQ ID NO: 25571 - DNA, 524 bp, Arabidopsis thaliana
tagtacccgccgccagtgtgctgtaaaggagtgaatccccaggagcttacataagtaagtgactggggtgagcgaacgagacgcagcacatgcaacttgaagtatgacgagaatatttacagcatgttccagccgatcagcatattccaccaccacacgccgagggtgatatgcaccaggaaggttaatatcgtcagtaccgcaccgaccaaccaccaggatttaatatcgttataacccacgccaaagatgaccggacctgccgcgccgccatagtgagtaaccatgccgccataggagttggagaacaacagtgccagcgcggttaacattaacggtgcgccggagacgttcgccagcatggcaaataccggtaacatagcaacgatataggcactaccggaagcgaagagataacgcacgataatgctgaggaaaataataacgaagaaagcaacgttaccgtgaccatcaaatgccaggttatttttaaagacttcagctgaccattcgaagaatttaac

SEQ ID NO: 25572 - DNA, 502 bp, Arabidopsis thaliana columbia
atccccgatctatgaaggcttactcgtttcttcaatgcatttagacacactttaatggctttttggttgtttttgcagcgtgaaggaagtgataacgaagttgcaagagtatgttgacgacataaacggtaacatagagaggctcgaaacccgtggtcctgtttcaaaatatgtcttaccagatgagaatttacggggaaggtttggactttcttcttctcctgattctattctttctctcattttattgtccctaccgaaatcttaaaaagtcttaattgtcacttgcaggctcacgttaagttttgatgaagcatcagctggagttgcgtgtaatcttgattctcccggctttcacgttctatgcaaagcaaccgaagaagttgttggacacgtgaagccttactcgatcaccggtactttacctctaatccgagacctccaggtaaaccatttgataaaccgtactttaactagactcaagactgatctttcagagttc

SEQ ID NO: 25573 - DNA, 520 bp, Arabidopsis thaliana columbia
acgctttctacaaacaatagatattaacttttgaaattcgagggaagaaagagccacaaattaaatgaatatggagccacgattcagacccctaggttcatagagattacttcaagatcctcttagccacaagcgtcgcataaaacttctttgtgcggaggagcaacacaagagcgacaagagaaccaagcagagccatggccgccattatcaaaaacgaagtcctaaaacagtgatttccataacaagaatgatcatcttcagaagctaccttgtcatacaagtagcctattaccttcactgagaaaaagtacgaaccaaccggactagctatcgaaattgtatagaatatagttcccatatgaagaaccccgaatatttcagaggttattgttggcatgagtgaccattgggagccgtacgctgaaccgaccaacaaggatccgatatataggcttcctagtaaaccggagccatgacaatgtgacctatagccataaggcgaagggttatggcatga

SEQ ID NO: 25574 - DNA, 568 bp, Arabidopsis thaliana columbia
  unsure (1)..(568): unsure at all n locations
atctcaagtttctgcgatgattcttctattgcttcatagattgtgttcgatctattaatttgtttttaggaatctggaaatttagagaattctggtttcttatgagttaatattgatattggatctttgatctctctctctctcggtttcagaatgtgtaatccggatgttgaatctgaaccaacctttgaatccaagtggaactgcgaacgaagaagtttacaagatcttgatttacgataggttttgtcagaacattctatctccattgacccatgtcaaggatctgcgtaacgatggagttacactcttctttctcatagacaaagatcgacaacctgttcatgatgttcccgctgtctactttgttcaaccaactgaatccaacctccagaggatcatagccgatgcttctagatctctctacgatacctttcatctgaatttctcgtcttcgatccctcgtaagtttcttgaagagctagcttctgggactcttaaatctggttctgttgagaaagtctcgaaagtgcatgatcagtatctggagtntgtgactttggaagat

SEQ ID NO: 25575 - DNA, 420 bp, Arabidopsis thaliana
attcaaagcttctacacattttgtcaccatttgcaagtttatcttagcaacatttatgactcccagtatttttctcatgaacagacggaaaggttcgagcagtaaacagaatgaacagaagcggttggctagagagtccaaagctgtaccggctcctagtgccaatgccgagttactgggcatcaatacaggtaatttcttagtctacagatgcatgtgtgtgtttgtgtgtatgtatgcctatgcttctatcttattacttggaatttttccctttcaaagaaacgtctaggggagactaaccggacaagcattagtgagaagtttaatcctgagggagattctggcaatggcttccggatcgaaccactgaagggcaatacggcacaaaatccctacccaatctacacaaacggagac

SEQ ID NO: 25576 - DNA, 614 bp, Arabidopsis thaliana
tgtgctttaaaggaggaagctttcgcagtagatcttatatgcgtcttccgtgcctgacggacgcgcggcgaaccagccgttgtcagtcatcactttcagaccgccaatagaagcaccgttgcccggagcagcagtcaggcgcgcggtgatcgggtcacctgccagggtgctggcgctcaccatttccggagacagcttagacagcgccgctttttgtgcggaagtcgcagctgcctgcaaacgggttgtagtctcgcgcaccaaagggttttgccagttcgttgtagtgttcctgcgggttcttaccggtgacagcggtgatttccgccgccagcagacacatgatgatgccgtctttgtcggtggaccacggcgtgccgtcgaaacgcaggaaggaagcccctgcactctcttcgccgccaaagccgaagctgccgtcgaacagaccatcgacaaaccatttgaaacctaccgggacttctaccagtttacggcccaagtcgttgaccacacggtcgatcatcgcagatgaaaccagcgttttaccgacggcaacatctttgccccactgcggacgatgctggaacaggtaattgattgcaccagcctttaga

SEQ ID NO: 25577 - DNA, 526 bp, Arabidopsis thaliana
  unsure (1)..(526): unsure at all n locations
nnnnnnnnnnnnnnnnnnnnnnctaaagaataaagaaaggttgccctgctggacaaaattaaacgccactttgtcgccggttttaatttcactcattttcgtctgcggggtgatggtaaagcgcatggtcatctccggccagttcacggcagcaatcggatcgtgatggatggtgatttttttgctttccagatcgataccctttaccacgccagtgcgtctaataacctgtggttgtacttcgctcatggtttcatgatgatgttcgttagcctgggcattaaagccaataacggtaaacagactgaacattgcgacttgcagtgcttttttgatttattctctcctggagttaaaagtcatactctgaataattcgagttgcaggaaggcgacaagcgagtgaatccccaggagcgttacataagtaagtgtctggggtgagcgaaccagacgcagcacatgcaacttggagtatgacgagtatatttgctgcaaccgccaccaagtgcggtatacaaagaaat

SEQ ID NO: 25578 - DNA, 555 bp, Arabidopsis thaliana
ctgaggctgatgatattcaaccaatcgtgtgtgacaatggtaccggtatggtgaaggctggatttgcaggagatgatgctcccagggctgtttttcccagtgttgttggtaggccaagacatcatggtgtcatggttgggatgaaccagaaggatgcatatgttggtgatgaagcacaatccaagagaggtattcttaccttgaagtatcctattgagcatggtgttgttagcaactgggatgatatggaaaagatctggcatcacactttctacaatgagcttcgtattgctcctgaagagcaccctgttcttcttaccgaggctcctcttaacccaaaggccaacagagagaagatgactcaaatcatgtttgagacctttaactctcccgctatgtatgtcgccatccaagctgttctctccttgtacgccagtggtcgtacaaccggttagtacattttaggctttttgtttatactcattgatcattatttgaactgagctctgattatctccattgaacaggtattgtgctggattctggtgatggtgt

SEQ ID NO: 25579 - DNA, 502 bp, Arabidopsis thaliana
  unsure (1)..(502): unsure at all n locations
nnnnnnnnnnnnnnnnnnnnctaaagcacaccctgccgttgccaggcgtgggtttctgcgtggcacgctggcgattaccggcgtgccgccgttcaacggcttcttcagtaaattcccgctgtttgctgccggttttgcgttgtcagtggagtactggatcctgctgcccgccatgattcttctgatgattgaatcggtcgccagtttcgcctggtttattcgctggtttggtcgcgttgtgcctggcaaaccgagcgaggccgtcgccgatgccgcaccgctgccaggatcaatgcgcctggtgttgattgtactgattgtgatgtcgctgatttccagcgtaatcgccgcgacctggttgcagtaaggagatgatgaatgaccggttctatgatcgtaaataatctggcgggactgatgatgctgacatcgctgtttgtgattagcgtcaaaagctatcgcctgtcatgcggattttagcctgccagtcactggtgctggt

SEQ ID NO: 25580 - DNA, 612 bp, Arabidopsis thaliana columbia
ttcttttgatgttcttgtagcgtctgtacgaaatctcacaaggtttcttcttctcagatttagaaatacttgtgtgatatcttctgagtaaccaaattcttgataaagtttctagctttattcaaacccatttgaaaaatccggtggtgaatcgccggagaaatgtgtttttcgtttctccactgagttttttttgttaagaaatctgttaaaactctagatttcaaacgaatgacattttctgagattgaggaacattgtgaatcgaggactggagtgaagattctctgatgagtgattcagaagaagacgaagaagaagaagaagctagtgaagtcattttaagcagcgtcgttcagaagaagaagaagaagaatctgcgtttcggtgaagaagtagagagacgagacggtttggtgttgttagctcaatctactccaatggtgagatcgagatctcaaggaacgactcggcgcgtgactccacgcctttagtagatgttgagaagctgtaccaaacggagatctttacatcggaagtttctccggtgggtgtcacatggatctgggaagtactatggaagatgggtcatgtcgaagagatggaacgagg

SEQ ID NO: 25581 - DNA, 566 bp, Arabidopsis thaliana columbia
cccttggcacaccggcccacttggtgacataacctcctgcagctttcactcggagcatttcatcctctctatctgggtgatggtcctttgtcaattctttggcaataaaacgcatgagtccagtgcgatgttccagctttaaatcagagaaccttgatggggaagagtcttgattgcgcttacgctctctgtacaactttattaaagtagctgcaataagcaaacaccaaaagaacaaaacgttcattcattccgctatactcttagtggcttcacaaggttggttatagtctaaaaagggatgctgcgggaacctttagcctcttcaggagtctcatatctttcagaacacaaaagtgccttagaatcaccgatgctagcaaccagtagttgaccatctgcgataagtgcaattgtggccgttgaacctgaatccaactttcgagtagatgcttcctgcattaaacaacagagtctaatcacgctactgaaaaaacaacggtccaaatgatagagtagaaggccatgaccacaccttagtaaatgttgcatcaatgtcgtagata

SEQ ID NO: 25582 - DNA, 1025 bp, Arabidopsis thaliana
tgtcttaatcgaccatttactaatttgatactctacgtagctccaagaacagcttaatgctactacatgctactcgtgtgtctaaaccacctctacttacttttctgtacaggtacatttggatatatatcactaaagctctcaaaaacagcaagaaagcacaagctccggttgaaatcacatttggtgttttcattctggagactaggtcgaagactgatatagccaagacatcattgccaatggaacagttcttattgattgggtgctagactgttaagtgaaaggatacatactgcaggttgcttgatgagaggctcaagcctaggtacccagaggagcagctggcagtagttttgcgtggcttcctttgtttgcatttggttgcagctttcagatcaaacgtgtcgagcatcattcaattcttagacaatgtggctcagttttctcacaatttgcttggcatggtgaaatctccaaaaataaatggagccaactcaaaccacataatcatgggagaagatcaaacccatgatggtaacactaaaatatcatcagaagaaactgaatctacaattctatctaatggggttgtagaataactgagtaaattatctgctgaacattaacaagattgaatcaatccacttctattatcagaacaacattatcattgggttctatacacatacataggaaactgtaaaatataactatctcttattactcttattactccttccacgactaaatactggtaactagagacttttctatataacaacaagaatacaagatcattggctctataccccaagactgatggaacaacattggtggcgatctttgccagaagatcagattaataccggatggatataactatcataacactttgtctaaagagcttttcgatacggtccgcattggaagagaaccctgcacaggttttgctttcggattaagagagtccctccgcgttttggcatcaatcactcctgcctgttacacaaaagaaagcaatg

SEQ ID NO: 25583 - DNA, 640 bp, Arabidopsis thaliana
tgctcaaacctgagtctgtattggattgaaatgtgaaaatttgtaaagcgattcatacaacttattcccaagagaagtcacaggaagaggttttaagtctaaaagctctgtgtgagacgtccgcgcctgaatgaagaagactgttaggacctaccttaccgataatttaagcgtagaaatgatcttgtaactatttcggaaatagcaacctctagaagatatatacctctggtagtgcaagattgtgaaaagagattgtgaagtaagtctctgcatgcaaccaagaatcagaaaccgcatgaacatagtattgtggtgggtgtggttcaaatatcggtacggtaaaagaaagcttctgtggttcccctctagccatccgcttcgttagtgtgaaaagatctgagtgatagatataatcattctctgtgtcctgtcgaagaaatagcacaagacaagcgttatatcaacactgccaaaagagttagcattattgaagaagaaatcattagttaactagtatctagcacagagtattgactcttcctagtgtttagtagtgctataacatgagatactatatcgttacaaacagctcattctttgtcactgtgacatatgtgtcttaatgggagttagatag

SEQ ID NO: 25584 - DNA, 621 bp, Arabidopsis thaliana columbia
taaatagcaaaagaaaaaaagggtttttgattgcaaactgaaaaagtgaacgatccatccaaaagtcagaagtttacgaagatgcaaataggtcaagccttagccgcagcaaaggaaggtgagtctcagatgatcgtgatgatgggtaacaatctttctttaacaagcattattctcaatggagatccatctatagagcataaaggaaaacttacttgccttgacgaacaagtcaagatatctcagttctatcactgcgagggcttactgctatgcattttaaaagatgattctaggtttgtggtttgtaatccgtatttggagcaaacaaggtggatcgaaccaagatattcccatcgtccatacggaatggataggttctcttacgctcttggatacgtgaatacggattcttgtcgtagctacaagttgttgaggtttatagattattactacaatgcacccgagaagcaattcttttggtatgaagtctacgattttgactctgatttatggactactcttgatgtcctccacattggcgtatagcgttttgtacactggcgttcgtttaagggaacacttactggtgtgctgcagaaggacagagatgtagatgaa

SEQ ID NO: 25585 - DNA, 503 bp, Arabidopsis thaliana columbia
ttccctgttttaaccatcgtatcaacaatcattttctgctcgtcactcaacttctcgtcctgaatcatcgacaaaagaccgagtatcgaatgcataggacgcctcatcccttcgctcatcgttttctgaaacgcattcctcgcttggctcgctctcaacgcgtctctcttcgccatctgcaacgccctgttctgttccgccagcttctccctcataagctgagactcttcaagaaccgctgcatgatctaacgcaacggttacttgatccgccacaactttaacaatctcaatctcctgataagtccaatcccgaggcgtcccgcccggtaaaacacaaacaagtatcgcataacttagctctccattaaaatccgaaacacgaagcatcggcattctaatagcagccacggcaccaatctcactaacatccccaccaccaccactagctcgagcaatggacgagtcaacactcaacacattcacttcatcactctccctaat

SEQ ID NO: 25586 - DNA, 610 bp, Arabidopsis thaliana columbia
ttgttgttgttgagatttgaatctgttgtttatggtttttgtgattacttggttttgcagagacaatgtcgacagtcggagaacttgcttgcagctacgctgttatgatccttgaagacgagggcattgccatcactgtatccttaaatctcttgacattttctgaatctcatgtcctagctattgttgtcgctatatcttgttttggttggatccttttcattatcgagacaacatggtgtgagtgtttattttaggtttatggagctctcttttgatgaaatagtcagtaccaagattcatgtttgctttggcacactcaattgttgggcatgtgttaaatgacctatctgcaaagttgttggtttagggttaggaattaggattcttttttactggatttaagaaacgtgtttgttctattagttttgatatgtaggttcaatgtttgggttaggtaccttaaccctattattgatagtctgataagattgcgactttggtcaaagcggctggtgttgagattgagtcttactggcgaatgttatcgccaagatggctgagaagagaaatgcacagacttatcatgaatgttggtgctggtggtggt

SEQ ID NO: 25587 - DNA, 505 bp, Arabidopsis thaliana columbia
agtatgtgatagcatcttcacatggctctctacttgttttatcctcaataaagacagaaaccaaggactttgtctttttcatttatttaatttttgataagggactttgttgggtatgatagaaatgcaaaagataaaaactgcatttctcataagtcatatatcaagcatgattggtagatgtgataagtacattccatactagtcctagtgacctgagaaatgaaactcatggctgagtttgatgatctgagaaatatagacacatgaataggacagttaagcatcaaacttctcttagtttggattgtaacaatgcatgaatctgagtcgcagaacttgccatgtgtcgtacctaacagacatgtgtagtgtatgtagccaaaacacgagtgttacctgaaagaaaccaaatcccttgcaggccaattcaatctcatggatgacacatagtctaagcaaaggatcgtgtaagaaggagagatcaatgacaggaagattgatg

SEQ ID NO: 25588 - DNA, 624 bp, Arabidopsis thaliana columbia
gtgtgctctaaagcgaaaagctgtcaccgcatgtgttgcgtcacgcttttgccactcatttattaaatcatggtgcggatttacgcgtggtgcagatgctactgggccacagcgatctctccaccacgcaaatttatacgcatgtcgctaccgagcgtctgcggcaacttcatcaacagcatcacccgcgggcgtgatgtctgaaaagaacgggaagatttatgaagaaaggttttatgttgtttactttgttagcggcgttttcaggctttgctcaggctgatgacgcggcaattcaacaaacgttagccaaaatgggcatcaaaagcagcgatattcagcccgcgcctgtagctggcatgaagacagttctgactaacagcggcgtgttgtacatcaccgatgatggtaaacatatcattcaggggccaatgtatgacgttagtggcacggctccggtcaatgtcaccaataagatgctgttaaagcagttgaatgcgcttgaaaaagagatgatcgtttataaagcgccgctagaaaaacacgtcatcaccgtgtttactgatattacctgtggttactgccacaactgcatgagcaaatggcagactacacgcgctgggg

SEQ ID NO: 25589 - DNA, 306 bp, Arabidopsis thaliana columbia
taaaagagctcaaggaatcgacaatccaagctactacattcaccggaaacctcaatgctccagttgatgaaactctgttcgacatagagaaagaaatagatgatttactaccagttgaagtcaaagaacaacgggtaagcaacttgcttcagtctacgatggtaggaggatgcgttgcagctatgcctatccttaaaatgatcccaacatcagtcctttggggctattttgccttcatggccatcgaaagcttacccggaaaccaattctgggaaagaatctgacttctgttcaccagcccaagtc

SEQ ID NO: 25590 - DNA, 578 bp, Arabidopsis thaliana
acataagaaaacaatagcttaaaagggctaaaaaggcgtgttatcatcttgcagttatgatcttccaagaactcatctgcaacatctccgtcttcatcaatctaaagccgcatcgagtaccaacgtagtccttgatccaaataagaggtttgctagtaaaattcttggctcatactttaaattgagtcaattccatcaagaagaactcaatgacccaaatacatataatcgcataaagataattgaataatcttggcaagataaatcgtcttgcttattatcatctttctctaccaatataaccaattaagattctttaaagtctttattttagcatgggtggcttatgattaatactcaaccatctactttcttctgccacaattaatcatacaacaagctaaaacatatatcactgacatggcagtatcttaaggactacaattacaaagacatctaattctataagatcattcagagaattgggaaaaaccataaagaaatgacgaatgtaaagttatctactaaagcatataaagtattgtttataaacacaaacatatcgaagctacttatga

SEQ ID NO: 25591 - DNA, 353 bp, Arabidopsis thaliana columbia
atccccgatgtgtgaggttggttcggttaaggaaggtagagaactcgcggaaagatttgaacctgttgtgagtgtttataatgcattgattaacgggttatgcaaagagcatgattacaaaggggcgtttgaactcatgagagatatggtggagaaggtgatatctcctaatgttatctcgtactctacacttatccatgtgctttgtaattctggtcagattgagcttgctttctcgattctgacgcagatgttgaaactgagggtgtcatccagatatttatacattgagttctcttgtgaagggttgtctttctaaaaggtacgaacttcgatgctctagacttgtggaa

SEQ ID NO: 25592 - DNA, 488 bp, Arabidopsis thaliana columbia
atatcctgacgagtcacatttagtaatctccttggacgtgtaacgccgttaaaacgattctttcccattgtatccgcttttaacaactctcgtcgtcatctccaccgtccgttttctctcagctatattttaatggcgacaattcagaagcttgaagaagttgcaggcaaagatcaaactctaagagccgttgatctaaccatcatcaacggcgtcagaaacgtcgaaacttcaagacctttccaagtaaatcccacagtgagtctcgagcccaaggcggacggattgatgccgtcgttttcaatgtctttagctccaccgtcttcgacaggaccaccattgaagagagcttcgactaaagaccgtcacacgaaggttgaaggaagagggagaaggatacggatgcctgccaagtgtgcggctaggatttttcaattaactcgagagttaggtcacaaatccgacggcgaaacgattcggtggttgtt

SEQ ID NO: 25593 - DNA, 577 bp, Arabidopsis thaliana columbia
gcaagttcctctcgcctgtaggaaaataaattcttcttaaatcagtagctctggcaatgctggtttatgcgatgtcttgtttcaaattatctcaaggaattgtctcggagattgaatcacttttgatgaacttctggtgggagaaatcttccaaccaaagaggaatcccatggatagcgtggaaacggctccaatattcaaaaaaggaaggcgggcttggatttagggaccttgctaaatttaatgatgccttattagcaaaacaggcatggagacttatacaacatccagattccttgttcgcacgagtcatgaaggctaggtattatagagaggattcaatacttgaagcaaaagcacgcaaacaacagtcctatgagtgggcatctattctatcagggatagcacttttaaaaaaggggacaaagtacacaattggtgatggcaaaactattcgtttagggattgataatgttgttgattcttacctccgagaccgctacacacttccgaaagatataaaggtgcatatcttgatacgctattccgtttcaacgacacatatactttctgggat

SEQ ID NO: 25594 - DNA, 551 bp, Arabidopsis thaliana columbia
ttactaaacctagatcgttggcaggtgcggcggctgggacggtaaaaagtggctgtcagatgtttatgttatggacacaagtaaaacttcatttctctattctagttttagttctgcaataaacggtttttatttgctgataatgcttactctcttggtatccattagtgtcccttgaatggctggagctatcggtttcagggtcattgccacctcctagatgtggtcatacggccacaatggtggagaaacgattacttgttttcggtggccgaggtaggctacaccaaaactttgaaaattcttgctgctggcttctgaattcaccttgattcattccttaaatatgtttaggtgtttggtatattcagtacatagaaaatattgttactcaagttttttttccctttattttactgaacactggaactaataagtgtgattgctcaagagcagactcctgatagatataaaagtcaatgtcaaatgttactttgctattccgccttttcattcatcaaacagtgtttaggatgtcgatgtgtttgatg

SEQ ID NO: 25595 - DNA, 593 bp, Arabidopsis thaliana columbia
caccgaagtgtcctgtgttggaatctttaacagttttattgaccatatgaaacctgttacttcctatattcttatgaattccatttgtgtcatcagtgtccaacaacgatcgtgccattctttggggatcagttcttctggggtgacaggatctatgagaaaggacttgggcctgcgccaataccgatagctcagctcagtgttgagaacctcagtagctccataagattcatgctacaaccagaggtacacaaacttgcttttcccttttttttaatatcttccaagcctagggaggatgttaagcctcctccataaaacctccaaagctttctctagaaagcatagacatcataggacacgaatcatgtgctttcaggtgaaatcacaagtgatggagctagcgaaagtactggagaacgaggatggtgtagctgcagcagttgatgcattccacaggcatttgcaccagagctgccacgtgccgagtcctcgtccgagaaaaaagatgaagatgatcgaccagacctgttacagtggttctttattcagattggcaagaagtgttgtcttccatgtggtggcgtgtgata

SEQ ID NO: 25596 - DNA, 541 bp, Arabidopsis thaliana columbia
tggaccgtagatgggatgttcgagtctgacgaccttgctgcaagacaactaaaccagtcattactcgatcgtgcgccttgttcgataggcatactagtagatcgtggacaattctcgcggaaaagctatgtaacgagcaagaataggtacaacattgatgttggtgtgctcttcattggaggcaaagacgatagggaggcactatcattggtgaagaggatgaaatataacccgcgggtccgtgtaaccgtgatccgactcatcttcgaccatgaaatagagtcagagtgggactatattcttgataacgagggcctgaaggatttaaagagtactgaatccaatgaagatattctttatacagagaggattgtgactagtgtcgttgaggtagtcaaagctgtccaattgcttgcagaagagtacgatctaatggtggtcgggagagatcatgatatgacatcacaagacttatcaggactaacggaatgggtcgaactaccagagttaggtgtcatcggggatttgctggcggctagag

SEQ ID NO: 25597 - DNA, 565 bp, Arabidopsis thaliana columbia
  unsure (1)..(565): unsure at all n locations
agtagaagtccttgcataccccaagcaagcatcaagacactgaagaatttggtagtcccttgtgagatagttgctacatctagagaacgtgtacgacctgccaatacagaaatagtgtgacagtgagttgattcattaggaaagtcgaaatgtttttgaaagattgaatatcgtatggcatggagcaggacctcggattatcgaaatagtagcacttgttgcactacaaggaagccctaccggttccaacaatgatttaatcatgccattaccacttcctgccattaggaatgttagtgcacacaaagaaccgcaaagtaaaaatgtttacctaaagtttctcatacacaagatatcaatttggtatgataaacagaaaactgtttcaatcttacttaaggataacctttacatctaaactttcacatggacacacaagacaagagaagtatgaggcagaacgaacctgcagggaccattccgatcggcaattttatggcagtcttccagtcttctctttcaagcagtccatttacaacctactanattaggaaccaattttaag

SEQ ID NO: 25598 - DNA, 628 bp, Arabidopsis thaliana columbia
  unsure (1)..(628): unsure at all n locations
tttgtcagcaaaatctgcagctaaattgggacttgtcttgttagttcaaagattgaaacttttttggttaattgtttggcggaagaagatttacaatgggagaggagcatccgagaaagcggtctagacaacattttgaagcggaggcangaaacgtatcgttgtttgaatcccctcaatgcgaaacctccaagtggtatttcagcagggaagagattgagcgtttctctccatccagaaaagatgggattgatcttgtgaaggagtcgtttttacggtcttcgtattgcaccttcctgcaaagacttggcatgaagcttcatgtgtaagctcaccatagtattactttgttgttttgtcatctaggaagaaatagtgtttgttctttggttgtttgctagaaaatctacttatgacgtctccttgtcttctgatatttcttggtacgtttttttagctaaagagggtgcctaatgcatgacaatggatagcctaactgttgaattttgtcgtagggccactgtgggaggtggtctggaggttcccaactatagattctcgattttgcgacatttatatctcgtgaatggaagaattatgtaataatagtcagaatttggtgtcatgc

SEQ ID NO: 25599 - DNA, 601 bp, Arabidopsis thaliana columbia
gcctcgagaccttctgtccttcatgatcacaggtaagcccgtatacattccggtgatagggttacaaatcacaatcgtctcagtatcaacgatatgcacagcaggaaaatagagcaaacctgaggcatagctacaaatgtagtggctaacatctcctgagaacttgctatgaaactctaaatgagctgatttctcataccgattctgtgactgaggcgatgagaaaaattgccactcattacatttgtatcgttcaacagcaaacaagagacgtggacgattcgaggatctgctcaggaacagcttggtgaaatcagtactgcgaagtatagacgcccactgcttggacagtgtacgaaacctagccactgacttcgaaggcaatctcgcgaagatctcgcgaatgagatcagttgggagtgatacattcatttttcctctatccatcggattcgcctgagttcgtgattgttccgcggagaaagaaagggtttggggctacgacgacgacaggttggaatttgtgactgtttattttgttctttctaaattcgtccggtaaacgaaagaaatagacatactttatagattgtgtatgtga

SEQ ID NO: 25600 - DNA, 619 bp, Arabidopsis thaliana columbia
  unsure (1)..(619): unsure at all n locations
cgtgtatagatttggggaacaattgcacttgagcatttcattgtacacagcaaaagccagcataaagaagacctcctctcgcatcatgactcgcaatatcacgttgtacgtgaacacatcgggtctgcaatcaaactccttcatccttccaaacgattccactgctttttccgccatacccatcttagcataagcagagatcaaaacacagaagcaataagaatcgacagagacgccaccagatttaagctcctccaatgtctgccaatatagatcgcaaccattatcttcagagagcatatcgatgaccaaaccaaaagactctcggctcctgagacgctctcttctcgacgcccatataaaaaaacggaatcctaattgtctattgacctcatctttgattaccgatgtgatgatattcttcgagagaaacggaacaagcggctccaaagcaggctctataggtttcttcttagctagaatgctgatgacctcgccggagatattgaattcggcgttaccggaagagtaggaacgttgcatccatgacggctttgaatagaactgaatgactgatcgaaagacatctgtggttcatagtaaatgcgccngatgagaa

SEQ ID NO: 25601 - DNA, 666 bp, Arabidopsis thaliana
tgtccctcctccacttggtctacttacatatagatatacaatgttaattagtaacatcacatcatacataaaataaatttaaaactacaatataaaacattgccctacttacatatatacaatgttaattagtaacatcacattataaataaaataaagttaaaacaacaatatataaaagatatggaccaatctattttttgtcaactgatctgaaactatcaagatgattagtaatgcgtctaaatctaaaagaaattatatttagataatactagttaacatataccgtttaagctaaagttgttagaagtgagacgatgtctgtcccagacggggatgatgctaggttgtgtttttcccgcggcgagctcagttaaggttttgaaaaactgagacgctccaaaaccatcacacaaggaatgagagagggccgtagcaagagtgagccctccgcatgcaaacaaagtgatctgcaaagccagagggttgtaatcgccagagggcgcagctacatcacaaggtacgagttggtataagtcagtgtccatgtccttcaaatagttgagggaagagagagtacagtctgcggttgcctaacaaaggggactccttcgcgggactgcactcaattctagtctatggtcgtgtgatcccggtgaagtt

SEQ ID NO: 25602 - DNA, 568 bp, Arabidopsis thaliana columbia
agaaacattaggagctcgacataagtcatatattcgactaggcgaagaattattaccccgcgacttggtcatttgatatccatgccctccattcatcaataactttgtatccaagagattttgtccaagcttccgagccagtaaacggaacacacatatcgtgatccccgctacaaagaaaagcttatttcattactctctaaactatatagtatatggcttcagattcattttatatgtttttgtttaagtacctgtaaatgagagctctatatccacttagtgtaaggtttctatggaaatcgatcatgcttcctgcgtcgtgatagaatgagagtttccactgcaaagttcccaccttccaatctcgctctcctgtataatgttccaaacacatcaatgatctgttttcataatacatagcaataggatcagacagagtttgagacctctttagtatgaatagctttcctaatctctggatcggtcaaccacgctggttgaactctatcaacctgcaaacaatcattcattgtttcagcgtacaatctatagtggtgaacagaga

SEQ ID NO: 25603 - DNA, 422 bp, Arabidopsis thaliana columbia
ggatccgtggagaggtttgtggtcggaggaagcggcgtcgtctcttcgttggacgagcataccaccaggtctcacctcacattccgattcttcggttgaattatgcatcatcggttttcgacaatgaatcggagtatgagattaaagtataaaacccttctggccaaaaaaaattagggttttccttgtcagggtattgatagacggatgatgcacacctcctcaagccatacaaattctcctgataacacacatgtgtgtcaattgttatatatctgtcttttgtggtaattagaatttttaaggactaaatgaaccaaatattttcagagattgtaacaatagttgtgtacagctgaatatagatgttcttggtttttcacagatggtgatgatttgtgaaacgtcagaaagaagaaatc

SEQ ID NO: 25604 - DNA, 649 bp, Arabidopsis thaliana columbia
cttctcagctttcttcttctcagcctttttcaacttctccttcgccgccctaaccgcgacgacgatctcgtcctccgcggagggtttcttgagaaaatcgctctgttctccgagaaagtcgaaaactttctccaaaaaccctaatgggtttgcagaactgagtgttgccctaaagggaaatatcatgggtcggctgctactgctttcttcttctacctcagagataatcgccatggaaggtttccgttttagggttttgctctactttgttgggtttgcgacaaagagggaaatcaagaaatgggatgtttcagaaatcgattttggagaagaaagtcattcactttgatagggaaattgaaaagtccccaaatcgagaaggttcgagaagtagtaagcttttctctttgtcattcatttcccttgggttttcgctaaagttttttcctgggccaaaaatttttttacaaccaaaccagtagagcccaataaggcccaaccttaattagtgtcgtatgactaagcctccaacaaaggctaagcatactatgagaacttgatatcaaaaacaaagccatcgtaagaacttccaagaaagaaaaagaacaaaaagcgagggcaaaaggcccacctagacaagataacaaac

SEQ ID NO: 25605 - DNA, 481 bp, Arabidopsis thaliana
cgactctccccgggtacccgcttcaaccacctccccgatcgctttccttccttcggggactgatactacattggttaacatggcgagactcctctcgctcacttccatgtctcccaacgtgttcaagagacaaggaatcagatcggtttcgagtatgaaggacacgttttggtgatatattgacaggttgtaaagagctcgaagacggtcttctctagcttgtgagctgctagtttcctcgaagtttttaagcgttttcactagaaagatgattgcacccgaggcaccgatgatcggtttgttggaatccaacgcgcttaaccctaggaaattagcgacaatagcctccgcgattgcttgattaggaggttttgatgactcaactagctttaacattttgtgaacaacacctgcttttacaatggctgccttgttcctgaaattcagagaatttaaacatatgtcattgaaacaaatgatt

SEQ ID NO: 25606 - DNA, 529 bp, Arabidopsis thaliana columbia
  unsure (1)..(529): unsure at all n locations
gttccaacacttgatcgaatgtcctcacaacatcatctacctgcttggctttcccataacactggataactgacgtcagaacaaaaagagtaggctcaaaaccagcttctctcatttgaagaagagccgcctcggcctctgaaaccctcccactacaagcgtacacagtgatcaacgaagagaaggtccagctgtccggatcacaagtctcacaattcttcatatcttgaaaaatctcaaaagcctcatccacatatccgatatcagcacacatggacaagagagtattgtaaagaatcacagttaaagacaatcccttctccttcatctctcggtagatagcaagtgcatcatcgccataacgagctctaccataggctctaacaagagcagcataagtactccaattgggagtaaagccattggtaataagatccttgtagataattttagcctgccaagcgctcttggatctacccatagaatctatcaacctattgtanataaccagattaggcttcacccaaga

SEQ ID NO: 25607 - DNA, 547 bp, Arabidopsis thaliana columbia
atttgtgtcttttcaagcagaccaattttgagaatccagtttatcggttacataaaagaaagtatgaaatacaaatttaactccaaatccaatcaagttaatattaccttgatcattacagggaaaccaatctcattggcgaccctgacagcttcttctgtactctgcaataagacaaaataaaacattcaaatcccaagacttctcttgacatgcaaaaacttgaaatactaaactgataatctaaaaaaatacctgcaatagcccatcactccctggtacagtgggaaccctgcatttttcattgtctctcttgcagtcgctttgtctcccataacacggatgctatcaggctacagatagaaaagacgaaataccgataaatcagatactgaaatcttccttctctccaacaaaagaaagctagggctgaactgagactaatgaagttctgcaaagtctataaagtctttgaagagatataagacacttacattaggtccaataaaattgatcccatggtctctacacatttcaacaaagagag

SEQ ID NO: 25608 - DNA, 587 bp, Arabidopsis thaliana
tagtaacatccgccagtgtgctctaaagtggaatagaaaaagagtatgccttgagcagtcatgaactgaacgggcgattaagcgaactcttaagtcatattcctcttgaggtgatggcaacctgtgatcgtattatctctttagcgcaggagccgttgggaaaattacaggacagtatttatatctcgctaactgaccattgccagtttgcgattaaacgctttcagcaaaacgtgttgctgcccaacccgttgctgtgggatatccagcggctttacccgaaagagttccagctaggggaagaagcgttaaccattattgataaacggttgggcgtgcagttaccgaaagatgaagtgggctttattgccatgcatctggtcagtgcccaaatgagcggaaatatggaggatgttgcaggtgtcacgcagttaatgcgcgaaatgctgcaattaataaaatttcagttcagccttaattaccaggaagaaagcttgagttatcagcgactggttacacatctgaagtttttatcctggcgtattcttgaacatgcttcaattaacgatagtgatgaatcattacac

SEQ ID NO: 25609 - DNA, 580 bp, Arabidopsis thaliana
gatgaataactatacttgactccagcagtaaaaatcaatacagaataaagagcaacagtgaaaaacactgaagcgtttgactctagtgaactacaaacaaaaagaggaaagacgcacctgagtagttttcccacaaccagtttcaccagcaataagaacaacctgcatttcgaataagaatgaataaagactctttcaaaatgaatggaaatccccactaaaagcacaatgacgaaattcacatcctgaatcctaatatagaggaacaaattaaatatctaaagacccatataacctgattggattccactgcagatataatggcatcgcgaaaagatgcgatgggaagctttgatcgtgcttcaaagatctgtaacatcattcaaataaaaggatatttctattactcaacagtgcatgattccaactttctgaaacagggttctgtaaagagaatattgcaatcttttgaaaatacatataactgctaacctctcgagaatgtctttctctattcagtctagaactcagagataccacgttattttcaatatcgtgttttgtcatatgaggttcttga

SEQ ID NO: 25610 - DNA, 788 bp, Arabidopsis thaliana
  unsure (1)..(788): unsure at all n locations
tgcatacagcagtgtccaagtagtgatgatcttcagtcttgttaattagagtcgttaattttctccttcaaaccacacataacggtatccacgaatccaaaccatttgtagagcatgtaaaaatcccaaggcttccgcttgtagggctgagtatgattgttgtagcttcgcacaacctgaatgtattacatgtccattactgtctcggattatccaacatgtgcttgtataatcccttccttgaacatagccactgtcaaagttacattttagataaccctccggtggtggactccattctttacttcggcccgacggtcgatcatttggttgttcagtgctgtgtgagttagctgtgtcattaatcgtagtttcgacccattcggttgcttcttgttcccctttctgtgccaccttccaagggaatcgatcaatctgttgaaaaaggaactcattacgtgatttccataagcgccacattatccaaaaaggcagcaatccattgagaatggtaaggttttgttttttcttcgcctgcagtagtaatcgtatattctcttcaagattattagtgaaacaaagccgattactcccagaaaagtttgcacttctccatacagcatgcgcataagaacaagtaaaaattatatgattaattgtctcttcggcatagcagcatctttggcaagtcggatctgctggaatgtccnttttacggagttgactggttgtggataattgctgttaaaactagtatcggtttcggtaaatgattttaataatatttg

SEQ ID NO: 25611 - DNA, 465 bp, Arabidopsis thaliana
gagacacttttatgaaaatcaaataaaattaatataagtcaagcaaacatcagcttttaagttggagatctcacctccatattgtccccaacaaaatgactcatgaccgcatctttcacagattctagattcaagctctgtagtgacttaggtgtcggctcaacaaaacgctcatcaccgttcagcatagcgatcataagtttatgagcagtcgcacgctccaagcttttaggaattgatcgaaaatacgaaagatatagctgccttgctcgatcaaatgcatcttccaaccagacactacgctgcataccagagaaccaccactctttctcagcaaaagattagagaaaaaaataaaaaaataaataaaggaaaacgaacaagcaggtaaaagaaaacattattgaccagcaaatctatagatcaagagtctgaaatgttgcacagcattctatatcttatttg

SEQ ID NO: 25612 - DNA, 564 bp, Arabidopsis thaliana
  unsure (1)..(564): unsure at all n locations
gccagtgtgctctaaagcactcatgcaggaagcatagatcctttgagcggagtttctgatatctgaggagtgcgaaatgcaattgagcagcagtgaaccttgcgtggtgatcctgaccgaaaaagaggtagaggtaagcgtcaataaccatgctacgtttacccttccgaaaaactacctggccgccttcgcgtgcaacaataacgtcattgaactctcaacgttaaatcacgtattaatcacccacatcaaccgtaacatcatcaacgattatctgttgtttttaaataagaacttaacctgtgtaaagccctggtcgcggctggcaaccccggttatcgcttgtcatagccgtacaccggaagtgttccggctagccgccaaccacagcaagcagcaacccagcagaccctgcgaacggangttgacgcgcgcattgctttttaccgtattgtctaactttcttgagcaatcgcggtttattgccctactgatgtatatcttacgcagcagcgtccgcgacagtcntgccgcattattcaaagcgatattcagcattactgg

SEQ ID NO: 25613 - DNA, 568 bp, Arabidopsis thaliana
taacgacctcctcgtaagtgatctcaggatacttctcagcaacctcacgacaacactgaaaaacggaagcaaaataaaaatggtctcagaacaaaatgtaaaaaaaaaaaaactagcagaaataacaatcattgctttgatccctccgtataagaaatgcttggagttataaaacgggcagaccttgagaaagagaccgtcagttttctgcataatgttggctttgtggatagcagaaactctctctcttccatgagtcttggcatagagaaaagcatactctgcaactctcaaactcgcctgacgggtaatgattttaagactttccaccacacctctaacaacctattatatgcgtcaggagaaaacaaaaccatcattagaatcatttattagaagaactaacctgaaatattcgatcaatagacttaaaacaaactaaacctgatgttcaaggccactgtattctccttccgtgttttctgtgatggtaatgagatcaacatctatcgtaacgagttttgtaccaggaagactgtaacaaggtctaacattggcatatagatta

SEQ ID NO: 25614 - DNA, 572 bp, Arabidopsis thaliana columbia
gataaatcccagactcgcaaggatagtctatgttttagaaaatactcactcagtaaatgggagatgcttaaagcttgctcaaggagagaaattcttttgatgaaacggaattctttcatttacttgttcaaatctggactggtacgttctgttacactggcaaggtttccttatcatgtaccaatgtatgctaacctttttctttatgcagttagtgttcaatgcgttagtcacaatgaccgtttttctacaagctggagctacgagggatgctcgtcatgggaattatcttatgggttctatgttcactgctctctttagacttcttgccgatgggcttccagaactcactttgactatctccagattgggagtgttctgcaaacagaaagatttatacttctatcctgcttgggcatatgcaattccttcgattatcttaaggatactctttcggttcttgattcatttatttggacagtactgacatattatgtcattggttacagtcccgaagtcggaaggtaaacaacttttacagataacttcaactatgaattcaaatttaatag

SEQ ID NO: 25615 - DNA, 539 bp, Arabidopsis thaliana
atttgagactggacacaatggcttggtttccatttgtgtttatgttcagagaatgcaattcttgtgccattactgtatagaaaacatgttttaagaactgatatgatgcatgcatttattcataacgattatatataaggagaaaacattaattaacgaaagaaaaataaatttcattcatgagaaaatacaactacatgtgaaaccaacccaaacatgtaacttaaacaaacagaactaaaacaataactttttattgatagttgaaatgacaacaacttaaaataagatcaacgatggctcaccactgtttcttgttcagatccaaatcatttgtggtctgtttcatattcaaagtaatttgaatttgatctcgaaccttgtcgtaaaatccaaccgaagaagaacccatctcaaccacaggcatgacactagatgttgtaggggcagcaacaggaacgagggcggaagatggttcattgttccttttcagaatctcgatcctacgattaacatctttgagttgttgtcaatgacat

SEQ ID NO: 25616 - DNA, 371 bp, Arabidopsis thaliana columbia
tagtaaatgtggatgtaacagtccgttataaaggctgccatggtaagttattcgcactgccgaataaatgagaagcagattagttgcttgttgagatttgccgtctcatggaatgatcgatcggtaggtgaccttaatgagacatacttcgtcggcaacgttgacgaagcatcacgtcaactggttaagtgcacatacgagtgcctggagacagctatagcaattggtaggcgcaaagtgcgtacctgctctgagcttttatgatttgactgagatctatattcaaaaattgagaagagagtgccaagactttcgaagcatggcgactatcagcaacacctggagtcagattacgtgatactggagagata

SEQ ID NO: 25617 - DNA, 490 bp, Arabidopsis thaliana columbia
tttttcgacagaaattgcttgatattcttaagatgatcggaacttgcgaagtgattgatagccttagaactgatacaaagtttccaaacaaagtattatgtgcagtcgaataaatcaattatcatcagaagacgcatcagtttagatacaatcccagttttctagcacagtttcaatcaactcttgcgcactctgattctacattcaaataaagtaacacagctactaatgttcgcacaacaatgaacccaaatcaaacaaacagtcacaaatcgagaggaaagagaaaacggaatggcataccaggcgaaggagctaccgagctcaacaatgtcctcatcgcagaagacacaccaaacagggttttgcgactgctcttgtggccgtagaacgctagggttcttcaggaagaatctgacgtcagctatcttcgatctgaatcgatcgagtaaggaagagagggaacttttgtggcgagggaagtacttgt

SEQ ID NO: 25618 - DNA, 227 bp, Arabidopsis thaliana columbia
ccccaatgagaaactagccaattaaacaacgacattagaaaactggactcttgatttccaatcgcgaatcgcagaccggagcgtatggttcggtgtgagcttgaagtgatctagcttatgtcgagtcaccggtgacatgtgatgtttctcaagccacgctaagatcgctttcctctcgtacgtgagtccatcggcagccatctctggctcctccattatctcctaca

SEQ ID NO: 25619 - DNA, 590 bp, Arabidopsis thaliana columbia
gggtaccgagttcaacctttttgattccacagggacaaacaccgttgtttccacgtatcttcggccatgaagctggagggtaatagaaacactaatcttctttgcttcgttttggatatttttaaggttttagagattcaaggtcgttttttttgttgttgtgtaggattgttgagagtgttggagaaggagtgactgatcttcagccaggagatcatgtgttgccgatctttaccggagaatgtggggagtgtcgtcattgccactcggaggaatcaaacatgtgtgatcttctcaggatcaacaccgagcgaggagggatgattcacgatggtgaatcaagattctccattaatggcaaaccaatttaccatttccttgggacttccacgttcagtgagtacacagtggttcactctggtcaggttgctaagatcaatccggatgctcctcttgacaaggtctgtattgtcagttgtggtttgtctactgggttaggagcaactttgaatgtggctaacccaagaaaggtcaaagtgttgcgatttttggtcttggtgctgttggtttagcgctgcagaaggtgctag

SEQ ID NO: 25620 - DNA, 585 bp, Arabidopsis thaliana columbia
taaaaaaaaactataccgtgaggagacgattccggtgacgagtccggttttggcgacgagtgcgagatgactaccgtgaaactgaagcatgttccaagacggtggattcaaaccttctggtaatttcccgatctatcaacaaattaatcctagatttcaaaaattctgcaaaacaaagaaacaaaaacagagaattggtttaggtaagaggaaacttacgacgctgattccgtgacgctcggctctgaaaacaaagacaagaagtgtagagacgataacggaaagaagtggtgctccggctgagacccaaaacagcttcggcttcttcatgctctgcgttaaatttccattcttattattacttaagaggaaaccagatcaaagtatgtaatagctatttaagtcattaaattaattatatatttaacatttttgatgaaataacaatttgtttttctactccaaaacaattagttcgttatttatggcgggaagaacgtatagagagaaacaatgacggtccatcgtaacaaatgttgtacatgcatattgagggagaatgaaaatgataaatgaatagtgaga

SEQ ID NO: 25621 - DNA, 597 bp, Arabidopsis thaliana columbia
gctctgtgttaacaccatcacatcttgtgcaaactcgctcttcaaccctgggcttacctacaacatcccatcacaaatccgagttagacttttactacgattaaaatggtttcactttttctgtatccgaaccaaacccgtaaaaccaaaaacatggattgaacacccctactagatattagctagtattatgcccggtaaaaaccatattgcaggatctatggtcatagaatacttagtaaacggaaaaagaatcactcacatcataaagcacttccccaagtttcatcttgacagcaccacttttgtagactaacagtttgcccatgtaaccttctggcaaggcttttaaatcaacagtcttcttctcaacggggcctttgatatttggccttgtttcaaggttttctgttggtgttgatgcaaaggaacagaaggtagcctcataaaaaacattttctgttctccactatcctcctgccaacaagtgatccacattatgtaactatagagtttgcgtgtgagttttggtttatcgaatttttatatgtaatgtcactaaccattagaccgagattagcggctgtgttaagtgaa

SEQ ID NO: 25622 - DNA, 503 bp, Arabidopsis thaliana columbia
gtcctcgggatagtagacgtaaagcatttcactcaatacacatgtcttggaatgctctgcaagtgtctcccacatcctgtttgacatgccacttccaagaatctgaaaatcagagtaagagtcatcatgatgaataataatatttgaacatcttggtaagatactggatagttaaatcgtgcactcacagtccttagtttctgagagtctttgaccataagacgcaggaattctttaacattgtagattcctgctttattgagtttcttatggaaagccccgtcctttccaatcttttccaacctccagacctcatcatccaaagcaggtgggtaatgtttcttgtacactgtaggaaaacgaaacattaggcaaaagagaaactaagattcagatacatcaatgactaatatcaaaggaaagctagaacttacactctccacgatggtccttcacggtaaaagcttctgtttttgcctcgcgtacacgcattccctcacagt

SEQ ID NO: 25623 - DNA, 537 bp, Arabidopsis thaliana columbia
cactttatccagtttgtttgtggtctttcctaagcggacgttcgatgttctctggttgtctatctcagttgaggtgtcactatattagtgtagtcttcaacatcttacctttattgtgcatcattacgagcgaatcggattatatttctccacggggtagctgatctctaaaagattaatttgtttcgacttaaccataacctccataataacataattggaaaatgcttcataaaataaaccctaattttttacatcattcttgagcaaaaaccctaactctgtctcaaaacaaccttgtttatcttttatattgagtctttgagtatataataacaagagagttaagtgaatttgtttcccctttaaacaaattcattgtgtgactttcggaatcaacagttgccaacaaaaataatcctctttccaagtccattggaatattaaagatctcttttggtaacttcgtccttcttgatcattctggtactcctgtttggtcacaaatctgacgagaactgtgaaatctccagtggt

SEQ ID NO: 25624 - DNA, 498 bp, Arabidopsis thaliana columbia
gtactatcattccaattttctccagtctatttcacaaaacgtaatacaatctttaagtttgtagcaagaaacataatctatttcacattgtgaatttctcatgtatccgagatcaacaaaaagccaagtttgtaactaaaattataaacatctttgtaaggatttgatttgcttaccttatcaaagtctttattgtgtttttgttggagctgtcgtgttaaagcctgtttatcctcagacaatcggagccttctctcacgaatctgatattgtactctagctagtgtttgcatgctttgcaatgtagatgtggcttgacgtctcacacatttcccctggactaaagattttagcctcacaagacctctcaacgcacgcaatgctcttcttgcctaataaagggtaaccaaaaagtatgaactttgttccattagttagcaaaaccacctttatagttactagacttgaaaatgttaaaaaacaaaaacgttaccatat

SEQ ID NO: 25625 - DNA, 597 bp, Arabidopsis thaliana columbia
ccagtgtgctctaaagtgccagaaaggcaggcgttaaaaggcctgatgctgaaatgacgtcggtgacgatccatactgcgggctactgcctatactccatggttgttaaacgggagttaaacatatcagagacgcctctgatttggcaaagatttaccttcctttgcaaacgaatgtgacaaggatattttacctttcgaaatttctgctaatcgaaagttaaattacggatcttcctcacttaaattaattttttcgatatctaaaataaatcgcgaaacgcaggggtttttggttgtagcccttatctgaatcgattcgattgtggacgacgattcaaaaatacatctggcacgttgaggtgttaacgataataaaggaggtagcaagtgaccattgctattgttataggcacacatggttgggctgcagacagttgcttaaaacggcagaaatgctgttaggcgagcaggaaaacgtcggctggatcgatttcgttccaggtgaaaatgccgaaacgctgattgaaaagtcaacgctcagttggcaaaactcgacaccactaaaggcgtgctgtttctcgttgatacatgggga

SEQ ID NO: 25626 - DNA, 602 bp, Arabidopsis thaliana columbia
ccaaataccaaataaaaaaagacaataaagataggtaatctagaagattcaagaggcctgtaacgatcaacacaacataaagacgaatgagcttacttgattttttggcatttaaccacaaagacgagctttcgcattttgactctttcatatctttaaataataaaaaataatattgaatgagagacaagtttaaaacctttatattccatatctgtttcaatcagtatttgggtctttttttgtttgagctgtacgagatgaaattctcatatacagttcttggagggggagtaaccttggtttacctatctcaataaagtttatgattggttcgaagaacgtcttgagattcaggcgattgcagatgatataactagtaaatatgttcctccgcatgtcaacatattttattgtctaggcggaattacccttacttgttttttagtacaagtagctacgggatttgctatgactttttattaccgtccaaccgttactgaagcttttgcttctgttcaatatataatgactgaagctaactttggttggttaaccgatcagttcatcgatggtcggcaagtatgatggtcctaatgatg

SEQ ID NO: 25627 - DNA, 347 bp, Arabidopsis thaliana columbia
caagccacaataaaccacaaaccgttcttcaccaatatatatatctgatcatcatcaaagtcctactctctgctcataccacaaaccgttccattcttcccctaatcacatagtgatatttacatagagaagatagagatgtgaagttcaccatgcttgtgataagtttggagtgtagaatggaccatggtcaccagaggaagatatcatcttggtttcttacatccttgtacatggtcctttaaactggagatctgtgcctactctctcaggtatcttcttcgatcttaagattatgtttttttaatgaacaatagttatatgttaatttcatttgttaaccccta

SEQ ID NO: 25628 - DNA, 404 bp, Arabidopsis thaliana columbia
tgttgaggatgttaggagggagattcagattatgcatcatttagctggtcacaagaatattgttactattaaaggagcttatgaggatcctttgtatgttcacattgtgatggagctttgtgctggtggtgagttgtttgataggattattcatagaggtcattacagcgagaggaaagctgctgagttgaccaagatcattgtcggtgttgttgaggcgtgtcattctcttggtgttatgcatagagatttaaagcctgagaatttcttgttggttaataaggatgatgatttctctcttaaggccattgattttggtctctctgttttcttcaaaccaggtaagcgttaattgcgagtttctcattgttctgaatcgatttaagtaccatgatgtgttttgt

SEQ ID NO: 25629 - DNA, 252 bp, Arabidopsis thaliana columbia
ctatgtccaacaatgtctttcattgtctgtggataatccccaaacatagttgtgtccagatgcctgaaaagaaaaattccattatattcagatttcattttctttaaaatatttcagtcttattaactacttaccatcccattataaagtcaagtgcacggtcaatggtcgcaccactttgttcatctttaaagtcatgtggttcaaaccaagccggactatgtgcgattccgatctttccacccttacact

SEQ ID NO: 25630 - DNA, 523 bp, Arabidopsis thaliana columbia
ctgattctaagtctttgatatatgtatttcgtcaagtcatcgtttttaaaattaattaccttacttctattttgtcatccttgcaaaaaaacaaattaacgagcacaaaaaaacatacacaaacaaattaagagttacaaagtatcaagccgttcgcatagattctttacacagagcctttcataaattagaataattaatttccatttttaccccatgattttatcagttcttatataggctttgatacaaagagaaaaaatttagtagtgagttatatttttagcatgcttttccgacccggcaatccaatgctccggcgtatttggtaagcttagaaacggccataccatttttgggctttatcatctgttgcctagaatgcgaacacttgaaatgaggatttccagattgtctgaaatatgcattgttcatgaaaacatctttctcggatctccagttccagtttttccattcgctttctgaagcataatccctctttgtcacctatatatacacatgt

SEQ ID NO: 25631 - DNA, 445 bp, Arabidopsis thaliana columbia
tttgttattcctgtggccatgaggtaaatgtcaatggtactgataagccattcttgagcattcttcgtatatttgaccaacccattaaccccagtgagaaatgcacatgtcaactatgtccttaacaaagaaattgttttgccagatttggaaaattttgtgggatagtgactgtggagtcatttgctgcgtctgcaatgggtctaactgttggagctatggtcccaagcacagaagctgcaatggccgtgggaccatctctcatgacagttttcatcgtatttggaggttactatgtcaatgcagacaacaccccaatcatcttccgttggattcctcgtgcttcattgatcagatggtgaacaccttataccaaattactatacagcgatgatgaccttatttatatatgaactcacttaagtcttagcaccactcgtctttg

SEQ ID NO: 25632 - DNA, 503 bp, Arabidopsis thaliana columbia
tgtgattataggaacgttgtgagagtttatgttctgatgaacttatatcttcctcagatgccttttacctcaaggtactaattttgtttcttaatctcttgtttactcttgattggttttgaacttaaatatgaggttaatttagggtttgttttgtttatagacaagaaagccttataccatcactaaacaaagagagaaatggacagaagcagagcatgagaagtttgtagaagcattgaaactctatggcagagcttggagacgaatcgaaggtgtgtgtgcttatctgactttagagagtctaatgcacattctaatctaagtttgatgaagatataagacaactacttggaccctagtaatgagtagagatctgacttttgttggttcttctatggaacagaacatgttggaacaaaaactgcagttcagattcgaagccatgcgcagaagttctttactaaggtttgccttcttgcagacccttatacatgacacag

SEQ ID NO: 25633 - DNA, 966 bp, Arabidopsis thaliana
tgctttggctactaatgcagggttcttaccaatgattcaagacttctgagacagcactgaaacgcttttccattcaacttccgcaatgtttcagttttcaaagaagttaaaagcactgaaaccaagaattaaatctgatgagtaaagccaagttgggtgatctagcgaggaaaacgaaggaaatttttgaaactctttgtcgatgtcagatggaaacgttaatgaatccaacaacatcggcaatgcgaatagaatctgcagcttatagtagatgggtgcacctctcgggcttggaggaaaaatatttgaaacaaaaatcaaagctccattggcttaaggttggagatggcaaaaataaagtgtttcacaaagcgacaaaggttagagaagtacgcaatgccatcaatgagatcaaatgccctgatggtactacagtggacacacaagaggagataaaaaaaagaggctgaaagtttttttcatgatttcttagctcacaggccagctcactataagggtatttcagaggaggagctgaggaagctagtgcagtaccggtgtcagaagcagatggaatgcagttggaaagagaagtctctactgaggaaataagagaagtgttattctcgatgccaagtgataaaagcccgggtccagatggatacactgtggaattccttaaggcaacgtggcctatagtaaagagagattttgaggtagcagtccaatctttttttctctatggattcatacctaaaggagttaacaccacaattttagcactaataccaaagaagaaagaagccacggagatgaaggattataggccaatctcttgttgcaatgtgatatataaggtcatatccaagattattgctaacagactcaaaaagctactcccggatttcatttcaccaaaccaatctgcattcgtcaaagatcgtctactaatggaaaatgtgttat

SEQ ID NO: 25634 - DNA, 537 bp, Arabidopsis thaliana columbia
tcaaacaaccaccaccaacatacaacacaggcttcttagactcagaaatcaacctaacaatctgctccaaatgagaatcttccggaggtttaggcatcctagacatataaccaggtaatctcatagcctgttcccaattaggaatcgcaagctgttgttgaatatctttaggaacatcaaccaaaacaggtccaggtctaccagaagtagctaaaaagaaagcttcctcaataatcctagggatatcttcaacatccatcacaagatagttatgcttcgtaatcgaacgcgttacctcaacaatcggagtctcttgaaacgcatctgtaccaatcatacgacgagggacttgtcctgtgattgctacaagaggaacactatctaacaacgcatcggctaatccgctaacgagatttgtagctccgggacctgaagtggctatacagatacctggtttacctgaggatcgagcgtatccttctgctgcgaatacacatccttgttcgtgacgaggaaggacgttacggattgaggaag

SEQ ID NO: 25635 - DNA, 496 bp, Arabidopsis thaliana columbia
ctggccctgcttttgtctagcaccataaaggaaaaaggttagccaagcaagagtagatgctggaacatatatagtaacagattcaggggaaagactattatcctgatgagcaaaaaaaaatatcacaacaaaagacttacatatatcatgtcttggttgtacctatagttgaggttgtacaacactgatggctcatttaagtaactaagctgcataagatcgtccactccatcaagaatatcaggatttgcaggtactagagtctctgatatgacttttataacctgtttcaagtttgaaagtagtttcagatcaaatacttcaaaaattaacctggctaccttagaaatacaaaaagttacttacttttccttcgggcaaagatataacagactcctcccctgaagttgacaatatcttcccaagctcccagttaccatttggaagttgaatccaagattgcagtatctaaagttaaaaactgtcaaaatttcat

SEQ ID NO: 25636 - DNA, 620 bp, Arabidopsis thaliana columbia
tttctatatattttatgccattgaaatgaaatttatataaataaaaaaaagaaatcaaaagtataggaaagaagaccgacaattgccaagaggtaaccccgagttcagcaagcttagcatccgaagtttgtctcatgaccttgactccatgaatttcagtgggaacctcaggagcgaatatcgaatcatgattaagttccatagttgaaactcaaactaaatgatgaacaaagaagagatgaatatgtgttgtttcataaaagatgtgtccatatttaaaaccatcgcgtaacaacgatagtagggtaacattgccgtaaatgaaataaggttgtacgtcctgataataacacattgaactacatgacaacagagagaaagttgtggttgctataattctagtactcgtaaatagtgccgtcccatgtttttagtgtggctagtactgatttttttagggacaccgaagatattaatacaatcgaaatatttgtaatgtcactatagaaaaaggacgaaattaattgagactctcccgacacatgaaaaatctcatgaatataattttgatgttgtcgttatcagtttttgattgtgttaaatatgtatagtagatagag

SEQ ID NO: 25637 - DNA, 571 bp, Arabidopsis thaliana columbia
tgatgtgaaacatattatgaggttttgtgagcagagattgtatggtggtttggaccgggttgctcggtctcttgaagttaaccgggcggttgggaaatgtcatcaagccggttcggatagtttgctgacgtggcaggcgtttcagaggatgagggatttgtatttcgttgaggatggggcggagaaacacgccggagttttgtatggtttagaggttttttgagggatttataattaattaatttaattaatctttgttaatcatttatacagtcgaaatcgaaattatcttattcatctctcgttttaaccaaatccaaaaaccaaaacgaaataactcaatttggttttgtttaaccaatttacacttcaaaactttttgtgcagtaaaatattatcgttacgttagagctaggctttgaggtataactttgatttttgttggtgttgtttaatagtttacatctagtcatggaatcataaattgaaattattcacaatattgtaacatctatatatagagagagatatgaggaggatttagttctcattttgaagaagtttggtgtga

SEQ ID NO: 25638 - DNA, 516 bp, Arabidopsis thaliana columbia
  unsure (1)..(516): unsure at all n locations
tctnnnnnnnnnnnnnnnnnnnnnnnctaaaggtgtaatagacctgaatcgccagtttgatattaaatgccgccagggtacacaagttagcaatgcataaaaccagcaatggcggattccgaaatatcgcgcaaaatgatttgagaatactggctttatgtccggttggcgttgtgtccacataatgctctttgacgcctctgtagcacagcatcataaaaataaagccgccaatggagaacataagtgccgcacaggcataaccgacggttgagtcagaaaaaagcgactgcaacggaataaacgccacggtacaaatcaatagccctatggttgcaccaccctggcggtaagcgcgagctgcgcgcgctcattcgggtttttggtaattgccgggatcatcgcaccatacgagcagttcatcagactgtatgaaagtccaaacatcataaacagcgcggtggcaatcgtcgttttaaccggcaaacaaaaggtggtggcgataaactggagcgt

SEQ ID NO: 25639 - DNA, 574 bp, Arabidopsis thaliana columbia
gcataaagatagtttcagttgaactgaggatataaaccatatccataaggtcaagtaacaaaaaccttgttgatgcgtagccatttggaaatgcattcagaatgatacacatgcttgcacggcagattcatttgcctctcccctatcttgtacttgagctggcatatcacacacctgctcatcacaagcacacttatcactttatcagcataatcctgtgaccaacattattacaagcttgctatttacctctccccagctcttttcctggagaagatgctcccaaacttatactttttagtgggaagcgtttctatgagttcctgagacaaccccctgctttctgttcctactgcttcccccagctctactaattcctgatccacaaaccatacaacttatttgttgcccgcatctagatgtgaatcactccctctcttgaccatcttcgtcaatcaatcaaactagaaagaaccaactaggaaactgaaacgagcctcataggtcattgtatcaggatcaatgtcatcttgccaggatacatgtggcaacatggcattaacgagcatataga

SEQ ID NO: 25640 - DNA, 527 bp, Arabidopsis thaliana
  unsure (1)..(527): unsure at all n locations
nnnnnnnnnnnnnnnnnnnnctaaagaccagggtgccatttgccgtcggttgcgaaacaatactcaggttattccattgctgatttcccagtgacaacataggcgtacgtaacgttatgtgttgtgggaaactcgctgcaccaccgacactctccgcagcgcctttctggaacagggccagccactcggcaccattcatcggcggcatattgagttcaacgccactttgttccggcaacggcgggacgattttactgtctgccgcccaaatagcacgatcgagcgtcacgttttgaccgagcaaccagcggctattgaaatgattatccgcaccagcctgtccggttaattcaaagctgttgagattgccatcaaccttaacgtttaccgctagtggttcacccgcaggtttggctaacggtgaaggtaagtgactgctcacattctttagatcgccgttcagctctatgttataggtcgcaccagcatgataaggcagatcaatgcccactttaccatcccacgcc

SEQ ID NO: 25641 - DNA, 574 bp, Arabidopsis thaliana columbia
tgtccatcatgcccttaagggatgtgtgaaccttaaaagacaaagatgtgtttgaagttttcatcattctaacctattagaacccgagccttttgtttcattattggcattaaagataagagactgaagatgcccctgatgtataactcttacagtttcttttatacgtttgcttaactgccaacattgctgacgtctgtgcagaaatcaggagggtctctagttttcctgatcttgatagatatgagcatggcagtccatttagatcgcttggtcagccgacaaatggaaagcttgatttagagggatggtcgatgatgcaagccgaggtaagccactgctgatagttgtagtcaattaactgattcatgttgaattgtaatggtgatactaataatttttataatcaagagtgggctttaccgatattgattgcttttgctttcttcaggaaaactgtcacctccagagagcttctccatttcgcggtccttcccagtgggctggattgggatgcgggactccctacccaccattgtgaaaaagtgattagcttgatgtccagtggataaat

SEQ ID NO: 25642 - DNA, 607 bp, Arabidopsis thaliana
  unsure (1)..(607): unsure at all n locations
nnnnnnnnnnnnnnnnnnnnnnctaaagaatcggatgcaatcgggtgccggaaccgcccgccaggataatacctttcatgtttgcctccgctgaaaattagcctttcagacctaaacgctcgccctgatagctgccgtcctgcacctgcttccaccagctttcattagccagataccactgaaccgttttacgcattccactttcaaaggtttcctgcggcagcagccaagttcacgggcaattttcgaagcatcaatggcataacgcagatcatgccccggacggtcagcgacaaaggtgatcaggtcacgatagtgcgccacgccgtgcggcgttgttcggagccagttcttccagcagctcgcaaatggtttcacaacatcgagattcttacgctcgttgtgaccaccaatattataggtttcaccgactttcccggtggtcgcacgcaatacagcgcgcgggcgtgatcttccacatacagccagtcacggatttgctgcccgttgccatataccggcagcgatttcccgccagcgcgttgaggatcatcacgggatcagttttcccggaagtggtaaggcgtagttatcgcacagttggtga

SEQ ID NO: 25643 - DNA, 535 bp, Arabidopsis thaliana columbia
agtggaccgggttcgtcgtcggaccggcaaagaacttcggtggttaacgggttgaggaagaagctgaaggatgagatggaaaaatttagtcgagtgagagaaacgatcacgaatgagtacaaagagacggttgggagaatgtgcttcaccgtcaccggcgaatatcccgacgaagctaccctcgagcgtctcatctccacaggtaataattttttccaattctttcttaacaatttttttggtcaatttcaaaattcaaattctaaacgttaaagagcaagaaaatagcgcaagttgttaaacctttttaagaaattgttagtttataatttggttaaatcatgatattgatataaattggaattatattgtaggtgaaagtgaaacatttttgcagaaagcgattcaagaacaaggtcgtggtaggattttggacactattaacgagatacaggagaggcacgacgcagtgaaagatattgagaagagtttgaatgagttgcacaagtgtttcttgatatggctgtgttggttg

SEQ ID NO: 25644 - DNA, 433 bp, Arabidopsis thaliana
  unsure (1)..(433): unsure at all n locations
gggtaccgagctcgaagtnnttgttctataggtcttactactatggacaaaggatgttgtggaataggaaaaaacagaggacagatcacttgtcttccctttgaaacgccttgtcctaacagagatcagtatgtgttttgggatgctttccatcctacagagaaagttaatctcataatggcaaagaaagcgtttgctggtgaccgcactgtcgcgtacccgatcaacattcagcaattggctagtctcaattaacgattatgaagactatcaacaagacataaaaacttggtgttgtctttgtagtttcttctttgtaaggttttgagtcaaatctgttttcgttttaagacgtattgaaaacgtctactgtgtcacacttaacggtccagatcaatgtactcatcgttgcttcctttgtttcttaaatatc

SEQ ID NO: 25645 - DNA, 461 bp, Arabidopsis thaliana columbia
tatccttgtgtattgtagttacattttccataatctcattctgcttataatctgtcatcaggtttaagtttccataccctctccagtggggacctcctacattttcagtaggccattcgtttgctatgatgtctgcggttcttgtatccatggtcgaggtaatgaagcagcattgttaatattcattgcaagtaaacttaagtttgattttgttagaggagaaaatgtgatggttaagttaatggattgtgcagtctactggagcttacattgcggcttcaagattagctatagccacgccgcctcctgcttatgtattgagtagaggcattggatggcaggtgaatcaatagtttgatgaaagaaacacatttatttacatatcacaccttcttatgtatcttacatatgatctgctatgtttcttcttaaaactcagggcattggtgtattgcttgatg

SEQ ID NO: 25646 - DNA, 846 bp, Arabidopsis thaliana
attggtcttaagcgaattttcatatcattttgtctatatcatcttattttaatatttttatgttcggatagggctgtgacgccttgcagctcatagattcaaccaattccgagaaaactgctggaccaaacggaagcgtcagggaatttgacctgatagaccggatcaaggctcagctagaagctgcatgcccttccacagtctcatgtgctgacatcgtcacattggccacacgtgactcggtggccttagccggaggccaagctacagcatccccacgggaaggcgtgacggtagggtctcaaacaatcttgatgtaaccttaccgggtccaacgatctccgtctctggagccgtgagtttattcacgaacaaagggatgaacacgttcgatgcagtagctcttttgggtgcacacactgttggtcaaggaaattgtggtctctttagtgacagaatcactagcttccaaggaactggacgaccggacccgtccatggaccccgctttggttaccaggtaattttaaaccggtcatggttcaatcatacgccaccactagagtcaaaaattaattttatctttcgattagcaattttttttataaattacattcggattttataactttttttggaatatttagtcattaacaaaatatatatgtatagttttctatatttcaaaaatattcaactttattttatttttaaaatattattctccatattgaacattatttacaggaaaaaaaaaacagttttatcattaattaatgataatttcaaaatgttaaaaaaaaaaacaagcttaaaaccaattttttctaaagttaaacatatttga

SEQ ID NO: 25647 - DNA, 668 bp, Arabidopsis thaliana
cattaaatcatcgcaaacgtcgcaaattgcgaacctacacggaagacagccttaagatagttgtatttacaaagcaaatttcatcgactactgtggtagagtaatagagttatatatgtcttattatgttatatgtgtaattttgcctttcatgttgtcgtgaatgactcaccacatccacactttgtcgcgtttggattgacgaacacaaactcagacctgtgccaatacaatgcaaacatgtttaccatgaataaagagagtgtcaagattggcacgtgaaagggcacaaacctaagcttatcgtccacgaaatccatctctgtcccaatcacatgcatcaccgcctttggatccacaaggatctttacacctttctcctcgaccacctcatcaaacttccctttctcctctgaaaacaaagatcatagcagaacaacgccaaataggaagcctcaggagtcaggacacatttaagtcatctattaaaagttctcaaaagtgctacaaaacaaaaggtcttaggttcctaggaaggtgacaaaacctacctaaaacttgactctgaacctgatagaatatgtgcgtttaattattacatcatctctctagcaatatgaactcctctcatcatgagcacaaatatatatcacataattatgaggaaa

SEQ ID NO: 25648 - DNA, 457 bp, Arabidopsis thaliana columbia
aacatgcatatccagttcttagcctacacgctgaatagcctctagttgagtattttcaccttctacttcgagagatacaatcccagctataggacccaatgttaaactcatttgattttttaaagttagttatgcacatatatatcataacaaaagatattagaaacaatgggaagtatattgaacaaattgtacctggttgaggacttatcttaagatatgctagaaacgacgcctgccgaatatttcgacatcaagaaacctctcctaaattttacattctctcccaagattgcatctacttctgtaacagcgtttgaaacggttgtttcaccattaacttttggatgatccaggttaagcttgaactcctgatagcatccattagagtgattagaaatgataacttgatatcaatatctcagacagtacacaggaaacaacataaatccataaa

SEQ ID NO: 25649 - DNA, 536 bp, Arabidopsis thaliana columbia
catctggttctgacccacatgtgactttaagggccttagctcgctcaacgagtttatcctccctggttagtattagacaagttaaagctaatctttcatgactgtcaaatgaaaatcaacaggcctcatacatattcttcagttacatttagtattaggacacaacaattagtcaatctaaattaaagaaaatggtgttatcttaactatcctatatatggcttaagcaccctaaaggcgtggttctggaaaccgtacgagagaaaaagattacaggaaaatgtgtttatcacaagaaatataagatattcgagaaactggagtaatttgaatatataaagtaagcagtaccatgattttgcatcgccaacaaaaaccactgtactcagtgccatgcatctctgtccagcggcaccaaacccagcagcaagtagcgcatttaaagttgcatcgatgttggcatcaggcaagacaagtccatgattttctgccccatatttgactgagtcaatatattataagcaatttgacatagt

SEQ ID NO: 25650 - DNA, 535 bp, Arabidopsis thaliana columbia
caccccatgcttcttcctgaaacaaattgaagaaacaaaacaaaacagatttcagaaaacaaatattcaatcaaattaaaaggttctgtttttttttttagcttaccgcaaattgtttaggctcaggccaagccatcttagtaaacttcttgacagcgatccaacgacggttctgaagtcggcctttgtagacaagatttggggctttctcaccactttctgatacgatgttgtctgagctaaagttgtttgtagctgctttaaggtcagcgaaagagaactcagagaaagatgggattcctcctcctcctcctccgccgcctacaccactagctccgccgcttccgccgttatcagccgtcgtagctccgccgtgattgttttgagatagtggttgcggctgaactccatctttcccaagtgggttatcgccggaaaacaaggattgacaacaacccatcaaactctttttccttacccaagtcggaaagtgtttctctttcgctccttgtaagagagagaaagagttgatagt

SEQ ID NO: 25651 - DNA, 570 bp, Arabidopsis thaliana columbia
  unsure (1)..(570): unsure at all n locations
cgcttatacggtttctgtactacttcctctgaacggcttctcgtttatccttacatgtccaatggcagtgtcgcttctcgtctcaaaggtagttaattaaacaccttgattttgatttctttacatgaattgacccggtttacgattcgtgtgaatggtttgcagctaaaccggtattggattggggcacaagaaagcgaatagcattaggagcaggaagagggttgctgtatttgcatgagcaatgtgatccaaagatcattcaccgtgatgtcaaagctgcgaacatacttcttgacgattactttgaagctgttgtcggagatttcgggttggctaagcttttggatcatgaggagtcgcatgtgacaaccgccgtgagaggaacagtgggtcacattgcacctgagtatctctcaacaggacaatcttctgagaagacagatgtgttcggtttcgggattcttcttctcgaattgattactggattgagagctcttgaattcggaaaagcagcaaaccaaagaggagcgatacttgattgggtaagaagtaanagagtaaaacatt

SEQ ID NO: 25652 - DNA, 511 bp, Arabidopsis thaliana columbia
aagcaactattatcacaatcaatggaatctccagtctactctatcataccaaccaaacggatttcaaaacacactcaccttcttgtagagagcatcaagagggtccgtactaatcgtgtaaccgactctaaaagtaggaacaccaagactctccaccatattcctactcacagccccctgcattgtcgtaaaaggaaccaccgatcccaactccacaccaggagctgccactacctccttaacagcaacagcagcttgaactcctcctccagcagcaaccgcctcaacatctttagccacaatccttcccatcggtccacttccaactaaaccagccaattcaaccttcaactccttagctaacttcttagcataaggagacgccacaatcctcttccctccttcagacgccggatgcacgcagacgccgccacctgcttaatggacaccggagcagctgcaaccttcttctcaacactcacaggtgcttcaactgcagccgtgggaggag

SEQ ID NO: 25653 - DNA, 365 bp, Arabidopsis thaliana
tgagttcgaagaccatgaaacgctccgtttgatgcctgaatgctgccacgtgtttcatgctgattgtgtaagtgtctggctctctgatcactccacgtgtccactctgtcgtgtggatctttgcttacaaccgggtgagagaagctacttgaatccggaaccggatcttgtagaatctagaaactcgcatttgtttgatggtgtgacgtggaccactaggaacacaccgtctcagtcatggtcaacgagattgtctcaatgtcgagtctcccagatattaatctcgagatcgcattcgactggacattctgtggttcaaccgctagataatttagaccggtttacgcttcggttaccagaagaag

SEQ ID NO: 25654 - DNA, 403 bp, Arabidopsis thaliana columbia
ctctttccaataaaccgaaaatgtgggtgagaataaagaaaagtgaaatgttttgggtcatattcatcataaaatgcaaatagcggggcgaaaagtatgaagatgggaaaaaacgaaaaggactgaaagtgaaagggcttaaccaaaagcaaaatactgggtcccacaacacgtggcctgtgtcattacttcttcttctccatccatataaagaagaagaaagagatgagatgcaaggtagtatatgcagcaagaacagcaacaagaaccaaagtaacaaaaacaatctctaaaaccatatcaatgggactacaaggtcagctctccgacgtgtcatcagattcgatcccactgatgctactggctctcctcgcaactttcctcagacacagtcggtctcttc

SEQ ID NO: 25655 - DNA, 421 bp, Arabidopsis thaliana columbia
tattcatttttgatattgtatagtatatagtattaattagatctttactcttcatagtcatcgatcaatacacataacattccctaataagttaaattagtggctacgtttgacgaaaagccctcgtttaaaaaaaaaaaaagagaagaaggaaatcaggaaatgatctgattcttcgacgaaaggggaagaggttgttgaattcaaaatctctctctcttctctgtctctctcgcgtgagctagttgcagatttttccagatctcaacattgaaattcaaactcaaagctagagagggagagagatagatagatagagggagaagaagaagacgaacacggagctgaaacaatgattacgatcccataccttaccgctgtatcaacgtatttcagctacggcttgcttttcgcgtttggt

SEQ ID NO: 25656 - DNA, 508 bp, Arabidopsis thaliana columbia
cgtacctttacctgtggcaaagatttgcagaacgagatacatttctgtttagaggacatttcgggtgactcaactaaagaagacgttctgtactaagcaaaggtacctgagcaggatatggacttggatctgtcccatttggagaccaagctttggaatcaatgttcagttttccttcactagcagcttcaaagatgccgtgaagtgttctgtcactgtagttgaacaggaacagcgtcaaaccaggatcaatgtccttgatataagccatgtgcggggctggtaacctgttcacaaaacaagcatcattttcaaaatcctggtcgtcattaaactttaagcctcaaagattgtatagccaactaaccaaacaaattcttagcatagcactctttgatagtgctgaacttgcatccaaatataaccccacaaagatctcccttcttcagattcctcacacacatatttccttatcctgatatgtattgccatcctgagccaatgtata

SEQ ID NO: 25657 - DNA, 500 bp, Arabidopsis thaliana columbia
tgcctgcttcaaatagtcagcctgccccgtcttatgtccaaccttggaggccggaaactgactcatcccatccaccttctcaacaggttcagatattactttcatgagggagtagagtaaatttgcgcccttaagcttatttgagtttagaatgcttttctgctttcagctacttgataaaatgtgtgttattgtccttataaatcaactaagttgggaaaagagtgatagtaactgacctgttagctaccaagcaatactgcatagagtcaattcttaaatgttttatttgcagacagtttagacatgatctctgattgctttctttcatgggggtcctttttattgaatactaacttagtaatcattttatcatcattctctcagcctggtgcagctgttagtacatctaatgatacttactggatgcatcaagcaccaagtctgcaagctcatcatcctgttccacctcaaaataattaccagagtcctctggagac

SEQ ID NO: 25658 - DNA, 492 bp, Arabidopsis thaliana columbia
gccagtgtgctctaaagtagaagcggtaaaacccttgagctttacgctacgtgaaggccagacactggcgattattggcgagaatggttcgggtaaatccacgctggcaaaaatgctggcgggaatgatagagcctaccagcggcgagttattgattgacgatcatccactgcattttggcgattattccttccgcagtcagcgtattcgcatgatttttcaggatccttcgacctccgtgaaatccccgtcaacgtatctcgcaaattctggatttccactgcgcctgaacaccgacctggaaccggaacagcgtcgcaaacagattattgaaacgatgcgtatggttgggctgctaccggatcacgtcagttactatccgcatatgttggcaccggacaaaaacagcgtctgggtctggcgcgcgccgtgatattgcgcccaaaagtcattattgccgatgaagcctcgcttcactggatatgtcgatgc

SEQ ID NO: 25659 - DNA, 1561 bp, Arabidopsis thaliana columbia
ttgtttgattttgaagtttcaagagaaagcaagcaaaaggaggagacagcttctccatcacttgtcaggttagtatttgttttttttttcaaataatattattagcttattggacagcgaccactctttttcctaccacgtccttatctcttggacaatcttattacgtcatctctcctttttgccaagtttatgcaattattttcttctaaatcaatgttaatactatttttactaactaaagttatgttttgtagtattttcgagtaattatcaacatgaaattacctggattagacgacgaagtggacgttgagggcctttagcggcgtgagtaccgagccatggcgtatggcgccaaactgttttacgtccgagccagagatgagtttagttccaccgagaacaagctccagagaccacattccaggctgcatctgccacagcacgaagcaaccactatctccgctcctaccgtttccaccaccgcctagtgtcttcacactttttccggcggctatctccgtctcacagcaactcattttcattatccccgtcgcgtacatgtttttcgccgccttcgctcgctttagacatcccgtcgccgctaagtattgttgtattatataatgcgctgtcgacgtctcctgtaattatacttatgtattattaattaacaatccacatcatactaattactttgcataatcaaatggcaaaaaaaatcattggtctcagtgatgttttaacagacaaacaaattacatgttgatttcacatgttttggcccataacaaaattattaacctttgaacattttttcaaccaatcttatctcaaagataactattcagacgactttgtttggccaattcaaataattaatataaacctaccgtttgaaatttcgacacaacaaataaccagaaaatattttttttttctttttctcaaaggaacaagatagaaatataataaattaagaaacacaaataaaatttgtatactgaaaataaataaataaatataaaccaaagagagggaataattagtaatactcacaaatgggacattcttgatttggaaagaaccaagaagagggtcatcgggaaataggtcagagacgacaacggagattggagcaagaggacaacccaagacgccgagcaagagcctcaagtcttgtcccttagctggcacgtcatagctgttgcaaagtggttggaccgaagatgatgacatatttccagaaatgcccttatgaaccttaaaccattctctaattgcttcccatgagctctccttcttggttctttcgtcttgcatgtctggatctggtccttccattaacggtgttagggcttgtggcggcgttccccatctttgctttctccagtatgactttgagttgctcattctaatcaaagagtgatggtgatcagtctgatgtttgtgacgttcttgtgtgctgtttgaatatctaacacaatggtttttgctatggataccgattattggcgcatttatatatatgtatagagatgtatatgtgtgtagagag

SEQ ID NO: 25660 - DNA, 511 bp, Arabidopsis thaliana columbia
caactacaacaagaacagacaagaaactatgtaaattgatcaatccgatatgacctttgaaaggaatccgtcagcttttattacaaactaaacaatgtatctccaccaagtcttgctatacctttccagtagcggctgctgaatagatcaaaccatcctgcctccggctcagaagaaccttggccagaggctgataagtcgcgaactagttcaaccactctttctttaccatacaaagttttgatcgccttttcagcttcagagacttttccttgctgcaaaattgatttccttgacttgtcaaaaattgatctcattttaagtgttgagatctgttccttgagagtacctgaacgagccaccttgggctttctggagaaaaagccattcctatggccaatagaacggaagggataactgcaacaccaaacatcgtcctccacctagaagaccacgatatcagaacttatcacagtatgcaaccgaaaataaaagatgatgaataaaaagg

SEQ ID NO: 25661 - DNA, 828 bp, Arabidopsis thaliana
tcctatgcgcattattcaacatcagattgatcttctcccaggatcaagcttactgaatcttccccattaccgtatgagtcctaaggaaaatgagatattgagggaaaagattgaagatctgctgaggaaagggttcattcgtgagagtatgtccttgcgtagtaccagtccttcttgttcctaagaaaggtaaccaatggcggatgtgtgtcggtagtagagccataaacaagataactatcaagtaccggttcccaattcctcaactggacgacatgcttgacgagttaagtggttctaaggtcttttccaagatagatcttcgcagtggataccatcagatacgaattagacctggggatgaatggaagacagatttcaagagcaaagatggactgtacgagtggcaggtaatgccctttgggatgtcaaacgcccctagtaccttcatgcgacttatgaatcaaattcttcgtccgtttacgggttcttttgtggtggtttattttgatgatattctgatttatagtaaaaccaaagaagaatatttggagcatgtgagacaagtgttgcaagttttagaagagaataaattgtacatcaatatgaaaagtgtacatttatcaccaataagttgttatttttgggttttattgtaggagaagaaggaattcatgttgacgaagataaagtgaaagcaattagggattggcctgcaccaaattagtcagtgaggtcgcaactttcatggtcttgctacattctataggagatttataagagatttagtatattactttcatattactgagtgtttgaaaaggaaag

SEQ ID NO: 25662 - DNA, 504 bp, Arabidopsis thaliana columbia
ttgaatgcgaaaccgagaaccgcaatcttcttgtttgatacagagttgaacatggaggaaacaacacggttcacgaaccggctcttctggtagtcattgatcttgatgacttgcttccagtactctgccacttccgggagtccgttgcactcacagatgtagacaagattcagaatgtccttctggaaacacgaaccaccgaatccaacactcgagttcaagaacttgggaccaatccttgagtctgtaccaaccgcgtaagacacttgcgtgacatctgcgcctgtggattcacacagagccgacatagcattcactgatgaaatcctttgagccaagaaagcgtttgccgcaagcttggacagctcagcagaccagagattggttgttatgatttggccttcaggaacccagtgtgcatacacattcttgagagtctgcaccgctttaagaccttctggggtttccgccctccgataagaacacggtccggattaaataggt

SEQ ID NO: 25663 - DNA, 735 bp, Arabidopsis thaliana
agagaatttagtaatattacttttcctattactgagtgtttgaaaaaaggaaagtttcattgggtatcgagcaagagaaaagttttgatttaattaaggagaagctttgtaccgcaccagttctagcattacctgattttgataaagtgttccaagttaaatgtgatgctagtggtgtgggagtaggggctgtcctgtcccaagaaaaacgaccagtggctctcttcagcgagaaattgagtgaagctcaacataaatagagcacctatgatcaagaattgtatgcggtattttgacctctaaggaagtgggagcattatttaattgagagagagttcattttgttaactaaccaccaagctttgaagtttcttcacacccaaaaggtgataaacaaaatgcacgctcgttgggttagttttctgcagaaattctcttttataatccagcataagttaagcgcgcttaataaggtggcagatgcattgagtaagagagcgtcattgctacttactttagcataagagattatagctttgagtttaagaaggatttgtatgaaaatgatgttgaattcaaggaactttgggctaagtgcgacgagaagcatccttctgcagattttcatgtccgagaaggctacttattcaaaggagatcgattgtgcatccttgctcatcgctaagagagacgttgatcccagattagcatggggtggcttagtgggcatttggg

SEQ ID NO: 25664 - DNA, 593 bp, Arabidopsis thaliana columbia
aagaatgaagatgagtgcgtagacaccgaaaaggttccttattcgagtgccactggaagtgtcatgtacgctatggtgggaacaagacctgatatagctcaagcagttggagtgctaagtcgtttcatgagcaaacataaagaagctcactaggaggcagtgaaatggttactgaggtacttgaaaggctcgattgacttgaagttagtctattcaaaggagagtgttttcaggattcaaggcttcagtgactcagattatgcagcagatcttgacaaaagaaggtcaactacaggttatgtgtttactgtgggaggtaacacagtcagttggaagtcaaatctgcagaatacaatagccatacctactactgaagcagagtatgtagccataactgaagcggtaaaagaagcgttgtggatgcagggtctgttgaaggatatgggagtaaaacaggataaggtacttgtgtggagtgattccagtgtgttatcacttgcaaagaaaaatatgttcccgaacgtccaagcatattgcagtcaagtccattttacagagacgtgattgagaatggtgatgttgaagtcttaaga

SEQ ID NO: 25665 - DNA, 593 bp, Arabidopsis thaliana columbia
ccagtgtgctctaaagcagacgatcgccgtccatacgagtaaagcagatatgtgtttcagtcgggcactgctgcgcttgcgttgagttataggttcgctcaatgatcacatcggcatcggcaaagcctttgtccatatcgccaatatgaccatgaatactggcggcgatatttttgcgagggcgagaaccgatcgggaagttgatgatcatatgctcgccgcgctgggctgcaaggctggttaccgtcttccagagtatctggcgcaccagcaacatacaccaccggttcatcgtgcacgacaggcgcatcttccgccattgcttcgtcgatcgacattaccggcttaagcacttcatattcaacgtcgatgagcttcagtgcttcgagcgcaatttcttcactttctgcgacgaccgcagcaacacgatcgccgacgtgacgcattttcttgccgaacatacggcggtcaagcggtgacggttccggtgcgctctgaccacccggggtatagtagatatccgggcaattcaggtgagtaataacgtgaacgacgcccggtaaggcttcagctttgctgacatccagatgagt

SEQ ID NO: 25666 - DNA, 523 bp, Arabidopsis thaliana columbia
gacctcaaatggactgatgtcctcaagcacaggagccgaaagtctgtttataagatgaacagcagagagcacacaatctccccaataaggaagaggaagatgtgattggaaaagaagcgccctagcaacattaagaatgtgttggtgctttctctcaacaacagaattctgttgaggagtttcagggcaagaatggaaagaaacaattcctttagattggaaaagttgagtgaaattgaattcttgagcattgtcagacctaacccccttaactctagtctcaaactgagtctctaccatagttaggaaactaggaaatatatgtaagacatcagacttgtttttcatcaaatagacccaagtagccctagaatgatcatcaacaatggtcaaaaaacatttgtaaccatcatgagtaggagtagaaaaaggccccaagtatctatatgaccaattaaaaggaacttacatatatgttgacagaaataaagggatatgtttttgatttgcaaatgacaagttt

SEQ ID NO: 25667 - DNA, 496 bp, Arabidopsis thaliana columbia
atcccttgacctggttgcatccatcccgagcccgtagtacccgcttgagcttgaacttgagactgggattgagattgagggtggcctgttgggcccatcctggatttggataagcttgtgtttgtccttggacaggcgcgacccagccagaatgagtgattccttgcacagttgagggaacagaagatccaccccaatttacattcactccagtttgagcaggaccaacccatcccatgtttggatttacagtcccttgaccccagctgctgttctggtttgctggagcctgaggttgtgctgagttttggttgttgttcaccatgttcataccccactgggcctgagcctgagcattcggttggcttggaactgcaaccttccaagaatcagatggaggaaatcctggttgactctgtgaggggagaacactaggagatggggtgccataagacgtagagttattctgagaagagggagtgttgcttctccatga

SEQ ID NO: 25668 - DNA, 455 bp, Arabidopsis thaliana columbia
agtgagaactaatgttgctttcgtcttcttgaaacaatctccgacgcccaagccttgcctatattagtctggaacttccctgaatcaaacagtaacaagcttaaagccttcaaccatattcagattatctatttagagtataatgacatacaacaaaaattacctgctgttgattggaaaaactcttctagatctttcccttgatctgcgttaaatagcaaacaaaaaacaatatgagtattagtttctgctaaatctcttatcgaaagagagtttcttttattggtcattcattaccttgttcatattccaaagcttgtagtatcagctcaactttatcgaaatctttgacaactttggcttcaggtgaagagttctcttcgtattctctccaaagctcagcgatttcttttgctgcaattacgatatatacatttttagaagtgatgataagt

SEQ ID NO: 25669 - DNA, 520 bp, Arabidopsis thaliana columbia
tagaatgttttatccacttactttagagataatgaattcatgacacccaattcttatgccgaatcaaaccggaataattaacgctaacgtcaccgaaaaaaaataaaataaaaataacaaaaatacaaaggaagaaatcagagaacactgaacatatccgaataatatgctatatatacaaagaacctctcaccacttggttctcaggaaaaagcacattctccaagtgtttctctcctctcttttcctaactcagttttcttatatacataacactaatttgacaatttttttgtcctcgaggatcctaaaataactccaaaactttgattggtttttcttgctctaaaacaaaaacaaaaacaacatattaagatgggattaaggatgtcagaatcagctaaaccttattttgcaatggtctgtcttcagttcggatacgcaggtatgaacttagtaactaaaaccgtcctagaccgcggtatgagccattacgttcttgttgcataccgcaacgctt

SEQ ID NO: 25670 - DNA, 833 bp, Arabidopsis thaliana
gaaaaccggcgactcaagaatctccggtgaagtcttccggtatctctccaccagcacctcaggaagattcacttaacgtaaactcaaaaccctctccggagacagcaccgagttacgcaactacgacgccgccatccaacgccggtaaacccccgtccgccgtagtccccatcgccacgtcagcatctaagacactcgcaccgaggcggatttattacgcaagagaaaattacgctgctgttgtcatccagacttctttcagaggatatttggtgagcaattattaatgacctatatttttactttcatttttttaaccaacttgacttctagaccactttttagtgacaatgatgtgtgtctatgtctataaaattaacattgcttatacaagatctaccatttaaaagattgggatttcatttagataatttttttttgggtcttgatataagttttgttctatctaatttggtaaggcaagaagagcattaagagcattaaaagggttagtgaagctacaagcattggtgaggggacataatgtgagaaagcaagctaaaatgacattaaggggtatgaaagctctggttcgagtccagtctcgtgtgcttgaccaacgcaaacgcttgtctcatgacggtagtcgcaaatccgcgttcagtgactctcacgctgtttatgaatctcgctatcttcaagatttgtcagatcgacaatccatggttagtatagcctcctaggccttgcctaaactatagcataatcaattgagatgtcgtttagttctagacatgttgtgcgtttgagtttagtcagaaggttaagctgtt

SEQ ID NO: 25671 - DNA, 461 bp, Arabidopsis thaliana columbia
tgtgctctaaagctatggacaaatcattggacatccaattttataatcactcattgccgagcatgcagttgccggattatcatatcacaaacagtagtctttcccgatgctgcgcctccagcaacacctaaccaattcaagtcacaacatatcaatcaagaccattcgtcaagctttttttatccacgaccatatattaatcaaaaatgaaagcaaaagcagaactcacctattacaaaaggctgtctttggatatcttctgatgcagaagtggtttccttaagtgcacttggttccaacccattcatgtgcccattcacgtgtaaaccagaaaaatgtgcccgcgaagcagcttcgatcatgtcaacaacggacttagaacccatcccgacgacaattctggacattgtacattggtaacataacttacatctttatcacaatcatgcataagcaaacac

SEQ ID NO: 25672 - DNA, 593 bp, Arabidopsis thaliana columbia
accggaacgccaagacctctccgccggtttttacaggtccaatccggttattgattttttttttgatgtaatgtccggttctcaaaatgttgaaccggtggtttatttattgtttgagcaggggttagatcctcgttcgacggcgaatctgtttcttgacgcaacgtgtatcggagagaagataatcaacggtgaggattgctttatcttgaaactggagacgagtccggcggttcgagaagctcaaagcggtccgaattttgagataattcatcacacgatatggggttattttagtcaaagatcgggacttttgattcagttcgaagattcgcggcttttgagaatgaggaccaaggaagacgaagatgtcttctgggagactagtgctgagtcggtgatggatgattaccgatacgttgacaatgtgaacatcgctcacggcgggaaaacatcggtcacggttttccggtacggtgaagcgtcggcgaatcatcggagacagatgacggagaagtggaggatagaagaagttgattttaatgtttggggccctccgttgatcgcctttaaatttctagtgaaaaacatga

SEQ ID NO: 25673 - DNA, 472 bp, Arabidopsis thaliana columbia
gaatgctctcaaggttaataatctctaacttcctcttgatgaaagatttccgtccatgtcccaaactgtaaaacctgacatgatgttgtgaatcttgtgtaggctcctgcatttacaatagctgcaaatgccggttacgatggttctttagtggttggcaagttattagagcaagacgattgcaattttggtttcgatgcagccaaaggttagaaacttagtgtctttgagaacattatcaatcgcaaatctcatcgatctctgaaagtgtctgccgtttttgtttcgtgttgccataggtaaatatgtggatatggtgaaagctggaatcatagacccagtcaaggtgatcagaaccgccttaaccgatgctgctaggtaaagagtgtcctaacaaactcaaaacctttggttgcttctgtggaataatatactaactccgtatcatgtgtgcgtgtgtcaaaatgcagcg

SEQ ID NO: 25674 - DNA, 572 bp, Arabidopsis thaliana columbia
tgatcactggttctttaccagctttttatgttgctaagttacaattcgaatattgacttacatgttagctatatctagttcttatacataacaattttcttcctatagagtggaatctactcatcaatttcgtggtacctcagtatcagcttggacttcccctacatgagatgggttgttattagagtcatcgcttcttctgaacattctcttaatagcttcttctttctcatccacaaactccacaaaatcaaacactaattctctcaaccgcaatgtaggagaagctgaccaagaagcgcgtggcatcgaggatgttctctccatccgtctgtaccgcacgaactggcgtatcatcctgagaacaaacaccaaaaacgcagagactgtgattgcaatgcagacaaggtacagccctttgaagcttttgagatgaagctggtttggctctgggttccaatttgatttccctgcgcaattcgtcttgcataaccatttctttcgaatttcttgcaatttcctcgtctcagagagtctcaagatagctgttgacatgtctatagccaatggag

SEQ ID NO: 25675 - DNA, 517 bp, Arabidopsis thaliana columbia
gttgttaatgaagtgcttgttcattacccttctttgagccgcattattcgatcatcgcttgttagattcttcttgcctaaccatcgtacaaaatcgggagacacttgctcgcttccttgcttgaagtcgatgacaacagaatcatctacaagaggtgttacctttgcaccgcttccggttttgactaaggctctgagcccagactggaaatcagagatgtaaaagtccaccacatgtctctgcaacataacattacaacgaagtgttttgatgggttgaggaagataatataacatttcctctgtcaaaacgaaaatattgggaagggaatcactaacctctgatgatctcagtccccatgtgaagtgacgatgggaagacttggctggtttcgaaccccatccacgatactcatatagacatgtcgatgtgtacacacatctgggaactctgtggaaggatgactcaagcggtacattaccacaagtctacaccttcaaacaataatacaagaatc

SEQ ID NO: 25676 - DNA, 660 bp, Arabidopsis thaliana columbia
  unsure (1)..(660): unsure at all n locations
tagaggatcaggatccccagtcaaacagatacgaaacccataagcctgcgagtcgctgtctcgtttactccaccagtacgcagtccatcagtcttacacatggttcaatcaagaccatcgtgcaaaggctcttgcttctttccaatcattggaaagtcccgtcttgctaaaagttcaacacacattgttgatgaaacccaaacagaggtgatcacacttcaaattaggtatgacaatctaaacaacattctctttcgaaaaataaacgcatttattgattctggtatgataaaactcagaccagttatatatatgattttactttcttactttgtcgtgttttaggaactccgctgatggaggaatacttaaagatgatcagagacaagttatgggtgtgacagactctggtgaaactcgcgtgcttgcggtttatactggtagtttctggtctttgctggactcgaaatggtcacttaagcaaataaacgcctccactgcagataatccgctctttgagattttgggcctcgagtggtatatccaccattttatccagtaaaaagagatgaatctcttgttttgcaatgtacccagtcaatgatcaatgcgttttatggtngcaggtgaaatttctcggggagaactggatatgaccaa

SEQ ID NO: 25677 - DNA, 562 bp, Arabidopsis thaliana columbia
gtgtgctctaaagcgggttgaaacgtgcatagccgtaccaggcttcgtcaaagtgcagacgatcggaggttttttccagcagatcctgcgcttctttagcgttataacacacgccgtcataggtgcagttggtcaccacgcagtaagacggtttttgcccggctttgtctttggtcagcgggctttcactgattttcttctgcaagggttccaggttgcatttcctgcggatagatttggcccgataatgccgtagcggttgcggcttggcaccatatagaccggtttcgcgcctgtcagcatcaaaccttgttcgatggatttatggcagttacggtcaacgaccacgacatcgttatcggtcatgcaagcctgcatgatggtgcggttagagccggaagtaccgacgactaccgaccaggagcgatcggcaccaaatacgcgtgcggcatatttttcgctttcgccaaatgcgccagtatggtcaagcaaagaaccgagggaagttcgttcgatgcccatgtcggtgcggaacagattttcaccatagtagtcatggtag

SEQ ID NO: 25678 - DNA, 511 bp, Arabidopsis thaliana
caatcactcttttttcatattgcatcaatcagaatggaaaaatgcattagataatggccatgtctaacatgacgtatttcctacagataatcgaacttcagcttccttctttctttaacaactttgatcctcgtgctgcagcagcaaacttcccatctagtaaacctcctagcacacaaaactttcatggttttttggtcattaaatcttgtttcttatacttggtaacaaaatgttctgtcaggtgtacaagcatatctagccggtctcacattcgcacttgctgcctcaccttgtagtactccagttctagccactcttcttggttacgtggctacttccagggtaactccatttcgtctccttccatttgaaatgtcattatctcaaatatgaatatgaaagctagttaactttccggctttgttttcaagcttttaagaaacggtttaagtttagcaaaaagctgatatggataaaatgtgaaaaacaggatccagtaattggtgga

SEQ ID NO: 25679 - DNA, 571 bp, Arabidopsis thaliana columbia
gttttttgaatcatttgtgttagatactagccattccagctctcccattgacgatgtcggctggtcttctcttcggtccactcattggcactatcatagtttctatcagtggaactgtaagtttattcttcccaagaacacaatccttaatctcatcaagtgaccttcccatgttgatatatgttattttggttttcctgtgttagatggctgctagtgttgctttcttaattgctagatattttgcccgagagcgcatccttaagttagttgaagacaacaagaagttcctcgccattgataaagcgattggtgaaaatgggtttagagttgttactctccttcggctaagccctctacttcctttctctcttggcaattacctgtacgggttgacgtctgtgaagtttgtgccttatgtattaggaaggtctgtgttcttgcaactttgttatacttatttccctatgatatccgctgtagaagcttgatacttgagttgtagtagtcaattagtcccagcacttaatgccacttggtgtttatctcaagcaatcttgaccaggagttg

SEQ ID NO: 25680 - DNA, 651 bp, Arabidopsis thaliana
  unsure (1)..(651): unsure at all n locations
cctttattcaacaatctttctttcttgcaggaaaggtgcaggacattcttcaagtctctcaagatgagttccacagaatcacaaagatcaatctcaccgctccatggtttctcttgaaggctgtagccacaaggatgaaggaccatggatcaggaggctccattgtcttcatggccactatcgccagcggagagagggcgctttaccctggcgctgatgcctacgcttcaacttctgccgctattcaccagctcgtccgggtatgcatcctagctcctaattagacacatcgcgttcgtaacttgaatatgtttgttgatgattgggtttcaggcatcagccatgagtctcgggaagcacaagatacgggtcaacatgatctctagagggctgcatctggatgatgagtatacagcttctgtgggaagagaccgagcgcagaagctggtcaaggacgctgcacccctcggccagtgtgtcaacccggacacagacctctactccactgttatctacttgatcagcgatggctcacgcttcatgacaggcaccactgtcttggtggatggacgcagtccttacgcgacccgtctcaaatgtacatgtgataatcctagtatattataatctatgttgtgtgtnaaagtgata

SEQ ID NO: 25681 - DNA, 596 bp, Arabidopsis thaliana columbia
gtcttcaatggcaggagaactgttgcatcaacaaaattttcatcagagacgcaagatatttcgactacttgcagtttttaaattggctctcaagtgagatatgtgggcataaaaaagtaacatcagaaaagaaaatacctctcaggataatcaacaattatctcaaataatttggcaatccttaaatcttgaagtgtttcatatgcaaaatattctagccgtaatttccaccgaacaattccttcagaaggagtcaccactctggaaaagcttggagatgggcaacaagccagaggggacgtgaggccagacgatgtggtaccataacttacggaatcaccaagataagaaagaagtgcattaaggaattgtagagggactgtctgaaaagagaaaataagatgtcaggaatctccaaattaccaaactaatctgatggagcagtgaaaatctaaccagcaaaaactacctgaatccattctttgattgattcaaaacagaagtcctgtaatcatcacagccagatcatggactttcgcctacagtataacattgccaaacagggtacaagtgtactgcaatagatatagtgttat

SEQ ID NO: 25682 - DNA, 417 bp, Arabidopsis thaliana columbia
tttaacactctcatccatgggttttgcagagctatgaagttacaagaagctagtaaggttttcggtgagatgaaagcggtcaacgtggctcccaacactgtcacgtataacacgttgattaatgggtacagccaacagggtgatcacgaaatggcgttccggttttatgaagatatggtctgcaacgggattcaacgtgacattttgacgtacaacgcgttgatatttggactatgcaaacaagctaagacgaggaaagctgcacagtttgttaaagaactcgacaaagagaatttggtgccaaactcgtcaaccttttctgcgctaataatgggacaatgcgtgaggaaaaatgcagaccgtggttttgaactgtacaaaagcatgattaggagtggttgccatccgaatgaacaa

SEQ ID NO: 25683 - DNA, 562 bp, Arabidopsis thaliana columbia
tatttaccctggctctgtataaacagggaccaaccatcttctaatgggtccaaaagtaagtaattaaaggatttcacttgcatctaacatatcttcatggtaaggtttcattttcttttgttgtgtttaggcaacaaaagtgactgctgtgaaagacttgctatttttggctgcatcttctcttgctttgccccaaatcacagtataaaacccaaagctcaatatcattgatccaatcacactgtccacaacacagagatgcaacatagtaacatgaagatcatgagactaaacatttcaacaagctataactaagataactaagtttatatcacttatgtttctcaagaaagagacgctatagttgaaagatatggcacatccaaaggtgaagtgcatcgccaaggaatatagcacccatgacgactgcaactgctataaacaacggcttgaataaggatacatacactggaccattcaggtggagacccatgtgtgtataccgagcacaatgatgaatcaaatctccctgaaacagagtggtagtttctgagcttaaaga

SEQ ID NO: 25684 - DNA, 573 bp, Arabidopsis thaliana columbia
caccaaacacaaatattccattaaaagaaacattttctatagtcaagcataaagagcattccaatggcgatcccaagtttctccatgtgtcacaagcccgagctccttaaggaaggcaaaagcgaaggccaagaagaagaagggctaagctacgagttccaagagatgttggactctcttcctaaggagagaggacggagaaatcgttacctttacttattccaagggtttcggtgccaagctaaggagattcaagctatcacgtctttccaaaaacattttcagtcccttccagacgacgttgtcctcgccaccatacctaaatctggcacaacctggttaaaagctttaactttcaccatccttacccgtcatcggtttgatccggtttcctcatcaagttccgaccaccctcttctcacatccaaccctcacgacctcgtacctttcttcgagtacaagctttacgccaacggaaatgttccgatctctcgggtctagccagtccaagaacattcgcaacccacgtaccgttcggtgcctttaaggattcggtcgagaaccccagtgtga

SEQ ID NO: 25685 - DNA, 612 bp, Arabidopsis thaliana columbia
ccgacggccgaatctttagaagatgtgaaagacgagaatgcctccaaaactgtggatgtaaaacaggaaacaggatctccggatactaagaaaaaggagggtgcctctagttcaagcaagaaagacactaagacaggtgaagacaagaaggctgaaaagaaaaacaactcagagactatgtctgaggggaagaaaattgataggaataatactgatgagaaagaggtaaaagaaaaggttaccgagaaagagataaaagagagaggtggaaaagatgagtccaggattcaagtgaaggacaggaaaaagtgtgaggaacctcctcgcgctggatttattctacagacaaaacggaacaaagactccaaagtaggtggacaggaaattagaagtttcattacatttggtaatggctatattatggtcgtaactgctttttttttggcagttgcgttcactttcggcctctttggattcgctcttggattacactgacaaggaccttgatgagtcatcatttgaggtttgttttcccttacgttttgcttagcctgttttcgttttctttatactggaacttagtgtacccattttgttgttacactgaatagt

SEQ ID NO: 25686 - DNA, 479 bp, Arabidopsis thaliana columbia
gttggtcaatgacgtgatggagataaattgataacaatgctgcttgatcagtttgttctgaaccgtgctcctgcttcgcccaaggaacagcggcacagaactcggctaactctgaaactgatacttcgtcgtctcagggctctcctattagtacgaaccgttatccctcgggaaaaactgaaatggctagtcctggcgatgaggtggctaccaagggtccaatttatccttctaggagttcatcgtctgtagtgatgaatgggggaagtattgtgtggaagagtggtgttgatcagctgagctttggatttagcgaggggattggaggtgctaaccctgtttttagacaacaagttgcttcttttgaagacgaatccattgagagcttggataagcaagagattgcctttagatgtgaacccatattttggataaagtcaaaattgactctaaacttcaggacaaagtgagatttatag

SEQ ID NO: 25687 - DNA, 460 bp, Arabidopsis thaliana columbia
ttcaagatctccttcgtgttgctttgcggtccattctccgcctttgcttttgcacacgaatgagaaaactcccatctcttcttctttcttcaaacggcggcgagatttctcaactgtgaaaaaaactaaagtctcatggcaaaaatgcgtaattttgtttatatatgatttgatttcacgacgcagtgagaaccctaaaataagtccgggcttatagaagatgggcctgacacaaagcccattttaaaaattggaagcgtaattaatagactcatagtagtaactcaaaaatatgcatgccacacttcatttctacagctattagtcttatcgttatcgacaaaaacttgtgtttatcattactcgtgctatgtattttagtttgcgttatttatgcttaaaatcaaattatgcatattttctgtttttctgggtcaaaaaatcaaacatgccacacttg

SEQ ID NO: 25688 - DNA, 564 bp, Arabidopsis thaliana columbia
  unsure (1)..(564): unsure at all n locations
acacatgacctggtcaagaacaacacaagactcaggcaaacattggttgtgtgctttattcgaaactataataatatctgaagaaagtgacaagaagaccagaaaagagagaggtgaggtgaaaaacggttttggtgcatggtcctctctagcgagcgtccttggacaaaagaccttgcgcttcaactttccttgcgttgcgaactncatcaactccatctcctctctcaaacacagctgctgcacccatccccgtccctgccagagtttaccaaatcagtaaaaccatccctcagacacatatttcagacaccaaattcacaatgaattattcgagtgagaagcataccaatgcacattgacactactccaaaacggcagtctttaccacggcgtttcatctcgtgcaacaatgtagcaacacaacgcgctcctgtgagagttttacaagtattagcaactgttcatgagcgttttataattatatagacacaatgtagacattgatatgctttgaaaaggacggactgcggcaagatagagctcttgtaagttggttaaaga

SEQ ID NO: 25689 - DNA, 537 bp, Arabidopsis thaliana columbia
ttctgtcccttcccctctcacttctcctgtcaaagtggtgaccctcttcgccattgcttctctcacgaagcttaattctaccctgaagacgactactgctaatggagttttccctcggtgtatccctacgagactctctatatcctctgtccatcgaagagtcaggagcagcatagtcatggcctcctactgataatctcataccattgccttttctctgcttagccaaacgatatctcagatccgattccagtatgttctctgatctctcatcttctgcgtaaacccttctgtccaaacgatcctctctctcagaagaaactcgacgatggccccatcccctgtcttccctccgatcatatgaatcaaaacgttgttcacgtaatgcttctttatcaccatcagcaattgcactgaaatcagggtcatactctgagttccctctctcctgacttctacgtccatatcgatcttcaacatgataatactcagaatctccagcctcattatccacaagaacatcaaacccaggagacg

SEQ ID NO: 25690 - DNA, 566 bp, Arabidopsis thaliana columbia
tctataaatgcaatgattgtagcactgctcttcatgttgattgtttgcttggtgtagacatgtacatgaaacctattacagactacatttctgtcatcacgctcacatctaagggtacgaaacggaaagatctttggatttttcttaacaactctctcactcgaccaatttgcactacatgcttaagtcgttgtccattcccaatatttttcaaagggcacaccaaaatcttctgttctttgtattgtagtgaggactgatcatcaaactagttatctcttttctctgtcaatctagttatcccttttctttgtcaatttgaagtatttttgttttgggtttgttgtatttcttaattggtggatatgttaaaatacaagatatttgtggttgtgtcttctcatcgcatctttttgttaaaatttcgcattttttggtaaaattttagtaataattcaaatatttgtgtatatcaaataatttaatacataaatactaggttcaaggattcggttttattcagtttttcggttctagcctcttaggatcataagagaacaaaaaag

SEQ ID NO: 25691 - DNA, 618 bp, Arabidopsis thaliana columbia
gtgaagcacaagtcaaagatgagtttctgaatctgattcgagttgaacccgatttcgtccgaaagaacataataatgagttggtttgcttgtacctatcgctccatgttgactacagaggtagaaatcatactcaaacgggtgaatgatcgtggtatcaacgaccgtacctgaaggcacattgcccttagcccttccatctttgctagttgtggcggggaagaaacgggtttgatgacgtttctgtgccacaattacagttatctgcggattatagccaaccttggcaaaaacgtccttaacattctgtaactccacattgagaaccatatcgaactgaccatcgctgacaccatcacggaatatcacaatcttgttaggtcgtttctcgggggcctgagaatgagcttcgataagctcccagcaagtttcaccaaacccttgtatctcttctttacggtgactctgagctttgactctagctgcgtacgggttagcttcaggccagttaagagtgctacaacagcaacaatggatggactcatattgtcgtgagcacgggatgattgacatcacaccaatgaacatgacgttacttcttgtttgaagaagagaaata

SEQ ID NO: 25692 - DNA, 1239 bp, Arabidopsis thaliana
  unsure (1)..(1239): unsure at all n locations
tcaaaaatcgttgcgcgccaaaatcagcaatctttaggccacgccatcatcaataagaagatttgatcctttgatgtcacgatgaagtacaccacgactatgacaatgctccaaaccagatatcaactgacgcatcaaacatttaacctgctacgtctatgagtaatctgatcttaaaaaacgactgaatattattagcctataaatttagaatgcgagttactaatacgcctaactaacctctgattctgagaacttaacaatcaggacttgaagcaagaccagccaaatcatgatccatgtattgaaatacaaggtataagctacaagacattcttgacgtaaccaaaccttccaacttcacaacattaggatgatcaagtctccgcaacacaagaatctctctcgccataaacttcacactttccggctccaagttatcaaaccgaaccttcttcaacgcaacgattttaccggtcaacatatccttagctttgtacacattactatatgttccttgtccaatctaccacatcaaaaacaagatatctccaaatgagaaacttcaaaaacacccaaaacaaaaacagaaagaacaaagtaagagtcttttcatgaatcaccttatcaattttctcaaaagtatcagcctttctaggaacccaaccatttaaagcttcaccacaagcatcagaaagccaagaaggccaaccagcagcaacctgttcaccacgccaatgcttggaaggattactcaaccgcggattcggctttgtcgaccttcttcgatctcctttggatgatttcctttctttatcaccatttgcctcctcattcttcttcttctctacatcatcagcaataactccattactcttagtcacactactctctcctactactactactccactactagctttagagctcttagcttgtttagcttcagctgttgttgttgtcgccgcctctcggccaaatacacaacccataacttaaatctcaatctaagcttcatttctcaccataacttctaccaacaacctacaagaaaaccatcacaactatataaaatgaagtcgatctaatcgaagaaaacgaaaccctaattaatgatcttgaactccattgaaagaaagaaaaaaagtaggtagacgttgaaatacgaatanaaccttagttccagaatctgattggagacatttggagcttgaactacnctatggtgagagagaagag

SEQ ID NO: 25693 - DNA, 506 bp, Arabidopsis thaliana
atatccacaggagggtgagagactgcaatgacaccgttcatagaagaaacatagatatgcggaacaaaagcctcttcttcttcttcttcgtctgcatagttacctctgcgtttcttcatcctcttgctgcctttctttgcatctgattccttgttttcttcagtcaagtcaaacacatcaccttgttgctgtcttgtgtaacgtttcgaggaagattcccgagctgacttatgttcagcagctggtgttgttgtggctgtctttttcctgttgctagctcgcggagttgctttaggttcattagtctgtatctgcacctgttttctcttcctctggctgtaacgcgaagttgatccttctttttttacatcctcagcatcctcatcttgattctgtccttctttggatgtctcttcaaacagagacgcagcatcaactacagaaaaaaagaaacatcattcatgtgttgcagatagagttttatgctgacgcaacagaagagtgta

SEQ ID NO: 25694 - DNA, 431 bp, Arabidopsis thaliana columbia
tttcttggaaaatccatggaactgcttgatatggagctcacggatgttagcttttccagatacttgtttaggctgagagtgcagtggtctagagaaaacaatgatctattgtcagctgtctaatttcaaatattggaatcacatcataatccttatcagtagataaaattgcatactctttaggagtacgcttgcatttcctgtcttttgaattagcctcttcacagggcaacttaatggatgcatccaaagggcatagcattacaaattttacctgttgataagaaaatgtgttaaaagaactgtgtaagggactatatagagcttctacaatatatgcaacacttacattgtcccatctgcattctggtatgagttttgcacacgtaacatgaaaactattcttgcaactcttattgttacaaccaagt

SEQ ID NO: 25695 - DNA, 502 bp, Arabidopsis thaliana columbia
cttatcgcaggaggtaagagtaagaagagcaaaaggactgctcctaagtccgatagatgtctacctaaagcttctcgtcaaggtaacaaatattgacatgtcttttacttatgtttctctgtctgttacattttggtttattgagatttgagtgtgttgttgataaattttgtagctcaaccggtttttggtgaggagatctaacagcaacttcaatgctgtgattctgaaaaggcttttcatgagcaaagtcaccagagctcctctttcactctctaggcttgtagagttcatgactggcaaggttcgatctttttgagacccatctctctgtagatacatctttgagtctgtccttggtcttaatttggaacccattgattttagttcattctgtgaagtcatgagttttgaagttgtcctgttatgttagtacgtgagacaaatgtcaaacttgatctcgtatttactatcagtgatggttagagtatcaaatgttgtg

SEQ ID NO: 25696 - DNA, 850 bp, Arabidopsis thaliana
ctcagagagagagatgctaaatttcacgtatttttttagatttgagtataacaaacatatgttgtgttctttcaggctactgctgtgaaagtgagcgacgtgacgtttagatcattcacagggacttgtgccgctcctattgcaataaaactagattgtgacccgaatacaggttgtgacaacatcgtgatggaacaaatcaatatcgcttcttcatctccgaaaacgccgctcacctcgtactgcaaatttgcgcatgtcgttagtcgctttgtctccattcccataacctgtagttttcatactgaagattctcaacctgcgtcactgaatcctcaaccttccgcaccgtatgctatatccccgacgacaccgcatactcagcctcatgcaccaactactcaacctccactgttctttcgtttctatacaaatttcaaagccttcttaggaaggttgggtcgtaactgctagatttattatagcaatatattgttatgagtagtcactgttactttactaaaaaaaataaaaagaaagttttaacttatttacaatagtaatattgtttcctgatgtgagcttaaatacaaagatataaataatgttatcagtaacacacgcgcgctaattaagaagaagacaaaattactttttacgtatttttaccaccaaagatgatcaagggtgttcattagtatgctatgtatgtgtacaagtaaaacgtatttagtatcctcctaatgactagaaataggactataggagctaggttatacattatcaaccgtttgtagacttgtagcccaaagacattacatgccgaacgtttaagttagaagtgaacaat

SEQ ID NO: 25697 - DNA, 546 bp, Arabidopsis thaliana columbia
ggtatacaaaaaaatcacttttttttttttggacaaaatacaaaaaaaatcactaattcctcttattatgaaagacttagtctaatattttgaaatttcataggcgagacgcactcttcgtgcgctgcgaggaatggctagactcaaaagtttgctgcaaggaaaatacgtcaaaagacaaatgaatgcgatgcttagctcaatgcaaactcttacacgtttacaaacacagattcaagagaggaggaatcggttatctgcagagaacaaaactcgtcacaggctgatccaacagaagggtcaccagaaagaaaaccatcagaatttggtaaatctcgttacattttttgttgaatgaatgtaaaatttattcaatctatgtttacaatatatgcaaccgttcatctaaaaatatgacaaaatttaaaaagagtcatcccattgttatgtggtaaaatctccctacattttaccacactgggtgaacaaaattctgaactggagcatattttgttgtaggttaagcgggaaattttgatccagcaa

SEQ ID NO: 25698 - DNA, 491 bp, Arabidopsis thaliana columbia
caaacaagcttagagatatgagaggtacactaatagagttaatctttttccctaacatttccacataatctttttccctaacatttccacatacttttgttcagaggttagcttatattccttcttcttcttcctagattccatgctttatatacacagagttctttctcgctatcatcaaccgcgcattaaatcaatatcagcatgagcatgacgcatatccatttgccttgaacctgttgaccaaatcaggttttggtttggctgctgctgagggacaggcgaaatcgtgttgttattattgtccagaacgtggtgatcatcagtttcttgaacaacttcagaagcttcttcttctcgtttcttgctcttgatctttggagctgcccatataaagctcgctacaataacctgatagacccaagaatctttattcaatcccaagaaatatgagagctcaagagaaaagtgtaaacaaacctgaacaggac

SEQ ID NO: 25699 - DNA, 613 bp, Arabidopsis thaliana
ctaaaggcttcctggcgaatcaggcgctcgtcaactttcggatcgttaaccttcaggccatcgacaatcagatcgccggagtgatttcttccagtttgttgatgcagcgcagcagggtcgatttaccggaaccggacggcccgataatcaccacgacttcgccctgggcaatgttcaaatcgatattgtgcagcacctgggttgggccaaagtgcttggagacgtttttaaattcaatcacaggattttcatccttctttccagacgacgcagaataaagctcagcaccagggtaataatcagatagaacaccgccacggcgctccagatctcaagggcgcggaagttaccggcaataatttcttgcccctgacgggtcagttccgccacgccgatcacaataaacagcgaggtgtctttaatgctgatgatccactggttacccagcggcggcacgatacgacgcagtgccagcggtaaaatgacgtagcgaatggtttccaacgtgaaagaccgagcgccagtcctgcttcacgaaaacctttgtggatagacagcaccgcaccacgcgtgatttcagcaatatacgcgccggagttgatcatgatggtga

SEQ ID NO: 25700 - DNA, 347 bp, Arabidopsis thaliana columbia
cctttttgttatcgccctctttcttaattcttttgacatgcatgtcccttgacgtggttccttcgctagctcgcttcttccctgacttcaccgccggtgattcagtagcaccttcgttattccctgacttcactgccggtgattcagcagcaccttctttcttccctgacttcactgccggtgattcagcagcaccttctttcttcttccgcctggttaagacgaatgactgcttctctgactctgagtcatcagaaactgccacggcggcggaaggagagtttagggtttttgttgacggaacagtgacgggagcttccttgggtttgcttcattagaagaagaga

SEQ ID NO: 25701 - DNA, 563 bp, Arabidopsis thaliana
aaataggtatatcgatctcaaatctggcacagctcaacaaattagggtttcagtagaagaagatattgacggtttgattaggaaaaggattatcaaagatatcaaagaaaagagagaagtgaagttcggatcgcagttgtttctaacggattgtagaaaagggaccacaggagttatgagctatgcgtgcgatataaccatgttgcggttcgagccaggttctgagaccaaggcgtctaaatttggagacaaccctagctgttttaatttttgattagttattttgcaaagatttgattttactctttctttaaaattagagtcaatctatgtaattctcacttgttactattaattaatggaaacagagaaacaaccatttcatacaatctcaaccctacaatataaatgatcattagttagcgtccactagagagaaacgattccgtcatgaccaaggaaacgttactactcgcttccatagactcagtcgttacacctaaggtatcaaatccttcattgattaccgagaatcacaaggtctacaagttatgaggaagagt

SEQ ID NO: 25702 - DNA, 488 bp, Arabidopsis thaliana columbia
tattcgccgatgctatcactcctgcacatgagtaaatctcaatcaacttagttcctaaataagcatttgacctaaaccctgtttttattgaaaaacactgtaactcctctccctgtctaagatccttaaccatcacgcaagcttttaaaactacgggaagagtaaaacaattgggcatcacatcaaagcttctcattctcttgagcaacaacaaaacttcaaaagacaaatcttattgtgcatacccattaaacatagcattccaaacagaaacatttggttgagagattctgtcgaacacttggcgtgcgtaatcaattctcgtgattcggcaacaagcagcgacgagtctcggagcgacgtaatcattctgtagtagctcgtgacatacggtttgagattgaatttgaagaagctgtttctgggttttacatgattccaagaaagagatgaacttttcttccaatagcctctattggtgacctaga

SEQ ID NO: 25703 - DNA, 539 bp, Arabidopsis thaliana columbia
gggactcctctacagaaaagaaaaagatgtattggattgcattgtcaaagataacaagatcaaagagagatggaggacttagtttaagatgtcaataaatttaatgatgccttacttggaaaactgaggtggcagatcattacaaaaccatcatgcctctgaacctgaaacagggtattgaagccacaaatcgtttggttttcccttccacctatagaaatcagtcttagtatgttatcctcgtggatcttgtggatgctctagtcatgtcgaaataagaaactttttgagcaaaaacaccaattaagcacatctctaatctctcaagccattatttaagcgaaagaatgaagcgaaggatagattaaaggtaaatctacccagaaaattcccaataccctttcatccccaaagatcagattgggcatagtacgttgctttacagatgcagccatgcgtgaagactcgcaacacatgattaggatggatctcaatgatatgatatcatgtgcagagacctcgttctgatatactgaaag

SEQ ID NO: 25704 - DNA, 519 bp, Arabidopsis thaliana
tttttatactcaccatagagtaaatcggaagctgagcatcaatagttttcaatagctcaggtccagagaaatcccaatgacgaatagtaccatcaagagaagcagtccaacaataacaaaggattttttgagcaggacttgatgcaggaacaacaattagagttggtactggagctgtatgaccttcaagcgaagtaatctaaaacagaaatgtatcaatcaatgattcgaatagaaaccctaacaaaatcgaagaagaattaaatttttggtacctgtaagccagtggcggcgctgaaaacagagacagtgtttcctgtgcagacgagaagctttttagcgtcgttggagaatgatggaggtgaagttacgtagcttcttccgccgcgtttcatggttaatttccggcgatagagagaggcggtgaaattgggaagagaagaagaaaagggagacgcacaaaattggtttacttcaaaagccctaacttaaacccttcttcgtctcttttgttttttt

SEQ ID NO: 25705 - DNA, 451 bp, Arabidopsis thaliana columbia
gcccaggaaccaaacagtcttgtcaacaccatcatcgtgactccacaagccaacccaatgaaaagcaagatcgatatctgatgttgtacttcatctttatcctgcataagcactattctattagaagttactaatactgtgtccaattggaaaatatcctggaaattgcttatgattaatgaataaaaggtattataggccaaattcatagtccaagaatgataaactgacctgccgagcaagagaggtagcaacaagatttgaagtcgcaactgagaggaacatgaacgtataacacaaataatcacagatgacggtagcaggacctggttcatccaaagtgaaatttaaattactgttacttcaaccagtgaacctagcgtggaacatagtaaagggaagaataatcggatgttccagttcaagtaacaccatcaaggtataatatgaa

SEQ ID NO: 25706 - DNA, 681 bp, Arabidopsis thaliana columbia
ttttttctaaatgctagtactaatatttagttataaagtatttcatttgcatacaaagagaaaatatttgaatagttgttgtacatatgtaacgtggggtggggaataccttacttttggtaattcgacgtgagaatatttaaacttgataatcacttcacataaggcaattataagattctacttaaatcttaaattagactactaagaggttagtgctataaatatttcacttttaccacacacaaaattgaacaatatgtaagtactaaccatggaagctaggagttgaacaccggcgaacttgacgtcccagctaaactcggacatggcccaagaaaggccacctagttggtgagccatgtcaaccacataactcatatagtgctcattgtcggtggctcgataaagccaagtggcaccccataaaagctcgtccatgtacccactcaccgaggcataataacttttcacaacttttagactctcatcgtattttcctctgtacttgtctccaaactcaaacaactacaaccaaaaccataaccataacttatttaaatgtcctaccaaaaacattaaaatgtctgttccgactgtacgattagattaaatttacaatgagtatgtatgtacttgatgggcatggtgcagagaaggtgagagtatgtggatttgtga

SEQ ID NO: 25707 - DNA, 349 bp, Arabidopsis thaliana columbia
tgttaatttcataccccaaagtttaaaatctatcaaattaactccaatttgtctttctcaactaaacaaagcctaggtttaagctgatatataagattccactgaaacaataaattactcttcttaccggcggaaagagacggggacgattccggcacgatactcagcgatcttgagaaacataggcatagcaagatcaaagtgaggtctaggagggttacaccaaccaccattgtcactaggctgagcaaagttcggaggacagaaattagtcgcagtgatgaagattgaaggactaccagaatggcaccattttggatcactagcacatttgagctcaaaacaagca

SEQ ID NO: 25708 - DNA, 496 bp, Arabidopsis thaliana columbia
ctgcgcgtttgatgtcatcgagcctagagatagcttcttctttggtgttggaggttttgtcaaggactttaaaagcatccccgagacgaccctgaaggacgagccaccgaggagactccggcattgccaacactccaatggctaggaacaccgagggaaccgctcctacacctaacatgaacctccatccgaggtgctcgggaagcttggagaagaagtaattggatacgtatcccaaaagtataccaatattgataaaaatctgcatacaaaaatcacattatcatcatcaccctccgttatcatttcgaatcatacatagaaaaaaaaaactttggatcagttgacccctcaggaagaggtagggagcctcgggaagagcgggacggacttcagcggtgtaacaggcgcaatcatcatagcataaccaacaccgataccggctacaaaacggccaaccattatgaaagggtagtttgtggcaaagccattagta

SEQ ID NO: 25709 - DNA, 542 bp, Arabidopsis thaliana
gttccagtttatgattagacacatcatcagaaacattattgataaagaggaaaatgacttaccaagtgttgcggagtcgaaagtcttgatgccatcaacgccgttcaaatcgccgctgaggaccgtcaagtctctgccgtcgccaacgagggttaagttagttttcttcttcccgatacgaataacttccttgtataacccttctttgatgtagatgacaaaaggcttcacaccattctctggagctgctgcaaccgcttcattcaccgtggtgaagttgccgctgccatccttggcgacaatcaagtcggctttatccttcaatgcctgcaaattatgtttaagagaaaaaaaaatgaaatagttaataaaacatatgaaagtcaacaataaacatatgaaacatatgaaagtcaacaataaacaacaattcaaagatataaaaaaaaaaagaacgaatcggagttttaggcttcagatatttgaggtattatctcaaaagacaaatatatgataaacaggaaaattaggttttacagtga

SEQ ID NO: 25710 - DNA, 488 bp, Arabidopsis thaliana
gtagcgagcctatacgtcttgtccagactttgctaaagattgctccgcttgtcacgggctatgtctctgaaatccaaaccttgaacttgaagcttaaaggcttggtcgaaaaggacattattcctactgcttgcttgaagatcatgatcgaacaacgtgcagagtttcgtcctggagcaggtattcctgagatttacgatgcatctctgttccttgaatccaaacttcctttcttgaaaaggatcatatggaactggaggaaaactttgtttgtctggatcagcatgagtttgttcattatggaattacttttcgccttagttttcttcagacctctgatcatcccaagaacaggtcagagaacacaacaaagagatggaacacattctatcaacaacaacttatatcttgacggtcaggcgggaagtagatgaatcagtggttgactagttgttgtaacggtacttacacttactgtaactttaata

SEQ ID NO: 25711 - DNA, 540 bp, Arabidopsis thaliana columbia
gtatcgagtcactcgattcagcctgatcgattgatctggagtcaggatcgatagatcatctctatctggaatgtttgcatcgattgatcaatcttctggatcgatcgatcggtttttgtctgaaactttttcttttgttagatcgatcacgctaacttctggatcgatcggttgattctcttctgtaacttgacttgatctcggatcgagcaggcttgcatctggatcgatcgagcttgtatctgggagtaaaagaaactcaccctgtcgactagcgatagtcgaatttggactgttataatcatcttctcttgctagagcactctcagagtaaggaaaacattcctcctcgaaagcaacatctcgggaaacaaaaattctttcagtttgaaaatccatcactaaccatcctttctttcgaaattgatatccaagaaaaagacatcgagcactgcgatcttcaaatttgtcattcgaacgtcttactagctttgcatagcaaaggcacccaaatatccttatatcatcataagaaggagg

SEQ ID NO: 25712 - DNA, 605 bp, Arabidopsis thaliana columbia
  unsure (1)..(605): unsure at all n locations
gtttctattcttagaatttttgggttggtttcagtaaactttctagggtttagatcagattattaacaggattggagaaggaattgggcgaattagggcaaaatttaacaaagcttgtggtttttattaactggatatgttgccttgggattgtgtgaaggccttgcaagttagaggtcatgttgttgaatctgtggttttgataaagcagtgttctctaagatttaagatgaatatggttatgtggtatgtatatatgcttctgagttgataagtattgatattttatcacaattttctttttttcagatcaagtaatctgagatgccttaggcttgcaatgtgctatccactaactggcaatggatttgtcagtgcagtcatgaagctctcattccttgaggaactcgatatttcacagggctatacacaactggatttgaaagctataggccactcttgcccactactgaagacattcaagctaaaccgtccttctttcagccggttcgttaaatatgatgcataagggttccctttttctagacatttcaagtaganagagaaatgaacagagttggaggaagacatgtagatgaagtgtg

SEQ ID NO: 25713 - DNA, 478 bp, Arabidopsis thaliana columbia
acaagttccaatttggtaagaaactggtgtgatctttttatcaatcatgttgtgagagtgttgaaagtaacctatgatttcgttttcttggggatcaattcaaagactcatacgtctacacgaggataatttattattttaaaatatcaaaaatacgatcattcaattcggttgaaactaaaaattaccaaaaatacatttaaattaaaattctgcatagaaataaagtaaaaaaataacaaatcctacaaccccttaaaccgacgattttattatataatggtacaagcattggggttttcatcactgaatatctgcggtggataagcaaacatctccacggggtacctcggtggctggtactgatattcgttcttcttcaagtctaccactttgttcccctcctccgcggcagaccatcgcctttagcactcctccaccaccgttttccttggcctcttttccttctttgggctgt

SEQ ID NO: 25714 - DNA, 776 bp, Arabidopsis thaliana
attcagtgtaaagagacttctcgttgttccatacacgaacatagagttcttgtcctaagtatctccttgaccatatttgtgacctcaaattccacattcccttattgtctaatgataccaatatgctcgtccacgacattggataaacctatttttacacacatatagagaacatttagaaccatagatgtagttatatatgcatgattactatattttaggtttcagatcggcccgcaaaatcaaatcaggtattatattgggtgggaacgttttgggctttaaattgaccaactagacaaatttttctttcttgtgaaataaaaaactaccagtgttgtttttaggatttacctgaaaagtgtgccttgaaacagcatcaaccaaattataacctctcctcttagccatgttccatgtgcccgacccgtatctgattatatgtcaaaacttcatcaattactctaacaaacaaatttgattgatcgagagcaatatggagggataatgggaaaagaattaggcttagttattacccaacaacatatgcactagtgccgtcaaggtgccaagattgtatagatccctcgttgttctggaacacgaattcgacgtactcatggagagccacatcaaagaccgaagttccgagaatggagggtcctggtgtgggaatgttcataatggttttgaaattgaacaccccgggaatgttgaaccagtcggctaatttcaatggagttgctgggtgaacgtaggacacacggttcactgtg

SEQ ID NO: 25715 - DNA, 518 bp, Arabidopsis thaliana columbia
taacctgaaaacataacaagtggtttaaaaacataaaaccaaaatcttctaaaatccctgaaattacataagctagcggaaaaaataaaatcttccaaaatccctaatcgaacacatgtttctacacactaatgtgattaggttagtgtggtttcaatgtctattttgatgtagttacaattatcatcttacagtttacagtacttaatgctcctgcttcttgtatcatctgacatatataatcaagatctttctttctattcaaatgcaagcaaataagtttgactcaacaatatatatcatttacatatatataattgtacaatatgcacttttcttgtcactacaattcatgaagaatgaatcagatgcaaaaaaaatgaatattttgcatctgtatcatgggtttccttgtccgtcagtcttcacagcttcaacgaatacgattcacgtgagaaaatggctcggaaactgcttttggagcagcttttttggcggtctctggtactccaaaaaca

SEQ ID NO: 25716 - DNA, 1051 bp, Arabidopsis thaliana
tttttgggtcaaagtttattattaaaaatcttatttatccatttttggggtctaattaaaagtcaaagatagtactagtttcatcaataattagataaggtgacgaattttttggaaatttacattacaagttaaaactagtagccccaatcatacatacacttggatgaattagtcttcgggcttttatatgacgtatatatcgtaggaactttcgtgggaatattctttttccttccacaaaattcgctgacacgttaagctttgagatatcttataatatccgtttatgcttccacgttcctatgaatcttgtgggaattgataaatttcaacattttgaacagataagatagtcagtcacggatcatgaattcataattactttccttgttaaatgtttagtcaaataatacactttaaaacacatatcattgattattacaattttttttttggaattataatgtcttaagtttgagttttatattgtggttttagggtggaatattacttggaccatcagcacttgggaaaagcactaagtttatcaacacagttttcccaccaaagagtctaacggttttagacacacttgcaaacttaggactcatcttcttcctcttcctcgttggtctcgagctcgatcccaaatctcttaagcgaaccggaaagagagctctctctatcgctctcgccggaatcactcttcctttcgtattaggcattggaacttcttttgctctccgcagttccatagctgatggagccagcaaagctcctttccttgtcttcatgggtgttgctctctccatcacagcgtttcccgtcttggcccgaatactcgctgagattaagcttctaaccactgatatcggaaagattgctttgtccgctgctgcggtcaatgacgtggctgcttggattctccttgctctcgcggtggctctttctggagaggggagctctcgcttacttctctttgggtgttctctcgggttgcggttttgtcttgttctgtatctttgttgtgcaacagggattaagttga

SEQ ID NO: 25717 - DNA, 1185 bp, Arabidopsis thaliana
taaaacccaccaacataagaacattggattagtcaaaagaaatcatgatggaattgacatatagacttctaatgacacaaaatttgtaaattttatgaacctgaaacattgcagccgtcacagtgtccagaagggtgttggtggtgtaactatttgattgcaatctgatacgtttagcttcaatgtctaccggagtcttagaccagaaagccagaatagacgaatctagtttctgatagaaagacatttacaacaatagataagacctccagtcacaaaaatggaacaaattcagtcataagaagaaggtagataatctcttacttcgcatcttgtgatgttctcaagaggatatattctcaaagttcggctagtacttggatcaagcatacgaagaccatccaaaccaatctgctagcacaaaaccaattcactaaaactagtttaggtaacacaaagttcaaattgaattggggacattacctgacaaagaacatctgttgtggtttgtccataagtctcagccaacaatttgacacgaaatttctgcacaccaccagtggaatcttcctgcacatcagccttaggaacagctctcacgatcttagcagaattcgagctaacagaagaatctctccctgaagaagaaaagctaatggatcgtccataatcatcgaacaatgttgaattcgatgatttcggcgcagttccacgagaaccgtatggctcaactttgcctccttgataagcataaacgccatcgccataggaatcttcaaaagcaggatattctccgctatcagatcgttttccgtatagatcagatcctaaatccgatctgctccggttataaccgtcataaccagattgatcaaatttcactgacggtttctcatacgaaggaggtatggatgatcctccgctactataaggaggtgcagagtacaaggatgatgaataaggcgcgggattaggattcggcgcaggccgagatgaaggaggaggcgcagatgaatagccagaggtttgatgctgatcatacggtgagtaatacatatgttgcgaggtaggttgctgatacggagcagtagaatcaaatgatccataagaggatagaggttgtggatgaatcgtgggtggaggtggtggttggttgaaggttgaataagaattagggttagtgat

SEQ ID NO: 25718 - DNA, 540 bp, Arabidopsis thaliana columbia
tgcaggtggaagtagtgcctcagtcaagctttgggacactgcaagctggagattaatctcaactctatcaatcccacgcccagatgcaccaaaaccttccgataaaaccagcagcaagaaattcgttctctcggtggcttggtctcctaatgggaaacgacttgcttgtggttcaatggatggtacgatctgtgtttttgatgttgaccgctcaaagctacttcaccagctagaaggtcacaatatgcctgtaaggtcccttgtgttctcccctgtagacccgagagtcctcttctctggatcagatgatgggcatgtgaacatgcacgatgcagaagggaaaacgctgttggggtccatgtcagggcacacgagttgggtgctgagcgttgatgctagcccagacggtggagccatagcaaccggctcaagcgatagaactgtgaggctatgggatcttaaaatgagagctgcgattcagacaatgagcaaccacaatgaccaggtttggtctgtggcctttagcccaccaggtggaac

SEQ ID NO: 25719 - DNA, 569 bp, Arabidopsis thaliana columbia
tcattcaaattattcattgaacgagctcatacggtagggattggtctaaagcttggaacaatcaatatacaaacgtttaaaactttgaaatgcaatttaatgcatttcaccatgagaacaaaggacacaaagtaaccaaagaaaaacaaaagattgagatagtaaataattttgtttcttagatgggattgttgttggtaataacccaattcgaaaaggaatcgagagtattcacatctgctcggtaatgtttttgagtgaactcaaggaacatagaccaagtgaagtcagggtattttcttgttttcatcttctccaaaatatcacttggtggtttcacactttgtctttcttcggacacaagaaaaacgccatcgattttctcgcgctctctctattcacaaccgctctatgcaaacagctcttgaatatcccgttcgatagagcctacaaaaccaaagttgattaaccatttctgtatgagtaccaaaatgtgtttacttcttagaatgtttcaattacatgaaagtgtcacaatattgacacgaaaccttgggattgggcgaatg

SEQ ID NO: 25720 - DNA, 484 bp, Arabidopsis thaliana columbia
gattcgaaatggagacctgtttcccacaactccatgaaggcttatgatcaatttctcttcttctggagagaaccttcctctcctgatatcaggtcgaagatagtttatccatcgcaatctacaactttttccacatctttgaagccctaaatttgatcaaacatgcattttaaaattagttacattaactatatatgttaattagcgcaagatcgttataattggttagagaaaaaaatatgttacttgaaaactaatatacaagtaagatcacctgctttttcagggacttcactccaacatccatagccatgagttgtgatatatctaataagcttctcatcttcttccggtgaccaaagccctctcttcaccttttgctggttgcagcatgagtgatgacccatgattagtagctcctcaaagtaacttaaatatagtgaaccacttaatcacaatcttaaattaacttttatataagtat

SEQ ID NO: 25721 - DNA, 532 bp, Arabidopsis thaliana
accgtcacactgaatgttatatttgctgggtaagtttcacatttccccctcaatctctgcaagttaaaattcttcaatggtaagaatctttttggctaaccaatgggaacaatccaaactttcattttacagagaggtatcaggagcatcgatgaatccagccagaagcataggacctgcacttgtgtggggatgttacaaagggatttggatatacttgctggctccaacacttggtgccgtctctggggccttgattcataaaatgttaccgtcaatacagaacgcagagcctgagttctccaagacaggatcttctcataaacgagttaccgatcttcctctgtgatgatgtagatcaatctttaaggtcaagcatcttcaaatctgttcgctgctctcattgtaactaatcattatcaacacaaaatggttgtaaagtagaacatatgtatatgttactgtgtaaagtacactgtaaatcaaattaaaagtctgtatcattccgacttatgaaaacgattcaagaacg

SEQ ID NO: 25722 - DNA, 1335 bp, Arabidopsis thaliana
cagaggtgactgaagcagtccaagaattttttcgttcaggtcagttattgaagcagtggaacgcaacaactttggtccttattccaaaaatcacaaactcttcaaagatgactgactttaggccaatctcttgcttaaacactttgtataaagtgatagctaagctgctgacttctaggctaaagaagcttttaaatgaggtgatttctccgtctcagtctgcgttccttcctggtcgtttactttcggaaaacgtcttgttagctactgaaattgtgcatggttacaacactaaaaatatcagctctcggggtatgcttaaagtggatcttcggaaagcgtttgatagcgtcagatgggatttcatcatctcagccttccgtgctctcgcagtccctgaaaagtttgtttgctggatcaatcagtgcatttcaacgccctatttttcagtcatggttaatggttctagcagtgggttttttaaaagtaacacagggttgagacaaggtgatcctttatcgccgtacttatttgttcttgcgatggaggtgttctctagcttgctgaaagctaggtttgatgcgggttatatccactaccatcctaaaaccgctgatctctcaatctctcacctaatgtttgcagatgatgttatggtttttttcgatgggggaagctcctctctacatgggatcagtgaagctcttgatgacttcgcctcttggtcggggctgcatgtgaacaaagataagacaaatttgtatctggctggaactgatgaggttgaggctcttgccatttcgcactacggcttcccaatcagcactttgccaattcgttatcttgggctcccgctgatgagtaggaaacttaaaatttcagagtatgagcttgttaaaaggtttagatcctgggcggttaagagcctttcttttgctggtcgggttcagctgatcacctctgtcattacgggtcttgtcaacttctggatgtcgacttttgttcttcttcttggctgcgtgaaaaagattgagtctctttgttctagatttttgtggtctggcagcattgatgctagtaagggagcaaagattgcatggtcaggtgtctgtttaccaaagaatgaaggtggtgttggcttacgcaggttcacgccatggaacaaaactttttatcttcgctttatttggcccttatttgcagataatgacgtgctttgggcgaattgacataaatttcaccatattaaaaataagtcgttttgggaactagaggagacccccgggacccttggacctggaggacgctgcttcggttaagacatcttggtgaaag

SEQ ID NO: 25723 - DNA, 604 bp, Arabidopsis thaliana columbia
  unsure (1)..(604): unsure at all n locations
tnnnnnnnnnnnnnnnnnnnnnnnctaaaggggctaaaccctttttcgacacgcagctcgtccggcaaccactgatggtggaaacgcggcgcattggtcgcttcggcgacgttcaagccataatcgatgctattcaccaccatttgcagcactgtagtgatgatccggctaccgcctgggctaccggtaaccagccaggttttaccgtctttcaccacaatggtcggcgacatcgacgacagcgggcgtttgttcggcccgacggcgttggcatcaccgcccaccagcccgtaaacgttcggtacgcccggtttggcggagaaatcatccatctggttattaagcagaataccgctctcgcccgctacaatgcccgtaccgaagtcggtgttcagcgtataggtcaccgccaccgcgttaccatctttatccaccactgagtaatgggtagtttgattactctcataaggcgcaacgttgccggggcgaatttcgctggatggcttcgctttattgatatcaatttgatcggcaatagatttggcataggctttattggtcagcgcctgccacggtactttgacaaaatctgggtcgcaagata

SEQ ID NO: 25724 - DNA, 488 bp, Arabidopsis thaliana columbia
  unsure (1)..(488): unsure at all n locations
nnnnnnnnnnnnnnnnnnnnnnctaaagattacgactttgtcggggcgtcgcagatttctggttttgacagtggcttctctacctttgctcagggctttgtcgcgctggggagtttccgtctctcttacatcaccttctacgcgttgattgcggtggcgttcgtctgggtgttgtggaacaaaacccgcttcggtaagaacatttttgccattggcggtaacccggaagcggcaaaagtatctggtgtcaacgtcggcctgaacctgctgatgatctacgcgttgtctggcgtgttctatgcctttggcgggatgttagaagccggacgtatcggctctgcaccaacaacctcggctttatgtatgagctggatgctatcgcggcgtgcgtggtaggcggtgtatcgttcagcggcggtgtggggacggtgattggcgtggtgaccggggtaattatttttaccgtcatcaactatggcctgacgtat

SEQ ID NO: 25725 - DNA, 639 bp, Arabidopsis thaliana columbia
aaccaagttgctcacatcagtgagctcttttccctcaacagccgactgcaactcgttagtagtcacgtcaccgtagttgctggaacacgattcatcctcctcctccagagaaagagatgatgatgtggcttcttctcgttcctgtttacggagcaacttctccagtttagcggctcgcttctttgactctttcttgcttattttttctccacattcctccaaaacctctgatcccaccatctcttctccagtaaattgatagctgcggcagagagagagagaatgagaataagataactctttttgagctagggtagataactattgttgggcttgaaaggcccacaaaacatattggtccagcgaagacccatgtaaagcacaagttgaattgatttgaagtttacagtgataataattttttttttcttttttttttcactgatttattggatattgtcaaagacttttacaaacccacaaatgggcttaacataagacccaaaaaagtacaaacagaatacatgaaattcgaaaaatatatacagaagtgaaaattaaaacatgaataagaggtgggtgaattttacattgaatgatgttatgccaatcaataagtggtgggtgtgggtgtaattt

SEQ ID NO: 25726 - DNA, 503 bp, Arabidopsis thaliana columbia
atagctgtaagagtcatctctcatatctagcttcttactaaaattgaccagtgactgacttttatctttttttgaagttggcgactcacaagaacgccataggagtggccattggggcaagtattggacacactgtgtgtacttcactagcagttgttggaggaagcatgctggcttcaaggatctcgcaacgtacggtcgcaactgttggaggcttactcttcctcggcttttcagtctcctcctatttctatcctccattgtagtacatgtgcttctctcgaaaatgggtgtcagacacaatttctcagtcaagtctcaattttccccctgattttaatttaagtatgacattatgcttaaaatcaatggccaaaatggcaaaccaaagaatccaacgcctatgcttttacaattaactttcttgaagtgtacaaatctaattaaataaacttatgcagtatccaattttccatgtagttggctgatcatgtttatgaggt

SEQ ID NO: 25727 - DNA, 496 bp, Arabidopsis thaliana columbia
ctgttacataataaaacgtatgtaataattctatgatttttcagactatgataatagttgcatggcacccgtcagggtctattcttgccatttttactgaggatgtctttagaaacgtgttgaccattttcataacttcagcttttctcaatcttctacaaggtaacttctagtccgtttcagtttgacattacccatgtataaacatattggcataatcctttgatcttttatgaattgcagcgacactggatttagttcttagttttggtgcttggaagagcctaaagttttcccaaattatgcggtacatcacaaaatttttaatggcagccatgtgggccatcatgttgccaattacttactcgaagtcagtccagaatcctactggactaataaagttcttcagcagctgggttgggagttggcttcaccggtcgttatacgactatgctattgccttgtatgtctaccaaatattttggctgctgtgttt

SEQ ID NO: 25728 - DNA, 932 bp, Arabidopsis thaliana
gatttcacataataatactcattgatttgccttccaacaaaataatttctaaccatctttgcttcattttaaagtcaaatgtaataaaaacatcacaacaagatggaactttcaacgtcctaaaattaaaatacttgacgaaactggcaaaaaccaaatattcaatgaagaataatattgctagagatttcacccttttaatgaggcgatattttaaaaatagataaaaaaaatattatgttcatgattaaaaaaagggattagataacgtcacgacatggtctaattaacaaacgacagaaaaatctaaatgaaatcatcagctccactactatataagtattattttatttcatgtaggtccttaactttattcgattctctctgtaagccactaaaaatgcgataaaacaaatagaaaacccaagaaaaagactcaccggatcgtcggtgacaggagaagccgtgtgaaagacgccgtcgcaaccatcaatcgccgccttaagagcctcgtagtcctgaagatctgctttgcacagaatcagtctctcctttcctccttctagttctctcaaatgtgtgttcttcggatcatctgcaagaaaaataattataaagaaatccaaattgtcaatcaaaacaataaagataacctcaacaacttcagataattatcacaagtgaccagtaaagtatatataaaaatggacaagtacctggattccgtacggttcctttgactgtgtaacctctctcgagaagtatcgtaacaatccaagaagcgatgtatccaccagctccggtgacgcagacggtttttccggccggtgagctacgtcgactggcatatttcccggtggacgacagtaaagagcttcggttctgaaaagaggctttcgagaggctatgaatgctttagttagaaatttgtg

SEQ ID NO: 25729 - DNA, 533 bp, Arabidopsis thaliana columbia
tgtaccaagttcttgggaaacttatcatcttcttcctcatcttcatcatcgtcgccatcatcatcttcattaccgatattccccttctctatatcttctctagagtataccttcatgccaggtgctcctggcataccctgaacatagcggtaaagagtaagcttaagatcattccatggatatgcattccttgcttagtggtattgattgacgtcatcaaagattacctgcatagatctcagaatcttgtccatttcagcatcttttgatggttttgcaacaaatggttctccaggaacccgatcctggcaaagataaagagacacttatcaaaacgtcatctccacagcaacaacataagaacattcacggacacaaatcgaccaaagatccacatttcagtttcaatgaaaggtagcttgggaacaggaggaggtttcttgctgcaagcatcggtcaaatctttgcatagatgattcaccagtgaaacaagatcaggcttagacttgtaaatatactctgcaacatcagtg

SEQ ID NO: 25730 - DNA, 482 bp, Arabidopsis thaliana
cgacattagaacagtatccttaaggttcttctatagatcagacctttttgtcatcacaaagttgttgtaagtttgtgcgtgtaaatgctctgaccttatctcagttttgcaattgtattcaaggttgttagttagagattagaatttcagcccctacgaccaggcgtcttcatagttctaaccgtgtaaatcggtaacaataatataatgttgtcgtagacttcgaattctgaagacctgagacatcgtattatcatacaagtctagatgaacagtgatgagtagataggtaagaggtatagagtcgagagatacagagggctgagatcagtgactagtagttcattactagaatttgttgatgctggttgctaaagtgtctttagagacagcgccgatgattgtatccttctgctcagcattgacggtgatcacgatagttgggatgcttctatcatgatactggccaggggttgcaggag

SEQ ID NO: 25731 - DNA, 454 bp, Arabidopsis thaliana
tctagtattgatgaaactaatagtctaaagagagaagatgtcaaaaaaaagggagttgaaagagtaccttggggaacacttggtcgacaacttccaaagcacgagaagagttccatccataatatcctcgcagaatgatgtctgcctatacacataccatccagatggtcgaatatcattatggttcgcataatacacgcttacaatcgtagtacaaaagacgaatttcaatggacgaatgtatcgttagggctaataatacatagtacagagtacttagaataagcgatctacttgtaggatcaacgcgctagtcgttagccaaggatgaatatcgaatccagacgccacagagagcgagagactgatgaatctgacgataccttacgagcgtagacctcggaaagaatggcgccccaaccaccatggccaaagctcatctgaacgatggaag

SEQ ID NO: 25732 - DNA, 497 bp, Arabidopsis thaliana
gggaaatttgtgctcgagcctgaaagtgaagcgtcattgaccggaaaataatatgattgaaaaggtgtcaaccatcctctcctcataactgcctgcataaaatatatcgtgttcaacgattctaataagtatataactcaatcttgattttgacatactcacaagcttttagagcaacttacctgaagaatgtagatttgctgcccacaatttggtcctgcttttcctacaggacatccgagtactttaacattaatggaaaagcagaccctagaactggaatttgtgccctgtgcaaaccggttctcccgtccagataaactaataactatataccatcgaccagctttcggtttgttaacaattaagggaactttatgtatatcagcagcgtaatcatgcagagtctctgaagcaaaggcttcaaaacgggcgtaacacatgagataactttcattggaatctactttgacattggatgccataataactaactg

SEQ ID NO: 25733 - DNA, 537 bp, Arabidopsis thaliana columbia
catagtttgaagctgaaagaaccaatgtagacttatagaaaatctcaagaatctgaactaacctgtcaacattctcccagtcttttgtcacagctggtccaatccttttatttccatcctctttctctgcaaagtaatcattatagggtttatcttcagcctccatcttctcaaatgccaatctgaactttaaagcttggtctaacatgagataagtcgaattccatatggtcttgacatcttggtgtcgaagactcacatactggattccattgcgaatagcctccacactgctattaacctctgttaatccttcctttacaaccagattcaaaatgtgagcagcacacctcatatgcaagtactctccttttaatatcaatgcatcatttccattcagcctcatcatttctttcttgaacttagtcaaagctgaagtattggctgtagcattatctacagtaatgcaaaatactctctttataccccactccgctaaacaagctagaagagtatccaaattgtttgcccttatga

SEQ ID NO: 25734 - DNA, 590 bp, Arabidopsis thaliana columbia
catcaaaacattattatatagacacaaataccaaatcacaaatggagagaaaacgctagagagagattcattctcacgataaagcacggaagatgtcattgatttgtccttcgatctcagccagctcttcgctaaccgctgatattggatccatctttacacagattcccagaaaaattcagtgccgatatacaaaagacaacaatgtctcttcttcagatccacgcgagcagtttttgaaaaatgtcgaccacgaatcgactcgccgagattagatccgatggatctgaaatcgaatcacctccaacgaaaagaattgaaagcctggtgtcaaaatcgccgagcaaatcgtaataacagaacccgtgttttttttcttcagatctaagaacaatgtggatgttcaaaatcgataacgaagagatagatatcaaaatcacgagcacgagctctctctcccctacacccagattttatttgttttgttttccctaatttcctcggacattttttgtttttgttcttggggaatctaaaagctaattttttgccattgatttggctcgaagggacgaaaatgagagattttg

SEQ ID NO: 25735 - DNA, 1094 bp, Arabidopsis thaliana
tcccgaaagccaatttgatattgccaaggatgtttttactcaggtcagcttttatcatttactgttcatagtataggctagctaaattcttgaaatcattggaattttgtgaatgttttaggttcaagaagctgcgagcggaagtgtatttcttcagatgcctgatgtatgggtgaatctggctcatgtttactttgctcaagggaattttgccttaaccgtgaaaatggtttgtcattttatatagcgttttttttttttttaaattcttttggttgatttcgatgttttgcttaagtactctgttcattatctatgttgttggcagtatcaaaactgcttgcgaaagttcttttacaacacagactcccaaatccttctttacttagcccgtacccattatgaggctgagcagtggcaagagtgcaaaaagacactattaagggccattcacttgactccttcaaattacacattcagatttgatttgggtgctgtaatgcaaaaatcatcgtcttccacactgcaaaagaaaaaaagaacagctgatgaggttaactaaagattttcccttgcttctttctgactctagtcttgtgtcgtagaagatagacagatattaacatgcatcgattgggaatttatcagactatgaacttgcttctacagcttgtgtatctagaacttttcaccatgaccctagcatagtatgttagtcatccttgctaagtaatggctaatctagaatgcaatactaggatttgttgtcttgttttattagaagatgtctagacaatactaattcgtccaatggggattaattgatttccacctgacaattacttgatgactctgcaggtgcgctcaacagttgcagaagcagagaatgctgttcgtgtattcactcaattgtctgctgcttcagacctccatgttcatgggtttgatagcaagaaaatacaaacccatgttcagtattgctcgcacttgctggaagcagcaaaagttcaccgtgaagctgctgagcaggaggagctgcagaaccgacagagattagaagttgctcgtcaggctgctttggcagaagaagcacg

SEQ ID NO: 25736 - DNA, 459 bp, Arabidopsis thaliana
tttcttacggatcacaactgcttttcttttccttggatttttctgtctagaacttaaacctgatgagcacgcttcatttaaggcagagttgaatccctgatccaaatccagatccaaatccagaataattcctttagaacagtcttcttgataagccttctcgtgttcctgactctctttagcttcttttcgaatcttttccactaaaccagtagactgtacctctgaaggtgtagacgacatgattcttgaattcagaaggtttgtctttgttgacaaagcactgtttccttctatcctatctaaatctgaactaggaaggggatgatttgattgtggaaacctaagatcagacttttctttatcctcttttttctcaaaaaaagacctttgaaacccatccatgactgacgattttcctggcagaccagaatcacaatcacctttctccatgagtta

SEQ ID NO: 25737 - DNA, 539 bp, Arabidopsis thaliana columbia
gatgatttgatagtgatcaacatatgtcttgaaggcttccaccatgcaatccatgccacttcgttgatgtcaatgaagacccatagagatgcttttgtgacttcactagcgaagttcacttcacttcactccccagctgatatcaagcagagaaatattgaagccattaaggttggtattctacttcattaaggtttacgtgattgttgtttgtaatagttcgctgtaccaaaaaaacatgatatgtatcttgagtatactttccccatctgacctcgttctcagtccattccttgtcactttttatctcgatgttatttccttcctgatctaactgtcgccttttcccctctaaaattgtctggatcccaaattaatattggttgttcccaggcgattctcagacttgctgatgaagagggcaactatttgcaagatgcctgggagcatatactaacttgtgtttcccgttttgagcaactacatctcttgggagaaggtgctctccagatgcactttttttgcttcaagcaaaatga

SEQ ID NO: 25738 - DNA, 479 bp, Arabidopsis thaliana columbia
agaaaattaaaagacatgatcatgaactacattctcatgaacaacaagttcaaaaccataactttattatatgagataataagataacaaacccatcagggtatatgtaaagagtcaagcttttttctccagagtctccaacttcacactaatgcacccacaagttatctaaattagccttttccaagatactcaacatgaatcaagcaacatccacatagtactttaagtattggcatatatataagcatgcgataccttcggacatatcaagcaactacgtactcctggaggacagttttgagcatcgattccttgttctgacaatttacgcatcaaagtcactaatttagacagaacaaccttcttgcctgcttcttcttcaggaacaactacaaagcagaaaatgcatacaaatggaaacacgaggactcaataacaagaagcatgaaaacatagtgaaactgaagaatgggagc

SEQ ID NO: 25739 - DNA, 571 bp, Arabidopsis thaliana
catcgttcctcactgcaagctgaatgtgtcttggtactatacgtgtcttcttgttatcccttgctgcgtttcccgccagctccaacacctatcaacccaaaccaaatcaaaatcaaatcagtacaagatccaattcagatgtgaccaaatcgaaattgaaaaccaaattggaagacaagaaaaataaattacctcggcggcgaggtactcgagaacagcggagagatagaccggagctccggcaccgacacgctcggcgtatttaccggatttgaggaatctagcgattcttccgacggggaattgaagaccggctttagatgatcgagagacggatttggtggcctttggctttcctctgccacctttggttgttccgcttcctgcgcctgtactcatcgtcttcttcgaaatttagaacagataaacgatttgatgagagtttgaagaaatcgaagagaaatgactattgtagatgatctgggaattgagaagatgagtgggctttagggttttgctcttctctatatgtataggctactaagattgattgtgatttgttagactttag

SEQ ID NO: 25740 - DNA, 542 bp, Arabidopsis thaliana columbia
aacggccgcaagtccgccagtgtgctctaaagaccagcgcaccgggcctgcgtgattacctgggtgacattgcctggtatctggatggcatgctggatcgtcgcgaaggggcaccgaaattgtcggcggcgtacaaaagtgggtgatcaactgtaactggaaattcccggcagagcagttcgccagtgaccagtatcatgctctgttcagccatgcttctgccgttcaggtattaggggcgaaagatgatggcagcgataagcgcctcaggtgatggacaaaccgcccgcccggtgtgggaaaccgccaaagatgcgctgcaatttggtcaggacggtcacggtagcggtttcttctttactgaaaaaccggatgctaatgtctgggtcgatggcgcagtttcaagctattaccgcgaaacctatgccgaagcagaacaacgtttaggtgaagttcgcgccctgcgatggcgggtcataacaatattttcccacgctttcatggctaaacggcactgcacactccgcgtctggcatccgcgc

SEQ ID NO: 25741 - DNA, 484 bp, Arabidopsis thaliana columbia
tcatcgacaccatgacaaattactactgagaatcctaaaatggtataccttcttctctttgcagacatagcagtaccgttcatagcacgatttgtgaaacttgcctcttgagtttgaaacctaagatagttatcaagaatttaggttttgcatcaaacaaaaaaaacaaaacgaacatgtcaaggagtatattaatataccaaaaaaaaacagttccatacatggttttcgatatcgtggatagcaattggtttgtgacaagcacgacaacagaaacatccaggatgccaaagaacacccaagatattcacagatcctccatgttcaaccgcaaagttgcaaccaccacacaagctacaagtcaaaagattctttaaccaggtgtggacatacttaagagttgagataatgaatacaagaaaattagcaataaacgcataagcttacctaggaggaggattcaactctaggagcattccatctc

SEQ ID NO: 25742 - DNA, 614 bp, Arabidopsis thaliana columbia
  unsure (1)..(614): unsure at all n locations
nnnnnnnnnnnnnnnnnnnnnnnnnnnctaaagcgggcgaatgcgggattgttcaataatgtactgccagcacagaccgtcgcagtcttcttcctgcaccgtaccggtaaccagcagggtatattcatcttccagaccgaggtctttaatgattttaccggcataaaccatagaggccatgccaccttcctggtcggaagtaccgcgaccaccaatcagttcatcagtttccatgccttcgtacggatcgaagtcccagtttttgatgttgccaatgccgacggtatcgatatgagcgtccattgccaccagacgcgggccgtggcgagtataaccgagaacgttgcccatcgggtcgatttcaactttatcgaagccgactttttccatctcttctttaatacgatgtactacgcgtttctcgtcgcagctttcactgggaatagcaaccatgtcgcgcaggaagcgagtcatatccgcctggtaatcttttgctttttcaagaatcagtttgaatggaatattcttagccattatttttcccagatttttactcccagttttcagggacagtcccatagggtgataaggtctacacgtgtttccttccagac

SEQ ID NO: 25743 - DNA, 613 bp, Arabidopsis thaliana columbia
tggcatgtatttcttacattttcaagtgtatagaatggatacaactgtcaatgcggtatgcaagttttgagctcttttcctttcataattagctggcatattagaatatgcagaggtactaaagcaatccacattgtggttattgtgcagttggctgcagccaaggaccctgaatctgctttcttcaagcgattggaaggtcttcaaccttgtgaggtttcggaactgaaagctggcacgcatatatttgcagtttatggtatgacttattactttacttacgatagctggagcatttttgagaccttagtttaactgggctctagttacttttcaggtgataatttctttaagactgcatcttacacgattgaagcactctgtgccaagacctatgaggatacaacagagaagttaaaggagattgaagctcaaatcttaagaaagagaaacgaactgcggcagtttgaaacagagtaccgaaaagtaattttatactatttgagagatatcagtcagtatttagggagacatgtaacttgatataaatttgctatattcgtttgcaggctttggcgcggtttcaagaagttccaacagatatcacaggaga

SEQ ID NO: 25744 - DNA, 581 bp, Arabidopsis thaliana columbia
  unsure (1)..(581): unsure at all n locations
cnnnnnnnnnnnnnnnnnnnnnctaaagtaatgctgcgtcggcggtttccagcgccacgtctgtgccgctacccattgcaatcccgatggcggcagtttcatcgctggcgcgtcgttaataccgtcaccgaccatcgccagcggccatgttgattcagctcggtcaccgctttgactttatcttccggcaacaggcccgctttaaactccagccccagctccccggcaattgccgccgctgcgcgtggattatcgccggtgaggatcacccctttgacgcccagcgcgttcagttcactgatggcagttgcagcatcggcgcgcagggtatcctgtaacgcaatgacaccaagcacgtcatcgttacgtactaccagcactaccgtttgcccggcgctttccagttcgttaattaaaccagtaaatgcatcagcgggatgtttccggcagcgcaaatcaatacgcgctcaccgttaacctgcgcttcaatgccagacccgaccagcgcncgctgtgattcggcggtgggaatggcgagttcacaacctgtgcttcgcgtacgatggcttgcgcagtggatg

SEQ ID NO: 25745 - DNA, 534 bp, Arabidopsis thaliana columbia
cctctaggccagtgtgctctaaaggtgtcagacgctgtaccgccgttgtgcacatactggtatcccccattcagcgtggtatccagtgcgtgaccatgtacagtctggtcgccgccggcgtaaaccacagtggtatttgccgttccttcagctctcacaatctggcgaccgtttttattgatggttgtgcgtacggcatccccgcgaacaaactgcccggtatcaccgttttctgcatccggtcccccttccgccccggtattaacaacggtatccgttgccactgtaccgggcttgacgacctgccagcccttatcattaatgacggttcctgtggctatcgcccctcatgcatccactgttcgccaccattcagcgtggtgttcacagcccgtccctgaaggctctgtccgcctccggcactgataaccgtgtctgagacacttccaccggggttcactctctgaagaccacactggtgacagtcgttttgttggctgttccgcatcctgtacccattgccgccggtattgg

SEQ ID NO: 25746 - DNA, 554 bp, Arabidopsis thaliana columbia
ttctatcaattgttaaaagtaaaaagagacttcgaatgggatgagaagtatgcaacctactaaaagcatatatgtccagtctgccattattggcaaagctggtacccggagaacctcaatacttttatgctccgtctcacaatactccatcagcgggatccttacgtgatctttgtgcagggctaacagaaacctatctcttacatacgcaagtctttgacgtatccaaaaaatcggtatctgttgatggataagctcactgtagtcataatcgcatctgcaataaaacttctgccttattttcagtcacaaattgtaattgtcctaaccagtcaaccgcttcgaacagtccttcataaccagaaccaattaggtggcaaaatggacggtagagctaagcgaatttgacacataatatcgaggtcgaagttgccttaaggcttgcgtaaacggcattttgagctcccactagttatgggacgatcatcgtgtacatgaaaattcttagatatgttccggttaaaacattcactagttatgttatccatatttag

SEQ ID NO: 25747 - DNA, 509 bp, Arabidopsis thaliana
attcatcaagatttttattttatcacatttctaaactactgaataaaagattcaattcttataaatgtggagtcagtaaagaaacaacagagcttgtgtatacacagggaaagagtcttccgtctttatgtttagtttcaccaataatccatacacgagcatgagccatcttggaaatggtgaaaacgtttccggtctcgtaccgttatttttctcttgtaaactttggagatgagtttgatggacgaatgacaatcctcacagatacgtaggttcttaacaatgcgtattggtttgccagggctcgtgcttatcaacccaaacgctgtagcgatcttctcgctgtggtaatgaagtacattttctttatcttcttcctccaagtttaacaaaacctgtgtggtgattggtctatacccagctagtctcagtttgtctgagatttctacgagcattgagttgatttctttggcttttgggtgtgaatcatctgccacaacaaactcatg

SEQ ID NO: 25748 - DNA, 578 bp, Arabidopsis thaliana columbia
  unsure (1)..(578): unsure at all n locations
nnnnnnnnnnnnnnnnnnnnctaaaggatccgcggttgcgattatcaggcgcggcacattgcggcggtgacctttactaataaagcagccgcgagatgaaagagcgtgtagggcagacgctggggcgcaaagaggcgcgtgggctgatgatctccactttccatacgttggggctggatatcatcaaacgcgagtatgcggcgcttgggatgaaagcgaacttctcgttgtttgacgataccgatcagcttgctttgcttaaagagttgaccgaggggctgattgaagatgacaaagttctcctgcaacaactgatttcgaccatctctaactggaagaatgatctcaaaacaccgtcccaggcggcacgaagtgcgattggcgagcgggaccgtatttttgccattgttatgggctgtatgatgcacacctgaaagcctgtaacgttctcgacttcgatgatctgattttattgccgacgttgctgctgcaacgcaatgaagaagtcgcaagcgctggcagaacaaaattcgctatctgctggtggatgagtacaggacccaacaccagccagtatg

SEQ ID NO: 25749 - DNA, 2033 bp, Arabidopsis thaliana
ctgctactgctgactgatgggtggttttatcggttttgtatcatgtctatatgtgtttctggttgtgattataaaccaggcgtttttcttctgctgcaatcacatgccggtcttcaacaacctccgtaatctatctcttgagagcgacgaagaaaaaggatggcaagcattgcctcttctgctcaataattctctaaatcttcatactctatctatcaaagtatgacatgtttttgagaaattaatacacaatgttctttttggctcttatgtaaaagaagtttgtctgatttgttgttatggtttttagggtcttgtgcacagagttactagtagatgtggagacgcatgcgcctgcattagcgagaggaagacaggaatgtgttgtttatcggcatgtcgaatcaaggtgctagagattacagggtatggaggaagttttatagagctgaaacaaatgaggcattttttgggaaaactgcaatgtcttgaaactgtgagaattggtgttgaaagggacggcaacaacgagcacctgcgagccaatctaagctctcttcatagagcttcatcagagtgcaacatccagttcatttgatctctctttaaacaagttatagataatatgagtttgttagtaataaaaatatgacattttgtttaatttggtaaagttttgcactgattggcgaaacaattaagaggtctagttttggtaaaatccaaattgctaatctatcatctctcaaacatgtgttaacaaaaacaaaattgaggacttttgatttcacaatggccttgagccatgttaagagggaacaacgttaaccggattaaatcataatatttggtttggtttagtaaattagaaaacgtactgtatactctctctgcctgagggagaaggttccaaatagccctaaaaagcttcgccttctctccttgccttcatttcgggtgtggaggaaagttatcaaatcagtttttgtggaattttgaatctcgtcgcttctgtgttggctatgactgaagttgcgagctcagtggtgtatgaagtgctcggacgcagagctcaggatgtggacgagccgattatggactacatcattaatgtcctcgctgatgaggatttcgacttcggtgaggaaggtgaaggcgcctttgatgccgtcggtgagctcctcgtcgctgctgaatgcgtttccgatttcgaagagtgccgtttggtaagtaaccattcgcagcttgttgcttggctttcttcatttcaattatcgtaattctagattcgttttatctttgcttgtttgtatttatgggattttttcgttagggcctctgtgactgttgaaatggtttcaataaggtctcgcttttgaatgagctgagatatttaattggatgtggtgtgtgtaggtttgtagcaaactgtcggataagtttggaaagcatggattggtgaagcctacacctactgtgaggagtcttgctatgcctgtgcggatgaacgatgggatggatgatggacctgttaagaagaagaagccagagcctgtggatgggcctttgctcactgaacgtgacttggctaagattgaaaggagaaagaaaaaggatgatcgccaaagagaggtatacagtaatggcagtttttttaccggttttgaactgagaatttgtttcttatcttgtgtttatttactggtttcttgtttatgcagctacaatatcagcagcatgttgctgaaatggaagccgctaaagcagggatgcctactgttagtgtcaatcatgacactggtggtggctctgctatcagagatattcatatggataactttaatgtttctgttggaggccgtgatctcattgtcgatggatcaatcaccctctcttttggacgtcattacggtgggtttgatcttcgtttttatttgttttagctgtctgtttaatccaaggaatagacggtatggaaaatctaccttacaaatgggtatttgctctctttggatgactttacaggtcttgta

SEQ ID NO: 25750 - DNA, 768 bp, Arabidopsis thaliana
caaggtgaacacctcttcttcgctcagcagtaccatgacaggtaaaagttaattattaataaagtatttactaaaagtaaactaagtttagtggtaatttttcctattagtcgaaactagaaattagctgctgcttactaggataattagtttggtgcttaaaaatatagtactatcaagaactcatggagtagtatattatttgttgttatcggttcggtgtgcttggttacgaaattgcttctttcgaggtcttacgttactacgtgttcacgttctaactaaagtctttatcgatatatgtgacaaatggtctgtcaaactaaagtctttacacgttctaattaagacaaatttctttcaagtgaagtttccaaaaaaaaaaaaatggtaagtcttttttggcaccaatactattttaatttccaaatgagaccattaattatataatccattatcgatatatgtgagacattttcattagttttgcatggttgcatgcatccggttttaatctcaaaagtctaaatataagttttcagaccactaaagccatttctagatgattttatacatttttcattaggttctcataatatttaattaataaaaaaaccaatatctctaagtaaattaattacaaccatgaatatatgtatcacagaaagcagagggaggcaagaatgagcatgagcagagaagagaggacaaaaactccgttcgtggactacctaaagcccatcatcgccgacggagacaccggctttg

SEQ ID NO: 25751 - DNA, 1625 bp, Arabidopsis thaliana
caagaggatgcattgtctcactgatttattgtcctttactcgttttatttatatttatatacaggaatttatgattaatttgtttcgaataaatttgtaagtactttgaggaaaaaaaaattaggtttggctttctaattggaaaccagttacgatggtcgaaacaagaattccagtgtgcaagactcacttattcagacgggtgatatgatgcactcgcgtcaaatccaaatgtttaaggttaaaatcggttatatatataacctcgtttttaaaatattaaacaataaacatgcatatatatgttattgtttctgtagcacggcatacatcaatagaatgacgattgagaaatttagtttcatcagtacgtaataattagtacttagcaaaaaaaagaagtggataaatatctttaatttatggaatttcaatggttgtagagcaaatttttccatatcgtcatgcatccttgtctatgtccttgactaattttcacgcgcccggtttagctgctggtttagctgctggtttagcggcaggtgcagcaggggcaggggcagcgggacggctggggcagctccacctgctgcggcagaccttggaattttaattggaaagtctctacccgtatatttcctaaacacaaaaaaaagtgtggttataaaaaaaattgtggtttaatttaccggcttgtgtgcgcatgcatacatattaaaaaaagaaattatgaatgtttttgggggttaattacttgtagagccacattaagatggtgagacccgacacaccagaggtgcctccggcattaaacctgaagcaagaatagtggtggcaatacccgcgggtacaagaacggggctaaaaacgaggaatagcggcatggacgcgaatagtgccacggctgtgccggttagagatataccggccagcaacaagaggcatattgcagcttcagtggcaaaaaaagccgtcataacacccttgagcgtcggcttttgtcttcgtatctcgtcgtctgcgacgacgttttttctttccaaaaatcaaagagagtggaaagggcgccatagcttgtttgatatcggatgattgtggaatttcatgaattagaagagtggattttaatgaagagagagtggtgtggtctacgtgcacggcacctgcttaccccatgcgaaacgatgcgagtgaatgttgagctctacgtcacgtcaatgcctcttcgtctttctatcttcatgcgaaaatggtcacactttcttgtaaaaaaaatagttgtaggtattttggtttattagcggatttcggtttgggtaggtaccgttggttggtttgattagttcagttttcgttaaaatttgattgaattataacctcaaagtcatttttaatcggttggactatatatttcgtttggttcaattagatttaatttgctgtggttttgataagagtttgtttcggttgtgatattatagcttacatgttttaaaaatcgaatacagtgaaataaatgaataagtatgattaactaattgaaatattgaggattgaaaactcgagtgctctcaaacatagcgatctgaatcttcaatagagcaaataggataattttcggcagg

SEQ ID NO: 25752 - DNA, 529 bp, Arabidopsis thaliana columbia
gcttatttccaaaggtaggctggtacgtggaaacaaaccaaagacaacctaagagcatattcatataactacccttgcttgattcataaatcataggtctttgcataatcaatgcactagaaatcaaccagtcctcgcgcacatatgtatacatatatttaagtgttttggtttccagatgcacctaaaaaaatacttatatgcaaaagaatagatttgcctttgttatcccacagtcctccttcaagccttgcctgcttaagcactggattcacctctcccctgaaactatttctaagacaagttagcttgcagttagaaaaagaaccatataactgggtgctggaaggaaacatacaagaaatctctgacaaaaagacatcatactcttagggaataccatttttgctggattcatcaacaccagttgtgactaagttggtcggatcttctaatgatcctgaattcggaggcaagccaacagaggtttccatttctgacatcttccctaccgtgttgagagagcaaa

SEQ ID NO: 25753 - DNA, 503 bp, Arabidopsis thaliana
accactcgctcagtctctgattcttctcgttctcgttgaggttcatgcgcttgatggcctgcacgacagcttccgagaaagtcataagaccggccgagccaagccactgatcttcaatggattgcaacgccggaccattcttgcctacagtcattccctcagccagaagcgaggacaaactcttgcctctaaggctcgggttagtggcaccgaggatgaactggtggtccctcgcgtcaatgttcgactggatcagagtagctgcgaccgcatctgttctagcaacaaggacggtctctgtacccatcacgtcgaactggagccgagccgcgacaaggcggttgatgtgttcgctgactgccacgaggacctttccggccatgtggcacacttcttggtgacggaggactggtcctcgatgtggacccagcggcgcctctttcaacgaaaagcttgcagagtttgacggtggcggtggtgccgcaaagccgggtgtcccggtc

SEQ ID NO: 25754 - DNA, 1037 bp, Arabidopsis thaliana
tataaaaccgaacttgactcaattttaacggaattgacggccggtgaaggtttgtccaaaggaccaactagctggagcaatgttgttagagacgacggtacgaccatcactagcagtcaccttaaatgacaatgcttgaccgtttaagagattgttgctttgccagttctgtccccagtttcttgacatttgttgccaccttgttctagaacctttaaccgcaaccgaatgaacatctccagcaccaccaacattggtcaccaagacaaggttgaagtaagagtgaccgttgattgtgaatcttatacctcctcttctcatacacggaaccctacacatgaagcaaaaaaaaaaaaaaaaccatcagttaaataacagagtcatttaaataacgaaaccattaacaagttacgatgacccagatacgaaagtgaataaagattgaaacttttatcaacaaacagagcaattatgaagacccataacaagaaatttgacacctaatcaagaaactgcataaaagatcaagactttgtaacagtaaagactatagatttatgttttaccttctgtaggaaacagggacaacaccagctttgtactgagcaatgcgttgaaaaacaggctgagagagatcgaaatgatgaagcggagggttacaccaaccaccagcgttattgggaagagcgttgttaggaggacagaaattggtggctgtgacaatgatagcaccatgtaaacaccacgcgccgtcgctctgacacttgatctcaaaacaagccccgcagctaagaccgttgttgaacagagcagtgctcaacgccgccgtgttggtcccgtaaccttgactgtagaggttcccgtagccacaagctccacctagagacaacaacatcaacaagattgtaaatatcctagattttcgttttctctgagacattttagagaacaaagtgagaagcacatacccattgttcctgaagcatcacttccaccatagaaggtagcatgagcattgacccatccagcgtcatagc

SEQ ID NO: 25755 - DNA, 884 bp, Arabidopsis thaliana columbia
tcccttccttcgccggagatttaggaacgtcgacaataggcatcaccgtttcctcggattccaaagaagaggactccacataaattgttcttccgaacaggaccaggtatacagttttttgttcttccttcttcgtcggagatatagaaacgttggtgagaggtattgctgtttccgcggatcccaaggaaacgttgttctcatgagaaatctctcgctgttcttcggccataactcttcttcgactgagatttaggagcttaattaggagagagttatcgtccgaaataattatagagaaaagactcgaaagattatttgtgagtaaaagggattgatgagagtagtatatatagaagaacggtcaaggatataggttttgtaatgaataagacctaatttggtcaaaactctatccccctaataatttattccaatagaaaatcgtattttttgttcgcagaattctcttccacatatttttatgtttctcaacaaacttatttttatgttgatcacaaaaaataatggatattattacatgggagaaatggaaattctctggagatattggaggagctcgaacgttaatctgcaattttcagtttatcacgacgtgaaatttgaaatagactcacacaactagtctacgaggcccactggaagaagaagtggattgtataaggtgaaacactcacttttaaatatagatagtataaaccaaaccgaaattttggctacttcatttcggttttattgggtgaaaccgatggccaaaaggaaagatgaaaaataataatcggttccgttcgattcgaaaccaccaaaccaatattgtattctaactttatccgaaattataggaatgtaccaaatttaatcga

SEQ ID NO: 25756 - DNA, 631 bp, Arabidopsis thaliana
taacaacatcttacaaccaataatcatagttcttggaacagaaaagagggagaaaatagccataataacaacaacatgaacaaaaacaagagaaatggtatattgtttagtttaggacgtagactcaggaccggccggtttagagtttagaagaggctgaagtgccttgacaacgatggtcatgtttggtcggaaatctgcctcatactgaacacacaaggccgccacggctgccaactgttcgaccatacgcaaagaaacttttcaaaattacaaagctaaaccaaataatcatatgtccctagttttcaaaatatgatatctagatgcatctaatatcaaaatatctttaaccaagcaaagtaaatgaagatatcgtttgatatttgaagaagaaaatgaagaacggaccttggcgactgctttgggaggaaagtcattgttaagcttaggatctatgcattgtttcactttgtcttcacttagtctcggtgttgcctgtaacaacaatacaaaggttattaaaaggggacttataatgatgatatatatggagtcattccaaaatgtttgctttaatttgtgtacgtacccaagtaacaagactttgttggcctttagcgatggtatg

SEQ ID NO: 25757 - DNA, 600 bp, Arabidopsis thaliana columbia
gcaaaccaacttcaatgctgttaagatccttagtctcgtagttgcccgacgtaatccaaatctgcgacaagctgaactcgtctcctgtttctacggttgggtcccaaatgcttattgtagcctttgctccgtacattttcggcaaggatttcgtagttacgatcgcatactgtttatcaattattattaatacagacaatacatatgtattttgaacggaaaaccaatgcatcagttaattcaattcatcaggccgacggaagaaaaaggaaaaaacgggtatagtatattccaggcccactctattggttggtagaagtggccaaggcgtagaaatatttgtaagaaaggtccataaatcttttcttttttaaaaaaggccctataacatgtgagtcttattttagaaggcccctctctaatagttccaccaaaaaaatcgtatttattcatacataacaatttcgataacagtaaaaaaacagcagtgtacatatgaaatcgattcattgattaatatataaatatataatagtaatgagctatgagttttactaatgagttactgtttcttttaacaattgtagtccaaatgttttt

SEQ ID NO: 25758 - DNA, 532 bp, Arabidopsis thaliana columbia
taataaggttctttcagatcgaatttgcatgtcgatgattggagaattccgccttgacttgcaccgggcccccacattttagctgttaaaaacccattttgttatcagatcaggaaaagaagttgaaagttggttcatggtgctttcaaatgacgaaaacacagaaaaaaagaagaagcaaactgcacctgataaagttagatctatggtgtaactctgagcactgtgggctatcaaatgaagtctaccagtgatctcttgacctgccattacgtaaataggctgcgagagaacacatctgatttggtaccaatgcgttgtaggtgcaccgggagcagttgtgagccatctttggaccgtgctgttgaaaatagagtaaaacgagtttgaaatataaatcttcaattgcaaagagatacatgaagatgaaaagttttgaatgaagaagaataaaaagaaagagttactcccgtcaaagagaacgtcaaactagcaggcaagtcgatgcattctggtgcacatggaagcagtg

SEQ ID NO: 25759 - DNA, 430 bp, Arabidopsis thaliana columbia
ctagtaacagcccattagtaccatcttcaagagcttctctctattttgtccccgtggttctaatacacgttcatcggaaatgcttcttagcgacagagcttctcctggagacgaagacaaactcgataccaaatctcccggatgtttcccaattatcaattcgagtatcaaaaccccgaagctatacacatcgcatttctccgtcaccttcatcgtgtaagcaaactctgttgcgaaaaatcaagttcaatttcgaatttagtgatttaaatttcataagctcaaaatcagatttagggatttagatttacctggtgcaacgtagccgtaggttccagcaacggcggaccagtttgatgaatccgtctttagaagttttgctgtaccaaaatcggagatcttagctgtgtaatcgttatcgagaaggatg

SEQ ID NO: 25760 - DNA, 265 bp, Arabidopsis thaliana
catcacgctcatgcatgctagctctttttggtttaatatttcacacttgggctttaagtgccgtcaacatggttgcacgtttctgaaaactcacagtgtacattcttacacgtttggtcactagcagcttgttgtcagtctgtccaactcctgggatgtagtaattctgcttacaacacaagttggttattcacctgcacaaaggtcatcggcactacttgatcacatttctagttccttgtgaatgcttagattctgtttcttt

SEQ ID NO: 25761 - DNA, 546 bp, Arabidopsis thaliana columbia
tcacttgtaaatcatcaccctttgttttgtgttcttggggttctaacgggatgctcttttggattttgtgtttcttttcacaaggaaaaacagaggagaaaacaatgttgttagtcataggagttcttgagttaattgatgatagttcatgaaatcaatcccatttagcctgacgcaacacagaatctgctccggtagctcctctggtttgttcccctgttcacacatacaatcgtcaacataagcgataaaatcccatatgattttcctagccaagaatgattgtaactaaatctacctgaattgtgaggccaacatcaagaacacagatcttgagtctgtctatgaatgtttcaaaccctttccgcgatatataaccgaatctatgcatatcgatatcaatctcaaagtaattgtcaccctacaaagagtaacatttcgaagttcattagttagtagtctaagcatattcctaatcaaagagggaatgttatagagtttgggtctaccaagtagaattcgtgctgcggacgtgaaagtacaggt

SEQ ID NO: 25762 - DNA, 848 bp, Arabidopsis thaliana
tcagtgagttgcgttttaaaacgaagagatagctaataattggtagccagaaaactgagaagttgaatattgactcaccagtctaccaggatgaaatggaatctctggtcctccagtgatctcaacagcaactactccagctagctacagtaaccaagaaacacagatgaatcaagcccttaaagccatgcgataatacaaagtaagcttttagattcagtatcaatctaacatgtgtgaatctagttcactgcagacaaaccagagggccaatagccgacggctcaagctagagaagaacccattttaagtcataacttagctgtaccaaccaacaaaatcccttccaaatgtttcccctctcggtataatcactgatgcatcagaaaacccttgagtctatggttctacctcaagttcctacttactacagcttgatgcatcccatgacttaacaggactactacatagactcagtacattgttgaaaatttactctggtagaagtcagcatacgacatgaatagggaacagctccttgatagggtcaagaacgtaacggcaatatcaagaccattgctggcatcatgggctagctcttggggatgccttatcgtcccaaacggtcctcctgtcttcgtcttcacatcaaatgtcccagccgagtgccatctgcaaatctccgccaacaaaatatgctctgagaagccatcaatcgaacaactcagtactctcagtaacagaaaagactggaaccagagagaggatattacgcaagacggaggacgatgggagcacagtgcttatcggcaataagaccacggagcttcctcttgcatctctgaaca

SEQ ID NO: 25763 - DNA, 538 bp, Arabidopsis thaliana columbia
tatagttagatagtaaaaaagagaggcctagttaccgatccagttaactggacataaatcggaaagtaattggcaaattagttttctcaattttgaataataattttacctaaatattggtttatatattatttgtaagaaatcacatatacatatgtcagtgaaataagatggtcttgtggttgaatttttgaatttaatgggtaactctcagcttcaagtccagaattcgggtttactaggatctgtttttattttattttttaacgattttgttttactgaaaaatttaatgaaatcataggaagtcgaggagtgtaattggagtgtgattgtagtttaaaataaagccatggtacaaacatatcaagaaggacatgggatgagaatcatctatccatgtctagagaaaccccacaaccactttagagtcaattttcagatcaatgtgcacgactctcttctctcaagcaatatatagaccattgtacattctccatagtttccgttaatggtgttgagcacgagcaatgttaca

SEQ ID NO: 25764 - DNA, 527 bp, Arabidopsis thaliana columbia
taaagaattaacgtctaactgcggctctggatgtagctactggtgttctgttcgctgaaaacctggaactgcttggttgaaacggtggcattgaagttttgcaccgcatagccaacgctgaatttttgcgttgcgtaccggtcagtactggaaccgtacttgttatcgaaatcattgaagtagctaggatcgctgaccttggtgtagtcgacgttgaaacgccacacctgatccatgaccccggagtggttccagtagaataaccaacgacgtgaactgtcatcgttcgggtgttcatcttcatagactttatctgaaggcagatagtccagttccatcaagccagcgcccgcctgggagaggtagcggaattcgttctcccacatgatgttgccacgacgatgcatataatgcggcgtgatggtggcatcatatttggcgcgatgttccagtaatatggcaggtagaactcaaagtagttggtggtggtgtcttggcgttcgggatcaagaaccagagcgacgttt

SEQ ID NO: 25765 - DNA, 511 bp, Arabidopsis thaliana
aaatccaggggcagtgatggtcaaactgttcaacgcagcgcttacaagtggggcagtgcttagatcgcaccggtctaattatctgaagaaaaaatgataattgtagttagaaaacaaagaaaatatcgaggtaatcccctgaaataaggattgaggaaaaccttgcaagtggggcagagttgggaccagtttcctttccatgaggggtttttgaaattgatatcaatcaaagggtcctgcaaacatcagaagataatatgtgaatcaaacctttcagaacaaaccttacgactgttcaattgatctaaagtcggtgtctacttaaatcaggcatagttcagcatgatcaagacgaaaagcttaaacaattaacaactgcgcattgatttcgtatatatatgcatgaacccaatttagacggattgccaatctgctagacgaatgttcacatttctctcatcatggaaacatgggaagaaagttcacttacgttggcagtgtgttggctgtt

SEQ ID NO: 25766 - DNA, 542 bp, Arabidopsis thaliana columbia
  unsure (1)..(542): unsure at all n locations
nnnnnnnnnnnnnnnnnnnctaaagccagcgtctctttaatagacttcggctgaccgggtaagttaaggatcagcgcctgtttgcgaatcacgcccacctgacgcgaaaggatcgcagttggtacaaaatgcaggctgatctggcgcatctgttcaccaaagccaggcatctcgcggtccgctactgccagcgtcgcatcgggcgttacgtcacgacgcgccgggccagttccgcccgtggtgagcaccagatggcaactcatttcatccaccagctcacacaacgtttgctcgatgatcgcctgctcatcggggattaagcgggtttccagttcaaacggcgtggttagcgccgatgtcagccattcttccagcgcagggatgcctttatcctgataaacgccgctggatgcgcgatcagagatggaaactaagccaatacgtaaagtattcatcaagatttttccgtttaaacagtctcgttaaacagaatgatacactgcgaagggagtgacagacaggcttcagaagaggtagcgtga

SEQ ID NO: 25767 - DNA, 548 bp, Arabidopsis thaliana columbia
cattcaaacgcgtcatgcatctttattattctcaccatcaacctcatcctcatcattgtctgccttcgtcagcaattcttgatcttggacagtgggactggactcggaagctccatcaatggacaaattggagatttcacccgctacagagtttgcgtcgccatcatcagtggcgtcttctgagacagtagactctgtgtctgattgttgttggaggctccagtacatgatgctggctgccaagataagcatcatcttctggttcacctgtatccaccacacaagtttactgactcagaaaaaccgaagaagcactcaagtctgtttcaataccatatatatgtctctacctctatgatatcttcaggcaacaagaatatggaacatccaagctttcgtgcaacactgatgatgtatgtggcattcaacttcttatcctcctctgtttaagtgccaattacaaacaaacaaaaacggtacagacaatcaaaaatatgacttaacaccggagaataaggcccagcaatgaagttgtacatcatagtttt

SEQ ID NO: 25768 - DNA, 502 bp, Arabidopsis thaliana columbia
ctgttcagggttggtgagtaactcatcaaatgacattccacgcctcgctgtttcttcaagtatcccatacaaatccagatcctgtacaacgttgacttattagttagcctgtacgtcctaatctgaagattaatagaaactggatattgtacctcagtaccgagtcgtttattaagtgcctcgttccacatattagcagcatatgcaggttgtacacgagtccacatagacatgacagaaataacctgaaagttcaatgtggcttgttgattaccatgatgatcttaatgatgatagatctttaagaatatcagggattaaaaagtaccaagtgagcatcaaggggaggggggtagttacgcctagagtgtcgatcagctgaatacatgttgtgataccatacggtttgccaacatactccgtgcatatcccacgcagcagtattgttgaactttgcccggatatcaggatgtagaggaagcaaactacttgaggatttgaa

SEQ ID NO: 25769 - DNA, 435 bp, Arabidopsis thaliana
gctgcaatgatggacctacctcttgtaaaatagccactgctagtgatcccaatttaaaacccatagttataagactgacaagagttgttaaagcaccagaaagcgaaattggtggttgcgtgttctgcaggttggttgtatacctattttaatttgaatgcgaatatacttgtactccactctgcttattcattatcccccatttctgataggtcgcatgattttagcattgggaaatttgatgataggacagttattctctgtgaccaggtattgttgtttctggtttcttattccagattttctttacccacgtctttcttgtctaatggtcatttttcctctttgctcttgaagtgcgagaaagagtaccacgtcgtgttgtctcagggaaaatgagctttgtgatttgaaagtaagtcatgtaatataggt

SEQ ID NO: 25770 - DNA, 594 bp, Arabidopsis thaliana columbia
tggaatcggtggtggttctttcttgattgttagctcgcagaaagattccaaagctgaggcttttgacatgagagaaactgctccattagctgcttctaaggtaaaagaagagcttctctaactaatctctcttgatccagttgttcagtgtgtaatgtgtttagcttgtgaattgatgattcaggatatgtataagaacgatgctagtgcgaaatcgttgggcgcattgtctatgggagttccgggagagatagctggactttacgaggcttggaaacggtatggccgtcttccgtggaaaccgcttttcgagccggctattaagctggctcgggacggtttcgtggtgtatccgtatctcggaaaggccatatcgaccaaagttgcgatgatacttaaagatccgggtatgcggagtgtcttctcaagaaacggacaggttttgaaaactggtgagacttgctataacccggagctagctcagagtcttgagactatttctgagcaaggcccgggagcgttctacaacgggacagtaggcgagaagcttgttaaagatgtgaagaaggcgggagggaccataacgatggatga

SEQ ID NO: 25771 - DNA, 511 bp, Arabidopsis thaliana columbia
cagatctttttttgcgaatgggcaggaaaagaagagatgcaacacagattactcacttccgtaatgtggacatttgatatcatcactaacctgacggtggaggagattgagcccaacaggaagagcattttgagcagctttccagagcaggagttttgttttgggtgaacttttgagtgaccagatgttgctattccactcaaatccatccgttgagaggccattgagagctacatcgttgggataatcaatcgggtaagtcccatgatagcctgattttgcagtatagattccatcctttattggtagccacgcccaacaatccgctgcacctagtttgcttggtttcagagttagaatttcttactcgtattgtgggagaatggttctaatgagatccttgttccaatcgcagaaatttggtaataggaggtctgagacagtcatgttttgagtgttctctgtggggggactattggagagagaggtgatgataaagatatccaagggg

SEQ ID NO: 25772 - DNA, 695 bp, Arabidopsis thaliana
tacctttgtagggtttcctcacttttttttatccactgttctttagttttcaatgtgtcaaattcaaacagataacatttttcgtcaaaagaatcagtaaaaactaaacattttgactatatcctacttgaatcaattcttcggctgattttgaagttttgtgacattcagatattctagggttttgtggtaaatggaatcgaatcacgaaggcaacgcgatacaagtgattgaccaagtaacaaccatgacccatctgtctgacccgaatccgaaaaccaaaccgggtatgatgctcatgaaacaagaagacgggtatttgcagccggtgaagactaaaccggctccgaagagaccgacttctaaagaccgtcacacgaaagtagaaggacgaggtcggaggatccgaatgccggcgggttgcgctgctcgggtctttcaattgacccgtgaacttggtcacaaatccgacggagaaacgatacggtggttattggaacgagctgaaccggcgataattgaagcaaccggaaccggaactgtaccggctattgctgtatcggttaacggaactttaaaaatcccgacgagctctccagtgttgaatgacggcggccgtgacggtgacggtgacctaataaagaaacggaggaagagaaactgtacgagcgatttcgtagacgttaatgacagct

SEQ ID NO: 25773 - DNA, 523 bp, Arabidopsis thaliana columbia
gtatttctttaccttcactttcgcgcagatcctgtcgctgactctagtcgtctacgttcagtctaatgtcagttggacgatcggtctaaccatccctgccgttctaatgtttttggcctgcttgattttctttgcgggcgataagttgtatgtgaagatcaaagcctcgggtagtccattggccggtatagctcaagttatagcggttgcgatcaagaaacgcggattaaagcccgcgaaacagccttggcttaacctttacaattactacccaccaaaatacgcaaactccaagctcaaatacacagaccaattcaggtaaaaaaaacacaccccatgaatagtattttcactttctttatatgttttatgttactgaaaaaaactttcctatttggcagatttcttgataaagccgctatcttgactcctgaagacaagttgcagccagatggtaagcctgctgatccttggaagctctgtacaatgcacaaagttgaagaagtgaagtgcatcgtgagag

SEQ ID NO: 25774 - DNA, 417 bp, Arabidopsis thaliana columbia
gtggcttaatcatcagtttttttttacctataaacaaatttagctaggcttttggagttggagctgctaaactggagaccaactgcagcctttggacaatgaaggttcagatgcgactcggcccagttcacgacggcccaactgcagccttgtcgggacaaccgtaatataatacccacaacccactcgatagaagcatcgccccttgaaccctagctcccgcaactgccgccgccactcccacgcccgcagccatgccgcccaagctcgacccgtcgcaggtggtggaggtgttcgtccgtgtgaccggcggcgaggtcggcgcacggtcttcgctggcccccaagatcggcccgctcggtctttccccaagaagatcggagaggacatcgccaaggagacggccaaggactggaa

SEQ ID NO: 25775 - DNA, 590 bp, Arabidopsis thaliana columbia
  unsure (1)..(590): unsure at all n locations
nnnnnnnnnnnnnnnnnnnnnnctaaagctttctggcctggcggcgggttgtcatgtcattgcggttaacgctccggcagataccccgcgcctgaatgaggtcgatttggtcctccacagtctggagcaaattactgtgaccaaacagccaaatggcgatgttattattcagtgaaacacctgatcatgatttagccccgtctcgtcggggcttttttatggcagaatcaagtcatccccctcaattaacaaggataagttgtgaacggtgaattgatttgggttctttcattactggccgttgccatcgttttgtttgcgacgggcagagtgcgtatggatgcggtcgctttgtttgttattgtcgcgtttgcattaagcggaaccgtgacagtcccagaagtattttccggcttttctgatcctaacgttgtcctgattgccgccttgtttattattggcgatggtttggtccgtaccggtgttgccaccgtaatgggaacatggctggtcaaagttgcgggcaatagtgaaatcaaaatgttggttttgttgatgctgaccgtcgcggggcttggcgcgtttatgag

SEQ ID NO: 25776 - DNA, 511 bp, Arabidopsis thaliana columbia
ctactcattcagaccttcatggtgtgctctgaactcagacggaaatatcttgaagcacgtttttcaagttcaatcgtgttcaaaggataaggaggatacttgaatcgttcccttggatgtgggacattcattacctggatggagattataaagtaaatacacaatgttaactagagatggagtgtcagatgatataattccgtctgataagatgtttcatttttactcacagtggcagtaggttcctcaacgcacatctcatataatatgacagctgaagcataatcgaagagatgaccacgcctgcaatagaaattatatcaatgtaactttcaagaagattgggaacaacaataaggaaggcagttgaaaatcgtacatccaattaaaggtggcaaggccttcttctgattggtgagaacagttgattgtccaaaactcttctggttcatgtgcctggatctccagtatcgctcgacaataaagccaagtgtaggaaacttcagttgaa

SEQ ID NO: 25777 - DNA, 570 bp, Arabidopsis thaliana columbia
catatcgaccgcgaacggcgctgatcgggatttgctcgcccgcttctgcgctggatcgcagctcaagtgcgagaactgcggggaggtcaccgccaagtccacctacgtcaccctcagcgagcaagtcgacctgcccaaaggacacggcgccgctcacctcgtccagaaggtatcctcgcaaatatcaccttcctcctccttacatctctgtggcaggacggattcgggttccctctgcagtactgttggtgtgcatgatgagactggactatgaggagtgcttgttagtgtggaagatggaccaattaacttgttattatgtttataaggtgctcgcatagtttagatattttagtactgttggggaccagttgaaatactgaaaaaacgacaacaggacaatatggttaaattgttagacccttctctcctgcctgcgaaggttgtagagggaagaaagtgttgcaagggtttttagttattctttgactttgagaacaattgtatgacaagcctgttatttgaatatggtcattcaccttgttcaacaaagaattgataacaaagatt

SEQ ID NO: 25778 - DNA, 428 bp, Arabidopsis thaliana columbia
ttcgataccgaggaaataactcaattcgccaaggtctttgagagagaaccgagctgcaagagaagcattgaatccctttatcaaggacgcatcaccggtgattatgatatcatcaacgtagactaacacataaagaaatgcattagcgctcttgtatataaacaacgatgtatcagcaagagaattctgaaatccggattgaacaaggaaattacgaagttcctgataccacgcccgaggtgcctgtttcaacccatataactctttccgcagtctacacacatgatgaggacgatcacgatctacaaatcccggaggttgtgaaagataaacctcatccgttagtgtgccttgtaaaaaagcattgttgatgtcgacttgatgaatattccagtttttcttaaccgctacttccagaaccatacgaa

SEQ ID NO: 25779 - DNA, 1569 bp, Arabidopsis thaliana
accacaactgtgctgctatcagcgcgaaagatactggggactatattatctcaatgcgaaactattatggatatatgggaaaggtgtagaagtagtcctgatataaaacaacaaaattgagttataggtaaaagcgtaatgatgtggaagtacacttgtgtatatatgactaatatgtacccagttatgtataaatgttgatgaaccctaggttggtaataaacaggataagactcataatagcactggtaagaacttgcaatatcttaaatgatagaatgtccttaatcctgtttatattcagaaaacggatattgaattacaaaatcatacaagtacctgattcagtaacaccgaataggatacaactttcactcctgatgatgagggaagcgagggtaaagattcaattaaccctccaacaacctacttggtcatgagaagtatcacgaacagagagaagacaaaattaatttggaaactgtagtcataatcctcaaaagaataacaaaagatgagttttcttcataccaccaccaggcgtacacttggcatctcagacaaacagctaagtaactgaaatctccagcagtaaatcaagcaggaaagcaagcaaaaagaaatcagaaaaacgattattaagcaaaagtacaagcacttaaagaaaacagtcagcaacatacacatcatttgagtaagggctaaaaaaggttgttgttttttttttctcactatcatccaagtaagcaattttttaaaaaagagaaggaaattaaagcaggagattgacagaacttacagagtttaaagtctctgccacacaaaatatggcttgcacagttgcatgattgacaataaatttcacagcatcaggaccttgagcaaaaacaaagagcagaattagaacaccccacgaattgtgaaatggaaataatacgccgaaccaaccagatacttaccaagagtatcatacaaaggaacagacacataagaataagaagaacaagcatgatcaacaatgagccactctgggcgattgatgaagtaaattccaacagaagatccctggtagaagaaaaacagagacttgagtctagctgcaaacttaaaaatcaatcaggaaggagagtaagaatccaataatttaccatggggattccgtgatgaaccaaaccagaacctaaagcagttcttgctgtaccagcttctccatatgtcatccatttgtagctgaaaaaaacaaaacagagtcacataagaaaactagcttcaaggaaagtactttcgtgcagatacacatagattgagtaagttaggagctcactctccaacagttccgtcgacacgaacacgagttcctaaatacttgtaatctcgaaaatcatgaacagcatgcctacatagaccccaagaacagtatcaatcagagagatgactaaagaattgatatagaagagatgatcagctttcgggagactctgattcatactcaaaattgtcatggagagtagcgatgtcaggatgatctgggaatctgctaacgagcttgaacggagattttgcagatct

SEQ ID NO: 25780 - DNA, 443 bp, Arabidopsis thaliana columbia
aaagttggagcaggaggaatacgcgcgggaacaaattgaatggcagttcatcgactttggcaaagatttgcagccaacaattgacctcatcgaagtcacaaaccctatcggtattttttcttgcctggatgaggactgcgtcatgcccaaagccacggataaatcgttcaccgagaagcttcattcgctatgggacaccaagtccaccaagtatcgcgcctctcgcctccgacaaggctttatcctcacccactatgcagccgaggtggagtattccactgacggttggttggaaaagaataaagaccccttgaacgataacataaccagactgctcgcatcctcgcaagataatcatattgcagctctgttttcagactgtggaaacgcagatgaggttgaccatccagaagtcgcgtgaagaaaggcttgtttcgcacagt

SEQ ID NO: 25781 - DNA, 528 bp, Arabidopsis thaliana columbia
tccaaacattttattacaaaagatctattatctcccaaactcttcttttctttcaattcccattcctcaaaacattctctccttacaataaaatcctccggtaatcgtttcaatgggcttcaaaccatttcttgaaggtggcatcgccgcaatcatcgccggagctctgactcacccattagacctcatcaaagtccgtatgcagcttcaaggcgaacattctttctcgctcgaccaaaaccctaaccctaatcttagccttgatcataatcttcccgtgaaaccttaccgacccgttttcgctcttgactctctcatcggcagcatttccttattacccttacacattcacgcgccgtcttcttccacgcgctccgtcatgacccctttcgccgtaggggcacacattgtcaaaaccgaaggacccgccgctctcttctccggcgtctccgccaccatcctccgtcagatgctttactctgccacccgtatgggtatatacgactttcttaaacgaaggtggactga

SEQ ID NO: 25782 - DNA, 1668 bp, Arabidopsis thaliana
ctgaatgagttatggcatggtcaggacactaatacaaatcactagataatttccttatacatgtatgcactaatacaaatcactaaattctacagtaaaaagctagaaggcaaagtagctctcataactggtggtgctagcgggctcggtaaggccacggccagcgagtttctccgccatggtgcccgagtcgtgatcgccgacttagacgcggaaaccgggacaaaaaccgctaaagaactaggctcggaggcagagtttgtgcggtgtgatgtcacggtggaggctgatatcgctggagccgtggaaatgacggtggagcggtatgggaagctagacgtgatgtacaataacgctgggattgttggacctatgactccagcgagcatatcgcagcttgatatgacagaattcgagagagtaatgaggattaatgtttttggtgttgtctccggcatcaaacacgccgctaagtttatgattccggctaggtctggatgcattttgtgcacatcaagcgttgcaggtattaacataaaatcaaagtcttagattagatagaaaccttactatatcaaaccaaaagatggttacttagtagttagtacttagtacttagtacttagttaagaatgtataatatcatatcgtattaatcaaagcttggttagtacttagtacttagttaataatgtataatatcatatcgtattaatcaaagcttggttaaacaaaaacttaaatgaagcttaatagttttcaatttgtggtcaacactcaaatttgacttttggtatggacaaaacaatgtaggcgtgactggagggttggctccacattcatacacaatctcaaagttcacaactcccggaatagtcaagtcggcagcaagcgagctctgcgaacacggcgtgcgtataaactgtatctcaccgggtacggtggctacaccgctcactctcagttaccttcagaaagtgtttccgaaggtatcggaggagaagctacgcgaaacagtgaaaggaatgggtgagttaaaaggagctgagtgtgaagaagctgacgtggctaaggctgctttgtatttggcttccaacgacggtaaatacgttactggccataacttggtcgtggatggtggcatgactgctttcaaaatagctggttttccttttccttcggattcatgatcaatcattttgtatcgtctataaataactttgtactgtattcaagattttatatcaaagttggatcttaaaacatttaataaattttcaaagcaaccaactaaatataaaagtttctatagtaagagttaactttgataacatatgactttcatttgaatacaagctggcatgaacttgaagctttgatcacagtttccaactcctcgaccatctcaactctctctttcgaggtaaggcgttttgtgaggaaagttgctttatccaaacgacttgcgttactaaggatatatttcgtcacctctttttcatcttctcgccattcgtagtcttcccatacaaatgtctccagatggagtaacatacatttaggaatattctttggctgaatccatttccacaagggtacgccatctaaacttttctgccatggctgtggttatgagatcaatggcgagttaacacaaagtaaattaca

SEQ ID NO: 25783 - DNA, 512 bp, Arabidopsis thaliana columbia
tgtgagccgggtgtgaggcgtcatcatcatctggacgaggtaatcctccggcggcgacgcttgaggatctccggaggtgtagtcatgttggattggcgaagaacaacgttgaatctcgtccgttacttcctgggattgctgaaaaatctgtgtgctaatgaaatttgcaaacggaatgtgattgaaactttggttagagatttaattttgaaagttttaatttaatttcgttgctattttttttaatgatttttgactttgtttttgggaaggagatggcaaaattagggtttgatattgtttttggttgtcgccagtgtcgtcgtcccagaatgatgaagatttgatgaaggagatagtttttttggagagaggagccctcagtttttaatttagatatttttgattctggtcgagagattcttatttatattactcttggctattttcaatttgtatattcagatttctgaattttaactgaggaataataaattaatttggaattattg

SEQ ID NO: 25784 - DNA, 610 bp, Arabidopsis thaliana columbia
ctacagtaacaaaacgtttcaacaatctgatccattcggtggtgaattaatggaagcgcttttaccttttatcaaaagcccttccaacgattcatccgcgtttgcgttctctctacccgctccaatttcatacgggtcggatctccactcattttctcaccatcttagtccctaaccggtctcaatgaaacaaaccggtacttccgcggctaaaccgacgaagctatacagaggagtgagacaacgtcactggggaaaatgggtggctgagattcgtttaccgaggaatcgaactcgactttggctcggaacattcgacacggcggaggaagctgctttagcttatgacaaggcggcgtataagctccgaggagattttgcgcggcttaatttccctgatctccgtcataacgacgagtatcaacctcttcaatcatcagtcgacgctaagcttgaagctatttgtcaaaacttagctgagacgacgcagaaacaggtgagatcaacgaagaagtcttcttctcggaaacgttcatcaaccgtcgcagtgaaactacctggagaggactactctagcgccggatcttcgcagctgttaacggagagttat

SEQ ID NO: 25785 - DNA, 515 bp, Arabidopsis thaliana columbia
tacctcatcataatactctcctactgcattgtgtttgttgtgtacagctcatcttacaaagtttatttggcccgtcctttgcctcgacctcctctgcctcttcctctacctcggcctcttcctcttctgctgtatgccaagaccttggtatttcccgggctgctacttgctgagtttgagttaggtagagactggtctcctgggagccactcttcttcatgggtgcttgaactgttagaggcacttgagtggctgtcattgctttcgttattaattgcaccatctgagccattccctactgtcatatcatcaccatgaatttcagctataggctgagaagccttggtttcttctggtggtgtgggtttttggtgaccttcgataaccgctggtgaactgaaaaagtaaggctttgcttaggaggaaataatgtcatcgatgtcaactagccagacaaaggagttgcttttcacgtaggtgatgaagatgggaaactgttagaagtatgacgtgat

SEQ ID NO: 25786 - DNA, 584 bp, Arabidopsis thaliana
tcccttgagtctgttcgatgagatgaaaaaggcaggagaatcgcccgatgatgtaacattcctgtctctgatttcagcctgcaatcattccggttttgtggaggaagggaaaaacatttttgagttcatgaaacaagactatggaatcgaaccaaatatggaacattatgcaaatatggtggatcttctaggacgtgcaggtctcctcgaagaagcttacagttttataaaagcaatgcctattgaagcagacagtagcatatggctctgcctcttatctgcttcaagaactcatcataatgtagaacttgggatattgtctgctgagaagttgttgagaatggaaccggaaagaggcagtacctatgttcagctaatcaatctttacatggaagcaggattgaagaacgaagcagcaaagctgttgggtctgatgaaggagaaaggcttgcataaacaacctggttgcagttggattgaagttagcgatagaactaatgttttcttttcaggaggttcatcttctccaatgaaggctgagatattcacgtattgaataggttaaagagtaatatggtagatga

SEQ ID NO: 25787 - DNA, 549 bp, Arabidopsis thaliana
tcccctgatgtgttaaactaaactcggagatgttgattgcggttcagtgtaagtgaacatgtaagtagtgcggtctaatggaccagagccagccgggaaagccttaaagcaacaataagcatccttatattaaaaccatttctttgtggttatgggaattgtgttagaatggggacagatttttttacctcccaaaagagttgtacattggaatctgcaactctggtcaccgatgaactgctatatataacgtcgcttgatgagttctctttaaacccatgagcacaagatccaacaacaaggcacattccatctggctttctaccacgtttgatcttttgtagcagaatacataacaagaaaagtattatgcaagggcaatacacaatttgctcaagaaaagcgaatcagtaagttttatttttttaccaccataactaatgcaaatgaaaatgtaaaagtagatatgttcttaggccaagatatgacctgcttcagaataggagaaaagtttcccatgggcatcaatacgagaacgggagataatgt

SEQ ID NO: 25788 - DNA, 631 bp, Arabidopsis thaliana
aaccatcctgcctagcctccggtagtgttcagatcgttggcaaatttatacatcgacaaccaaccgttgaaacgtaaatcgtcagtcagtttcacatcccagtctggcgcgattttccagcgctgcatattcgccgtgtctttacccggttcatcaacgtagtgataaccataaattacggaaaccgccggtcaggccgaaactgaaatcatcgttttcgaggaactgataatgcacctccagctccgggcgatcaaaccacgttccacgtttacccgcgctataatctaccggcccttcctgataataggccagagcaattctccacggcccgttggcggcattaaaatagactgaaggctccgccagcccatccatatcttcgccataaccctcgacgttttctatttcgtacatcgcgccgatattaaagtgccagtcgttcctttcctcggcctgtgcgcagcgcattcccgcacacatcaccagtgcggtacagggtaataactttttcattattgttccttgtattatcctgggggaatgccttccccctgtatttagcgaattgctatttccgtttctgcatcaaagaaatgacatttcgtcatatcaaaatgaatagtgatat

SEQ ID NO: 25789 - DNA, 577 bp, Arabidopsis thaliana columbia
gagttgtaattaaatcaaggatagaagatattgaactgatgcatatgcgttatgctctggaggcaatcgttttagcactaggtgcaatggaagaggctatgaaggatgagacagatgctagtcatcgagtagtattttaccatttaaaagacctcactaaccatttggaggccattaaaaatgttccacgcaaggtagtatacatatatacattgattaatttacaagaatctgggcttttctcatcaatttggttgtaacaccatattgaaaaaagtagaagtgcgttactatttactttgaataaaaatgataaatatatggtgtgcctcatactacatcatcacgcagtgttatttctatcaaacattatatttttgcaatacgttacagtttacatgtttttaacatgagttctcttttgtttgcagataatgatggtgaccatagttattcactcttacatattgatgatatctgctcagttctacgcaaagtgcctctcggcgatgttttctgaaaaagtacacacgtggtttggatcgtgcgatcttggtcagaaggggaaaggaattgt

SEQ ID NO: 25790 - DNA, 652 bp, Arabidopsis thaliana columbia
  unsure (1)..(652): unsure at all n locations
cagtcaataatcttctcaacatcttccttagtaacttgaaagttatcacaattacgaatcgcagattcaagcagaatcctaatagagtaaggaagtttatctgcaaatacaacactcctcttcagattctcaggtccttcataaactcattcaaagagagattcaaaaaatccataccaactcgtggatcgttaagagcaggtaagctatagaactttccgaattcaccaccaccaggcttaggaagtgtagtgaagatccctttaaacggatgctctgacgctgaaacaatcataatcacaaaacagttactactaatcaacagagatcggaataaaaaactcaagctagatcaatcagatcgagatattttacccatggaagagaaggttctctggagacgatctaagactggagaaacagctctgatctgagaggtgaagcgaaacggagatggtttcgagtgaaaggaatggctccagcgacggaaagcaggggaaatggtccaaaagatctcgagcgagaagagacgacggagaagtagatgaacggagggagataaaaccgatcggaaagaganaagagaagagagcgagaaaagcactcggatgatggaggaagagcggagatgaacgggtaaatcatgatgatg

SEQ ID NO: 25791 - DNA, 569 bp, Arabidopsis thaliana columbia
catcagacgtctcaagaaggaggtgagtgtggaggaaacataggcaatgtgtttcttgaagaaaaagaagatcaagacgatgacaacgacaacaactccgtgcaactacgttttattggaggagaagaagaagatagggagaacaagaatgttacgaaaaaggaggtgaagagcaagaggaagagagctagaacgagcaagaccagcgaagaagtggaaagccaacggatgactcatatcgcggtcgaaagaaaccgtaggaagcaaatgaatgagcatcttcgtgtccttagatctctcatgcctggctcctacgttcaaagggtatgatattcataaattatatcttaaagaaagaattttcgtgaatgtttttttatatgtatatgtacaactaattatactgtctacaccaaatattaattgtataaaatagggagaccaagcgtcaatcataggaggagcaatagagtttgtgagagagctcgagcaactcctacaatgtcttgaatcacagaagcgtcgaagaatcttaggagaaaccggtaggacatgacaacgacaacgac

SEQ ID NO: 25792 - DNA, 517 bp, Arabidopsis thaliana columbia
tcctgttcttcttgatcattatcatctcccccttgatcattgtcctcctcttgaggtggctcattctcttgatcttctttttcatcatcttgagcttgatccttgtcggcgtttcgaccccggggggtccctggaccgacgagtaaattaatctagttggtcattgggggcctcctaaaaggataggttcgatctatggtcattgggggcctcctaaaaggatatactaaattcatctagttgttctaaagaatcaaaactgtcggttattaatggaattccttgtcggctttccgtgaaatactcgtttggtcgaggacttccaaacacgtcataagctaaacccgtactgacaaataaccaacccacaatgaatagggaaggtatagtaatgctatgaataacccagtatcgaatactggtaataatatcagcaaaagaacgttctcccgtgcttccagacatgctgagctccaaaaattttatcaaaaaaggaattgattccgtaaaagatggg

SEQ ID NO: 25793 - DNA, 575 bp, Arabidopsis thaliana
ttgaggacttgaggacactcctttgggatatctggtcttagtccgcacgctgcaatcccaaccgctgcctgcactggtgagcaagacccatatgcctcctcccctgtcaccatctcccaaagcaccatcccaaagctatacgcattgctcatccaactctctcttgtcttctccgggtctcccgcgattatctgatttcagccattcacaaactacagtcaacaactgcttttccaaatagaatctacttatgcataattggacaaggagaattagtgatggtgaagcatgtaggtagctttcagatgtctggtattgcatctataaccgaaaagctagaccttgaagcctacaagtataattacatcatccaatcaccaggcaatgtttttttgtattattggcttacagatcacatatgatgaggtaatggtaagcatgaatcttgaggcaaatcaatgaactatgatttatgcagggaaagcgtcaaagaaatacagacctcgggtgcaagccatcgatagccatccgtttcatactccatggcctcgttgacactcttgcatgcagtgact

SEQ ID NO: 25794 - DNA, 573 bp, Arabidopsis thaliana columbia
gatacatcaagttggttcacaatcttatgcttgatttcttgctaaaacagtattttgggtgttctattgatacaataacgcacttctgtgatcttcatgtgcaggtcacttcaatatatttgttggggatttgagtccggaggttactgatgcaatgctgtttacttgcttctctgtctacccgacttgctcgtaagttttttataccatcctcagcattcttgtattggaaatggaagtttaagatttgcagaaactcttccgacaattgctattgtatgtagggatgcaagagttatgtgggatcagaaaactgggcgttcaagaggatttggatttgtttccttccgtaaccaacaggtacttgactgtctaactctcagtccttgtgtatagattggcttttactttaaacactgatcgattgctgcaaatcttatttccttatgcaggatgccagactgcaatagatgagataactggtgagtgttcaatttgtttcccccttgatagttgatgtaatattttgttatttagctttgtgtttttgagcttattgtaattggtgggaga

SEQ ID NO: 25795 - DNA, 502 bp, Arabidopsis thaliana columbia
cccggaaaaaaagtacaaacattaattatgcggccttatcaggaaccttctgattctagcagaggtttcacttaggactcatacaatttaattaataactctgttttgtttcccgtcttaaccggttagagtccgtagacttgcgagccgttcttcgatcttcataagatttgctctgagaagctatgtactcaaatgccaccaccacatctcctatttttggccggtgattcgcttcgtcgtttaggcacatctcggttatagaaatcgcgtagttaagacacctcttcgagaactttccccgtagcaacgggtcaactagaagtccaaatttcttaggatctttgagatacggtctagcctgcattaacgcgaaaatgaaaaaaaaaacacggttaaattaaacgagagattaagttccggtttaatctggttacaattgttaatcttacttacccaagcaacaaggtactgctctccgtttggtttactcaaatcaatg

SEQ ID NO: 25796 - DNA, 611 bp, Arabidopsis thaliana columbia
ggtttcaatactaagtacttaagattcagctatgttttgaagtcttcttacatttgtgcctcaaaacacttttttcttcagaaatgtacaatcgtgtgggagataagagtagtgggatgggaggtttcgtatggagcggagtttgtgccggagaacaaagaagggtatacagtgatcattcagaaaccgaggaagatgactgcgaaaaatgaactggtggtgtctcatagcttcaaagttggagaagttggcaggattttgctaactgttgataacccgacttcgaccaagaaaatgcttatctacaggttcaaggttaagcctttagcttgtgagtaacaaaagccgcatctttcgtctgagtgtttcttagtttagaacttgatcatatgattgttgattgtgttttgtttttctctcttttaccgacttatatgtttgtgtggttctgtttgctaaattcttttgttttatattgtattttgctctcttattttttatttttcagtttgcttccaaatttcactgaggaatgtttttgacttttgagtgttgaatggcttttaaaggaaaccaagccttagctttcaagtagtacttcaagaattaag

SEQ ID NO: 25797 - DNA, 670 bp, Arabidopsis thaliana
agcattcacatcatatttatcatcagggtgagatccaaagctaccattagcaacaatggcagtacctattctcaacatatcgatgtttgaaatatcgatctctttgatataaccacctctgccttttgtggttctaaaggcaatgccggttaacgagtagtgtatatgagcgttatcaaccacgacatcagatattccaccagacatttcactgccaaaggagatagaggaaccagaagctcctcgaaggtacacatttcttatatgaacattttcagtgggacgagaataggcaattccatattcatcccaaccgcttttgagggaaatcgcgtcataccccacgttaatggtagagttttggatgcagacgtaatcagaagaatctgagaaacataacaaaacataagacatttcgttcttctatgcttagacacaacaaaaagggttttagtctagaagaagtagagacaactaacctggtacaataccgattgtataaggagatttaggagaagaatgggccaatatcttatgaatatatacatggctgcacaaggacagtattagagtcaagactttatcattcaaaaaaaccaaaaaaaggttgaggcctagatagtgttgaactatctcttacctagagtagattgaatagattgaataagca

SEQ ID NO: 25798 - DNA, 895 bp, Arabidopsis thaliana
gtaaactacagattcaaaaacctgttgtctgtggcattgcttctcttgggatggatcatatggacatattgggtatgccatactatttcattagtcgaacgtaggttctctctcatgcttctaactctagattctcaatgctaattctacataggaaatacgctagctgatattgcctttcataaggctgggattttcaaggtacttttcaaaagattttctttgtctcagaattttatgaatccactatatttgtttcaaagtttcccattggcagcttcatgtagaagaaattctctgatttgctttgttttcttgtatgttaatgaaagcctcaaatccccgccttcacagtaccacaactctctgaagcaatggatgttcttcagaaaacagctaataatctcgaggtaactatagtaggttctatatttcattctagttatgccatgtattcccacggttagttattactacaagttcaaaaaggttgtagttctgataagagtttatcaaatacacatgccagtgtctaggatcaatataatttaccaccagggtttctatctttggttccttggtgtcttggcctcttggattctcagttttggaaataaagcagtttaagttttaaaccttatcgtggtctttttggcgtctgtagcttagttatgcttttataaagaattgaactacaagggcgaaatattgaatgttgtttcgcctgcattacaggttcctctagaagtagtagcgcctcttgaacctaaaaagttggacggagttacgcttggcttgtctggggatcacagctagtaaatgcaggtcttgctgtttctctttcaagatgctggcttcaaagaactgggaattggaagaagatattccaaatgtt

SEQ ID NO: 25799 - DNA, 644 bp, Arabidopsis thaliana columbia
taaccttgactttacactgagaaattgaaaccagaaccaaagacaaaacatcacctcctactatctagtatctaccaaaactccaagcgagctaaaacatattaaatggaacacaaacgcaagagtgagaaacgaaaacgtttaatacctgagaatgattgtacgatgacgatggataaagctcgacacgaggagctgcggcggaagtggcggcagatctgaggagagaagataaggccattgctaagctaccagaaacagagagatctcgccgccaaaaatcctaaccccttccgctgaatggcttttgagtgtagctctggagccacgaaaatgttcgtttgagtaaaaaaatgagacaaatgcaaattgcaattgcaatttctcatgtaaaatatgcttacgattctgcaaagacgatgactgtgttctgatgcgtcgcggcccatcgtaactacttttgcgatgagatctaagggttgagatttcacggaggaaaactacaaagccgcgtgtaccggatcggcgtcaaggcccatgatttggtgggcctttggtcatatttgaataacgttgacgtatcttttgttgtttattgagttttccacgcgaaaataaaatgggcctgatttagtttgacacgt

SEQ ID NO: 25800 - DNA, 571 bp, Arabidopsis thaliana columbia
tcctgttaacccctttgagccaccggtatcgaaaatactcgagagctcttcgaaagttgaatccacagctcccatctgatcagtgagaagagagatgaatatgattagaggagatctcattgctgataatggaaccaataacacattgctaataaaaaactgtacctgactttgaacccgcacttagcattgctggacctattcgttcccgcacaagtctaccacttatcagactaacaatgacatcaatctacacaaagattaacaagaaacaagaatcagttcgaatcaaatctggaaaaaaacagagcagatgagtagttcaaatgaagatctcagctcaccaagtagaggagacatccaaaacgtgactcattagatttcaaagaacaagagatgactcaaagacttcgatagagaaaacagctcccgaaatggcgtccaacgccgctcctcggataacccactttcggtttcttggcctatcaaagctccagtaagtgctccaagcaatgtgcccactgaagaaggaacaactttcttagctctacataaaactcaaagttgcaga

SEQ ID NO: 25801 - DNA, 561 bp, Arabidopsis thaliana columbia
caatactaagagaaaatttgtgagttgtgataggtacccgaaagatgtttatgatcgttcgtgggttccatatattcaacccgaatggaatcaaatttcaacaacttcaaatgtgtccaataaaaatcactatgatccaccacaagttgctcttaagatggccgcaacgcctacaaatcttgatgcagcactgacaatggtttggcgtttggagaatcctgatgatcaaatctacttgtacatgcacttctcggagatccaagtcctaaaagccaatgacactagagaattcgacattatattgaatggagaaacaattaacactagaggtgttactcctaaatatcttgaaataatgacctggcttacaacaaatcctaggcaatgcaacggaggtatctgccgaatgcagttaacaaaaacccaaaaatcgacacttccacctctacttaatgcttttgaagtttactcagttctccagcttccacaatctcagacaaatgaaattgaaggtatcacactaaaagagacagttattttatcattttgttttgttataag

SEQ ID NO: 25802 - DNA, 476 bp, Arabidopsis thaliana columbia
gagccccttcctcaggaacgacaccacctcatccggggagttgccaacctttttagagctgataagaaactcaataccctttgacggctttctattgaatagagtgacgcctttctgcacataaaccaagaaagatgataaaggcaattaacatgaccgaagagaaaaacaattctactaatatcatcgaatgtggtggacaatattttagttcttttatgatgcaatataagacctggagcataatatacactctcttagctcgtcgttaccgcaaaggatgtggacgtctgctcgctcaatggttctcatatgtctaatctatcctaagcatcctctaaattacttagtatgttgtagtagctataactttttaatatttttttggtcatagaagcacctttccccagagcatatgtaaataacaatgttccattttataatagaaattcacatttccatcaaaaaaaattaca

SEQ ID NO: 25803 - DNA, 521 bp, Arabidopsis thaliana columbia
ctctctgtcaattgaccaatcatagagtgaattctctttttgcaggtcagtagggaagactcaaatgaatgagcaatcatctagaagtcatttcgtgtttactatgaggatttcaggtgttaatgaggtaataatgttttttcttgccttgtagacttttcgttcttatttttgaaatccttttttatcaacactttttatcaacacattcctcctctttcagagcaccgaacagcaggtacaaggtgttctcaacctaatagatcttgctggaagcgagaggctatcgaagagtggggcaactggagatcgattaaaagagacacaggttttttgttgtttcaaacataatctttccaagcttttgctttcagcatatccttacttatctttgttctacacaacaacaggctataaacaaaagtttatcagctttgagtgatgtaatatttgcattggctaagaaagaagatcatgttcctttcagaaactcaaagctaacatatctgctccaggtttgt

SEQ ID NO: 25804 - DNA, 516 bp, Arabidopsis thaliana columbia
cccgccttatgttatagttgggattgcttatacttggatcagatagtagagcgattgtttggttcttaagaaggtgttgtaactctccaagtaaaaattctgattgaggaactgagcaaatggaattttgtgttttccagattctggttttgatccttctgctgctggcttgcatgtaacttctgatgtaaaacccaaggttttggacgtcattgactggtatagttttgtgatttaattgaattttgcatttagtgttctttgactgtggcgtgatggtcattttacgttatcgtttagcactggaagtggagatatagatacatccacagtggtgaaagccaatgaagatggtcatattcgtggagcatcaggttggtgatttgagaggttttatgatttctgcatgatagtttgctttctctatcttgctacgatatgcgttgataattcgttttgtgtaaacaggggcaactttggttgtcaattcttcatggaaaaatcccactggagagt

SEQ ID NO: 25805 - DNA, 651 bp, Arabidopsis thaliana columbia
tacggatgattgagaggatgaaggcagacaatgtgttcccgaacaagagtctagctgcgaaactggctcaggttaatccgtttaaaaagtgtccagtgtctgttttacttgacatataacgataatcatcttatgtattgagctgttaagtgtttgttctggttgcttccaagctaggaaataataaacagaggattcgtttttcttccaaagtttctcatttttgagtttgtgttcctgtggttttttgtaagtgacataaactggaataaaattgaactggactagaggtacgtggaaaaaattatcgaaccgaagcaaaaactagactagtagaaattggaagacgaaaccgagaagttgaaccgtaaataaataaacacatcagagccgacatgaaccgggttgggtatatcaatgacgtgggacccagcagattataagagaattgaaaaatacaaaaatgcggtgagcgtggatcgaacacgcgaccttcagatcttcagtctgacgctctcccaactgagctatccccgctttgttgttattcaatgacacgtgtacttatataatgctaaatgcatttatttttgtttgttttattgaaataaaaaaagcgagattacataaatatgacagtcttttataaga

SEQ ID NO: 25806 - DNA, 598 bp, Arabidopsis thaliana columbia
tattatagtaatggaatgcaacatattaataacattgaacgcgagatattttagaataattgttgtaaaagtttatcaaaaagattttatagttttgacgcatgttgcaaatgatcgtaacgttggaaaacgacgacaaaaaaaatcgttggaaaacaagatataattgtgtaattaattgttgattagaaaattttacttttaaaaagaaagtcgaaagaaaataaggcaatttgcttacctggctcctaagccgggattcgaacacggaaccacggggatgagaccgaataagcttaatgatatctatcaacggctgtgatttatcgccggccgatttgacaccaccgccgcctccgccgcttctgtatttctgtcctttcctctttccaagacaattggacgttcccgattcatccaactcgcctgagttactcatttccgatcttttactaaccgttctttcttcctcctccggcgtctccgccttattaaccggatcgggatctggatttctcgaattctcgttagccttaacattttatctccgtctaatcggtcgtgatcggcgattttatcgacggaggcagttgagttg

SEQ ID NO: 25807 - DNA, 302 bp, Arabidopsis thaliana
aaatccgttgtaaatagtttaaattgctttgaaccctttgtaaatttttaaaacttgattgtaaaaactattgtaaaacatactctttatttataaacagtgtttaaaacataaaaaaagccacagctaagaaaatgtaccttgtcaccatctgctatcattgttacagcttttgcacttggagacgatgttgatctccattggagaatttgtggtctatttccactagatgattcatctctcatgccatacttttctcgcaactcctgaaccgatgctggtgcccatatctggattgatct

SEQ ID NO: 25808 - DNA, 1889 bp, Arabidopsis thaliana
tccaaccatagcttcactgaattgggtatcagcttaactcccttcgcaataacccccttcgcatcttctggattagctaacctacaagcttcaagccaaacatcctcatttttcgggcactcttcgcagcccctctgaatctgaaacctagctgctttaatcttcccatccacctcctccactctagcagcagcaatccagccatttggattctttggattcgactgggtcagactcttgtataacaatctagctctattgcgatcgtatatctcttcatcagtggttcttttcatactcttcaggtcagttaagtagcctttaggatccactacagtttgccccgaaactgaatctgataggttatcaagcttcagagacaacaccgtacctcttccctcaccgacagcagtcaagtctgtcaccggcgtctgcccccatggtgtctccgacccaccagcggctctgctctttgggtctaaggccatgacaagctccttttctttcttcgccttctccaaaagcgtatcaggaataggcacaaagctctcaaacttcttcttcttgttcctcagcgagtaatccccaatctcaggaatactatcccactcatccgcagacaaagtgtgtaatttcctcttcaaatccgcaaactgctcagtaatcttagggttcgaggctcggtatttctcgatttcttccttcagcttcgcttctctccgatctttcctcctcgaatccatcctctgatcaatagactcccagatggcatcagcctctttatcatcctcatcgtactcagcattagcgaacaaaccaacatcattcccttcaaactcatcaaacgtctgattctcatcgtaccttttctcctcagcttcttcatcgtcctccgcttccgcttcacttggcttccctgctccacgacctactcctggagcagccgctgtagccaaagcagaccgatcaggaagatccggagcagcacgagcaggaccaatatcagatcgagtagtaaacccagtagcaccacgacccaaacccgctacataatttgacggaggcttagaattgaggaaatcaagacgaggcttcggcggagccgcttgcataccacccaaaagcaggacatggataatcacagtagagaaacgagaaacaccgagatcggacaataagatcgaatcggaatcctttgaatctacaaacacgcggctagggtttcgcatacggagagagtaacgaaggaaagattgtggaacatcactacgttggtgggccaattgttcgaaggcggagatggtggttgaattagggttcacgtcgatcgataaagtcttcccgtttggaatcgagagaaacaccatcgtaacctaatcgagattctccggtcaaagaaaccaaactataaaaatctctgctgttacaacgaatataaagggtggaaaaaaaatagtcggttcagaggtaaaggcggtgggatatgtagtgggctttttaatgggctttttgaacttcatattgtaaaaccaccgttagtataattcgagcttttcataaagcgacaccgtatatgactatctctgtgtgttttggttttaaacgacgtcgtttgcatggctttgggaaaaaaattaaatgactaaatattgcggtgagcgtggatcgaacacgcgaccttcagatcttcagtctgacgctctcccaactgagctatccccgcttcatgtaacacaatcaatgagtaaaagatatatagaaagaaaataaaaacgaaaagacaacgtaatgcggtgagcgtggatcgagatcttcagtctgacgctctcccaactgagctatccccgcttactgactctttccaaaccaacgtaataaattactagtta

SEQ ID NO: 25809 - DNA, 539 bp, Arabidopsis thaliana columbia
tgtagaagcgaaatgaccattgtgacatccgcgatatgaactagttgcctcatgaacttgcaaatttggaatgttgtggaactgtctaaccctgttgatatttcatccatgaaaagagctgttgctggtccaaccaacatctctcctgctcattttaaacaagagacatacaagtttaagaacacatattcactgaaggaaccatgggaatatcaaagggaacataagttgtacctgttgttagacgtttccgctgtccaccagaaatacctcgtctcatcacatctccaacaagtgtgtcagcacaaatgtccagaccaagtaactgtcaagtggcattaaaccaaggataaggtcaaaaattgtttgttagaataagacagaagcatgcaaaaaagatgtaccttaagtacatagtctgtaaccaaactagtttcttggccagatatagcaatggatttcataaatgcatcaatctcagggtcaggcttaattccagcttctctctccctccttgagagctcagtcaaaagctggta

SEQ ID NO: 25810 - DNA, 573 bp, Arabidopsis thaliana columbia
taatttggtcgatcaaaattccccaataaacaatttacaaaaggcacaaacgaaatgatcaatcaaattgaactgtccattactaaggatacgcgccgagttttcgaattttcctaaaattgctaacactaaaactcaatgcctgagaagaataacaaaaagttgtgtttatttttctgccctggaaagaaaaggaagagactttttcacctgagacagcgatttctagggttttgttttttgggttaccgatttcttctcgaagcttctagaagacctcccagtgtgttggagaagatgacgctctgtggaaagtgggattagagatggtgctaaattcgtcagatttaggacctagccgctgtgatattcgagatttaccagctccgagcagcaccaatgatcagggcaagaccggtgagtttggttctgtttttgtcgatgaccaaactgcaaaaatgaagtttttatgtgagaggaaactctgattggaaagcaatttatctgattcggaaatgagaagaagaaaagatttgtctgttgttgtattgccaaggttaattggtttaagac

SEQ ID NO: 25811 - DNA, 1943 bp, Arabidopsis thaliana
cttcccagctcagtccacccgtctgttatttcatttgtcaaattattgataataatcaactaattttgtgtgtagtgaattgtgatgagtacttacaataacagttgagtctctagcggctagagccaagatatcagcgcaagaaactgtttcaggacactcttgttctaaggcatgtttgatttcctcgatgagttcgaaaccacgggctgagtttctgttagggtttgatcgtttctcgctgattatggttccactgctgtccaatagtatggaagcatcacatccctgcagcacaaatatatatcacaaggataaaaatatattaagattggaaaatttccgtatgtttttaaacgttacgaaattttgctaagcttgagaccttgacgaaacagtcgtggaaatggagtctgagcaaggaggcaggcatgcgaggatcatgttcgaatgctttagcgacaatggactgaacaatctcttgagctttaggacacgattggtcataaaactgaggaaagagatagccgccacttccataggctttggaacacaaacaaaaaggagaaaatgcaatgagcgagagagctgcaataaggatgttcaatgacttggccattttttggggggattctttctcttgatgactcgttgtatataactcggttacttgtacttggtgattgtgtgtgatgccaagggttgcatttatagagtagactttgtggacaattgagaaagacgttggagttggtatctaattttagctatatattggattagatggatacattgatatttgaattggtatgaatacaagatttgttagaattcttttcgtatatttctcatgtatgatcactttatgcacctcatatcaatagattattcgcagttgttgtgtgggatttttgttccatgcattagcaacacttaaagcacaattttgcttttaatagtcaacgcggagaagatttctatggggatttatgttttattaaattgagagatcagcctgaagatgattaagctacgcaaaacaattacatccatagggttttacttggttgaccgttgaacaaatagtcaaaaaaaaatgctaattattctgcaagcaaactaattaacattgtgtgcttaacaaatagatacggttgatagagtacgccaaagacataataaacgctagataatgacaaaatcattgagaaacagcttcaactgctctccttcacaaaaccaaaccaactatgtccttttcttttcgtgcagtaatggcaaagaagaagaagtcgtcattttaaagaaatatcaccggacgatgtattgagactttttcaatgtcttttgatcattttctcacgtcttttacctacgttcagaaaatacagatcactaataaaatctctccatttcataggcccaagcatcaaattatgattcggcccaaggttaaaccccagcaaaatggggaatacgagttcgaaaacaggcctaatcccatcttaacatgtacgtctacactctactacactaattgtagtgcgttaacggagttcacagtggacgagaggtgtaacacaaactaagcagaagaaagtagatttatatagatgtgaaattacataacacaaacatctcagaacataaaaagagccagatgctcattacacactcatgtaagtaaacaacacacatcgcaggacgtacatacataaaaagcacaatacaacgaccgaatgcgactgcgttacaaaccctcattatttctatttaatatgtatacacgattgttcgaagcttaacggccaccaccgggaagcttttccttgatcttgtccatcatccccttcttctcgtggtgctcaccaccgtagccaccagcatcatatccggatcccatgccgcccatcgcttgagcttgaccagactgatcatgatgc

SEQ ID NO: 25812 - DNA, 522 bp, Arabidopsis thaliana
tgacatcttgttcggtgagccaagcgggcaaagaaggtggatcaggtaaacctctgaaaccaactgactttggaatgcaaggtggacgtgggttacgcgaagtgaaaaatctggttattaacttttttgtatcaacttgagcaaagtcctcttcgatctctccaggctcctgagaaaaaagaaactcaaaatctttagtaggaccaacttaagcaattgaagaccacaagactgatccaactacatttacttaaagcaagtaactcaaataaagtaaatgactttgactttgactgcactatattaaagtaagcactaattgcctttttctaatcatcaatagcaacttgcattatcagagtcagagcctgagctaagttcagctatgtataggtaggtggctggtctctgtttctatagacacaaacagaaactaatagtggctaagaaatttctcattgtgtatacatttacacataaaaagctcaactttcttgaagcagtatcaaggcatggcaaaaa

SEQ ID NO: 25813 - DNA, 533 bp, Arabidopsis thaliana
aaagtgccagcgtggcggtcggctggcgaaatgacgtctggagctgggatatcggtaccacgccgatgggcttcaacgtggtggatgtggtcggcggcatcagttacagcgatgatatcgggccgctgggttacaccgttaacgcccaccgtcggcccatctccagttctttgctggcctttggtgggcaaaaagactccccgagcaataccgggaaaaaatggggtggcgtacgtgccgacggtgtggggctaagtctgagctacgataaaggtgaagcaaacggcgtctgggcatcgcttagtggcgaccagttaaccggtaaaaatgtcgaagataactggcgcgtgcgctggatgacgggctattactataaggtcattaaccagaacaatcgccgcgtcacaatcggcctgaacaacatgatctggcattacgacaaagatctgagtggctactcactcggtcagggcggttatacagtccgcagaatacctgtcgtttgcataccggtgatgtggcgggcgcacgga

SEQ ID NO: 25814 - DNA, 501 bp, Arabidopsis thaliana columbia
tgacctttcctcatcccgaagccttagtttgttacctggaagctctcgggattgctctaccccaattaacccccaaccttctctgaaccatcctgggaattataactatcgcggcgggggttggatacataatcagtgttcccgaactgaacgattgccttagcgtgagaagctcgtcgaagaagacgggctacttttcatccttggttcatgattaagaaaatcccagcttcgattggaaacctttccgaagtgcttccatcgaagtgatcagctaagactggtagaagttaggatatacatgtttttctctggtcatctacccttttactaactgaatctgttgtttcacttcgcagccttcattgcccagacgcttccaactaaagaattcatcgaattctttaaaatagtcttcgaaggggaaatccattggaattctttaaccctcgattggttcatagaggctacccgcaaactcaggatgagtcctcctgacac

SEQ ID NO: 25815 - DNA, 602 bp, Arabidopsis thaliana columbia
aaattctctggatttgaatgaatcaaatcaatcactgttagttaatttggaaattttgaatatgatttcaacattttctcccagattatggaaaaacaaatatatgtgaaaaggaataatgaatattctttgaatttataacaaaaagaataactacttttgcaaaataacaaataacaaaatcaataatatattattatttttaacgattgcgtaccgttcatccaattttgctcaggctgaaaatgaaacgccgttcgttgccacgacaacatactattgttccattcaaacgccggcgtgttccgatcaccggaaagtttccataacccatcgttacgtttctccgacacaccagcaagacgtgcacgtgacgttatcgtctctgtttcatcgatcccttcgtcgttggatctagatccgtcgtgtgtggcgatgagagcgacgtaaaaggcgatgaacaagagaccaaatgagacggcgaggagacctttaaagggtcttcttctccgggggccatgggtttcttgattcgggtcggccattggtaatctcgtgtaaggacataatggttcttcttctctggcggagattggcaagag

SEQ ID NO: 25816 - DNA, 565 bp, Arabidopsis thaliana
cactcatccgcagcttgaaaggtatatgcggccgtatgatgaaccattgtgaatgtgctcatctatagagaaacaataatgcgaaaccaacttagcttctggtgctatatcgaaaaagagagaatagggaaaaagcataaaatagaagcatttacccagaagtgatagcccaaccatggcattaaccagaattttacccatcccaatataccaactttgtatacgatcagtggccacccaacggccatgaaggcgaaaacacaagccaaacttatcttcaccctattcacctcgctcgctctgaactttttcagattgaagtgccagttcacctattagaacgcttattatagttgagtaaagagatatataaagagagaaaaaaaattgaaaaaaattgatcactgcgtaagagttaatctatatataccagtgagctatggacaaccaaggtctaattgggccatatccaaaaatgattgcctttctcatcacgggtgatgactcaaactcctctggcggaactggctgccaagctgtgtcatgaactaacctatagagaggg

SEQ ID NO: 25817 - DNA, 971 bp, Arabidopsis thaliana
tcatcaataatgcacaaactcaaaaccggagaacccttaccacaaccatgcctactattggtaaatctcattatcacttcttttctttctgatattgaatctagtcttctctatgaattcctgaatcactgtttctaggaacggatgtggaaagtgtaaaatacaaggattcaaacttacgcttttgggaaatgggcggccaacaatgttacaaggtaggagaaagttgttaatttttataaacagtaagatcatatctgattatgggtgattcaaaaaaacatttcagtggtttccaatgacgaaacatgacttccaagaaatagcggggcttgtgcttgtagtcgatagcacagacagagatcgaatagaagatgcgaaagattttcttaatgcggtgattgatgaggtaacaaacaaacctgacttctctaaacattgagcaagtcaaataatctaatgtttgatgccgtgtataacagatacaagggagtgtaccggacaatgtggctgttcttgtatttggaaacaagcatgaagttcctggtgctatgtctgcttctgagatcagtaacaagcttgatctcacttctcttcgtcaaaaaaactggcagagaaactggtaaagaagataagaaaaacctttcaagactctaattttgcgattatgatcgattcttctgatgatctgttttttgattcttgcttgctaggcatgtccagagctcatgtgcattctctggtgatggtttacatgaaggactcgactggctgttgaaaaagtgtgaaagaatgtaagaatgtgtcttggttgttaacgcggaatctctgtactgaaaatagccatcttttgtatcaagttattaacctcatcgtgcttatttgctagctccatcaacaacttgatccttttaaacgagacattactcggtctatgacctttctcaaccatctcaagcaaacatttctca

SEQ ID NO: 25818 - DNA, 712 bp, Arabidopsis thaliana
gtacgttttttaactcataaaactctaactaatgattacaaattgttataccaatgtttaggttcttttgatcattgcaaatgatagaaataggaatacttttctttttttctccaaaatagtaaaatatattagtatgtgatgattgtggtagtaggtgagagatagtgaaagatgacaaaaatatcagactttggttgggccaaagttgacacaaatgcttttataaaagttaggtgacacaattgctcaaattaaataccaaactaagcaattttagtagagttagttatttgattttgatttgaaaaaaataatcttggattagtatactagcaaagcaaaatcggttgttttcttgtattattgcaaatcatctaatgttaattgaaaatatataggctgaagtgagagctttcttcgacgtgcacgagcaagaaggtagccaccccggaggaattcacctagaaatgactggtcagaacgtgaccgagtgcatcggtggttcacgcacagtcacattcgacgacttgggttcacgttaccacacgcactgtgatcctcgccttaatgcttcacagtctcttgagctctccttcatcatcgccgaacgtcttagaaagagacgcatcaagtctcaaaaggcttttgcctctaatcaaataaacattgcttataataatatctatctatataaatgtgtgtgtgtgtg

SEQ ID NO: 25819 - DNA, 522 bp, Arabidopsis thaliana columbia
ccgtggttcaaatctcacatattcgtggatgagctttatagtctttgaccatatcgtcatatctccgaccttcgaaattccgagaaaaaaaacggcgcatgttttttctcattgatgggaaggcaagagaaatatctaacttggcattgaaatccatattgattaatctaaagctttctggcaagtaatcacaaatgctcaaaaagcatagctgaggagcatcaatcacaattcttgaacccgaatcatgccgagaaaagcgtattcttataatgcgccttatcaatgacctagagagcacccgaaagactttcgcattatgcttcaaacatgcaacaatctttaactcttccgagagggaacaggatgagacaagtctctcaaaagtggcttcattgggatacatattatcttttaaatgcatagtcttgagaagaggtaaagaaacaaactcgacatcatcaaagctcacccgagccagttttaggtatacgagtgtcttgcagatataaaaggttaggg

SEQ ID NO: 25820 - DNA, 520 bp, Arabidopsis thaliana columbia
tggtacaatctaacaacaactattaaaatcagatcatgtaagaaccatgaagtcatcttttccctatacagctccaatgatgtcggaactctagtgcttgtggtgagatcatatattccgtagaactgtctcaagaagtttcaagtgggggcaactcttgaaacaaactactgatcgatgtcatcgggaggtaatgtcggactcttggagcacatatccgtcttatgaagctcttttaaccgactctccgggtcacaaagccctaaagatttgagaagaaaagcttggctaattgattcttgtgtgactgctattgctattatgtgagaacatattaatgttacctgagcatttgggaatgtccaaactgctatggactttggggaacaatgcggatcgcataaagcgcggttgtcttcgtgatgtacatccattgcaagcatccaagatccgatagttacatcttcattattaaacattctcagactgaaatgaaaaacaccgataatgagatttgcat

SEQ ID NO: 25821 - DNA, 597 bp, Arabidopsis thaliana columbia
taaaggtcccaactttttttatataaaaagtccccattgttccctcaaatttcagaaatgcgaagaaaacaaaatcttatggttaaggaaatgtaattaacactgataatatagttgtgttcgttttttataatcatcgaacaagttttacacggagaatgaaagtttacagaaaaaaagagagaaatctttcacgccattttttttttctttcagaagaaaccaattggatgatattttcgtctattcaaccatatagttgaaattatcgtaaaaaattcggtcaaaacgaaaagaattattagaagcaatttctataatttgttctgtggtaaaatcaaatattatgttcgtgttacaaattctcagacgttgtcggagctagtaaccttgggtctataggacctattaggagtatgtcgtgaagtttctcttcgttggcccgatgatgaccgctctcgactctcagaatgataatctctcgacctacgatacttgcttcctcctccatgtgcagttcgattgttgtgattctaccattttgacaatgctggacttgaagactaatgctgcacagaggagactcggcgtggtgtg

SEQ ID NO: 25822 - DNA, 1275 bp, Arabidopsis thaliana
gttattggataattttgttgaaattgtctgatttgttctcggtttaacagtgctgagagcggttctgatggatcaagtgacggaagtgatgcaaattcacaaaacgtaagtttctagcatttcattaaatcgttgcgttggatttcatatgaaaattaaggagcgtttatgaatatggtattatttttgtaggactctggctctagacacaacgggaaggatggttagctaatatagctttttagttctcatctcttaacatgtaataatgacgtacatgttagaatctgcttattttgaggtttctctttcttgtttcgtaattcaaggtgaaacagcttcagagagtggtggttctgctcatggaccaccccgtaatggaagtaatctaccagtgaaccagaccgtcgctatcatgccagtgtcggctacaggtgttccaggcccaccaacaaatctaaatatcggaatggattattggagcggtcatgggaatgtttctggagcagttcctggagttgtagtagatgttcccaatcacagccatggttacaggtttctgtaagtatctcctaatcttacttctcctttacgtttatccaagcagcgtgtttgattgttttgtgaaatcaggatgagagagagattaagcgacagagacggaagcaatccaatagggaatctgctcgtagatccaggttgcgtaaacaggtaacataaacatgtttcttcaagctgatctagcatcatcatgcctatcaagtatgaatgatcaaaagcttttccttttctcttctgtgttcaggcggagtgtgatgagctagcacaacgagcagaggttttgaatggagagaactcaagtcttagagcagaaattaacaagcttacaagccaatatgaagagcttcttgctgaaaatagctctctcaaggtaaaagattacaataaaatcttcttctacaacatccataatctgcttgaacataaattgaaagttgctgttttctctggtacccgttgttgcagaataagttctcgtcagccccgtcactggaaggtggagacttggacaagaacgagcaagaaccacagagaagtacacgtcaggatgttgcgtagacggctcgtggttccttccacaactcagcttgactcaagaacagcagctaacagatatatgtaattttaggaaacagatttggtgtgatttctttagtgtttacataggaggaagcatgaacaaaaaaaatagtctcttctttaacaaactgtgta

SEQ ID NO: 25823 - DNA, 541 bp, Arabidopsis thaliana columbia
tagaacactatgtacaagcaacgacatgagacaagtttaaatttccgtatttatgttaaacaaccagaattccaatgtagacctgttattgttacgaaacacatctatgcaatcttaaaacaacaggcataccggttaagcacctgtttgtcttgaaactctcgaatccatatatatccagaacaccaatcaagtactttgaatcaggatcttgaccaattgaagtattaatcttctcaacgagcctgcatagacagaaaaataattagtataaaacagttctgtctaaatacaattcaaacttatttcttcaaatgaagagaattagctactgagaatgtcttcgtcagttgagaacagagaaactcaccagtcaaacaaccttgagtacatgacttttgccaaagcatctcggctaagaagagcggcttctggatcgagagtttttgtgattgtttcatccgggttgccatgatacgcttgcatagagaatctcaagtgacttttcattaccctgcagcaaaagaatatgctagtaagg

SEQ ID NO: 25824 - DNA, 585 bp, Arabidopsis thaliana columbia
gaagatcatagctgttacagtcatacaccagtatctgagtgaaggagttacgataccaaatgataattccaatttattcttgcggttttactttcaatagaatacctcagcttccgtagcatcaatggcatcgctcctctccctttctgcatcgcaatcgaataaaaaagctcgcagataagatcaacataaagcgaataagttactctgagaaaacatggatgtgtaccgcgaaatcttcgggcccaaatgtgcttaaaaatggcgtgaatcagatcctaattccatgaaaatcgaaggtaagaagaatgttagaatcgtggaattgagacgataaaacggcgaagtagaaaaggaagacgtgagaagagattacagaatcgaaggtattgttcgcgtccatgacgttttccgcatctaacgaagcttcctggtgaaaaacaaaaaaaacggagaccgctaaaaactcagaaactattttgaaaaaggaaaactagaatcatggaaaatcacagccattacatacaaaatcacaaaaactattctacaattgaaagatccaagctatatatccttgagatgttg

SEQ ID NO: 25825 - DNA, 626 bp, Arabidopsis thaliana
ccattgatactaaagacagcatcttttacttcttcatcatttgggattctagttagaaagtcgttgtctccctgcgaaaccatgggttcaatagcttcatcgaccactgaaaaatcaccatcagactcagaagtgaaaatttgttggaaatagcccgatataatctgggaaatttggtgttcctcatgctgtgcaacaccattgatatcctccatcacagtgaggcgattttgcgttctcctattcctggtaactgcatgaaagtagccggtgtttcgatcaccactatgcaaccacaaaactcgacttcgttgcttccaaaactgctcttctaacttgtaagcatgttctaacgtcgcagtgagggctcctatggtagttggattaggagggtcagctgtgagagcttcttctaaagctttttgggttttctctatcaattcagcagagttgagattttggagtcttgtccaattaattatctccctacgacattgattcatcttggtgagaacagaagcatctcctgcgtttgtccaagtttcctgaataagggcattgacaacgtcattatctctgagtctgttatcaaaacgaaactgtcctctccgcttaactctagcttc

SEQ ID NO: 25826 - DNA, 560 bp, Arabidopsis thaliana columbia
tgaagcagtaagagtggagtccttggcgccatctactgcaaggagttggtccttcaggagctctagagcagttggtctagaaggagctgggagaagacacttctctatgaattgcttaacttgaggatcatcaactttgctgagagattgaggttttataccctgctaatgcaacaatggtcaaggacgatccctgtgtcgaagagaaatgtaagacttatatatatcaggtcagacttaccgaggtaaccttcttgtatatttgagcctggtttctgcattctctgtatggatattcacatgttaccatctccaacatgcacatgccaaaagaatagatgtcgacaagttcattatattcttcttcataaagctcaggcgccatgaattcaggagtgcctgaaaaacatactcaatatattcagttctagaaaagcttatcctaaaaccaacaagacttaaagaggttttaatagtattattaccaatcacacttcgagcagtgggttgctgcatcacagcagcgagcccaagatctccaattttgacctttccggtat

SEQ ID NO: 25827 - DNA, 922 bp, Arabidopsis thaliana
cttcacagtttcttgtcctaacggcacagacttccatcaactaaccacagtttttcgttacgtctccggtttcaactcttcctggttctcctcaaactgctccgccgttatcactcacgtcgttcttccgtcaagaaaactaaacggcaccgtttcttggaaccctatacgtaatctcacgcgcttacgtgttcttgatctctccaacaactctctcgatggttctcttcccacttggctctggtctatgccaggtcttgtctccgttaatctctctcggaaccggtttggtggctctatacgagtgattccagttaatggttcggttttgtctgcggttaaggagttgaatctctcgttcaatcggtttaaacacgcggttaactttaccggatttaccaacctcacaactctcgatctttcgcacaacagtctcggtgttttgcctcttggtttgggttctctatcgggtttacgccaccttgatatatccagatgtaaaatcaatggtagtgttaaaccgatttccggtttaaagtcgttggattacttggatttatcggagaactcaatgaacggttcgttcccggttgactttccgaatctcaaccatctccaattcttgaatttatctgcaaaccggttttccggttcggttggatttgacaaataccgaaaattcggtaaatcagcattcttacacggcggcgatttcgtcttcaacgattccaaaatcccttatcaccaccgtatccaccgtctaccacaccggcattcgagaacagtgcgtcaactaaacgttataacgcaccgtagaaatcacactcctcttggtgattggcctatcgtcttcgttaggagctttgatcatcgtaatctgcgctgcggctataactttaatccgccggagaatgaaatcggc

SEQ ID NO: 25828 - DNA, 925 bp, Arabidopsis thaliana
gtaccaaattcttcatccaagactttagcaaaaggtgccaaacagttggtggtgcaagatgcattgctgcaaagaaagaccaaaactgaagcatgaatactcaaactcgttcatgctttaatgagatcaaaggtttaactttaaacggacctaataatgttagcgacatcgtgaccatagtcttgctcattgactcccataacataggtagggatatcagcacctttggctggtgcagtgatgataactttcgaggctccggcttggatatgcttccctgctcctggcccatcaacaaacactcctgttccctgatgatcataaccatatacagttttcgattaactaagttccgtagcgcgatttgccatcataataagcagttttcggtagaaatttcacctcgataacaatgtcaatgccgagctcagcccatggaagcttaagagggtctctgttggagacaactttgatgagcttaccatcaacactaatagtttcattgtccacaattttcacttcagccttgaaggttccaagcatggagtcatacttaagcaagtgggatgcctgcaaatttcatcaaatgtcaaaaatgtgttccacaagaagagttcacaaagtttattacatacttacattcttgacaccaccactgtcgttaagtacaacaacttcgagaggagagtctttacgaccatgccaacacctaagaaagttcctaccaatccttccaaaaccgttaatcgcaactttcagtttcgccactgtctctcctctaacaggagttgatgttgtcacagcctaatatttcacaaactcatcacatattcacaaatcatgataacaatacagttactgattcaatcaataaataagttaccttagggatgatttgtgcagctacagcatcgaagaaagatgg

SEQ ID NO: 25829 - DNA, 486 bp, Arabidopsis thaliana columbia
aagagtctattgagataatgtcaaatgtaaaaacctttttttattcgctctatctctctcccagtggttttgaacaagtgaatacaaaaatgttgcatcaatcacccattctattttttcaacctcaacaaggatcatcatgccaacgacgtcgttttcatgtgttgaaaattttcaaaccggaaataaccgagagggtcccacaagagcaataataatattaaaaaaatatcgaaccaatcagagttccgatggaccgccatagtcaccgactaaaaaaaccagcgaccacgtaaatctttgacgacgaggaggaggaggaggagaagaataaacggaagaaactacgagatgaatagtccaccggagaacgatctttgttcgatatgtcattcccacttcaccgctccttgtcaagccaattgttcccattggttctgcggtttactctctctatctctctcaatcctttcgagtctttgattc

SEQ ID NO: 25830 - DNA, 502 bp, Arabidopsis thaliana columbia
gccagtgtgctgtaaagctaacacgtatgatcatgtaacagtctccatcctacctttgtcacaagcgatgtgttcaaatcctttccagaccaccctctgtccgtggacgacaaaccctatcccaagcaaccaaatgttgttttctcttttctggtgtacttccccataaaaagcctcttgaaactttatccaaaccatcgccaatcgattttggtaaagatattgtgctcatggtatgaatcaatatagatgccaacactgatttggtcaatgttagtcttcttgcaaactcaaagagcagcctttccatcccggtagctttgatgacactttttcgaacaaaatagtattagcgcggagaagatgagaattctttaaggatacttttgggatggttgtatggaaacttgggctgtatggaaaaaatggcggaaagcacttggtcgaccaatgtttgccatgggagttatggtggagcttgaaatagaggtgtggttatgtg

SEQ ID NO: 25831 - DNA, 909 bp, Arabidopsis thaliana
cccccaaccctaatgatgaaaccgagaaagcaatatacttgtctgacccactgaagggatttccaccagggccaccaacagcaacttgtccaatctttttgctgaacccaaatctctcaatcatttgacgtgccacacgagacacctgcatgaaatcatttgatgctccagtcgtcacattctcatccccatagatcacctcctctgcaaccctgacatagccaacacaacagagatagagatggtttaacatgattaaacccttctctgtatattcaaagactggcttttgtgacgaggcgtggaggccattactaactaagcttccgccaagtgcaacagccatttgattctcaaggtagctcctactgtacaatccagactcaagtctttcttcgcttggagcaaaaaaagtgagcccaccagcttggccacgaggaatgatagaaatctttgcaaccggatcatattctggcataagagcacccactagagcatgaccagcctctgtaaatttaaaattcatttgaggtggtcagaaaacaagaatcccagctgcgtactccattacatatagttagataaaatgctaaccatggtatgcaacaagtctcttcttctcttcagagacaactgcattcttcttctcaggtccagcaatgatcctctcaagagcatcagagatttcatccttgcttatttccttaagctcacgcctagccgcaagaatcgccgcttcattcatcaggttttgtaagtcagcacccgtgaaaccaggggtccttctggcaaccttgtcaaagtccacatctttaccgagtgccttcccctagaatgacctaaaataaaccaaacccatagagagaataagattcattcacataacccatagacaaccagtacctttat

SEQ ID NO: 25832 - DNA, 572 bp, Arabidopsis thaliana
tagaggatcccctaagaagaggaatattaaacaaagaaacaaaaatacaaaacagagcaacaagctcgataaaatatgagaataaatagtaccaacttttacacaacaaaaacattaccaattttttaatatgtcagaaaaaataaaaaaagtaccaactttataaaatgaaggaaaaaagagtcaaagcacgtggctaaatgaatcggccggtggcagtagtctccaatagatctctttaataactgcgtggtctgaaaaaggaatcttccttccacggccactaaattcactattttcattcacatttattattttcctttataaatacaaattcatttctacacaataatcattcaatacacataatttacttctttctttataactaccatattctcaatcacaacactcgccactgtttcgaatagatggcttctatttcaaccccttttccgatttctctccacccaaaaaccgtacgatcaaagccgttgaaattccgagttttgaccgtccgatcaaagcttccgggtcagaaactcctgatctaaccgtagcgacacgaaccg

SEQ ID NO: 25833 - DNA, 608 bp, Arabidopsis thaliana columbia
ctatttttgaatgcccaccagcactctaaacttgcacattatcacaaataccaacggtcccaggaattttccaatcttcatcggtctatgtaaacatagatcatttattttggagaacacatttatattattttatttttagcttttcttggattatgtgatacatatggaaagcacaaaatgaaaaacttcacgaaaatatggatcgagatccaagggatattctcaaactagcgaaaaacaaagacaatgcttggacgttagcctgattggaggttgcaaatgaaattcaagcctcagtggcagttaagtcggttaatataaatctttcaggatatcattgtttcattgatgactcttggaaagatagtgacaagtttttgggcatgggatggttctgtattttaccaaatgaaggacatccaaccatgtgtgctggaacactcgtctgggcaatgaaatgtatgattggccaagaaaagcgaaaagtaacgctttttataaactgtagatctgatgaagatgatgtatttccaacaaaatggccaacattcgctacatacttaaagacgattcaggaagatagtgatgagtttgatttctttgat

SEQ ID NO: 25834 - DNA, 1157 bp, Arabidopsis thaliana
taaaatcagattttctctattaatgaatggtaatttcttcagatagctgaggattattcgcattgcgagtttctgatacgcctccctggatactgtcctagtaagttatacacatagttccattttttttttctgcataacgtaccaaaacaaaccccatctcttgttcttctgcagtgcctgcgtttcatgatgttattgatattccccttgttgtgaggccagtgcataaatctggacaagaggttagttttcatgtcttttgtcagatctaactagagtccaattttattgcttaattgtagacatgttttttgtcagatttaaccaaatttttaattcatttcaggttaggagagagcttggagttccagacaacgtgaaactacttatctttaactttggtgggcaagtaagcacattctcttatagcttttaatctcaatatgcaaattcgagttattgtttatgatatattgctggtgtgatttgcagccaactggttggacactgaaggaggaatatctaccagctggttggttatgcctggtaaatcgagattcggttatgtcatttcggcttggtttgattgatttcaaaaccaaaataacaaatgaaaatatgtcatatatataggtctgtagagcttctgctaaacaggagcttcctccaaatttcatagcacttccaaaagatgcttatactcctgatgtgattgctgcttcagactgcatgctcggtatcatctatgagtctttcaccgtaacattgtgctgattaactaattcacgtctaataatggtggtaatttcaggaaaaattggatatggaactgtgagtgaagcacttgcatacaagttacggttcatatttgtgcgaagggattacttcaatgaagaaccattcttgagaaagatgcttgaggtgagagacccacagtttgcgtaaatgtttgtttaaatgtttgccttctcctaagaatacttcttctttcttggagtaaagtattaccaaggaggagttgaaatgatcagaagagaccttctggctggatgttgggcccttatctcgagcgtgcggttacattgaaaccgtgttacgatggaggcattgatggtggcgaggtagagtgtgcaactattcatattagcagacca

SEQ ID NO: 25835 - DNA, 452 bp, Arabidopsis thaliana
ccctgtagataaacaaccaaatcaaacttgttaacagaaaatacagagaaagattggatttcaagttacattgacattaatatcggtatgcttgtttcttggatcggaagctaaagaagtctgccatgtattattattgaccggaagagacgagaccgaatggattgtccggtgatcagctgcactagagataggaattgcagcggtaggactcgacaacatgaaatcatgtttgttctttttcggtttctgatcttgatggtcagtgcccgctaaaaaacttcctacaaccacctgttgatttcaaacacaaggaaattaaatcctccggttaacaaactttgcagctttttggactggcaaatatcgtacctgaaccggactcgcggctactagtaaaccggcgaggccaccgcctactacacgtccatcgggacttgctaacgatacac

SEQ ID NO: 25836 - DNA, 1507 bp, Arabidopsis thaliana
atccccgatacaaagcttcagcggacgaagctacacttttggaatttattcttctgttcttaaatcatctcaatcttatgaccaatctactcttgacaccgtctctgtctacaaagacatcggagcaaacgtaggcatcctctccggcctcttctataccgcggttgcaagccgaaaaagcggtaatggtggcttctttagtgggccatggttggttatatttgtggggctactccaatggttcgtcggatatggattcatatggatggcgacgtcaggagtgatcccacggcctcccgtggctatgatgtgtttgttcatgttcttcgctggtcattgtcagcctttctttaataccgcgattgtggtcaccgccgttcgtaacttctccgactatggtgggaccgccgttggcattatgaaggtaggttatattgagacgtgagaaataagatattaattcttgtattaaaaaaaaaacagtcgatatattaaaatgatgatacatatgaccggtcatttttcctatatatagttacataaactagtgaaaatcagtagtttggatgttgtcttgtagaccactaaataagatacatcggtagataacaatcatagataattcttcatacgtacataattctcattacaaacatatatatacttgataagttttgtagcccttatgtgttgtatttcttattttttattttagggttatcttggactaagtggagcaattctggttcaaatgtaccacatcttctgtggaggtgacccaaggaattacattcttctcttggccgtggtaccatcacttctcatcttgacgttgatgcccttcgttagaacgtacgacacagtcatcgcaggcgacaagaaacacttgaacggtctctctgccatttctttgatcatcgtcacctatcttatggtcgtcatattggtcgaaaacattatcggaatgtcaatgcctatgaagatatgttcctttacctttctacttctcttgctcgcctctcctctcttagtggcggttagagcacaacgtgaagaggaacatagattcttgtctttggattttcctgttaccgagagaaccacattgcttgactctcctaagctcaattcttcttccggtaaggtttagttttggttttcttatttattgacgaaggatatatgtatattgtggtcttgaagtgaattatacccttatatatatcttagttaggtcccttagttatgcttatcgaagtgaaattcctaacacatttcaatcaatcgacagatgttaaagatgtcatgaccaatgacatgaacgttctcgaagcaatatgcacaacgaatttctggcttctatttgtagcaatgatatgtggaatgggttcaggacttgcgacaataaacaacatcagacagatgggcgagtcacttcgctactctacggttcaactcaattctctagtgtctctgtggagcatatggaactttctaggccggtttg

SEQ ID NO: 25837 - DNA, 508 bp, Arabidopsis thaliana
ggtcttgtcgtgcttgtggtccccaccagattcaagcgtttaccagttcaagaacgagtttaatactcgtgcttgcaaccatagttccccttggaatggagtgtggtgcgataactctacgggcgcagtcacgaagatacaattcatggcctgtctcagtggaactctgaaatccaacagtagtcttttccagtttcatgagcttcgttcccttcttctcatccataacaacttcacctcctcttcaatttcttccaagtttggaatgctcaacaaattagaggtattgtttctttcaagtagtggcttcctcggccaagttcctttttcattcagtaacctaagcatgctttccgctttagacctttccgataacgagctcactggtagtttatcatttgtgcggaatctacgcaagctcagagttttagatgtttcttataatcatttctctggaattttgaatcccaatagtagcctctttgagttgcacacgtcacttacctta

SEQ ID NO: 25838 - DNA, 463 bp, Arabidopsis thaliana
aagcttggaagggattgaagagagggtgaagttgttgtgagagagaaaaaggtaacggagatgatgaaactggaagagactactgttggatttcagagttccactaagacatgccctgagtcgtagcatcgtgaccgcacccgtggagttatcgcaccacactccattccaagggtcactatggttgcaagcacgagtatcaaactcgttcttgaactgcgtaaaggcttgaatctggtggggaccacaagcaccaagaccaacaacagggttattaaaagtgaaaaagcttgaaggagagacacaaaatagtaagagtagcaagagaaaattcaaacggaaaagcaattcagacactgatgacaactttgtaagaaagaatggattatgatataagaaatgtgagagagaagattggtataaataaagatagaatgtggttttgcatagtggaagaagtgag

SEQ ID NO: 25839 - DNA, 633 bp, Arabidopsis thaliana
catgctcatagcaacagacgagattttcgggccggttcaaaccatactgaaattcaagtacaaatctaaatgctaaaccaaaaactttctctttgttgacattttctgattaaactttactaatggcttttgatgtttcttagggatcttgatgaggtgattgcaagggccaacaactcaaggtacggtttagctgctggagtgttcacacagaatcttgacacagcacaccggctgatgcgagcactcagagttgggactgtttggatcaactgttttgatgtacttgatgcatcaattccatttggagggtataagatgagtggcattggtagagagaaaggtatctacagtctcaacaattacttgcaagtcaaggctgttgttacttccctcaagaaccctgcctggctctaaaccataccaggtggttacacttatttctcgagtttggtttatgatttgcacttttgctttgaaaacctggagttgtactgtgtctctaggatttctagattttgagagtaatttatcttcaatacattttgcaaataaagctacatgacaatgtgtgattaataaacacaaactcttattagtttcattgatgtgtacatgaacttgactaataac

SEQ ID NO: 25840 - DNA, 645 bp, Arabidopsis thaliana
cacttagctctcactccttccactatgcaaaaccacattctatctttatttataccaatcttctctctcacatttcttatatcaaaatccattctttctttcaaagctgttttcatcatgtctgaattgcttttcagtttgaattttctcttgctactcttactatcttgtgtctctccttcaagcttcttcacttttaataaccctgttgttggtcttggtgcttgtggtccccaccagattcaagcctttacgcagttcaagaacgagtttgatactcgtgcttgcaaccatagtgacccttggaatggagtgtggtgcgatgactccacgggtgcggtcacgatgctacaactcagggcatgtcttagcggaactctgaaacctaacagtagccttttccagtttcatcatctccgttcccttcttctccctcataacaacttcacctcctcttcaatttcttccaagtttggaatgctcaacaacttagaggtattgtctctttcaagtagtggcttcctcgcccaagttcctttttcatttagtaacctaagcatgctttccgccttagtcctttccaataatgacctcactggtagtttatcatttgcgcggaatctacgcaagctcagagttttagat

SEQ ID NO: 25841 - DNA, 624 bp, Arabidopsis thaliana columbia
gagagattctcggaagctgtttcgttggatccaaatagagtgatcttagttgaagatattgagcaagctgattatttgtctcaagtgggtttcaagagagctgttgagagaggaagagtttgtaattcgagtggtgaagaagcttcgcttaaagacgcgattgtgatcttgagctgtgaaagatttcgttcaagatcaagagcttgttctcctcctagtaaccagaaatcggacggttcagatcaacctgaggacaagaatgttgctacttgtgttgcacttgatctaaacctatctattgatagtgcgtacgtttgtgaagaagaatcatgtgatgagattggcttactcgaagcggtagatgcacggtttcatttcaagtgttcatcaacataacactaacagcatgcacgtatgcatgtaacatggcccagtttatgaacatgatcattcgcattacatggtttatggcaaccgttatttaatttgttcccttacggacttatctttcattgggttggggcaatctttgggtaaacgtgtagttgtagattgcttttcaatttggttaggactttttagaggataggggtaactaagattcctttttacctttttttttgc

SEQ ID NO: 25842 - DNA, 561 bp, Arabidopsis thaliana
tcaagtatttttactttaaattttcattttactggtattgtggcctgtcgtccccaccagattcaagccttcacgaagttcacgaacgagtttgacacccgcggttgcaacaacagtgacacctttaatggagtctggtgcgataactcgacgggtgcggtcgcagtgctacaactaaggaagtgtctcagtggaactttgaagtccaacagtagcctcttcgggtttcatcaactccgttacgttgatctccaaaacaacaacttaacctcctcttcactcccttccgggtttggaaatctcaaaagattagagggcttgtttctttcctctaatggcttcctcggccaagttccttcctcattcagtaacctaacaatgcttgctcaattagacctttcttataacaagctcactggtagtttcccacttgtccggggtctaagaaagctcattgttttagacctttcatataatcacttctccggaactctgaatccaaacagtagcctctttgagttgcacagctacgttaccttaatctcgcttttaacaacttag

SEQ ID NO: 25843 - DNA, 621 bp, Arabidopsis thaliana columbia
tcttctccccatcacacagaaacgataacatcgacataaaaccctgtggtactctacatcacttccaaaacgactacaactatgtcaaccccacaatcatttctatacatcaaaccaaacacatgacttctaccttcaaatactttacacattcctcccaaaacattctctaacgacaaactctctccaccatttaccccacaatccaacttcgattgctctaacaacttatactcatagttcaaaggagtgtttcttgcaccaagaatcaaaaccgttttaaattcacttaggctatccacgctctctaacactcccttaaccaaacttccatagatattagactccttggaatagttaagcataagacgagcatcaaagatcttcaaacgagtaccttccacagataaaacttgagttgatccaaccatacaaacttgtcctgtagattccgaccaaaacccgtaaaaatcgaaacttgctcctccccaagagctacgtccgtcgatctgcattacctgaagctttttctggccaaaatcgccgccgtaataagaagaagaagcagaggttttggagatttgtaaagtcaatttcgcttccaccttgtaaatcttccca

SEQ ID NO: 25844 - DNA, 986 bp, Arabidopsis thaliana
ctctcacaatgtctcttccagaacaaatcatcaatgggatgtgttgcaagaaccgcttttgaccattccaacgtatatgaactctgccaattcacctatgagattatccatctcttctctaaaacctatatctcttcggtcacgatcaacaacgtttattacctatgcatcccccaaccgttccttgtagacttcctcccggtttttcggcttgcgggcttgcacctacgctctcgccacttggaaccagctgactcgacctagactcggactcgagaagaagtttgcgttgtgtcttccttctgatgaaaaccctttgaaaaaaggtgctatttactttggtggaggtccgtacaagctcagaaacattgatgcaagatctatgctctcttacactcgattgattacaaaccctagaaaactcaacaactatttcttgggactcaagggtatttccgttaacgggaataggatcttgtttgccccaaacgcttttgcttttgaccgcaacggtgatggaggcgttactctaagcaccatattccctttcactatgttacgaagcgacatatacagagtctttatcgaagcattctcacaagccacatcgggtattccacgtgtcagtagcacgacaccctttgagttttgtctttcgacgacgacaaatttccaagtgcctaggatcgatctagagctagctaatggtgtgatttggaaattgtctcccgcaaacgcgatgaagaaggtcagcgatgacgtggcttgcttggcttttgtcaacggaggagatgcggcgtcgcaggcggtgatgataggaatacatcagatggaaaatactttggtggagtttgacgttggaagatctgcttttggatttagttcttctttgggtttggtcagcgcttcatgcggcgactttcaaacacggccatgagaatgtcaaaacaacttgatagttgacattatcctgtgattgaatattt

SEQ ID NO: 25845 - DNA, 527 bp, Arabidopsis thaliana
  unsure (1)..(527): unsure at all n locations
tgaaaccaaatgtttgttaaatccaatactcatccaatgaaacatcaaatctgaattcatggtataaaaatcacctgagaccagacaggaatgatgattggagtgtggattccaatgtgccgtcttcttgattccttatgcttatcaaacatttggttcattacacggaaaagctgcaagatgcgttcatcacttctagcattaggcgtcaatgatgtctggactataaagtgcttttgcgagccatctgagccaataagagtcaaccgcctgaagctgcttccatgccttcgaacaataggaacgtctgctccaaccctatccaactttactgtatgatcaggtgctacttcctggataattgagcataattattttcacaatcaaatcaaaattaaaaaagtgttccataaattaagtgcaagggaaacgtagttcaaatttccagacttaatagtgttatttctacctggtcagcaaagtactgccctggtacnccacatcaacaacattaaagtcacgcaaaa

SEQ ID NO: 25846 - DNA, 1143 bp, Arabidopsis thaliana
gtctttcaaaataaaataaaactttaaaccattacatcaaacatgcactaaatatttacattaacatatcattaattctctttcagacaacacatttttttttgtttatgccaattttaaataataaaaattacatttcaaacatacatgtttctgctacttcgcatttgggcacgcatgagacgagtcacatacatacactcttcccagttcccactcttaacttttcttcactctaggcaaacacaaccaccaaacctaccaactcgcttaaatcgaagcttaccaatcacacttgaaagcttcggagaatgattcttacttaaactcatatccttacttgcatttgttacactcagactcgccgcaccagttgcagctgttataacacaaacatcacattctgtcaccatgcaattaccgcctaagaccttgtttcttccatttactgcttggaattcaaattcaacgtgatcagccattatatttggtttgtttccctcaccaccacctcgatgcatttcggcatcctcataaaacacaaacatgtgatccctttgaacctcaggagcttctctcggagcccaacacctaaacactttctctgctttaccagtgaccacccttttctttgtcttccatctgcttacgcacctaacgccaagcccagcgttgttgtgactatcatccgagaacgatactacaacgaagatagcaaaccccaagagtgtctttcgcagggaaggagttatctctatcgttgcaaatgaacctgcccgcaaattataagaggttgcctgatctgctcctgcaggcccgcaaatgctgaatgcaagtgctttgatgagttcctggtcccaacaagaaaaaggaaaattacatatacgctaaagtatgtatgagtgagaaagaagggacatgagaacgagagagttacctgctgatgttcgttgccaatgcttgctactttagccaggccttttacaactcgttttctagccacttttggagacttattgaagcaatcgctgaaggtgtaatgactaggaaactgctcaaatccccaagaaactgactctagagacacacaaccatgcacgttcaacagtttcaggctttggggaagcgccggaagcaatatga

SEQ ID NO: 25847 - DNA, 614 bp, Arabidopsis thaliana
caataaaatgcttttgcgagccatcagagccaataagagtcaaacgtctgcagctgctcccatgccttcgtacaatttgtatgtctgctccaaccctatccaactttactgtatgatcaggtgctacttcctacgcatttaaacatataattaggtcaccaccaagcacaaagagaaaagaaaagaatgaagggcaaaacttctataatttatagcccctctagagaatgtaaacgttgtaagtaaacaagagacgaggataacaatccaaattacctggtcagcaaagtactgtcctggtatctccacatcaacaacattgaagtcgcgcagaccgttgctctcgtcttccaatctcaacagaacagggaacctgtcttcaacattgctctgaagaatgtttttccagtctttcagtttctttgtcagatctgcgagtgtgacagggaatgaattactttctggatcaaggtcacgctcgaaatcctgtttgtatctctcacaaatgcgacatgcttggtcacggcatctgcagaaaaacaagctccgtgatccgccgagagttctttcttgagtggttggggaacttcacagtggtggcagtggatattgta

SEQ ID NO: 25848 - DNA, 607 bp, Arabidopsis thaliana
ggacagttgtagtaaaggtgggctccagactcatccaatccacctaccagcaaaccaacaccatagggtcgtttccatgatcgttgggtacagacctgttcataaaggcaaacatacacataaatatttccttttccagatcaagaaatataacaaaaaaaacccttggtaaagacaagaaatatgacaataatgtaacttaagttggacctgtcaagtaaaatctctcctacaaaagagtaaaccaactaataaagtttgacaatgaggaaatacaagacccttccttttataaacacatataatatatgggagctcttcccaatggctttgaaaagtatttatgcagatgtggataaaacagctaacttaagaaaccattagataggtggaaaaacaaagtgagaagtagcacataattacagaaaagatgtcgaacaagcacctagcaggagtaattgactggtaagataagtgcatagtggtgagaacgatgcaaaacaaagagcggaattcacttcttagaggtactgaaaatcaataactccaaataaaaactgcagaaacaagcaaaagcaccagaagaaacacaaatctctttctttta

SEQ ID NO: 25849 - DNA, 783 bp, Arabidopsis thaliana
cccgtctcgtgctgacgtgtacaagccacagctcggtacatcagcactctcaacagttacgatctccccatccttcgcttcatccgtctctcagccctccgtgatctatccgtcaagtaagtaaacataaatattatgttactataacctagtaaaatatgcatgcctgatgcatgttaatatgtccatttctatatttaaacatgactcttgaaacgtgtgtgggtgtagaacgcaatggtgcttccacagtggaacgcaaacgcgaacgctattctttacgtgacagacggggaagcccaaatccagatcgtaaacgacaatggtaacagagtgtttgacggacaagtctctcaaggacagctcatagccgtaccacaaggtttctcggtggtgaaacgcgcaacaagcaaccgattccagtgggttgagttcaaaacaaacgctaacgcgcaaatcaacactctggcgggacgaacctcagtcttgagaggtttaccacttgaagtcataaccaatgggttccaaatctcacccgaagaagcaaggagggtcaagttcaacacgctcgagaccactttgactcacagcagtggcccagctagctacggaaggccaagggtggctgcagcttaagagcttaaaactgcagcttaacaatgaacctcgagtactgtaaaaggaagttaaacagtacgtagtaataataataatgtacgaaaatgtgactagttttgttgaggtttactgtaaaatgcaactccttttctgaataaaatcttt

SEQ ID NO: 25850 - DNA, 578 bp, Arabidopsis thaliana
gtaaatgcagtgtttggcagtatcatgcattcaaagagtgaatccttttctccatagaactcgtgtttgtctctattgattggatatgtctgtttctttcagctcatatgacattctttttactataatgctgttgcaggctttttgaacgagctttggtttacgttggaactgattttctttcctctccgttgtgggacaaatacattgagtatgagtacatgcagcaggactggagccgagttgccttgatttacaccagaatattggagaatccaattcaaaatctggatagatatttcagcaggtaatttttactgattgcattaatcattattgtctgtgctgaattggatagagtctatttatgtggattgtcatggttatggagagaaaacatcatttgatgcactatgttgatttagcacttaatcgagttcagctatctggcaggtgtgctgtatcatacatttgatatatgcttaatctaattttatatttcatctgtcatagcgagggtttttatgttttgctcataatctttagtttctttctgatgtgtatgttgcttcgttttt

SEQ ID NO: 25851 - DNA, 2072 bp, Arabidopsis thaliana
tttttggcgatttatatatggttacttaaccgttctcccactatcactctggtgacggttcttctctatttttccgacgatgtggtttcctttcgacccatttctccgacggttatctccatgactatttcaccttctcgtcgtgatgatattggagcaattgtaaagatctcaagtctatttatacccagatttgcaattcgtctattcacagttcttgaaaaaattatccctcttagactccctttccccttttgatattatcacactctacgcaaaatggctgataatctacgacgggcagtacaagacattaacttgggtgtggatgacgaaccagtggcgctttcggcagcagtggtggctcaggcagcggcggagaatcggttcatcctcatgggccgaccggtgatgcctcgtcgtcagaatctccgatcaattgtggcttccatgccccggatctagggtcaatcgggcctggttcatgggagaattatcccagggaatcaatttcaattcatctttccttctgaggagtcgatggagacggttatcaggagaggtccatgggctttcaatgatagaatgctgatacttcaaaggtggtcaccgctgggtaatcctccactcctcaacttcataccgttttggattcaaatccgtggaattccattccatttcctcagccgtgatgtcattggcgagattgggcgagcaattggaaatgttgtggacattgacttcgatgcagaggcagcggcaagaattgaatttgtgcgtgtgcagattagttggaacagtgtgaatccactccgttttcaacgcaattgtcaacacgttgttgaggttccgatttgaatgtctgagaggtttttgtgaggtctatcgaatcgttacgcatgattcaggagcgtgtattctttgtaatggtgatgctgattcaaattctgatggtgatgaagatgatgatatgccaaatgctgagccataaaatcagggagtggtcatccgtgagatagaagaaggagaggagaatggaggccttgaaatcctctctgtgattgctgatccaggggaagaacctcgtcatgttgaagatattgacctgatgcctaactcaccggttgaggatgatgatctccgtgattatcaacgctacagcatgtaaagtggtgaatatgatactaatgagttgtttacccaattccaatctttgagaatgcaacaagagatattccaggtgatgaaagttacagtcgctattctgccaacattcattctcaacctgaagacatggcgcaaccaaagaatgatcatgagaccatggctgcagaaaggggaaagaggaagcgagaggactctctggaccagactgaaggcaatgacaacttgaagatggtgatacgcgaacggacacggaagtggctcttctagcatgatcacccagtgtagaggcgcagtgggccccaaaccaccacaaccgccatgaatacaccctgctggaactgtcaaggtttaggcatagaccttacagttcgacaccttaaggagatacgtcggaagtatctcccggaaatcttatgcctattggagacaaagcaaggagatgacaaagtcagagatgtatgtgttgacttaggttatgacaggagtagttcagttcctcctgttggattgagtggtggtgttgctgttttctggaattctaatgtttccctttctgtagtttcctagtcttctaatcttgtagattgctatgttgaaagtaatggaatctgtttctacttgtcctttgtatatggtttcccagaaccaagtaacaaacacttattatgggaacgattagaacggatttcaactacaagaagagaagcctagttaattatgggagactttaacgaaatcaaatccaatgatgaaaaaagatgcggtcctccaagaccagagagcaggtttttggatttcagaagaatgattttaacatgtgattttcatgatcttaaatcctttggtgatcgattctcatggaagggaaagatatatacacatgatatatggtgctgccttgaccg

SEQ ID NO: 25852 - DNA, 1078 bp, Arabidopsis thaliana
atgttgtcctgctcaggcgaagtagacacaagcggttaaaacaaagacaccgaagaatccgataacagttgcaagatcatagtcccaaagcttcttccaaatctccactcagccgaaatcccaacctccgcactaaaaacccgcacaagaaccggtatggtcgccaaataaaccgcatggtttatgaggtagtggtaaccaagtttcacgtacttcaagttcaccgactgaagaaaatcaggcaaacgtctcctgaccctaaccgagaacgttggtgagccggcgttaggaccggatggttcgatcccacgattaacgatctcggtagagagcagatcttgctcgttggatctacccattcttgtttttgttttgtaggttgattatgtgagtgagatctataggttgatgaagtgtatatcttataaggagttgtgttggcaaaaaatgtaaatatgaatatgtgtagttatatgagagtaatggtaatattgtggggattgggtttggtggttggtgagaggtagttaatgtcgccaactacttgtactggtcgtagttggagtgagttatgtcactcttaattcctccgttctaataaggtgtagttttggatcttatgtttgcatttattacaattttttatactaaccagatgtcaaaggataaagatgaccactttttgacaatttgacaatttgtcaatttggggtttctgaatcagttctgtttttttttttttttgaattaagctagtaactttggtttggttaaaaaccgacaggtttgtggagaactttggtttggtttttgtttagaacatgatgtcaagacaatgaagtaaattcggaagtaaagattgtactgaactttttagctgttgatttgatgttgtatgattgcttaatttatgtacaacctatttgatctcctttgtttatttctttttatcttattgttgtgatgtaaaatttaatatgcaacaagaaaatcttttacaaagttgagtttgtactaagctaaaaaagtggaacataaatttcaattaagatgatgagactgccaatagagaaagatg

SEQ ID NO: 25853 - DNA, 502 bp, Arabidopsis thaliana
gcgtcagaatttctgattgtttgtcccatttagtatatttcacttaacataatgaagcttacagttgattagcaatacatgaaccaaaaatttaagaacactgataaagttgcattccacagtttgaaatggctaaggcctatctgaagcctgttttgggaggcaatatcattgatgctagttgtggaagtgggatgttctcgaggttattcactagaagtgatctattttctctggttattgctctagattactcagagaatatgctgcgacaatgctatgaactcttaaataaagaagaaaactttcccaacaaagagtttgtactttcaccttttgctttctttattgtctttagatcttgggttaccagatgtgttatttttactcctggtgtctcgtttccaggaaacttgttctagtccgagctgacattgctagactccctttcctttcgggttcagttgacgctgtccatgctggtgctgctctgcattgctgg

SEQ ID NO: 25854 - DNA, 555 bp, Arabidopsis thaliana
gttatcacacttcaagctcacaaaagcacatggtgtctctccccacatcttatccggtttagccaccaccgcagcttccttcaccaccggatttgtatacagaaccgtctcaatctctgcgctgcttatattttctcctccgcatatgatcacatcttttgaccgatctttgatctccaagtaaccatctttgtgtataaccccgatgtctccagagtagaaccacccgtcctctctcatacaagccgcagttccttgagggtctttgtagtatcccaacatgactgagctgcctctgaaaacaatctctccaaccgaaactccgtcgtgtttcacactctttcctgtttttcgatcccttacatcgacttccgtgaatccgagtgttcttactccttgccttgacttcagcctagctctctccaatggatcaagatggtccacttaggcttccaagcacatgacacaaccggaccgctagtctcttgtaaaccgtatgagtggctgacgttgaaacaagtgatctgctcgggagataatggttgctggtggggg

SEQ ID NO: 25855 - DNA, 553 bp, Arabidopsis thaliana
ccattagtcccatagagatcttaattcgtgttattaccattacacaggcggattccagagaggctaaagacgatcttaaaagtgcaaaacaactaataaagaagagagaacagcttcagacatcaggacaggacaccgacactacacgatttgtggtcaacgacaagaacatagagccaaactaatgaaccagagacttgtactgtggtgtagagaagaaatttgtagagtacaatataataataacaacaaagcaagaacgttcttcatcaaggcaaggacttagccatttgtctgagaagaaacttttgaatctttccagtagaagtctttggaagctcttccaggaaaaccacattccttggaaccatatactttggcagcttggttttacaaaactcccgtatctctctctcagtcacagacccgtcatgatacttcaggctgacaaatgcacatggagtttcccccacatcttgtctggcttagcaccacagctgcttccttaattgcggggtttgtgtcagaactgctcgagtccgtgctgctgatg

SEQ ID NO: 25856 - DNA, 619 bp, Arabidopsis thaliana
taaatatcatttctcatctcaatttactgcagacttaatctctatgaactctgccgatctcatcatagctagcacttatcaagaaattgctggaaggtattttaactaatttcatttagacaatataatgcatttgttccatttgatcaaaaccagcctggtttgacactatcctgttttttttcaatcttgttagcaaagagagggctggacaatacgagagccacatgagcttcacagtcccggggctatacagagttgtctccggcattaatgtcttcgatccgaggttcaacatcgcagctcctggcgcggatgactctatctatttcccttttaccgcacaagaccggagattcaccaagttctacacttccattgatgaactcttgtatagccaaagtgagaatgacgaacacatgtacgtctctattccctattttacttttccacaatactacacggtctcaagaagcgttatagattgttatagaatatgaaactaactattaatattatttgtaagtaaatgttatagaatgttatctatgtgtattaaaaaatactaaccgatatttttcttgtgaacaaaagcggttatttagtggacaagaagaaa

SEQ ID NO: 25857 - DNA, 675 bp, Arabidopsis thaliana
attggagactttattgcatgacgaagagagatatcaagaaactgtccatgatgtaccttctctgcatgaggtgaacagaatgattgccagaagcgaggaggaagttgagttatttgatcagatggatgaagaatttgactggacggaggagatgtttaatcatgagcaggtgcctaagtggcttcgagctagtaccagagaggtgaatgctactgttgctgatttgtctaagaaaccgtcaaagaacatgttgtctagcagtaacctgattgtacaacctggtggacctggaggtgagagaaaaaggggccggcccaagagcaaaaagattaactacaaggaaattgaagatgacattgcaggttactctgaggaaagctctgaggaaaggaacattgattctgggaatgaagaagagggagatattcgacaatttgatgatgatgaacttactggcgctcttggagatcatcaaaccaacaagggagaatttgatggagagaaccccgtctgtggttatgattacctccgggttctggtagttataaaaaaaatcctcctcgtgatgatgctggttcgtcaggatcttctccagagagccatagatcgaaagaaatggcatctcctgtttcttcacaaaagtttggctctttgtctgcattggacactaggcca

SEQ ID NO: 25858 - DNA, 888 bp, Arabidopsis thaliana
cttaagaaaaaaaaggaccaaaaaaaagaaaagaaagattcgtcggaaaaagcaggaaaaaaaaaagaatgcaagaaatgtgaagtgtgtttgactctttcattggtcagtgtgaaaagtaaagtacatttacacttgcaagaaaaaaaacacagagacgaaccaaaacctcactctctcccctgaaactaatcttccactttttcactgtctgcaacttgcaactacaactagcaagcaagaacctttcttcttcttcttcttaatctcagattcttgtctgaaaactttctctttcattttctctcaatttaacactttcaagatgccgatcaacaaagacccatcaacacctcctcctgttatcggaaaaatcggtccttacactgtctttatgactcctcctgcgactcctaaaccacctgaatctccctccgctgtgtctcagaagcctgtgatggcaccaccggttcttcctccgccgcagcagtttaaatcggtggcttcttctgaccaggacggctcagttttggggttctttaaaaacgccgtcacaaaggttcaaaatggtgagaaatctgataaacaattaactgattttcagctcaaagtttcctcatttttagatcttgaatttgagattgattttccgataccctttgattgattgattaggaaattgaactcaaaaatgatataaatcgttgtaaagtttctatctttgtgaagtgattggaaagtactaatgttacatgaattctagcttttcatactgtttatgtgatttggtcctaaaagcaattagattgtgaatttgacattcatgttgtgtgtgtgtgtctaatcatttgactacagccatcaagtgtggatgatcattggtgaggt

SEQ ID NO: 25859 - DNA, 1265 bp, Arabidopsis thaliana
aaacattaaaaacgaaagatactgaaaaaaaaaaaaaaactcacgagtcgtgtgtgactcggtgactcgcgactcaaccgaaccttacccaatactcaaccacacaacaatgggccaagctccgtcgtctccggcggaaccaaacgtacgcgatacttctttatgtctatggtcaccggaatttctcgattgcgaatcgattggtttcgaagacggagattacgatttcacggcaaatctaccagacgattgcctcgctcatatctttcaatttctcagtgccggagatcggaaacgatgctctcttgtatccaaacggtggctattagtcgacggacagaatcgtcaccgtttatcacttgacgctaaatctgagattcccctttcttaccatgtatcttcaatcgattcgattccgtaacaaagctcgctcttcgttgtgatcggagatcttttagcttaagcgatgaagctttattcatagtctcgattcgttgctcgaatctgattcgagtcaagcttcgtggttgtcgagagataacagatctaggtatggaatcgttcgctagaaactgtaagagcttgaggaaattatcatgtggctcttgtactttcggtgcgaagggaataaacgcgatgcttgagcattgtaaggttcttgaggagttatctctgaagagaatcagaggacttcatgaattggctgagccaataaagctgagtttgtctgcttcacttagatctgtgtttttgaaggagcttgttaatggtcaggtgtttggatctttggttgctactagaactttgaagaaagttaaaatcattcgttgtttaggtaattgggatagagtttttgaaatgaatggaaatgggaatagttctttaactgagattcgtctagagaggcttcaagtgactgatattggactgtttggtatatctaaatgttcgaatttagagactttgcatatagtgaaaactcctgattgctcgaatttaggtttagctagtgttgttgagagatgtaagttactgagaaagcttcatattgatggttggagggttaagaggattggtgatcaaggtttgatgtctgtagctaagcactgtttgaatttgcaagagcttgtacttatcggtgttgatgcgacgtatatgagcttgtctgctattgcttcaaactgtaagaagcttgaccggtagctctttgtgggagtggtacgattggggatgcggagattggttgtatccggagaaatgtgtga

SEQ ID NO: 25860 - DNA, 889 bp, Arabidopsis thaliana
tctagagtaaatatactattgtggtttttagattcttcatatcctcaataactcaagcgaatctttaaggcagagacttagccatttgtcttagaagaaacttctgtatctttccagtagaagtctttggaagctcctcctgaaaaattactttccttggaaccatatacttaggtaacctcgtcttacaaaactcccttatttccctctcagtcaccaacccattaccattactatcatacttcaagctcacaaaagcacacggtgtctctccccacatcttatccggtttagccaccaccgcggcttctttaactactggatttgtatacagaaccgtctcaacctcggcactacttatgttctctcctccgcatatgatcacatcctttgaccggtctttaacttccaagtaaccgtcttcatgtataactcctacgtctccgctgtagaaccatccgtcctctctcatacacgctgcggttccttcagggtctttgtagtaaccaagcataaccgaaccgccttttaaaacgatctctccaacggaaacaccgtcgtgttccacactcttcccggttctcgggtccctaacatcaacttccgcgaatccgatggttcttactccttgtcttgatttcagtcttgctctttccaatggatcaagatgatccactcagccttccaagcacatgacacaaccgggcctccggtttccgttaaaccgtacccatgaccgacgttgaaacctagggtttctgctcttgagatgatggctgctggaggtggagctcggcggtcataacatgatttcagaacacaaaacagagtttatcaaaagttcacaaatgatttcaaatggaagttttataaacaactggtatgacat

SEQ ID NO: 25861 - DNA, 843 bp, Arabidopsis thaliana
ctcaatcattccacatacaggactttacacacttcatttatttgaattagcaggtacggcttacaaaatcagtctggatattatcaggcttctggaatgttctctgcaaatacccggacaactttgggacgtcttggcgtcgaaagacatcccactgggctcctcctgcacatgaagatgtgcaagaagattccatgttgtcaccgttttccgttaagttctctggattcacagtcaacgccaactcaggttcattcttctccatactggcttcaccaagtgatagatcatgtaactctccgtcccttaatttctgctcagggctaagaagtgactcattttcgctcatcttctggtcaggttcctctggaacaggttttgtttttctcaccctttcgaatgttgtttcttcagacgtgtgcaccaataggtatacctgattaacagtttcaacgactcaatcattatatattttaacaataatctcagttgacctaacatataaccagtttcccttatcaaccaaaataagacaaatgtgatcacttataatccaagagctgagtaatgtaccatgtcacgcatgttgtagtgaataccagtcaatgaatcgccagcactgatttcttggtacgtcccacaagacacataaatctttggacctgaatcgttttggagcgagtaatgaggtaacttggctgcaacattcagaaggcctaaccggggatgaatgtactcgagaaacggaaaacttctgataaactcaggtctttggtagaaaatgaactcctcggaagcacttgggctcggccagtcctttaacttccacaatagcggaagacc

SEQ ID NO: 25862 - DNA, 943 bp, Arabidopsis thaliana
cggtcgatgttgagtcatgtagtctctaaagactagcattcatagatttcaaaggaaccctagaaatgatctcctcgatcaaatcccttggaagattgtagatcatcgtcgtcattgtttcaactttcacaacgaatgatttcttgcagcttagggaaaggaaaaaggtatacacgacgacaaattataaccctaaataaatttgggccactagtgggctttcagaatctaattgggcttaagcagacccaatttgtatctggcgcgaggttttagtttctgcggaggaggagatgatcgacgattcgtctcttacggcggagatggaggaggaagaatctccggcgacgacgattgtaccgagagagccaccgaagattcaacgcttagaagaatcagtagtcaaccgtatcgcagctggtgaagtaatccagcgtccagtttcagctgtgaaagagctcgttgagaacagcctcgacgccgattcaagttccataagcgtcgttgtcaaagacggtggtttgaaactcattcaagtctccgacgacggtcacggtattagagtacggttcttctacacactctctttttcaatttcacaaatttgggaaatttctgattctggatttgtttttgtgttcttgttgattcggatttgtagcgtgaagacttgccgatactatgcgagagacatacaacatcgaagctgactaagtttgaggatttgttctctctgagttcaatgggatttagaggagaggcattagctagtatgacctatgttgctcatgttacagtgactactattactaaaggccagattcatggttataggtttgtaacattggtttgattaagttatgttttgttctgttcaatgtgtgaagacagtgttgttgtattgaactgcaattttttgtttgtcagagtgcttatagagatg

SEQ ID NO: 25863 - DNA, 726 bp, Arabidopsis thaliana columbia
cccatggaaacattgatataacgtaaacaggagtcgtttctgcttacatgattcataaacatagcatcatgctgattgagaattctgcaaattatccatcaaactgtagatcgcagatgagacacacatgacgcagagacaatgccaatgccattttggcttcagtctgaaacattaccattcagatttttgccagagacaagcaaaagttcatatatttacttcacagatttttacttgtcgtatattttggatgttttggactttgaatgataaagaatcctacatcattttaaaaactaaacatcaaaagtgactaaaattttaaaagtttcacttctagtttggcgggttgagccaggcccgtgcagtagtgcaacgcatgggcgactcgtggaagcccagatagcaagctatcatagcgggctttctcccttaaaagatagagttaatatcgtgtgagccgatggccacatatcagatattaaactgataagaacagatactacacttgatcttagccaaaaggcctgagaaaggtatgattagacgaatggctcagcttcttatttatactacaaagcttatgaccaacgatccctagcttgtcgatgtgggactttgagaaaagggtctagccagatgtactctttagtcttctcttacgcatatctctgcttgaatcaattacatatgaactatcaatacaaagcaatgaataaattt

SEQ ID NO: 25864 - DNA, 1039 bp, Arabidopsis thaliana
atctattttcatcgcctctcatcttcttcctctcaacatcatcttcttcatccatcctttttccttcatcgtttctgttcgtgtttcactaatagaaattgatgatatgtcttgataacatgaataatcgatcacatgcattagaaaggagacaacctttgcactgagcaagaagtgttgtgaagcaaaagagaagaggagaaagaaaatttggaagcttcaagatcgaactccaccaaattatcctccatctgaaatcctccgatcactatagggtacttcggcttcacacctccgtccacaaaccctaaacaaaccacatttttattcaccttcaccaaggaattagacccgtagatcctccacttagcccctccgctcagcaccaggtcgatcacgggaactccacgtcctccattggagtagaagcacgcaccgaaaggcttcaccgcgggacgtttagctatcttgatgttttcggtgaaagctgtgagcagagccttgtaaagggaagtttggaatacggtgtaaggagccaaagtgctgatctttgtggctccatagggtataggaacggtctttgcaccgatttggatggacttcacatcgattaagtactcgccggacttgccattaccgatcagaggcgtggaggcaaagatcttagagacatctttatcgtaaggcagataataatattcccctttaccgatccaaaggtcaccattatgagactgacttcgttcggtggaaggcaaacaaagagctatcttatgaggaagctggtacatggagatgagctgcgagggaatcgacaagtgggtgttagcgagaccgatggttctttgttttaaggcaggagcaccgtcagtgcaagtcaaagtcaatgaagaactcatttcactgtccctagtgtaaactccattaaatgtgtataacaaggggacggtgtctcggaataggcgggaattgtcggaggagagacacacgggtcctcttctttggcatgacattgttgggacaggggaagttggggttt

SEQ ID NO: 25865 - DNA, 646 bp, Arabidopsis thaliana
ctaaagtcagctctctggtaaataaaacctccgggcgggtcagcgtatttggttacgatctcgagaaggatgtcgtgaacgctaaacgtcagttgggactggtgccgcaggaatttaacttcaacccgtttgaaaccgtgcagcaaattgtggtgaatcaggcagggtactacggcgtggagcgcaaagaagcgtacatccgcagcgaaaagtatcttaaacaactcgatctatggggaaaacgcaacgaacgtgcgcgtatgttatctggcgggatgaagcgccgtttaatgattgcccgtgcgttaatgcatgaacctaaactactgattctcgacgaaccgaccgcaggcgtggatattgaacttcgccgctcaatgtggggctttttgaaggatttaaacgacaaaggcaccaccatcattctcaccacacactacctggaagaagcagaaatgctgtgccgcaatatcggcattattcaacacggtgagctggtggaaaatacctcgatgaaggcgctgctggcgaacgtgaaatcggaaacctttattctcgatctcgcaccgaaaagcccgttaccgaagctcgatggctatcagtatcgactggtcgatccgcgacgctggaagttgaagtgctgcgt

SEQ ID NO: 25866 - DNA, 1101 bp, Arabidopsis thaliana
tatctggctttcatgagtcgcccatgcgttgactactgcacgggcctggtcaacccgccaattttaaagtcctaatttgatcctctaataactttatttcagtctttcttaaaaacattttactttaatattattgaccactctttcgattttggtagttaatgtatatatcgttgatctgattgaaatggctgggaatgattttgagtttatggaactttgatggtgctacttatattgcctgctctgtgaggcctctcgttttcattgtagttcagaaacactttgatttgaagtgggaaacgtttctatagtggaagaagtgtcaaatatttctgtctcattttgggttgattgacatcagctagaagaaagacacctttctctgtaatctaagttttctggatcaacatttcagagtttggttagaattatggtaggcaagcagctggaatatgtggtcagaggagaaaccaaattcaagaacttgaggaagaacaagacaactgttggagggtcagtgacattcttgggagagaacatcgccactggtgtcaaagttgtatttttggttctgttgagaggttccgtcggatttatcatgtatcagtaattattcactttcagtagctgcttctcttactgttctttagataatggagcctagttcagtcttcttttggttctacttctcatgctaatgatgttgcttggcttgagtttgctaatttgttactttaaaatcctgcagaagatactaaacgctcgttgataaatctttaaagcaggtgcataccaattcagtttaatcgatctgatggcttaggatttatttctctctgtcttttcccgttgctgagtcaagaaaagatccgtcattgatggtgaaaagcacaaacttgctgatgtgaaatctgatgtgtactgttttatccgatttgaagctaccgtctatatattttacttgtcattttcagacctgacaaagcgatgagaacgtttctcctgtgttttgttttgtctgatttgaagctatcgtctctattaacgtctataattaagagcgatttctcagtacccgccaaactttaaggataagaa

SEQ ID NO: 25867 - DNA, 1066 bp, Arabidopsis thaliana
aacttaaaggatgaccagagtctgcaaatatatggctggctttactcgcaattctttgggtagccacaaagtcatcagagtaatgagacgagcaaacagttggagataaacactaggtggactttcttcaccctgcgtttacggcggtcaaggtacaaaattgatggtgaaaaacacaaacttgctgctctaaccgtttctgttatttatagagaggtgaataggtccagaaatctgatgtgttttgttttgtctgatttgaagcttacgtctatattttacttgtcattttcagacatgacaaagcaaggaaactttaaggataagaacgttcaaagtcttcttaagtcaacttctttcgccaggagaaacgttccaaagtaagatttccaccagactaaagtccttacatactattctcactagtcagtatctccatagttaagacatcgcaatctttgcattagttaactaattgatttattttagaatagcttgaagattagataaatagtttttgccaaagatactctcaagagcatacacacacactcacataactgaaagaaaacagaggatacaacagaaagaaagtactgagaaattgggcaatgagaaagccgcttatttaatcttagcattattactgtgactgaagcaaaaccatattttccttttagaaatttctcactgaaccttctcggaagctggcctcttggtgatttcagccacccactcattgacacgtggacgctcggtgaagagcttcttggtgggagttccgagcaggtattgaatcgcgggaatgtggtgaagatcagtcaaagtgaaagtttcaccagccaaatacttgaactccttgagcctagcctcgtagacatcaaggaccttggctaacttagcctcctcttctgcaacaacggcttcgtctgtggtcaagccgtagatggacttgaatatttgttcaaaagcaagctttgaagccactgggtcgaactggtgatcttctacttgcattccaatggccatgattgcgtactgagatatgttcttggagtcggtttgg

SEQ ID NO: 25868 - DNA, 639 bp, Arabidopsis thaliana
gtaataaaagaaaagatcattctgcagcattcatcagcatatctagtacatgctgtacttgtcgttcgtcgcttcgggtcgaatgctcttgtagatggacatggcaattggaagaatggctgtgagagcgatttgcaactgatccgagctgctggttctgactgtgatctgtccgctcatcttgttgttaagtcctgcacgaagcgcaatctttgagttccttccaacagagacttgagattggagattggctccaagggctaaatcgcctctccactttaccagagacagcccaaaagaagattggtcctgtccaattgggaaatcagcttccctaagcctgacctcgaggttcgcaccataggccgaatctccctgtgatcgcattgtcccagtgctgcccacaagcaccaaccttttccccagtgctatttggtcctcgagtttgaccccagtggcgatgttctctcccaagaatgtcactgaccctccaacagttgtcttgttcttcctcaaattcttgaatttggtttccctctgaccacatatgccagctgcttgctacattctgaatatcgaacctgccatggtggatcaatctccccgtgcttagcagcacagaggagtcagatgaatgtg

SEQ ID NO: 25869 - DNA, 547 bp, Arabidopsis thaliana
taacggccgccagtgtgctctaaagtagcaacacgtctgctcattatgcgccctccccaagaccagcagcgatagttcgccgattgctttcagcgcctgttcagcatctgcaccctgggcggtaaagcgtaggcaatgacctttcttaacgccaagtgccacaactttcatcagactacgtccgtttgccggtttgccggtaccatcaaggtttgtcacggtaatatcactgttaaattgtttaatggtattgaccagcatggtacctggacgagcatgcaggccgtgttcattgcgcaccacaaactccgcgcttaacacgtcgtcggtcggcgcatcatcgctggtcagcagcgccacgaacgttgccgcatccgctttcagcaagcggtcagctttattgtcgagcaataaatcagcgagacgcttaagaaccgcgatgggctgatcgtcattcatcgccacactcaccagcatggctgccgtttcgccgtccacatcaaaagcatttgccgcacgcgttaccgcaatcgcgctacgcagattg

SEQ ID NO: 25870 - DNA, 608 bp, Arabidopsis thaliana columbia
agatgtctttaggcccacggattcattttcacgatctcaatgataaatcacttttcagatacagcgaggaaattagggtaaagtaaacaaatcatgatcattagaagaagatgcacacaaatgtgttcggaattttctcagaaactaagcaaactgttctttgctctttcataagttttggtttttgtcccacatcgacaagtagaagagaacgtctcccaagtctgataatatataaaggaagctgggtctcactttcaaatcatacctttctcggccttttggctaagatcaagtgtagtatctgttcttatcagtttaatatctgatatgtgggccatcggcccacacgatattaactctatttttaaagggagaaagcccactaagatagcttgctatctgggctttcgcgagtcgcccatgcgttgcactactgcacgggctggctcaacccaccaactaatcagtcaaactttgattctcttagttatataattgagaaattacacaaaatctataaaacagcatggttggagaaaaaatcacctctttgtgtgaaaatgacattataatgggttagaacttagaaacattacatttgtatt

SEQ ID NO: 25871 - DNA, 1439 bp, Arabidopsis thaliana columbia
tccctaacaatgctattatagctcgacaaattctagctgccgtgcataactatataacaagaacaagttaggtttatcaatctaacttcgagatccacacaaaccttcgtcaatgaagacaagagatagctcaccttactaaaaggtgaatgagatcgagacggtggagtagcctataacagacagagacagagaacgttaaatttgtctgccctaatttaaagcagacacgttaattagggctagaagggttcctttcccaagtttcgcgaaaatgaaaaataaccctcaaatttcaaaactattgcaagaacatctattaaaatttaacaaaaacaccatatgttcaggaaaatctcatttaaaccctggtgtttaacaaagttaaaattacttataagaaattgtatgttactaatttggttcgagggataatccgatgccgtttggctaattttaggctttctgaataaagaaaatacttgcggtgcatttgcaactacgtactaccgcatacgacaactttaccaataaaccccaaaatttagtgatttcatcaactagccctgaaagtattctctcaaggcttaaacaatggaagtagtctatgaaacttcgattttataaatttagtaatttacccaaacagttcagattcataagaatatcagatacaaaattcattctataactactacagcatagcgtgctcaaaaaatggatgccaagaaaagttgaataagaaataaaacaaaaattcaaacagacatttgactcatgagaccaaactcttttttagctgccaacacatgtgtgtgataatatctatctacaaagaccaaaaaacagtagtacaatcatccaatcactgtcttaaactagaaaaaataagagtaacgtagtcccagaaaacgggacacaatgcgcttccagggttttttcttcaggttctaatacctataagctgaacctgtaggcggtggtgctggtggcaaccgattgggggtggtgcggcggttgctaccagaccctggtgatgctgcatctccgttctgcgcagggtcactgtaacggcggctgtgaccaccggaaccgtactttgacaatgagtctgagggtccattagcagcggagttgaaggcattcatccagtcgtcccctgaagaacctccacttgctcttgggctactctctgtaggacaagtgataccaagattaaaagatttataaacctaagtttcattgaagatctttcagatggtatttaagaaaccgtatcaatccaaaccaagcaagcagaagaactgttatcatgtttcgagtataataaggcggatgaatttaccagtgccactgttgtccgaataacttgaagcagctgctgctcggttgtcgtgaatgctaagctgcatcgtgagtttagaaagaagagaggattg

SEQ ID NO: 25872 - DNA, 726 bp, Arabidopsis thaliana columbia
atatgattttttacgcattttcaccaaattatgaccgttgtgggattgaggaaacctaatcttctaagtctctatatattaaagaatcatcatagccttctcgttgcacttcccattacgatcgaaagttctctgctttttatctctctctcacgatttaatcaaagtttcatcttctctctctctttcaaaagatggctcctcgtcagaagaaacctaacaagtccgatgatgatgatggtgatttgcataggaagaaacagagctttttcaaacagagatttccaggctttaagaagaaagcctcagagctctctgttctctgcggcaactctgtcggtttcatctgttacggtcccgacaacgatcttcatgtttggcctcagtctcaagatcataacccacaagccctacatgagatcgttgccaagttcaatgccttgagtgatgagaggaggaagaatcatgcatgtgatctcaatgacttccctcatcatctcaagggtttgtctcgtgaggagttaaggaagcatctcctttcaccttgactctcaattacttggagtcagggaacaaaagatagaaattcttaagaagacgctcacgggttcttccgaaaaagatggtgctagggtttcagagaactcggccatctccgatcacaagttgaagatagagcctcatttgaaggatatattgtcggaagatcatctaattagggtttca

SEQ ID NO: 25873 - DNA, 429 bp, Arabidopsis thaliana
ttctgatggactagcagaaaagaaagaaaaatatgattaattgaaaaacaatagtcaataaaaccccaacagcacataattagttccttgataaacaaaggtgcaagagaaggaacttagaagaaagaggaaagcaaagataaagttagtccaatacgtatgtgaatctccatgtcactgtaactcatcccataagctcccttgcaaggcccttgttactttaacccagtgtaatggctacagggaagacattttttgagctgcagacccaaaacctggacgaggaagaccacgccctcttcctgcacctctaggataaactgcagatcctctggcaacaagcattggaggtggaggaggatcacacccgaaagtctaagaccaggagaaaagggtgaacaaggagaacgagcaccaggaggtggtgga

SEQ ID NO: 25874 - DNA, 724 bp, Arabidopsis thaliana columbia
  unsure (1)..(724): unsure at all n locations
cgcttcaaaaggatactgtgaatcctcgtcaataggctgctcttctttcctgtggaccactccgtcaatctcaggactggctgcaccactatctggaattagatacggactcttcctccttcttagaccttcagtgcgcggagaagcaactccaaaattagaatcagaattcattctgtgaagctgtacacgtaggttcagcatttcagatttcatcttttccacctgcaaatttcgctgcctttttttttcctcagcctcacgaatttgttgcagttgctcggtcttccgtgctgctttcttctcttgctcccgcacaatagcaccgatttgctctgcttcaagataccgcgacacataatcaaactcctgggaggaaaacatgtaggactgaagagatactagcataaatatgatgatctcaacgagagcagatcttgcagtgattcgaaacccatagtcatacttgtaaaatccaatcacctcgtatatataatcaaccgtttcacattttccatcattgaagtttccaacaaatggagactgatatgcgagagaaaagatgatgagaacaaaattgtacacccgcaagaacctgaatattttgtttttcttcttcagtatttcaagtctcattcgggcaaaaacaagagcgaatgagagataanctaggtgtagaatgtcatactcaagagttcatgtgattagaatcagaataagcaca

SEQ ID NO: 25875 - DNA, 963 bp, Arabidopsis thaliana
atccttggtccatgtatacgccaactccgtatttgagtttgtagcttctgaatgttgtaccaaaaaagaagaaaaaaaaacgaccaagagcttttgtatatatatttgatattttaatttgttatatatagtaaaataaatgcctcggtaatttccatcaagagcttttgtatattggatgctacgatcataatatatagtaaaataaaaacatatcatttacaaaaaaaaaaaagaggaaaactaaaacgcaaaaaccctagtgtatttgatacaaaaccctagtatatataaagaacagaaaacccctcgcatgattggtaaagtagtctgaagacatggagacgtgtaacggcttgatgagaaagaataagagacaaaaagtgtctagaaatagtgattggtccaagctttgtcccgatgttttgcggaagatatacgaaaccttaaggagccctgttgattctcaccgcgcaaaaatcgtttgctcgaattggtattccgtttggaaaacatgcgtgaagaggcctctatgtccactgaggataattcaccaaggcgattctcccaccgtaggagacggcaacagaaaactcatgggattctcctacaacagctattgtaatggctagctccggaaactggctcctgatggttgatcgttgtctcaaattctatatttataacttgttgacgaaggaaaggatcgatcttccatcgatggagtcaaaaatacgtggcgggcaagtaagcttcaaatctaaaagcaacaattacaattttggatacttggtcgggccttctcgtaaggatgatatagtgccgtatgactatgaagctgttgaatggaaaaaatcattagctgttctgtgggtagacgagacaacaggagattatgcagttgcttggacttttatgcgacaatacttgttctcatacataaaaggagattattcttggtgt

SEQ ID NO: 25876 - DNA, 796 bp, Arabidopsis thaliana columbia
cctaaagtgttatcatgttgtttccatgacttgtttatggggacaacccataattcattcattagatctctaataaataggttatttttacaagtttgcatttataatgcttacaagtgtcataattagtagattgtgacatcattattccaactttcatacaatttgatggtgaaaagattgctcaatagaaacaaatcaattgattgagttgagaaatagtcaaaccaatcaagggtttagagaactgatcaagtatttttgggtttagacaaaagcccaattattgggccgataatattatttgaaaggcccataacgaacacaagcgtatattgcataccactctcaacaatggcggtcggaagaatctagtgaatttccgattccgattttgagctaaaggaagcgagagaagaaaagatgtcgggtatgggtgacggctacgttggtacggctcaagatgcggtgaggatacggcggcttcagaagcaaagagaggccgaacgcaaaaaaatacaagagctcaagagcaagtctgcctccggcaatgaccaatctggtcttctccaattcggcaccagctcgtgcgaggtaatcgatttctaaggtttcgagaggagaaatggtggattgtggtagaaactagatttagaacttgttctggctctgacttagtagcttccgcaatatttagggtttagtataattctaacgattagttctgagaagtatcggagaacaagattagatcatcattgcttgagattgtattgcagttttggtgtctcaagtg

SEQ ID NO: 25877 - DNA, 861 bp, Arabidopsis thaliana
cgtaatggtaacgtgtcatatgactttgactctgttgaatggaaaaactcggtagctgttctatggataaacgagacaacaggagattatgtcgttgcttggacattcatacagcattacttgttcttctacaagtcaggatattggtcttggtgtaatctgaatcataatgggaaaagtttggttgtgtttgatatggcatgtgagaacaataagctttatctgtacacagctaatcatcatatcaggatttttgatttctctggagcttatcctatggaaaagaaaaccgaaaacccgtattggaaatatctgtttaacgcggttgaggaaccgtgggaatacgtttggaagaggaaaatagcgattcagaaatcatcaggtgaggttttgatcatcttgagccttaaacaagtgttttacgaagcagagagacttttgttttacatctttaagatgaatcttgagagtttcaagtgggaaagagtttattctcttggagatgagatgttggtttttggtcaaggtgttacaatacctactgctcttgaagatcttggtgatgggataaagagtgattcaatctatttcgtcggcgaagatgtttggccagatcatcaagaacatgatcgtcgtgtttcgaattgcggtgtcttcaatattgccacaagtaagatcaaatggcctacgaaaaaatatcgttccgtaaatgaaactcagtggtttgtgctcggagttgcttattaggtattctcatttatctatatcatagacattttttaaactcttgttcaattcagtttcaatttcgagtaaatgttagtgttatcaatattactactgttttgatggcatgtgatt

SEQ ID NO: 25878 - DNA, 809 bp, Arabidopsis thaliana
aaaaaaacaagcaccttaacatatatatgtgtctataacaaagtaagtttgagtacataatattgcatgcaaatatatgcggcaaaactaaaaagtaataaacggcaaatgaaaaaaaaagctgctttaattcaaataattaaatattcggagtgactcactttctttttccccagggacttcttacctataaatataacacctcaccacacccattgtttcattcatctttccagctttcttcactttttcctttatataaagttagaaaaacaaaaaaaacaaaatagttagaaaaaatctgagagaaacagaagaaacataaaaaaaatgaggccattgagcattaaaccaacatcgttagatgtagctagacatgccacatcagtagaatcatttgggaatcaccgaccgccgatatcgccgtggcactcaccggtgccgtacctattcggtggtcttgcggcgatgttaggcctcatagccttcgctttacttatcctagcctgctcttactggcgcttgtcaacctccggtgatgactccggcgaaagagtcgacgaggaaaaagagagtcggtctggagtgaaggcggctacgcggcgtgcgaggagaaggttcttgtcataatggccggagatgacttgccgaggtttctggccacgccggcgtcgaacaaatgcatgtgcggtcacgagggtagaatggtaattttcaaggaggatggtattggtgctggagaggagaaaatgggagacagagagaaagctaaagaaaatgaagaacaacgagtcagtgagcttttttgt

SEQ ID NO: 25879 - DNA, 878 bp, Arabidopsis thaliana
tctcttgctcgtccatggtcactgggctacagcagaatctcatcaatggtacaattttttctctctcagaaacaatctccatataaactctatacattcatcaaacttttctctaacgcggttctgtttccgctattgcagatatgttacttcttctacaagaatatcacttttggtgtcaccgtgttcttatacgaagcctacacatcattctctgctcaacctgcatataacgactggtttttatcgcttttcaacgttttcttctcttcgcttcccgtcattgctctcggcgttttcgatcaagacgtctcagctcgttactgttacaaggtacccaaacattatctcccataaaccctataaaaacctcaaactcctcataatcgctaattaaactctgtttttgttttttgttcttgcagttcccgttgctataccaagaaggagttcagaatcttctcttcagctggaagagaatcatcggatggatgttcaacggagtctttaccgcactagccatattcttcctatgcaaggaatctctcaaacaccaactctataaccctaatggcaaaaccgccggcagagaaatcctcggcgggacaatgtacacttgcgtagtctgggtcgtcaatctccaaatggctctagccataagctatttcacttggctccaacacattgtaatatggggctcagtagcattctggtacatcttcctcatgatctatggagccatcactcctagcttctccacagatgcttacaaagtcttcattgaagccttagctccagctccatcttactggctcacactctcttcgtgatgtcttcgctttgatcctttcttcgtcttcaagtcagttcagatgaga

SEQ ID NO: 25880 - DNA, 685 bp, Arabidopsis thaliana
tggtactggataggagttggaggcttgcttggttttactgtcattttcaacggcttttttacattggcacttacttatctagaccgtaagtttcttttctttttgattctgttttcgttgtcaccgtaagttacttatatgtgtatcatgacaacagcccttgggaaggcacaagctatacttccaaaagaagaagacgaagaggctaaaggcaaagctggatccaatagtaagtatattccattgtttacatcttaagaattcattatataaaccaaaaaacaataatattaagaatttactcttttatggaaaacagaggagactgagatggagagtgtgagcgccaagaaaggaatggttcttcctttcactcctctagctatgtcatttgacgatgttaaatactttgttgacatgcctgcggtaatactttgaaaactagttaaacttattgttattattaatagaaacaaaaaaagaaactcatatagaattggatggtgcaggaaatgagggaacaaggagttcaagaaacgaggctgcaacttctaaaaggagtgacaagcgcatttaggccaggagttttaactgcgttgatgggggtgagcggtgcgcgtaagacaactttgatggacgttttgccggaagaaaacaggtggatcatagaaggagcgtaagagta

SEQ ID NO: 25881 - DNA, 531 bp, Arabidopsis thaliana
ccgaatggtttatgctccaatttgcgtgcaagttaacttcaaaatgagaaagtttccacgaaattctcttaatgtaacgatgacaaatttctaagacatctacatttttattatgaagctaaatatagataaagctagaaataagatgtagcgaaggagcgagtctttagcatgtcctacgagtgcgggttaaccataataaccacaaatctcttctacaaatattccaaattttcaacaaacacaaaagcagttgaagaagttaacttttgagagagatagataagtttactttaatagaaagatacatacatatacataggcaaagaagggaaatggcaggaccggcacaagcagcaaagcagtcaagtgaagtgctaggccagcggaagtcgttagggatatgtccgttgagagcggccggatgtggagcggtgataatcggtggaattggctatgtggtgttgtcagcaagaagaagcctgaagcttcagcaggtgatgtcgctaaagttatgtcaggcgtcggtgg

SEQ ID NO: 25882 - DNA, 1251 bp, Arabidopsis thaliana
acatacatactttaaggagtacacttacaacactgatactaatagttcctatattgtaaaccagttggttttcagttaaacatctacgaacaacatctacttgaatataaaatcaagccaataaaagtatcataagacaagggaaattcgtatgaaaactgaccattccaccagacgctttagattgcagccactttgacaactttttatgggaagacttcttaatgtcaagtgtgagaccagaaggcctacaaggtaatacatgatttgccctgcaccactcacagaaaaatatatgtcagtcaaacgtggaaaggagaaagaaaatggtttaaggtgtcttgcttgttattgacaaagtcaagagtaacacagaatagagcttcagagcgtaataaaacaacctaatcatagtcaaataccagaatataggtggctttcaaagtaagtcaagtatctgaatgcggttcttaccatagagtgcttcctgggatgggaaggtctttctcctttagtgttgtatgcaatgcttgcaaaagacattggtcaagaagggtatctacctcctcaggggagagagtaatctgcttgtcggtattagtttcagtagcacatacatcatctaccaagtatagctcattcatgctcccaacgacatgtacttcagcatcattcttagcatccgcagccgatgttgaagctgtttccagagcagattcatcttcttcatttccggtgcttgcagaagtgtctaaaatatcttcacctgaaccaggagcaaggtacgatgggtcctccatgaccacatcctccataaaccccgcatttggaacataatgcccctcagctgattccctaagaaacacaaattcagtatgtaagagacagagttcctccacagatgtaaaatataaaaaaacttttgccagcatctcatgtaccataggaagtcacggtaataatgagttatccttaaagccttcccacgtaaacctgctttacgagcttcttcactactcattgtggtacacccaaccttcataaacatcatgtaactcaatacgcaaactttacattcattaagaagattcatcagttaacaagacataaaaagcttaccgcaataggtgctagatttccaggaactttgacagcccatatttctccagcagagaaagaaggatagccttggggagggatcaaaatacttgggaaaatcaaatctgcaccggctataatataacgtgaaac

SEQ ID NO: 25883 - DNA, 1048 bp, Arabidopsis thaliana
caaaacctctgatccgaaatgcaaagaaaaaacctttcatatgaatcagccattttagtcgccgtgaaaagcctcaacgaccgttcacgcgcttccttgcctttcctctgtaattcctctgttccatcgctaacaacccgcaaaatcgcctcggtaagagactcaacatttggtgagaaagtatatcccaaatgtggaccgacaaccactgacccagtgatactcgctagcctagtagctaagaccggttttcctgaaaccatggcttccaagagagtgtgatccagcccttgagctcgaagggtcggattcacaaacacatcgatcgcgttgtagaatcccgctagcttttcttgatccaacggtccaagaacaatcacattagtagacccgaggtctttatatctgtttccccatggaccatctccagctaccaaaacgacaacgttttcacgtgcctccttgttttcttcaaacactcgcttcaaagctgagaacatcaaaggatgacctttatctctcactaacctccctgcaattcccaaaaccagaggagatttcttgttcttgccgcttctaacgccaaatttctctctaaagctctcacgttttgaaacgtccggtttgaaaacgttctcgtcgacgccgtttagaatgatatggacacgttcctccggaatcatgtaaatcctcttgagtacgtcaccgcagtgatcgctagttgccacgtggtgagcgtaacgttggaagaatttgacttcctcgacgactcgcttcgctcgctccgtcagagctggcgatgaaggcggtggctgttcttcttcggttccagcagcggtggcggcggcgatgtctgcttgacgaaggagttcttggatgatgtcagagtgaaaagtttcgtaagcgattccatgccaagacgcgaccacgttacggagattcttggctcttgtgtggagaacccaacgctctctgtgtgaattacgtcaaacggtcttccactagcgttctgcgtctgcgatttccggagaaaattgcgttagttaaa

SEQ ID NO: 25884 - DNA, 537 bp, Arabidopsis thaliana columbia
tttctcttgttaatgcagttcacaccatcgaaaggataaaaccaatgtataaagtcaataaggtttggactggtgatccttgctctccaagactattcttttgaaaggtacttctaattaccaaataaaatccttgtaagtctaacatttcaaccagacaataactcatttttgtaatttccctcaaggaattctactgatgagcttagttcaagtggattacaaggaccaatagctgtctcatttagaaatctctccctttttgagtcattgtaagtatacaaattcaagccatacacacacactaccaacctctttcttcacattatatataagagtcatgtgcattgtttcccagggattcataaaacaacaacctaagaaagggatttcttttgacagacatttgataatgtatttgtctctgacatttatttgtgtcacatgaatttgaaaggaaattacttgactgggtttgccccaagatctcataggaaaaaaacaatggctagtgaacttgcacagagaggtacattt

SEQ ID NO: 25885 - DNA, 852 bp, Arabidopsis thaliana
gccaatgaagaatcgtttatcatctttacagcaattttagtcccatcttcaagggaaccaaggtacacaataccaaaccctcctttaccaatcactttattgaagttgtttgttatgctagagacctcattatatgtgaaccttctcttccctgaaggcaggagtggtcctgaataggctcctgaaatcaaaacactcgtttttctcagcataaaacaacttcaattcattaatcctgaagtaaatattccagccatctaacctttttttctttgccttagtatgatccatatgataaccaagacgacaacgagaacgatcactgatgctgctacagctattggcacgaccatgctcttcttcttcttcttttcttgacatgagttacaaaggttttgctcatccgcactgcaaaacagaggaaatcacaagattcagagagagtgcttgtgttgaataactttctgaataatgctagaaactgttacctgagcgtaagtaaaccggcctttaactttttcataagggattttgggataaacccagtaaaattgtttcctttcaaattccttacaacacaagtaaatgtgtcaagaggcaaattcattatttaaatagaccaacactgtgtatatttgtgcttacttacaggactttcaaatgttttagatcagccaaaaactcaggcacattttgttgcaggtcattgttggataaatccctgagaaaaacaatgcataactctctgatagttcatgtgcataaaaagtggtgaaaaatgtcaattgtatacgtatacttacaatgactcaagaagagagagatttctaaatgccaagactattggtccta

SEQ ID NO: 25886 - DNA, 752 bp, Arabidopsis thaliana
gattaacatatattggtctcgatgattcacgaaatctctcttcgaaagtcttctaagctgtatgttgtgccatcatcatcgtcgtcatcatcgtcatcctcctcataatcttcatcaaatacataatcttcatcgtcatcatcatcattgttgacctcagcatcaacatgaagattataatcttcttcatcttcacgattatccataagttggcaactgtaatgatgatacttagtccatttgtgcccacatctgtagcaaaactcatatccacatctacacaatgaatgtaagaagacattatgaaataaaactatccatatgaagtagctttgtcggattcaatatatttacctgcaagttatgtgattgcaaccctcagtcagttcaatcatgtgcttacactcggaacattgacgccacatttggtcgtttgccagaaccttaagcatcatgtcattaaccagacgttcagagtgaattctcttgtaatcagcacaggacaaatcagaatgccatggtactttgcagtcaatgcagaagagttcagagcatttgatacatgctcggacattggattgttcggcttctcttgaaagctcggttttggacatcaacattgagcagcttcgatatgggcagtagattttctcagcatcgggaattaagtcctcctccattttacgtttccacatctcaatcagctttggtgtcaaaacatgctacaactttcaagagtgagctcagacttg

SEQ ID NO: 25887 - DNA, 578 bp, Arabidopsis thaliana
aaacgacggttaaactaaacctatcaaacacaaagacaataatgtctaatgttggtttatcaaactcaaaaatcatacttaaatgcaacacttgatcaatccttatagtttataatttatatagggatatagagtatagacctgtttaagagggaaacggccgcaagaagcgaatgcaattgtgacggccggattgaaatgagcaccggagatgtgaccgagagagtaaacaaggaccatgacggtaagtccccaaacgatggcgatccctggaagagtcacggctttgtcatgttgtgtgtttacagccaccgcggcacaaccggcgaatatcaagaagtatgttcccaaaacctccgccatcaactgaaaacagagcaatttgacaatttaaaaaacagagcaaaactaaagatttgtaagacatattttttcttcttcaaaactaaagaggttttggagattgagagttacaggagtaaagacaaaagtaaaaaaccttttgtaagaaagggacagagatcgagaggagagagtcttgtttcttcaagggtttatgaatagcttgttgttgttgt

SEQ ID NO: 25888 - DNA, 467 bp, Arabidopsis thaliana
gagctcgaatagttcaatccttttcctcttctttgtttctaaaaagagaaaagtcacttatggcggatatctcgggaaacggctatggcaacgccagagaagaagtagtaatggtgaatctcaaggatgaagtcgaacatcaacaagaaatggaagacattcataacccaagacccttgaagaaacaagactctctactctcagtctctgtccctttcttacaaaaggtttttacttttaactctccatatccaacatgttttacaagttataaatgaaaagactctgttttgtaccaattcacaagacatctcggttttatttacgctatgttttcagttgatcgcggagtttcttggaacctactttttggtattcacggttgtgcatcggtggttgtaacatgcaaaacgacaatgtcgtgactcttccagggatcgctatcgtttggggactcaccattatgg

SEQ ID NO: 25889 - DNA, 602 bp, Arabidopsis thaliana
ttcccttgtattcatggttttcaatctgaaagacacatttttgcatctaagtctaactaagacaggcaaaatgttttgcatatacataaagttgtgttgtttggtttcaccttggagcagaacttaaacataggattagctccttcccacaccagttccagcttgaaagaatcatttactcccactccattcgcttcgcacatctctctccaacctcttctcaaataaaaccattcacttccggcgcctcttccaagtcctgttatctgtagataagatgaccactttcttccatcttggttcagcagaattacctccccagtcttattaatgctattgttcctcgtgaaactcactggaagtgactgaacaagattcaatgatcagtatcaaaagcttaaactcgtaacgatgttcacaaaaaacgtttatgacaacaagttgttgaacttactagttgcccggtagtctcacggctaggtgtatactttactatcagaaatggtgaaggggtcttcttctcctttcctttggaaacttcatcaaacgtcctcttctctttacggccattgccagattcctgtggacacaacacaaagcac

SEQ ID NO: 25890 - DNA, 1168 bp, Arabidopsis thaliana
attgctattgtggggatgtgttcccgggtcaactttatctgaccatatcctgcggtttacaacatcccacaggtatattcttcttgacttttaaaattttgttgctcactgggatatcctcatgcggcctatccattttttctactgtttaaccatgagaaagctatactgtacttagaggcatctgaccttccctctcttgttcagctagcctctttaactccaaaattttgttttcattttttcaatattgcagattaagatggtggttgtacttggagagcttggaggaagagatgaatattctctagttgaagccatgaaacagggaaaagtgaccaaaccagtggttgcttgggtcagcgggacttgtgcacgtctattcaagtccgaagtacaatttggtcatgcagtaagtgtcactcagaaactgacatatagaattttggacgccaaatgttcatctggttccgatataaatcattctttgatatgatatgaaccagggggccaaaagtggtggagagatggagtctgcacaagccaagaatcaagcgctacaagatgctggagctactgtacccacttcattcgaagccctagaagttgcaatcaaggaaacttttgacaaattggtcagtctccaatcaaatgcggtcttagcttgcatttctctttgttgtgatcttatgttcatgttttttctgtcctcctaggttgaagagggaaaggtctctcctattaaggaagtcactcctccacaaatccctgaagatctcagctctgcaattaagagtgggaaagtccgggctcctactcacatcatctccaccatttctgatgacagaggtattattattcttctgaaactaaaccagaattctctctttaagcaagaacagttttttcaaacaaaattctcacgcactgaattttcaggggaggaaccatgctatgctggtgtgccaatgtcatccatcattgaacagggttatggcgtgggagatgtcatttcctcctatggttcaaacgtagtcttcctcgatattgtacaaattcatcgaggttgctcatctttccatgtactaacacaattattgaacactgttagtactgagattgaatatggtttctgacactgaactttgatcagatatgcataatgttg

SEQ ID NO: 25891 - DNA, 1742 bp, Arabidopsis thaliana
ctctgccacgagtctgaagcacctctgcctttgttgatctccctctgcctcggttgtaagagttgtgatagtaatcagaggaaggagagttgctggaggttgtgatgttgaacgcaacatgtggagagatagatgtttcctcaagataaccttgcagtctgtcgtcatagccagtgagcttgggataacatcttcaagggttggaccgggttgagtatcaatggagttctcaatagtggttttgattggttcatactcacggcctaacccatttaaggcagcaaagatcttcattttctctgttacagaacttcctacggatgctagttgttcacagatttgtttgagatccttaagatagacatccatagacttatcctttttactaatattctgaagacgtctctgaagctcaaacaacctagaggaagagatcttattacagtgtctagcaacagagagccatacctcatgagacgttttacagtcgacggcgacgctgagaaagtcttctgagaaagaaccaagcagccaggacttcactacactgtctgttttgaaccatgtgaagtattcttggtttggagaagaggaggtagaaccatcgatgtcggagaccacacttgttgtgttcggagcagggatggagccaatgacaaaccctagaagcccttggccgtcaagaaacgattcaaactgagatttccagaggatgtagttctttgaagtgagagtaacggtgacacaatttgagatgtttagagaagggagtgagtagagttccatggatctattctccatgagctctgataccatgaagacaaaatcaatctttttaggttttcattgatagtttgcttaaagcttacaacttgagtttgagaatacttaaatacaaaggtggagacttagctaaaaccctagagacattggacagatgtcatacatcaagttgagtcttctgaatcaagggttgagaaacgattctcgagctttacgttgaactgctttgccgtacaagaggtcgttgtctccttattgccagctccacttttgtcattacttgaggaagattctagactctgtttacttgaaacagatgaccgttgcctccacttctgcttcttgggcttggtttgtgcgaggcccatctgtttcattttcctctttgctccattagccgaaacgacaacgtattgtcgtttgccagagaaagcctctgctcttacctgtattgtgttgatactccccctcaaacttggtgtaggtggaagagatacaccgagtttgctccttaggcgagagaaggcttcatacagcagagacttagtgaagatatcagcaatgttgtcatgaccgggaatgtgcttcaccacaagagctttgagagcgactctttctttgacaaaatgatagtcgatatcaaagtgtttggttctcgcgtgaaaggcagggtttgcagtaagatagacaacagaaaggttgtcacagtatagctcaggagtgtttggaagtggaatgccaagctcccggaaaactgaactgagccacaaaatttctgaagccgcatcagttaaggacctgtattcagcttcagtggagcttcttgacacagttggttgcttctttgaggaccaagatatcaagtttgtcccataaaggccaaagtccaccactgatcttcttgtaccttgcaattacccaatcactgtcgctataggttagagaccgtttgtgagtgt

SEQ ID NO: 25892 - DNA, 636 bp, Arabidopsis thaliana
acattccaagaaaaagaaaatatgatatattagtaggtctcgtatcatcaactttattagattagtcaactagttgaactttagattttactggaagaaggtaaagtatatattatacaatcatgtagaagtagacaaagattttaaggtgtttgatcttccaactccatttgcacatatcctacgattacataagcctcttgagatcttcacaggaattatcttttatcctccaacttcctcactccttagcatgctcaaagattcaaaacgaacaaaagaacatcatcagctcaggaatcgaagagctttaagttcaagattgaattcaaaatgcgataccacattggccaattcatagagttatcactaaaggttcaagcattcctagacaaagaacaagcagaatatgatttttcttcactctattttttacctgagaataaatgaaagttccaagaatcgcgatggcagcacccagggcattgacatgtttaagagggtttggaagatgatgatagaggcaacgaggaatgagatccgcttcattgtgtttccacgctaaatgtgagtggtgaaatctagtcgagagcgatgtatgagacttgattatacaaatggtagaaacactatgtg

SEQ ID NO: 25893 - DNA, 668 bp, Arabidopsis thaliana
catctctcaagcaactacttttgtttaatgtcataagattagatcgcattatttctattttgccttctaaacccataaagaacttaacatgttacccaaaaaaaaaaaaaaacccataaatgataggaatatctgatctatattaacaagacaagcaacaactttttctcccttgtctaatgataattatcttataacaaattttagtagcataaattttagtataagcttttcgtcgatctatgtcttatggatcatctagtaaacagatccaattttccaagaaagaagatcaattaattaatatttgaggttgtgtttggctaaaacgtgtaggtgaatgtcccatgcagcagcctgttcgacatcgtgaccgtccgatgcggtcactgcaccaatctgtggtctgtaaacatggcagctgctcttcagtcgctttcacgccctaatttccaggtaacatctctctcctcaattgtgaagggtttattgtaaatttaaaaaaaaaaaaaaaaaaacttgaaccaaccctctgaaatttagggctcttttgtttgttttgaaaaacgaatgatagacagaaatctgagcctctagttgcatgtttctgtctccagccgccgtctacatctacatagccccaaagaatttaatattacttaaatatt

SEQ ID NO: 25894 - DNA, 668 bp, Arabidopsis thaliana columbia
tgtatgttggatgataaaacctattcaaaattatctaaatatctttttcatcaataataaattttttggcatgtttattttaatttatctattttaaggatcaatatagttcgtttatttaaagaaaaatatttcagaataaaaaacagaagatcaaaaatttgggaattaactgaaatttctaacattcttgcaattatacaaactaaaatgtaaacttgtaaagtgtaataatataatggggatcaaatatttccaaaaaaaaaatgcacactaacgaaatataaacaaaattcctttaaacatatatataactcaattgtaatgttcatcagaatttttttaacaaagtcctccctttgaaactacaatgccatatggatggtttacccttatgggcactaaatcattgtgaacctgaggatcgacgtccgctggcctggcccccactgctacgactggtgcgtcgtggccaaggcttccacttagcttcgaggtatttctttggtatcagccttggataccgctcctcaaaattccattctttaccatcaaacattatcccttccggtgtaacctcatgaaccgcacatgcctttctaaaattacaaatctcagcatcaatcgcggtcatacggatatcgacatctactgtaccaagcactgac

SEQ ID NO: 25895 - DNA, 788 bp, Arabidopsis thaliana
acttgtgaagcagtctcagaatgcccgaccggctacatcgctgcctcttcgtgaaacctctaggtgcaacctgcaaggtctgaaagtactagctagtttgatgttatgattcttgtcagactggtattaggaaacaaagctcccattctccttgtgtaatataatgtaatttgattgggagatgtactggaaaatcaataagttttcctatttgaatatatgattaggactgcctacaacatcagttaaggttacaaaatctcaatcccaagaccaaagaaagatatcgaaataattgaatgaaacacgtacagaacctactctagcactttgttctatataatgctgagtcaccagtaatcaccacaagaacagaccccctcactaaagtgatggaatctgcttgtatcccttacagttatctccctctttacaatcttcgatattagttttattgcagcatggcaatccctgcaggccctcaagttcttcatcacaacaatcggacacccttctggtgtactgatcagagcaaatgcaacggctaaacgttcactgtggtacttaagcgactcaatcttcatctgctcatctacgtcttgtactaccgaactagtgtcaggcttgtacccttctctctcaatctcagctgtcaattcattgatctttctcacgatctcatctccgtttgggtgtgtctgatcatttgatgagaacacatgaatcttgtggttaacttctacccagctataagccggaacctttttgattccgcgttcggcattgct

SEQ ID NO: 25896 - DNA, 978 bp, Arabidopsis thaliana
  unsure (1)..(978): unsure at all n locations
tcttcaaaaatgaaattatatatttaaaatctagacaccttatatttagagaaaattaaataagaatacaaatggaaataaatattttaacgaatggaaatattttttagatagatagacacagtttttgtgttgtataaatataagcaatactgtgaatttttccaaacatcaaaatgatcttagttttttttgaatatattgaagagaatttgacccaaaaaaaaaaaatttttaaagagaagttatccttgtttttatttatttttttgtttttttgtgataaaagagtattttttttcttagtaataaaagagtgtttctaatgttacacgtctaatttttgttccatatattgtaatatatcaactggtgatgcttgcagagtctgggtgtggtacatctgctcaataacaaaatggttaggtcctttgagaacctaagagaagaagagatcaaagtaatgacagagaagctggaagaagcatcttcatcttcttcatcagtaaatctaagcaaactccttatgactcttaccaacgatatcatatgcagaatcaccttgggaagaaaatataacgaagaggaaggtggaatcgatatcaagaacttagtgatgacatcctctgagttttttggcaaattcttttttggagattttattcctagtttggcatggatagactggatcagtggcatagatgataaaatgaaggacataaataacaagttagattgttttttagacagcatggtgcaagaacatgttgatgccgatcacaaagagccatcagattttattgatatgttgctactgattcaaaaggataaaaccaaacggtttaagtttgacagaagtgacttaatactcatactcaaggtaacacaagcctaccccttttcgttttgtatattccagaaaaatgaatttgcagtacatgatgtcaaatgtntttaaataagttatgatgagtagga

SEQ ID NO: 25897 - DNA, 545 bp, Arabidopsis thaliana
gtgatgatggttttgattgttcaggtggctttggcgcatacgattggacatgtagcagcgatagtgactatgtctaaagttgtagtgtccttcacacacgtcatcaaaagcagtgagccagccttcagagtccttgtctcaagcttcttcttgggcgagtcattccatgtatctgtttacctctccctcttacccattactagaggatgtgctcttgctgcaatcatggagcttaacttcaatatgatcggtaattaacaacatccatttattgtgggctactggttcgcaaaacgttgtctcccaaatcaaaccaaacgttgactgataatttttataatgagctattgatgttagttcaaaacaaaaaaattaagtttttcaaacaacttgatttgaaaccttgtaaggtatttgattctaaatgttagaattcaggtgggtaatggcacaaagtgtgttctaccatttgtataatcaagtctcatacatgtccctcgaccagatttcccactaacatttagcgttggaaacaaaatgaagtg

SEQ ID NO: 25898 - DNA, 939 bp, Arabidopsis thaliana
gttacttgttggcaaatataatgttcttgtatatttgtatgaacttgaaattactcttactcgttgtatctctgcctaatggttccttggcatgacagaatactcagtgcatattccaaggttaaccagaagccaaaggcctcatcttcaaagaggtaatattttcatgattagatttagttagtacaccattagttgtttcttggatgtgttttctttgaggtggaaacttgataatctaaatcatttttcccgctgttatatctcttacttgttaaattaagttagattttctatgtactgcagtgagtttgaggaattggaagctaagcctacaatggcagttatggatggtcctcttgaaccatcatcaactgctagggatgcccctgatgatcctgcttttgtcaacttctttagcgtaagtttctaaagcttctgttacacactcacactatcatcttcaccatgacagcatcttatacgactaatggcaggagggctttctattagttctagccttctaggttcttgaattatcttcagcgtagtatatggtccaacttagactcctcaaattgtaacactgaatttatctaaattgttgacagtcaacgatgaatcttgggaacactgcgagtgggtcagcaagtggaccttaccaatcatcagcgattcctcaccaacctcaccagcctcaccaacccaccattgctcctcctgtagcggcagagcacctccacagatacaatcaccaccgcctctacaatcctcctctcctctgatgactctctttgacaacaaccctgaagttatcagcagcaactccaacattcacacagatttggtgacgccgtctttctttggcccccacgaatgatggcacagcacacctcattcctggtgtactatgccactgctcctctctcaatctaatat

SEQ ID NO: 25899 - DNA, 556 bp, Arabidopsis thaliana
ggagctgatgagaatcctgaaacgctatgaagaggcttcgggtcagatgatcaatggggataaatcttctatcttcttctcaaggaaaaccccagtttctaagcgggatagagttaaggagctgctgcttatctctaaagagggtggagtggggaaataccttggtttaccgaagctctttggcagaagttaaaatgatattttctcttccattgttgatagaatcagacataacgctctgtgttggtccaacagatttctccctggggcaggaaaaatggtaatgctaaaatgagttcttgcctacatgcccacatatgcttatgtcttgtttcagtttacccatctccctatgcaaaagaatccaaactgcgttaaccaggtttttctgggatagtattcctcataaaagaaagatgagttggattgcttgggagaagctcacaagacctaagcagaaaagagggttgggttttagagatctacagcagttcaatgtggctttgttcgcaaaactcagctggaggttattaaaaaaccctagtagtctcttggc

SEQ ID NO: 25900 - DNA, 806 bp, Arabidopsis thaliana
tgcaggtcagatcatcccgatatggagtgatgagtaagccacacgatacacaaaaattacgaccaatgatcatacaaccaacaaatttcattattgtagtagcaacattatttattaacgttgtttttaatttttttaattattgtatctttcttacattcttataagtgatgttgtttgtatgattttggtagagaagagaagacacgtataagtaaagaacgatagattcttttgataagaattgaaaccatgagacatggaaatctctcatgtgaggtttagcgactgaaaatagtcggacaggtgttgctttgttctccgcgtccaccggaagtgcgaacctccgaggtgcggttgtggtggtggttccagcttctcctcctttgccttcgacctccatttttgtgatctttgtgaaggttcagagaattttggaggtttaggggtttaaggaatgaggaatctcaggtttgaggttatgagtatttatagagaaggagagtgttaaagctgtgacattttcatggatttatgttcttgtgaagcgttgatgtaatcattttaatatttatttatttttggattttgaatgctatctttttatttttagtgtgatggtataaaaaaaaacttgaatcattacataaaggttttctggtttttctttctagatgaaaaataaaatatattaaatcttggttttgattgaatctaagatggttgagtttaatgtggtgtttagttttcgtttagatatataaattttgttataactaagttagattgtaagcaccgcgattgaa

SEQ ID NO: 25901 - DNA, 620 bp, Arabidopsis thaliana
actattttttcatacataaaaatatcaaacattacatttttttttattgctaagaggtttggtgttacactcacagttcacactaaacattttggggttttatttgaatgtaaacgttaagtacaaacaaatttaaaccggggaaaaaaacaatccaagtcatactgtacctttgagcggagaacggcggagatagctggagaacaatcaacgggcaattgcagcatcagaatgccaagcatcagagaaagcttcatcagcttgtgtaccgatccaaacagcaagcataagctcacctttgatcttctctcctttcttgtcctctaatctataccattgcggacgaagagggctgtctggtggcacacgaagagggacatcattaatgtcaaacctaacaaacccgacataatcgtcttttaaaagatctttgtccttaaccactacttccaacaccgaggcttgcattcgctctttcgcgaatgcaaacacttggttccattccggatgttgtctcttctcaaaatgtcttgtgattcctttgtagttcccactctcacctacaaaacaaaaccttttttataaaaaaattcttgatttgaatcaaatggtttattaag

SEQ ID NO: 25902 - DNA, 579 bp, Arabidopsis thaliana
cagtctgcattagcttttctctctctggtctcaaagatgcgtcacagaccgaaccagtgacttgaaaacccttcttttgccatttgcttaaacactcgttaagctcatattcgtttctagcacaagtatgtattactgctccaaatcctgcaaattcctctactatagcatgcctatatatttgatttaagaactagagatcacaataaagtttaactctttcaggaaatatggaaagatttggagcttacccgatgccttttgttccaccggttacaagtacggtcttggccttaaggctccatctctggctttgctctgctccagccatttctctcttatcttgaagtgtacgatgtgaagagataagtggagcaaacacaaagttgattgatcattaatcaatcattggagataaaagatgaagatgatgggccgggtccatcaggaatatctcagactcagaggatccaaatcttcatatcaacgaatcttttaggcttgtcgtatctttacgacatagaggtgatcatggaattcaaattttaatcacacattcactactaagtactaccattc

SEQ ID NO: 25903 - DNA, 1030 bp, Arabidopsis thaliana
aaccaaaatgcaaatcggtacaatattctatggatcattttcaatataacatagtaccatgagatccacgagtatcatcactaacacaaggacaatgatggctgaactccaggcactgaaattggcaagttagtaaaagaaaccaacatcaagacatctccagattctaaaattttgcttaatctatagagagataactgacctggaagtgattaaccagcaaacaataaatatagcacctgccaaagcaatataagaatgtaaagagttgtcttttggtaaaatctctagcaaaaactcaaaatttgatagatgggaagcaaaccgattgctatagcaaggtttgtcaaagctactgtccagatattcagatattgctcaaagaaaatgtagaagacagaatatggaaagatgtcaatctgcataacaaaaaacacaagggttattatataggaggctgagcagaaaaaaaagacatatggcggaccatcctccttctagcaaagccagctaatctatacttctataaataaagaattcatcaccaggttcaaaccttcaaggaattggatattcttgaactgaactcccgagcagctcgcagtgcattaacatagtcaccctaaggaaattttctcacttggtgagtttttctttttaataattcgcttgccagaaacaataatgtcatacttgtgtgttaagtggagtgtggtatgtacggaactccgatgcctgtataacaccactctcataccctgaaagaaaaaaacaagcgtccaagaagatgttcagaccaaaagtaaattaaagaaatgaggtagtgcaaatagattttcttattaaggaaattctagagtaccttttaaatccacgctattcgtataagccccgtgaccaccctttgcacagtcagctgatgcaaagcatttagaaaccagggtagtttcccctgaattgagctgtagatggacgatcctgaaccaaatctgagtgtcgaaagcactgcaatggtttacagacttagatc

SEQ ID NO: 25904 - DNA, 956 bp, Arabidopsis thaliana
cccgttctcgggtctgccgccccatgattgtatgtgttttacttcttaagcacgtgagtgatgaggccaggaatgtgtacatttataagataatctttccatttaatgattttagggtcgaaatcaaacataaaattttctgaatttctgttgtcctcttctttctgcttggcgcataagtttttagtattcctatcgtcgaatctggaaaaacaaattgatttatgtaaatatataaaccatcctttgaaatttaatttggtgactaatagagagttaaaatttcacactagaaaaataatattctacgtacatgcccttgaagagtacgtaaggctcgtaaagctttaccaatctcatcaccatatcgatcttgcggtttttgtttttgtattcgtctccttccctcgaaggatatattatatcaaccaattttaataactgatggaggaaaaaagaaagaattaatatcataacactatatattaccacactattatctatgaaaaacatttagttttcttcgttagaaagtaattataagtttgatcataattagcgtaaatatactaagtaatttaaaatccctctcattgctattagtacctggacaggtagtttgtaacgtatggtcatgtagaggctgaacaaagccagagttggtatcagcttcattttcgagacagttatcattgagccattgcgactgcgcaacgagtttttggtgaagtaacaaaacaaaatttcacggatctctccatatattattgggttttggtgagatgaaccaacttggtacaccatgtgaacctttgaacctccagcatgtgtggctgcagctgcgatcatcgcgatttgcaccatatccgctggtatctgttttttcatacacacccaataaaaaaagttaggctataagagcttgagttttacttaagtttagttaatattattat

SEQ ID NO: 25905 - DNA, 613 bp, Arabidopsis thaliana
cctgaaaattcacaaagaatcctccattttttcttccaaattccaaatgttctctcaatcacagaacgtaaagatgcatgaaatcgattaaacaattcatgcctatttctaggaggaggaccattttcaaattgtgacgtatgatactgaatattcctatttcgtgaaaatttatacggagcaggaaaattttgttttgtggatagccggaatcaactacataatagttgtctgttggaggcaaagaaaattcagaatcattgtcttgctccattgtgaatcaactacataatagttgtctgttgtatcgtgacaaaatcttggtgctccaatccatacatgttcaaaccacatattgccataacattgaataatgttctcccatgtcgatcccaatacattctttgtaattcacgtttcaccttaacacaaacatgaactccatccattgctccaacaaatccactaaaatatgaccaatatctttggtctagttacaatcgttcaggaattcggcgtagttcttgccttcttggagtctttatataattacaagcaagtagctatgtagctgttaggacctcaaaaatttcctttttactgtctattgatt

SEQ ID NO: 25906 - DNA, 573 bp, Arabidopsis thaliana
atatgtgatataaatatgttgtttacatatgtttggaatggagcacttggatcgtgccacgatacagtagttctaacgatggcacaagataatgattctgaatttcctttgcctcctagagataagtattatgtagttgattctgggtatccaaataaacaaggctttttggcatcttatcgatcttcgcggaacagagttttcggtatcacatgtcacagctctacaatggtcctcctcttagaaataaacatgagttgtttaatcgatgtcatgcatctttacgttctgttattgaaaggaaaattggagtttggaagaaaaaatggaggattctttatgaattttctagatatgatattgatgtccaaaaaacagtggtaacgactacaatgtgactacataactttatcagaatgtcgaattattttgacgagaattttgttgaagtaataggagatacaaatatcaacaacataaattctgagaatgatctagatgaccgaagagaagtggtatacctgatggaaatccatatggcaaatataagaggaaatattgctgatatgttat

SEQ ID NO: 25907 - DNA, 1046 bp, Arabidopsis thaliana
ccgtcgaccacgtccgagacgatcccctcgctctgatcaagctcccttcgaaaacacgagcaatctccatgacctcatagaatttggacccttttgcccaagcatacaccgcctccattatatcaggtctgaaagactgcacaaaactctccacgtctatttcgacctgtcaatgtcataaaagacagaaagttatggaccaaagcctcttcaaatggtcaaattcacttttagctgagcagagagaatatgttagtgaataccttgcagtcaagctgaacttcagctacacgcctggctgtgtcttgtaactgtatgaagagcaagtcgagttcttctctgggtttagcagcgtcggggagtctctctcgccatacaaagcaagagaggagcgaaaccaacgtcctcacctttgcatccttgaagatacactgaacattaactccgttaatgtcaattcttctgcactactgatttcacatgcaaccttacccttcaactccacgacattatcactagtgatgtatctgcgttcaatagcataatgataaaaattaagctaatagaatcagcaatggaacatacagtcccataacattaaaaagagcatgatagaatgatgtagctgacgtataagattgagttggtttcacaagtatattttgaaagtgaatgaaataaatttagcaaatatttaccctagccttcgtaaaacacgctttctggccttgagttcatctttaaacgccaatgctgttgacgatcggacagttttcttaagtgacttgatcttggctattagctcttccttcatctgtagaactttcaacttttctgttatgagtggagattttgcaattttgtgtttttcaaataggttttccagagcctccagccgccgaactgtctttttgtaagagctgctcttaatctaatgaagtaaaagttgtattcatctcttgtgacaaatgaaagagcagaagcagaaaggtactgggggaaaaacaaaataccttcatatcaacttcaggatctaggggtattcc

SEQ ID NO: 25908 - DNA, 650 bp, Arabidopsis thaliana
  unsure (1)..(650): unsure at all n locations
gctagcagatcgccggcttccattgcctcccaggtctcggttcctataacctcaccagtggttgctgatgagggtaagcagcagtcagtgcctgggcaagcctttgctgtcgaaccaggagatgttcttggtggtaaggagcctttctttttggtcaggtgtaagaatagcagccgcaagtganngntacctaatcaaatcatgtgattatgttttttggatggaacattagagggttaaatagtcgtctacgacaagagatgacaaaggcttggattaatatccacaagcctctttttggagcttttttggaaaccaagatacaaccaataaactcatgtaggattctgcgagcgattcctcgtggttggaaacacttcgacaactttgacagccacaatacggcgagaattatcgttgtttgggatccagggtctcagttgttgtctatcaagcatctcctcaagttattacttgcgggtttcacttcaagctgagaatttgtttctcacggtctcttttgtgtatgcattcaacttagtggaggagagagtcgctttatgggaggagctgagacatctccattcttctactcctttggcaagaagtccctgggctgttattggggatttcaccagattttgaggagt

SEQ ID NO: 25909 - DNA, 1106 bp, Arabidopsis thaliana
gtattctaggtgatagctaaaaaaaccgggaccgggtatcttgggggtcacgtgacatgaatcgcgaaattcgagactagaagccacgcgctgactcagcacatacaggaaggagccaaatatctaatatcgccacgtgtcaccatgcgacttgcgctcatgaatgcggcgtcccgtatttttaaacaactctcttatacccgaaactacccttggagttttgtagttaattacggaaaaatgccactgatggaggagcggaaagaaacagcttcgacaaggaaagaaatcaaatgatattaaatattatatattatatagcctcacaatttattgtttacttttgtaaaaatgaataaaataattatggctaaaaccccgaagagatcctataaattagcatttcaagagtgagctagagaaggtctccacttgcgaatcgctaaaaaaaatcactgtttcataacacgtttttctctctcacccaccaaaaaaaaatcttttgttcttgttaccaaaaaatctcgtgataaatctcttcaaactttgttttattttcttcttgattctctcgaaatctctctcaacaaacccagaaactttccttgattcgcaagcttttcttccttttatattcttcattttgatgcgaatatagagagagtccataaaagaaacagtaatggacgaatatattgatttccgaccattgaagtacacagagcacaagacttcaatgactaaatacaccaaaaagtcatcggaaaaactttccggtggtaagtcattgaaaaaggttagtatttgttatactgatcctgacgcaacagattcatcaagtgacgaagacgaagaagatttcttgtttcctcgccggagagtcaaaagattcgttaacgagatcactgttgagcctagctgtaacaacgtcgtcaccggagtttcgatgaaagatagaaagagactctcttcttcctccgatgaaactcaatctccggcgtcgagtcgtcaacgtcctaataacaaagtttcagtctccggtcagataaagaagttccgtggtgttagacaacggccatgggggaaatgggcggcggagattagag

SEQ ID NO: 25910 - DNA, 614 bp, Arabidopsis thaliana
tatgacaaggcaggggaacaacattacaacctcataagcgcacttcacaagtctatgcgaggcggagatgctaatgctgcaatctactggttggctagaatgctcgagggtggtgaagagccgctttacattgcaaggagacttataaggtttgcaagcgaggacattggacttgctgacccttcagctcttactcaggcagttgcgtgctatcaagcttcacatttcttgggtatgcctgaatgcaatgtcattctcgcccaatgcactgcttacttggcactggctcctaaatccattgcagtttaccgagcaatcggagctgcacagaaggttgtgaaagactcggttggacagaatgaaggggtgcctctacacctgaggaacgctccaaccaagttaatgaaggaacttggctatggaaaagagtatatatatcctcccagtgatccttcttctgctgcaggtcagacatatctacctccgtctcttctgcatcataagttcctggaatggccagaaggggcttcaggcgatttccaagatcaagaacacaggctctaaccagtattttttctctctttttggtatgtgatgtatagaggatcatgttg

SEQ ID NO: 25911 - DNA, 607 bp, Arabidopsis thaliana
cccgagccccgtctccaatctcacgcgtcggcgagcccttttcctttccccaactcatctccggctccatccactttcatctacccgccgccaacaccttctccgtacactcacgcgccgcatgcaccgtctccattcaaccacgcgcctccagattcttacccgttcactcacgcgcctccagcatcgtctccattcaaccacgcgccgccgggtcctccaccgccggtacatggacagaagcgagcggtgatagtcggggtttcttacaagaacacaaaggacgaactcaaaggatgtatcaatgacgcaaactgcatgaagttcatgttgatgaagcgtttccaattccctgaatcttgcattcttatgctcaccggtattattctatatcataaaatgtcataatttgtgtaacacgtaaaagtaatgttaaaagtgtcaaaatgttgtagaagaagaagcggacccaatgagatggccaacgaagaacaacataacaatggcgatgcattggcttgttcttagctgcaaaccgggagattgctcgtctttcacttctccggtcactgcaacatacagatggacgacaacggcgacgaggttg

SEQ ID NO: 25912 - DNA, 823 bp, Arabidopsis thaliana
tataattaagataggctccaaatcaatagggcaaacaaagtacctctccatcgcgtaattcgcctccttttgatttatcagttgagcaaccgccagagtcttagaaaattgagcaatattccacaagccgatgtcaggctgatttgcaaaacagtatcttcttcctgggagatctgtcgtgtttggggtgtaacttggatcaaaagcatccaagaaaccaaatgggccatagtcaatggtttgacccaaaatgctcatattgtcagtgttgagcacaccatgggtgaaacctacaccttgccatcttgcaactaaggtagctgtacgctcagcaatttcaacgatccatgctaatataattaaaaaagcaaaagagttagttcgaatattggccattaatgtaacaactggcaataacaaaagtataataggtgatacaaatgaaaatagtggcgtttcatgcagcattttgacaaatacttcattagggaattacctgcatacttgttggaagttagatccacaaccgaatcatcttcatcaccggttttgaaagataggctatcgcttctatccatgctctctatatgtgggaaatgatgtttaatggcatagtctgccaacttacgaacaatatcaagatcctcttttcctctagaggcatgtatttggtatgaccaaagcgtagaaatgactgagaaaccctgcaaacgattgcgccgggttcttccttcggattgccactgcaaacgcacaatgccaaacaataggagtagtcaccacctagaagcctaattttatagacaaaaatttctctactaga

SEQ ID NO: 25913 - DNA, 442 bp, Arabidopsis thaliana
gtatagagagaaatttcattgttcttcgtgtttgcaattgcagaagatcagtataaatcatttaaaggtaataactaatatgacttttaaaaatataatcaacttttcaaggcctatgatgtgtggcaagactgcataattccaagattatccacgtctgatgcagctatgctatacgcttccacgagacgttctttagttaagtgtgtctgaagctagtcagcagtagacgataggccattcatacctcgtgagacctacacaggaaaccggttccgatggtactctagaatcaaagagttgttgctcactggtcgcatggccagaccaatctgtcaaaagcaatgtcttctgagaacagatgcaataatacgtgtgtaatacatgcaggcagtctccacgaacctgggcgaggtacgtcagatactgtcgcacaggagac

SEQ ID NO: 25914 - DNA, 993 bp, Arabidopsis thaliana
gatatatagggaaagaaaagtgaatgaaagttttgaattgaaacaaaacagatttttttttttttttcatgttttctgtaaattgaagcagtaagtattaatacagcgagaatatttgtgtttgttttcgtttaaacttcccgctttaatccggatattgatttgagtttggatttcttcatatagctgattataaagatgcatttgagtggtcaaaaatattataatcaaatagtgtaccaatgcagccgatgaagtacattctctgttaaacttacattagtttctgggtgctcctctacaacatcactctaggcacatgcattaaaatattcactgttttattaaatatatatatatatctactcattttctgacaagataagttacaaatttttgtttccatactctttgaaagagatggagaaaaaatcgaattcaataattgttcttggtatttattccatttcatcatcatcattaattgttggggacatattacatgtaacatggttgtgacgcatcaatccccatcgggccaagtggggaccaacagttcactgagcttgattcagttgagaacttaggaatcaaaaagagggacctgattggctctatcaaaacctcactggagcatgagtgtccaagcaagtctcatgctctgacgtcatcatccgtctccgccagagacaccgtggctctcacgggaggcccactcatgtccgtgctattaggacgaaaagactccctctccacttcaagcaaacacgtggcagactctgagcctcctccctccactgctgatgttgacaccaccttaagcctattcgctagcaatggcatgaccattgaacagtctgtggccattatgggtatatatttatacgaaattttcatcgtagccttctatctcagtttttctttcaggaacttgcaaagtggacagggccaatcaaattttagccatttagacttaagtggacgaatatactc

SEQ ID NO: 25915 - DNA, 1013 bp, Arabidopsis thaliana
aaatcagatttgcatattacatttgtttttttttgctggggaacaaaaagtagcatttcattaaaagacattaaaccatttgttaaaatcaaaatttgttatactgtggcaaggacgtaaggtccaccatcgtagtgcgtcaatgatattaatcatttcgaatgattctgatcgatggggtgaaaattgattctccaatgaattttgggcaaggagtgtttgagaacggtaaattgtttatggttaattcttttgtaacccggttttactatgtccggttactatgcttcaagctattttaattttatactaattatattttttaatatttttaacatttgataattataaatatacatcaatcaaccttgtcacacacgcttctaattactccttcattcccggttaacactttgtaagacgacaattttacaaacgcggaagagaaggcgttgaagaaacggtcttgatcagctgcaaacgcttccacaaatggacgtgtacgtggatcagctccaatctccgagtcaatcctaagattgccacgtcccgcgatggcatcatcgtaataagctgtatcgaagatcaccgaagtttgatcgttggggacaaatgtggcttccgcagcttgagaagttggagaaaactctggacaagcaacacgcaagaacgtttgaaaacgtggatccatgttctcgcttgtcgcgtttgcgttatcgaaacgcgataatacgttgttgcaatgtgtgactcctatcgtatgtgcacctacaagagatcgaagaaatcttattctatgaattaaatatgcataagatataagatataaataatgtttatatacccatgatggccacggactcttcgatggtcatgcctttgttagcgaataggcttaaggtagtgtcaacgtcagcagtggagggaggaactcagagtctgcacgtgtttgcttggagtggagagggagtcttttcgtcctaatggcacggagatgagtgggcacccgtgag

SEQ ID NO: 25916 - DNA, 584 bp, Arabidopsis thaliana
ccatgaaaattagcatgccttaagttcaggggttgcaactcactgtatcagcatatatgacgctagcaccacctccagctaccatcgtccaaatgcggcctttaggattcaaaacagtgaacttcaaagaagcacttgtctgcaataagtaacaaacacacacacacacacagacatgaatggtcagtaacattactttcaagtctttcctgtctgagtcacaaaagtggtgtttttagaaaagctggatgcttaaaccttctcatctaaaccatggatgaagttctctgtagaactgaggacccttccaaatggcagaggaaattcaatgtctccccacctgtattaataaaacttatcaatccaatgagtttccaccggaaaaattgattgcgggtctctcaccgggaacttagaaatgttagacatacttgttgaaattcttgaaggcagcagtgtcatctaattctcctctcatatccagagggaatggttcccatcgactagtgtaaaggattcatctcataaaactgaaaccaaatctttaagaacacacaagtagatataagaagaggtcttgagag

SEQ ID NO: 25917 - DNA, 846 bp, Arabidopsis thaliana
  unsure (1)..(846): unsure at all n locations
aaaccaactttaacatccttagaatacgacatcgttttgtctcctccgtgtctcatcaacataggagccgtcacgagacaagcgaccaatggaacaagagagttgagcaagagataacccgaagcttcttcacgttgagacgtgtgaaaaaaagagtggaccatgtcggtgtagattttcccactcaaaccttgataacttcacgtgatccccacggcgacttgacggttcaccggaaaactattgattgcgacgatgtaacaagctgtgttgatccaacagatactgttcccggccaagaaactcaaacaccacatctgagagaacgataaagtaaacatcttcttgatgatggagagatactggagaccgtagccggcgaaccctaatgaacctccggcgagaaggacaagagggagaggaagataaacggcggcgataccggagataaaacctaggacttttccagcgtcggaggcgaaagaaagataatttagcttaaactgggagattttgagaagctctttaagctgtgaagagtaagctgggaaactcaagttggtgccattgaaagattgaagccagagaatagcgactagactcaaccacgggagaatcttccgagacatgtttcttgagtgataattgaaagaaacagagattgtgaatataggagcaagattctatatgtgggggagttgtatttataacagagagattattttcctattttataattttaataggattttgtgttgtggtaattagacggaagatgtggttagcttaatcaagaaaaggaaagagaaggttgggtttaatganaatgttaattaatgctgatgt

SEQ ID NO: 25918 - DNA, 644 bp, Arabidopsis thaliana columbia
ccccccccccccccatctttttgcagctgctattgaaaacccctacagcagggaattcactatgtttaggaatccaagggagagaagttccgggaagtttgtttcactttctgatttcttgaacttggcaaaaaactccagctctctcaccggtgttttgatcagcgtggaggtgagttgtataatcacttttagacttttatcggtcattagaataaaagtgatcttcgtcatttcttttgatggttaaaacgagtatgatttgtttccttcagaatgcaacatatctgagagagaagcaagggctcgatgctgttaaggcagttctcgatacactcacagaagctggttacagcaacaagacaacaaccacaagggttatgattcagtcaactaacagctcagtcttaattgacttcaagaaacagagccggtatgagacagtgtacaaagtcgaagaaaccatccgcgacattctcgacactgcaatcgaagacattaagaaatttgcggatgctgttgtcattagtaaaaaatcagtcttccccaccagcgaaagtttcaccaccggacaaactaaactagtggagaggctgcagaagtttcagctccccgtttacgttgaagtgttccgaaatgagttt

SEQ ID NO: 25919 - DNA, 557 bp, Arabidopsis thaliana columbia
tcaaacaatattatagcaaagataatgtgattatttggttattgtaattgaaattaatccatataccaattcattttgttttgttatatatatcgagaggttattgtgatttaaaaaaaaaaaatatttaatcatctacccagtaaaactacgccacataaccaccacaataactctaagagcacttcttaccttgaaacgtctcttacttaaattaataattaaatctttaatttttatcatttattaacctaagaaacagctaataaatatttattaatctaagagacttacacgtctctctttcttataacatatcaacatcaaacaatattatagcaaagataatgtgattatttagttattgaaattgaaattatccacacaccaattcattttgttttgttatatatatcgagaggcctaagacaacacttacacgtctatctttctttcctttgtatccaaaaaatataaaataaaaaacactatggcggaaaactacgaccgtgccagtgagttaaaagcattcgacgagatgaagattggcgtgaaag

SEQ ID NO: 25920 - DNA, 577 bp, Arabidopsis thaliana columbia
gtatctgtttgctagcttgtttttcccatccatccatgctccatacacaaagctatacagatagaaccgtttatatattaggaaactgataacacggcagatgaaagcagtggcaagatctttttttataacataattggagggggaatatattacagccaatgcaaatgcagcatataagcatacctgagaatcagcaccagaggaaacaagaacatttagcacgtttgagaatgctaaaccagtcactctcttctgatgacctttcaatttacttttaacctgcatgattcattaccatccaaaagctgtttagaatatttgtttctatgacaaactaaaaaatccttttaacactttcagttgagtcaggatacctcatcaactctgacattgtagatttgaatagaagagtcatccattccgatagcaattatattattgtcttgaggatggaaggcaagggaagtcgctgctggaggaggagccatgaatgtcgtcatcgtctgcaaaaaagaaagataaataagtgagcaaacacagagcttgagaagccaactagcggaatcgacctgca

SEQ ID NO: 25921 - DNA, 846 bp, Arabidopsis thaliana
ctgtgatgatgcatcaacttggtcacgtcttctaatggagagcatttctcttgaatcaaagtgtaggtcgattagcatctgtttccatgtgtacacaatactcaacttcagtcccaacacgttcacttagaaggagaatcagcagtagaaagaaatcgagtacaaaaccaatccttaatgaatcaaagtttcaagaaacgatatcaaagcttccaccaagattcacacctgaagaactagctgatgctataactcttgaagaagacccgtttctgtgtttccatctctttaactgggcatcgcaacagccgaggtttacgcatgagaattgctcttaccatatcgcgataaggaagctcggtgctgcgaaatgtataaagaaatggatgatattgtgaaccaagtactctctgttcgtcatgttggtaacgagaatctttacagttcgatcatcttctatttcacgaaagctgggaagttgatacgtgctgtgaatatatttagacatatggtgaatagtaggaacttggaatgtagaccaacgatgagaacgtatcacattcttttcaaagccctgttgggtagaggtaacaactcttacataaaccatgtgtatatggagacagtaagatctttgtatagccaaatggtggatagcggtattgaaccagacgtattcgctttgaactgtttggttaaaggttacgtgctctcgcttcacgtcaatgatgcacttaggatatttcatcagatgagtgtggtttacgattgtgaaccgaattcgtctacttatgattatctaatacatggattatgtgctcaagataggccccggatgataagcct

SEQ ID NO: 25922 - DNA, 907 bp, Arabidopsis thaliana
tcccctttacaacaacgttacaaattacaatccaacaaaaacataaacatacataaaaccaacggaaactttacttttttttgtttttttttgcgaaactttacttgttttaaaacgataacataacacttcatcacttcacgtttacacttattatttgccgtttgatttctcatggcgcgatcaaaccaaacttcttaaattccaattttaccctctccatctcttcctccggcaacgtaaccgtcacaaccctctcctccgatttcgccgccgcgtaaacaaccaccaatccctcctcccctatcccctccacattacaataaaccgactccggcgacttccccatcactttcgcctcatacaaatcctcaccagtcagatccagaaacgtcaatttcgctccataaacaacaaaatccaaattcccatcgcaactctctccgatctcctcaattccacatctctcatccttcgcttcccccatagctttcactaattcctccaccgtcgcttccgccaccggaaaatccacgctcactgagctgatcacctgactgtttcgaatcgcattaagtttcagatcgttcggatcttttttaatgatcgtaaccgttacaggctttggctctaccctaactttagctatgcatttccatatgattccggcgagaatctcgaacaccggaatcgagtcatctcccttcgccggaaaatgtggtgatatctgatcggcgactgagagattgaaacagtaattcgccaatttcttgtcgtttggagtgacccagagatctccaacgggttcgacccgtttaattgaaaccggatctttaaccgtcgggtttgggctttggaaccttctctctcctatagagggtgttgttggggcataaatcttttctcc

SEQ ID NO: 25923 - DNA, 484 bp, Arabidopsis thaliana columbia
tcgaaacaagtaattggtgaacggagaactcacagtgagtggagcgaagcgagagacgaagacggcgattgaacacttccgaatcggcgaatctgagaaggtaatcgtacggaggaaagagttcgtgatggtgaagcggaattagacgattccggtgtaaaacatggagagatataggcggtggcgagagaaatcgccattgaagaagcttcggcgaaacgggagagtttttaagttaaagaaatgtgacattttttgttttggataacaaatccgatttgtaaggagaaagtcagaagacgacgagacaaatatttgggagttccgttaaccgggtcggttaataggagtgaattgatcggcaacattttgtaatgtgttttggttagcagttaaccaatttttttgaaataagtttttttaacctatttttgaaatgagttcggtttttttgctaatggttataaccaattttatgttgaat

SEQ ID NO: 25924 - DNA, 928 bp, Arabidopsis thaliana
tgtctgtcaattcaagaaatatatatatggccaaagtcaagacacagatgttcatgttagtagattttttattgctttcgcagaaaaatattatattaggattgtgaagtattgatttacaaactacaaaagacagtgatccaaatgaaacctcagattaaacatctcaaaattcagaaggatgattaataacttaagattaaattaaatgtattacaaacatctttttagtttttgccttttactactattgctcttttctgggggcttttgtggtgggaagtgtcccaaagactatgtcccataacgacgaagttataccaaatcctttgtcctgaatcctgaagtgatgattcaaatggtacttctgcagaatcataagaaaaaacataacaaataagctctctttatgcaatccggatacaaaagaaaagaaagtcccaggttttgagacttgacattgttttaccttgagatttttggtcactggtctagtaggttgggcatggtgaaggtaataatgagtgacatcgtacatcacatatccgagcatgcctccaccaaacaatgcaggtgcggttgaaggagttgagatagccttcgcaatgttccagaactaggacacaagaaaagaaaacggtttagggttggcgctgaaaacatgtagaatggtgggttaatgtagataaataccggaaagcataaaatcgctgttgcagtaggaggaaagacgagccgaaggtggtccatcgggtgcttatgatggcatccgtgaataagatagtgtgcagtgtttccctggagtggttcacaaaatcattagcatctgaccgaagtcatgtttccaggaatttgtctgtttgaggaggatcataggagagtactgctctatgaatgtacacagagagagggagaagtgactaccagt

SEQ ID NO: 25925 - DNA, 1253 bp, Arabidopsis thaliana
gaaaccaaacataaacctaagacaaacagaagaaacttggtaattgaaaaaaagggtttttatttttcacgagaaaaacacgtaaagtttacacctttggaagaacaagggaatcaaaatcacctgaagaagcagcgaatctagaaacaccgtcttcctcgtttcctgcggcgtaaagttttcggttttttcctctggagaatataaaaacgagaagaaaaaggtttagacttgtctgattaatgttttagatttccttaaatattccttttcgatttcgtttgtcatacgctatttaacaaaatgttaaacttatgttttatagacaaagcaagtttataaagatatatcagatttttatgcaaaagcaagtttattctgttttgtgtgttttttgagctaggcatttcaacaaacaggttatgtgcatctagaggaagaacttgttgaagactaaaactgtaatacgaaaccaaattgattcaaagtacaacaatttctcaaaagctgaatcaataactcaaacacaaactatactaaacaacaaaaagactcataaattccgaaaatatcacatttttttttttccgattgttgaagaaacttaagcaatggagactttagcaccagcttcttcaagagtcttcttagcttcttcagcttcatctttagtgataccttctttaaacttctttggtaatccttcgattagctccttagcttccttcaacgccaagctagtcaaagccctaacagctttaattactgcaatacgagaactactcggaacttcattgataaccacatcgaactctgtttgctcctccactacagccgccgcgccaccgtcggctggagctgcaacggccgctgctgcgggggctaaggagagtggggagacaccgaatttgtcttggagatagtcgacgaggatacgagcttcttcgagggttaaggaggagatttcggatccgattttctcgattttctccggagcttcgacggcggagataggacggaggttgattgcacggtggctagaagaagagctgagacgaaatgggaattcgattgcggtgggtttggaaaggaagtgatgagtggaagcggaagtgagaggagaagaggaacggattgttgttgcgattgagagagtcgtcgacgccattgtttctcctctcttcttcttcttcctctgaagctttgggatctgttttgtgtgctctgtgagtgtgtctgtagaagatgaggag

SEQ ID NO: 25926 - DNA, 479 bp, Arabidopsis thaliana
ttgggttttctcgttaagacacttaaacaaggcattgtaagtttcaacattaggtctcaccatcttcatcttcatttcctctttcagagagagcgcttgcccgaaattccccagcttagaaaatgcgtttatgagaatgttgtatattacagtgttcggattgacctttgagtgcaaacccatgtccttaaagagcttcaatgcttcgtctaattcgccgactgagcaataagcgtcaatcaccgctccatatgtcgtgacagtcgggtctaacccgtcttctctcatctgctccatcattctctcaacactctcgaagtccttgtgtttaccgaaaaacgaaatcagagtgttgtaagtgatggaatcaggtttcttcccttctttttccatatcggttagcatctcatagactttctctgcattattcttatcacaaaacaacccaataagcatgttgtaagccaataagtcatgag

SEQ ID NO: 25927 - DNA, 981 bp, Arabidopsis thaliana
tcaaaagttttgaacaatttaactccttatgagatgttaacaaagaaagcacctgattactcttttctaaaatcgtttggttgtttgtgttatgtgtctactttacagaaagataggcataagttcagtcctagagcagataaatgtgtctttttaggctactcatctggatataaaggttacaaagttttacatttagactcgaacattgtatctgtctctaggaatgtcattttccatgaaaaagattttccattcaaaactgcaacacattccatccctgcatctgatatatttgataaatgtgttcttcctgcttctactccttttgacattgattcgccatctcacattcatcatgatgcatctgacattcatacacctgcattacacacaacaccacactctagtgtcacagatcattcacaggaagctgtaacttcagacacgaccacagtttcattgcctacagtcagaccaaagcgaacttctaaagctccaggctacttatctgactatcactgtgctctcatacaaacatcatcaccaccagaaaaggtcacaactactccttatcatatttcctcttttctttcatatgaccaattttcaccagactatcaatccttcatatgcaatatttcgatagagacagaaccgaaaatttttaagcaagctattatctctgagaaatggactgctgctatgggtgtggaacttgggtctatggaacttaacaaaacatggagtgttgtttctttacctcagggtaagaatgtagtaggctgcaaatgagtttttactattaagtataatgctgatggctctatagaaagatataaggccagattagtagcaaaggggtttatacaacaagaaggagttgattattttgatactttctctcctgtggcaaaattggccagtgttaacttttgcttgatctaacactaagaaaggttggagtactctcagatggat

SEQ ID NO: 25928 - DNA, 757 bp, Arabidopsis thaliana
ttcatattttgttgtaaaatttttgaaaaattgttataacaacttattatcatgttaagaaaaacatttaaagactaagaactaatcacggatcgattcctgcttaatcttcgattttattgtccgagggcacctgaaacctttgacaagtgcctataaaaatttgctaaacaaatcatcacattaaatgattaaaacaactctaaaaaacaattttatgttttgaaaatttaaaacgccacaaacatgcaatgccatttaaaatatattatgtgaaagcttatataaactgatgcttaatcgtaacaaacaaatcctcacacacaaacatatacacgttaaccagttagcagattgacacgaaatgtggagactgcgaattggagctgaggcaagacaagaccctcacttgttcaccacgaacaactttgccggaagacagatctgggagtttgatgccaacgggggctctcctgaggaactcgccgaggtcgaggaggctcgcctcaatttcgcaaacaacaagtcacgtttcaaggctagtcccgatctcttctggcgtaggcaggttggtgatgaaacctctttgcctttgaacaaaactctttttttttatgacaattctctataacagcacagtttaagtttttgtccaaatatatcatcattattttgttcttttggtaacagtttctgagggagaaaagttcgacagaagatccgagagtgagaatagaggatcagagaagatacatat

SEQ ID NO: 25929 - DNA, 753 bp, Arabidopsis thaliana
cttattttgtcagcaatgacaatgacatgtctaattacaacaaaaacagttgataggaattttggtaggagttgaatctcacgtcattgcattcgtcattcttcttcccttttctcactctttctctctacatacttctttgagttatcttctattgtttttttctctttcaacaacaataatttgttaggaattaggacttagcttcattgattcttatattcagtgtatgattctggtaataacttcttgcaatcacattccctttgacgataacatgagatggtgaatgagaaaacaatacagttagaaagacttcactaataaaagcttctgtcattgacttgggtttctacttgatgggcctaaaccttactgggcctaaaccgtaacactccggttttttaacagtaaaccgtaaattggattcggaaacgagagatggttttccgagttaccctcctcctcgtttctcttcaacagaactgtagattccagtttttgaaaccaaaatttgaaaagcgattattgattgaatcatcatcgtcaaagtaatgatcttttgctcaatttgattgtccaggatctagtttcagcaatctttggttgcaatctttggttgtttcgttgagattccagcaatcaatcctcatgcccgacgacgataaagagttgcaggaacccaaggaagaagactcctacgtttgggacagcgatacgcagctggggccacaagcaggggagccacaagag

SEQ ID NO: 25930 - DNA, 710 bp, Arabidopsis thaliana
tttaattcgtaatgtttgttatctaatttcgtctactaaggatgagcaacatgaaactgataagtcccatgcctataactgaatgttctctatgtaaaaagagaacctgtagctttattcttctgagtccgagccatctcggcctcgatttctttaatcctttcgatgatccccattgtgcttcacttgtttttgctactatctgtggagagagagtaaaggacaaagattgttacttatcaatagactcagaatcagagagttcatagataataacataaaaattttatcaataactcaaacaaaaaacttcagattgctaataaaagagctaaaatcaaacccgaagaatataaagctttaagattcatatttagcttaaatttatcaaaccatatatatccactcagtaaacaaatttgaatgccaaaaggcgaaagctgagctctttacgtctaatcgaacaaaaaaacgtatgtcgagacatcgattccaaacatgaattccattagacgagctcgaaatgcaggaatcatttaaatataactgatttaacaataaatcaaaatcttagcatgaaaaagtaggaatatttgatgtgcgactcacagtggaattggtgaagggcgatctccggcgaagagagggagatagatggagagaggagagagagcacgcctgtaatagggcgcccaaaaaggattacagtc

SEQ ID NO: 25931 - DNA, 900 bp, Arabidopsis thaliana
tttctccatcttccttatgatccattatgcccaaagtccttcttcttcttctctataattacttccacaaatagaagaagaagaagaagaagaataatatagaaaaaaagagagcttctcttcttatttctttctcacaggaaatggtgtttggttggagaaaagcgttttgcacttccgtttcaagtaatcaagataaacctcaacaacattcatcattacacactactgatcctccaattcccacaccaagattccgatcaaagtttggttttttatccaacccttcaactcctcgtctccgatcacgcggcggaagggcactggatgccgtcctcagcttccacatcagtcactatcccatctcttccaactagtcccaaactccattgcaggactacgagcaatgctactccaaggactagtaacagctcaagtcccaagtttttctctaacccttcttctcctaaatcatcatcttcttcttcctctcaaggcggcggcggcgtctctctcctccgtgccacgcttcttctcaacaaggtagttacttttgattcaatcaagttcttaatttgaaagacataatctaaagctccgttttgtgtgtgtgtggatgcagagtaatagtagtagatgtgcgatttgtttgcagagagtgaattcaaatcaaagcaactcgacggcggcaattttcacggcggagtgttcacattcgtttcacctttcttgcgtcaatggattagaagacaagcgttgtccgttttgctctgccgcatggaatcacgcgccaaagtcgaattatccggctgttaataataacttcggatccgacccgattagacgacctgagatccgagagatcaaacggggaagtcctgagagtgtcaacgacgatga

SEQ ID NO: 25932 - DNA, 599 bp, Arabidopsis thaliana
tcaatttattttaaagatattataaataagaaagttatagttataaacaataattttataagaaattaataaagaattcattgatgttttatgccaagattttatcgatttattatgctcacatgatcatgctataactatccggaaaatcagtaggagtataatgcatgactgtgaagactagaaccaattctgcatagttttgaagaaactaaggtaatgtcacttacatgattaatatataagatgtcttatacacagacaatacagagagatataaaagcaaataatgttaaccaataaccatagtccatagaaatcttcttgattgcccccaaaccacaaatcgattttcatggaaatgatggagtttggtgtagaatcgaacaccaagagccaaacctaagatgaaaagaggaacaagaaactgaaagagcttaatcaacaacaactcagaactcttcaattcaaagctcttgttatcttgattatgctctgtctgatttggggtagtagtagtagcaatatcactggccttggtagagagatctatgtctccaacataaaactcacttaaaatggcgattcctgtgttgaga

SEQ ID NO: 25933 - DNA, 1319 bp, Arabidopsis thaliana
gttgtttttcggtcgatgctctcatttggttgtgtttgtctcattctatttgcctttatgttagaagatgttgtagtggtagtacaccaatcgtatcatacgttagtagaagttgtagttctattaggtttggttttcattgaaatggcttcccctgaagaagcttctacagctttcatatctcttgaatcctatgtaagaatattgcattcatcgcttcttttatgtctaaattggcatataattgttgagattttgctgtgcttgtctcatttttatctgtcttttagattagcagctgctgtacattgtgttaatagaccttttcatgttgcagcatcccaatttgattgatttgtgttttttttgtacctggtctttctttgattttcatctgccatttaattgtgtattgttgtttaggaatatgagggtcgtcgtttgaaggtagactatgcaaagaccaaaaagaagaagacatatgcgccgcgtgagacgccttcaccagtgcctacattcaatttgtttgttgcaaacttggcatttgaagcaagggccaagcatcttaaggagttctttgatgcagacactggtaatgttgtctccactgaagttatattccatgaaaatccaaggaggtcgagtggttacgggtttgtctctttcaaaaccaagaaacaggccgaggcagcgcttattgagttccaaggaaaggtaaatccaagctattctaaatgataatgatctaatcataatttaaagcattctaggcttatcagttatgttaattttgagcaaagttgaagctcattattaccgtctgatatagttattgaatggaataaaaaatacaagagagtgtttatgttttggtttatttgggtatgttgctgataccatttgagcttagggaccatagatggacccgtaaaccgatttttctagtctttagactcttaatgcatcaatgagacaaaaatataaatgggtttctctgagccattatgtgggtagatactagacactttaagagtatatggaccataatcccagaattgtagaacagaaagatttatgacatgtttctaataccagctctagaatatgagctgattaagttggtggaattgactgtgtgaaatgaacatacgcaggattttttgggaaggccaatccgattagctaaaagcaaacagtttgtgaagttgcaagcaaaagaagggttgcagcaccagaggaggaagcagaggaggaccatctcagtctgagacaatgcccaagagcacgaaactccggctgcataaaacttagaaggtagt

SEQ ID NO: 25934 - DNA, 552 bp, Arabidopsis thaliana
ggaaaaaagatgagatcccataaaagtacttccaaataaagctatcccatgagtagaaacaaaatatacgaaaaaaaacattcaatatgacaaatgcaattgcaaactaaccttggcatacatatccagatgttctaatggcaagttctccctgcgacactccatcctgtggaatacgatgatgacctgtctagcttttttagggttttcttccagttttgatgcaagccatacacagctggcagcaactatctgtaaaaattaaactacatatcaaatcattatggtcataggcaggagtatatacactcctaaagaattatcatactttcataaacacacaaaactagaagaaagaaacaaaataatttaccttgacatcaaatttagccaaagacttcttgcaatagaatcgctgaaacagaacctgcccagtagccataactgcctgtggtctaaaataaacaatctaagttaagaaaatcacagctacgtaacatttgagtcttgcttaataattagaccaagaaaaaggatacagtttgagcaata

SEQ ID NO: 25935 - DNA, 1029 bp, Arabidopsis thaliana
ccggtttaagctttgaccgataaagtaaaatgtcgtgttcagctgtaattaacggccgaccattggcaacagtatgacaaagaaaagaagactgttggaaacaccacacaacggcatcgaatgtgggggctactttcaagctcaattttataggtataaatgtataatattggatactgcgacattaaacactttacatgtcgattcaatgttgttctcttgagagctttcgtgagagatttcatgttggagattctattatgcataatattcataacattcagattttttttgcaatatcaatgaataatatgacttaaatagaagaccaatgttcaattcaatgaaagaatcaacgataaaataccgttatatggttgaaacttggaaataccggcaaaaatgcacctaatctcatggtcgcaattctcaagagacaagaagtaaagcaagctaatatggtcctaatcctctccaaatctcgaaaacaaaaaaatcaggtctacatctaaccgagttcgagctaaactaataagagagcttttactcccaaccagcagctggaacagaagcagcctcccatccagcagcaacggtaactgcaaaaaggaaacagcaaaaacattagaacatttggtgtttagattccgagagactatgatgaagaagaaactaaccgccaactgcaggtgcagcagaaattggctgttcgacttcaccagaccatgcagcatcagatatttgagcagtggtccactggtcaccaccaaccattccataatcggcctgtacttcagcttcttcatcaccctcttgctttgcttcttcgggctccctgtagaaaaacagatccacctacacaacagaaacaagtcaagatctttgtctggtgttggagaaacacaagtcctgatagtatttctagagtttaccatgacatcccatttctgagctgcgagaatggtccacgcatttggagaccatacgagcaaaagccagacaagcaccaatgctgtgttttccttgttg

SEQ ID NO: 25936 - DNA, 880 bp, Arabidopsis thaliana
aaaattgacttacgggtgaaggaaatgttcgaagagccaagctctaagtatattgacggagcgttcaggcaaaccgcgttgtggccgccaagcttcttgttccatcatacccatttgatgaaacgcacgttcgtgacgcaaactttgctctagcaaacgcaaacgcggagtttcaccttttgttaacccggaagaagagattcccgctgcatctttgtccccaagaagttcgcaactctgcttaagctgagccgcaactgcatctttaaggcatctaaaatgtcttgacatagctttttgagccaatgcggtgtacggtaatgccgcaccgtggcccattactatgtcgaaagagttcacaaccatctgcatttgctcgcagtaatggttgtaccgtcggtccacctgccaacgaaacaaaactatacattatacaatccataaatatcaatatttgcctttttcttttaattaatgttattgttaactcgtgtgtgttgtgttatatgttcacgtgattattatttagtgtagattttatcacgggaacctatgcttgtgtacgagcatcatctaataaataaactaatgagattaattagttacctttaaacgagacaaaataagaaaataagatattatatagacaaattattgaccagagaatatacttcaatgtttgcgcaatcctaccaacagcacattttatcgtatcctcgagcataaactaaaatatttatttctagtgagaaaaaagcaaggtcaactaaaaagtagataattcaattatgggtaaacaaataagtaacgtcaagggttagctttaggacgtaactggagagtagcttatatggagaaggaaacgccaattacataatta

SEQ ID NO: 25937 - DNA, 1302 bp, Arabidopsis thaliana
tcataacaccagcaacgggcaacatttcgaatagtataccctccaccacccaacaccatgagaggaacgttgtaagatcttaagaaccgaaggcaatcagcgtgacccttgactgataagttgaagcaacccaaccgatcaccacttaaggagtcagcaccacactgaagaacaacttcctctggctgatacacttccataaccttctggataagaggtctaaacaagctgcggaaactttcatcgtccataccatcgtttagtggaacatttagagcatagtatttccctttttcagcgccaacatctcttatgtgaccagttcctgggaaaaagtccccaaatttgtggaaagaaacagtcataactctatcagtggtgtaaaacgcttcttccactccatctccatggtggacatcaatatctatgtagagaacccgctgcaaacaaaatttgatgaaagcattaagatgtaagcaatggaaacatcgttccacactcaatcaacattttgaatgatgctatcagaatacattaacaaagcaacggaatcctaattagagaaacttaaagaaccagacgatgaaaacaaagaggcaatgtagaaaaccattctcaaacaaatcaacatccttatcagaaacacctgatgcacttgacctaacatgagattctaaaggtaatatgcagtttaggaacatgaaaggatcaaagctcattcgataatcacacaaggcttcaaggtttcaggtagatttaagaaaaaccactcaagataagcttaaaccctaaaaatttcagaagaacatgaagaagttctctatgatgagatcataaagaaggaatggagcatttaccttaaacatcttgagcaactccagaatccctagcacgatgtcgtttacatagcaaaacccagaagcctcgcttttcttagcatggtgaacccaccgccccaattgatagcgatatcagcgtcctgtctgtttaatttgacggcagcaccaatagaacctccggcggaacacggcaaaaatcaaaaagtccgtcgaagacaggacaatcctcaccgacattgaatcgccttaggtttcgtgcagcggaaggatcgcccatagattccggcgaaacggaagcgaggaagtcaacatactccggcgaatggaatcggccgatatcggaggcgtcacggaggctagggcgactgatttctaagcgacggtggaggtgatagtgaatgattaggctatgagccatacggatccggtgaggcttcatcgggtggccttgaccgtagtagta

SEQ ID NO: 25938 - DNA, 805 bp, Arabidopsis thaliana
tatgtgagttcttgatattatgctagttttggtgaatctatctgaagttcttggtattagtttaagtcttagcttactcggggtcaagatatccaactgtgccacggacaatgctggagacatgtgaggtcccgtcaactgcgaatttcgacaaaccgaaatctgaaacctttgccctcatgtgtttgtcaagtaggatgttactagtcttgagatctctatgtatgattgctggaacacaccctgtgtgaagatactcgatccctacagaaacaatcaaaaccaacaaaatcaaatatcgaaaaaatggctttctgttttgttgtacaattcacggacctcgggctgcatcttcagctatctcaagccttttaatccaactgattctccggtcacgtggtaccacgcctgaaaataaatccacttgttatcataatgttaagccaaaaggctgaaatataccatcctatcataaaaagatatgttaccataaagatgctccttcaaagtcccattgtgcatgaactcatacacaagcatgttttttccctcttcttggcaataaccaagaaactgcacaaggttccgatgatgtatccttgagagtaatgtaacctgaaaaaaccataatcacttgtgttacttcctaagcaaaataaaataaaactagatacttaggcacatggttttagactaaggcagatttacctcgtttgcaaactctctctttccctgatatgaattatttgcaagaacctttacagcaatctctttccctcccttgtttaccatagtatcgattcaa

SEQ ID NO: 25939 - DNA, 1033 bp, Arabidopsis thaliana
gaatgcaatctgacatgtaggtgaacgcctgaacaacaatgacaactccttgagcatctcaaatttcttgttgatgtcagtggatttagaggagatagtcaccttctttaaacagcttccacttcttaagatgaatgccgctacttctttctcttcttctgttccttcatattttacccattcgagagtttcaagacttgtcaacagacattcaggaactgcactcggttcattccagcacggccgcggttgatgagatcgatagacatggttctaagataaaagtaagatatcatcacactgttattctactgaaaatatatgctgatatatcatagagactgaataattcaggtttagatctgcagaccttaacaagtttgagttctcgtaatttaggggaatctctgagtacacacataagtagatttagccactctgtctcacatgtgcatatcgttaaacgtacaagacagtggaagacactaccaacaggataagcatcctgcataagagacactacataagtaatttgatcacaaagaaaccaataatatatgtagataacagaactatagaaacatattaccttagaggatggtatacatacatagagacgcttgacggaagaaatagaacccatgagctgctgcgtatgtacataagaattgcaaacatttgccttcacaaccttagtcatattattctcaatgacacaaaaaccacccctaccatcttcaatgtctaagcactccaaagaaggagtatctatcacaaacccgcaatcagcatttatactggctaattccgtttcatgcaagactaaacactttagagaagacactctaacagtgaaagtagtcacattgtcatagggacagcgtttcacaaccaagtcttcaagaacaggacaattcgataaaagcatcttgatcagctcatcacctggaaacttcatggacacaagactcaaagtcttgagagatggaaatgaaaccgaggacgtagcatccacaagaaccgcgttattaag

SEQ ID NO: 25940 - DNA, 678 bp, Arabidopsis thaliana columbia
cttcaacaaagggttcctgtaaatatcgctctgatcaaagaagaagatgaataggattatagcgcaaacccattgaaaatccctcgaaatttgggattattcgagctatacataaaattcacagctctcatttcgaaatctgaaaacttgaatcctatcaacaacaactaccccccacagatcatagcgtaatttagctgcaaaaccacaaatcgggagagagacctagggttttgaaaccctaggatcctggacgagattgaatcaaagttttcagatgctcaccgatttgaatcgacgtgatctctgatcagaaaaccgttttctccgtacgaaacatcgatcggtgagaatcacttgtgtcggaatcttaacttgcttaattagtatcctaattgaattgggtgggtttatttgacccggaacccaaaagttgactcgttgtatgaaccaaagtcaaatggtcaagttttcttttttctttctttaaagttaacgtccaagggtctggtgagtggtgatacgagctatagatattagatattgtggcttaacaaattgtatgatatagagactgaaataatctttacatgtcgctaatttggtttacactaggaacattttctatgtgactcggatcaacatgacaaccatgatgaacacacatgtcatggcgag

SEQ ID NO: 25941 - DNA, 1086 bp, Arabidopsis thaliana
gtgacctctcgagagcggtccattcactttttggatgatcacacccgcttttgtagtcacgttcaaggtaagatccaaagatttgaaaaactttgagatggattgggtaggaagttttgtctgcatataaaacatcaatatcaaaaaatatcttatgaagtcttgtgttaacaaaaatttgtaacatttaagagtgttaattgattatacctttttaagaagattcaaaacaccatcgaagaagctacgggtcaaactaatagagagacttaaggcacttccaccttcaatgtaactaccaaacttggtgattcctacggcttgtacaagagacacttctacgggttcaggagaagggataaaaaccggattcatcgggttatcacccatcccttggcccaccatgggttgatctacgatgaccgggttcactctataggctgcaagatgagccgcagggcccacaccacttagcatcaatagttgagggctcgcgatggcacctgctgataagatcacctcactcattgtcgagtcttgcgttgccaattctgccttgtaggacactccatttgcgtccagaaatatcaccccatatgctttgggcctctggttacctgtccaatagagaagtttcatatccggagcaatatacaaacaaataatatgtatggtaatgtgcaacaacgaatgactacgacggtgataatgaccaaacgatcgccataattgaataattcattataattaccaaaatgaacaactgaaagtcatgattcaaaattatagagatttaagagtaaaaaagaggtttctaatttgaagtttcagttttttgtaattagtgtatgttatcataaataatgtttgttttataaataagtatcataactatgttaaacatctttatgtttttttttttgttaaggaacatctacaagttataaccatgttctaatcaaaatataataatagatccttactacatgtaataaatatataacaatcataatcgtaagcaagatttttaatatttcaataacaaattaaacacaagttgtgattaaaaaaaaaaaaaacaagttt

SEQ ID NO: 25942 - DNA, 478 bp, Arabidopsis thaliana columbia
ttttcatggttcttatcgagaaaaagctgcttccgcttcgacccggtgttgcaaagttagtgtcacttctaatgttctattctatattctcgatgctattacttgaatgtcccttttgagtttgatttttttaaagtctaaaacttttaacccaaaacaaggtttagcagacttactactgattgatactcctgaatcatgatgctatgaatgtttgtaaggcttgttatctcaactaatcatatacatgttcttgtttgttctgagccctcttgctaaaactttgcaggttggttgatcaagctttaacaaacggagtctaaagtagctgtgtgcagtacttcaaatgagaaggcggtatgatcaatcaggttctactacttcagtttcctgagaccataaccatatatctcaaaatcttgtatcctgatgagttttcgtaaacaagactacgcgcacgtgcatcgttaacatgaat

SEQ ID NO: 25943 - DNA, 431 bp, Arabidopsis thaliana columbia
tagacttgtctcttcgacagaggtacccccatgtaacgggcgaccatcgttcatctgtagttgatagcgacgagagttcgacgcgttcagcagtcgcaagcgcacccagccacgcgagacttcaacgtacgggctttgtacaccgttaaccagcagcgtattaccaacaaagccgccgcttcccggttcgttgtattctggcgtaccaaagttatccagccgtttatcctggataatgaccggaaaatcatccacaccataatggttggggataggcagcgacttgctgacttcatcttccaccagccacattccggcaaggccgttatagacctgctgagccgtgcggtgtgggagtattggcgtgatagcacagagtagctgcgttctggcgaatgggcagtacgggtgccagtcagcgtttggcgaca

SEQ ID NO: 25944 - DNA, 380 bp, Arabidopsis thaliana columbia
attcgtaatcatctaacgatgatgaatatgggatgaaagatagattgttgaaatgtgcgatgtggtttgtaggcatgataagacgcgccagcgccatcaggcattgtgcacagaacggcggatgcggcaaaaacgccttatccgcccgaataataattacttctgcgctgccagcccatcattcacccagccatcgaactgctgctggtaggctttgatccaaccatcaacgtgtccctgaatatcgccttctgaggctttgccgtcatgcataatggcgttctgggcgttaatatctgccactggcatactgaataatggcaaacagtttcgctgctgccgggttttactcggcccaagctttgttggcaactatatgc

SEQ ID NO: 25945 - DNA, 609 bp, Arabidopsis thaliana columbia
tacctggcacaagatgaacaaagtggatttagctttaagaagcttgtgccctgaaacattttggaagctaagggacatatataaacacaaagcagagagagttttacccgttcgcaaatactctggaggagtaaatgccaagtttgtgctataactcttcccatctctgctatttttcatgagtccaaaacaagacaacctgggattcccatcctgtaaaccaacaaaggataaaacaaaatttacgactttgaatacaaatcactcagagagataaagaaagattgaatcaatatattaaccttgtcaaacaaaaccctgtaagcattgagatcatgatacaaagctctccctttattactacaatattccaatgcttgtgctaaacacaatgcaactcttaatctcatcgcccatttcatcggattattctcccctgaaaacatacagaatcattcaatcaactacagcactagaaaatacacaaaccctatgaaaccaaccttgttctgattattcaaatcacacaaactgaatagcgttgtaagttactcacagtggaaaagatgctttgcaagcgtttcatgaggcataaactcagcaactagt

SEQ ID NO: 25946 - DNA, 548 bp, Arabidopsis thaliana
tgcacaacaggctcatatcccacatggtttggaatgtatccctctacacttctactatcccttagtccagtagaagcgactcttggtgcagccgatatgtcagtatgtcctttaaccacctttgagagattaacatcaggaagtttcttctcctcagtgttattttcaattggctttttagaacactgaggatcagtagcaggcttagcttctacaggatgctgttttttatacgcagcaggattcggcgtgtgcaagaacgaacacatatctcctttcatacacatgcctttttgaaagaacagacatggaacaggctgttttgcaacactaggatgctgcgcggttgcatgtattggctgtacagaaacagcaggagcacctccttgatttcccaacaatccctccaaaggctgtaagaaaacaaaaccacaaacataagcacactttgataatacaactcaagaagctcaagcagagactatctattgaggaagaaagtaaactcacaggatgccgaaatccacatttgggattcaacagtttca

SEQ ID NO: 25947 - DNA, 474 bp, Arabidopsis thaliana columbia
atgcactgatttatttcagttctcatcttaatgtttctactcataagctattaatcatatttcagagacctaaacgagtctgtgcctaacaaaacgcaagaaaagaaacgctgaaatcagaaaacttacgggttactccaatctgttgtgtcctcattgacaaggtgagtccatttagttcttccactacgaccaaagtgcttgacttgcataactttggggagaatcgatttgtccaacctatcttctccagttggagcagagaagtcgcgctgaaatataccatcggttccagcagaacctgcctcatcatcaggatctgcctggaagaaggcacccttgtggtaatatttctgcataaagttccatttctttttcggttgagctgacaaaggtttcggattcttcctctcccaatctctcctctcctgctctgtcatattcctgaacatctctatttctcactctctctca

SEQ ID NO: 25948 - DNA, 1165 bp, Arabidopsis thaliana
tactcaatagtcattcatttgatataggtactgagcaaggcatggaaagaaggtatagaagttgcgggtgagaacgcattagagacctatggagccaaaggttacaatcagattcttcttaacgcgaggctaacggggtaacccaaacggtaagccgaagcttagaatgtacggatttacttagcttcggttatccgatactgtctttcaagaaaacaactttgagctgtttaagaagttggtgaggaaaatgcacgctgatcaagtaagacatcaaaccaaatgacattttgttttcttttgctcttttgttatgtaataaaaacttctatgtttttttcgaataaggattattgtggagacgcagcgaagtacgggcatgagattgtgccgttgaaaacgtcgaattcgcagctgacgctggaggatatcgccgacgcggctcagccaagtggagcatttaagtgggactctgaaaccgatttgaaggtcgacggttagttatattttatatgatcgatcgtctaatcacaaagaaagtaagggaaagaatcaaggaagtaagaataagaagataataaataaagagaataagaagaggcatttgcaactctaagaggttaaaatttcttaaatgagtctgagtttcgttgtgtgtcttgggtgtaccataagacataaaacgtacggggttgctatgtattttgtgaagtgtgtatttctggttgaatattagtctgcgtaataaaaaaaagtatgtgtagtaaaaataaataactgttgccagtaaaataatgcatcattgtcactgtattgccagaatatatatattactttttaaggttgtaaagaatttaagattatatatttttaatggctaatttgaagttggatattaatttgttttttatataaatttcttagtcagaaaccagaaatttctcacttattatgtcgagccatttttattgaaataaacaaaactcaactaaaagtgtacttgaaatttgtaaatatccaagaaaatgtttggaaataaatcattttataaaatatttttattggtcgtagctcgtaatgaaattacccaaaaaacattataaacaaatttcaataggacaacacaactaaagagattaaccaatttaacagacatgtacaaatt

SEQ ID NO: 25949 - DNA, 272 bp, Arabidopsis thaliana columbia
aaatgcgatgacgatatcttcttgggttttggaaatgacatgttttgagttttgtgtaacaggaaaagagaaggtgaagatgaagggatgtctacagaagtacgcaaaggcgttaacgagtcatgagttgtagttcagaccttaagtgatattgatgtccttatatatggctttagatggaggaaatattgtcaccaagttgtcataggagatactaatccaaggttgtctattcattacttagtttccgaaattgctaacatgtgtcaagt

SEQ ID NO: 25950 - DNA, 1531 bp, Arabidopsis thaliana
taaacaagtccccattatcttgtccatccacctccgcaattgtagcaaactcatgcccgcatctaatgagaataccaaagggaatgtcagaatagttaaacatagataaaaagattgcaatccatcacatgtgctttagcttacatggccttgtttgataaggtttataggaggatcaatgtgtagagaaatagatagatacctgcaagttatgtgattgcatccttgtgaaagttcaatcatgtgttggcacttgccacactggcgccacatcttattatttgcaagagatttgagcttcacatcatctgccggaggctcaggatgcaatttcttatactcagtgcaggacagatttccatgccacggaactttacagtccacacagaagaggccacgacattcaacacatctcctaactccagatttagggtaaagagacagtaagctcttggcagattcagaaatcttggttttggacatcaaagccgagcacctcgggtaagggcagtaaactctctctgtgacaggtattgcattctcttgaagtctttgttgccacaatttactcagctttggagtcaaaagcttgccacatgcatcgataaccagctcagacttgcagccatcgtgaggacattttggagccattccatgaagcagcttcacctctacatgctgtttcacacattgaaagcaaaaacggtgacggcatttgtcaacagaaaacataccctcagcaacgatgtcgttgaaacagattagcacactcctcctttcagaacagcttttgcttggcgaggatcttcatgaggggtgaccatagaaagtattgattcccttgcaagtttataagcaaatttaacatcatttctagccaccagaacatgctgataagatgaaaagtgttgcatgatgctttgaagatcatctaacaacagggaaatcttcttttgcttagccatccattttcccgtgacctacattcaagtacaatacaatcttctcaaacatatgacaggaaaagctaggtaaagaaacataactcattgcaatttaaaccatctcgcaaaacacaagcatagaaccttataagtcacggtctactgtctcataactagtaaaaattagcgcaaaatggttacaatattcacaacactattagataccaggacaaaggaggaaaaagttaaaacgaattgcaaagagaacaaactagatcatctttaaaaaatacataaacaaagtcgataaactatgaaaatcggaaacttacgtattggaaaatcggataagaatcgcaaaagaaaacaatatgcttaatccccaacttcaatgcttcggttagtcctcggatcaatgccttaagctctgctccctgacgactcatgccattgtctatcaatggtcccttcatctcaaacaacaaattatccctctggtcacaaatagcaaccccaaacccagacactacgtccgtcatcttccccttcccgttctcatcgctaaccaaacccttaaagtaaagcct

SEQ ID NO: 25951 - DNA, 515 bp, Arabidopsis thaliana
tcgagatcgtcaatggcatctgtatactgttacagacaagccagtgccaatcaagaggatgttcctgagatctcttgttcgacaggctacaatgaacgatggatttatattgcagcaagggcaggataagcagcttagccaaacactgatctccatggcgtttacgtcgaaatgtgttctgaggtctttgatggatgccatggaggaactggaactgaatgcccataatgctgcaatgaaaccagatcacgcacatatgtttctttgcatattgcgtgacgagcagatagatgatcttgtgcctttccccaggttgctatggctgtgtcctgtgacaagttattgtttgtaatgtcagacaatatcctaataatatcaacgtgtttcttacaggagagttgaagtggatgctgaggatgaagaaactacagttgaaatgatcttagaagaagcagcacgagagatacatagatctgttggagtgagaatgcataagctgggcgtgtgcgagtggg

SEQ ID NO: 25952 - DNA, 738 bp, Arabidopsis thaliana
  unsure (1)..(738): unsure at all n locations
tgaacatcgccatgaacatcgtacattgaaaagtggaatgtgttcagtaatctatgaatgatatgaatcaaacgagtacatggtatcataacatctaaaactcactctgattcagacaggtttcaacatggatttgataaggttttgttacatgacataactaataatacatgtttctgctccaaacatcttgagctatggatttaaccaagttggttcaaaaaagtttccctctagtaggtggggaagttggggttgacattggctgcccaagcttccagtcctccaattatatccttagccgaatcaaaacccgactcacgaagatattgaacagctctttgtgaatcattcccgcgtctgcatacaacgaagacactaggatttgtgcaagattcagtgttcgcatggccatttcccttttctttaagagctgaagtaagctcgtttaaccgagtctctaagtttgcaagagggatgttgagtgaatccgggagagagacaatcttatagtgatgtgaaggtcgaacatcgagcagaacatgttgtccttcttttgaagaatttctttgaactccttgctgctaattcttgattctgcaggaagcaggttcaatgggccctgtgatcaaatcgatgcaggcaaactttctaatatgagactactgacaacaactattggattcaagataagagaaaaagaaagaataatacagcaaataaagngaattgagtgaa

SEQ ID NO: 25953 - DNA, 719 bp, Arabidopsis thaliana
ggtctaagaatgacacgaggtaaatatgaagtactcacccaatgtatagaaagagtaagaagagagaaaattcatccacaaattgagaagaagaataaagatcttacagagaagggactgttctgcataatacttccaagtggaggaagctggctcaatggaggcaatggatgtgggtttgggactggaggaggtaacattggcctggcgaaaggagcaccacttgatggcgcttgaccatttagtacacctctaacaggatatggcgatgctctcatattatcaagcatcctgcttcgtccatgaaaatcttcaatgttactacgtgggggagaacccctggaagaacccatgtagcttctaggattcctaggaggggaaaaaccctgagaagaactcatgtagcttcccatatttctagctggggacagagccctagaattactactgaagcttctggtgctccttggcggtgactgatcccttggagggcccattctccttccagcatttcttggaggtgatctatcccttggactgccagttacccttccagcatttcttggcggtgactgatgccttggagggccaaatctccttccagcatcgcttggaggtgatatatcgtttggactgtcaattatccttccatcacttcttggaggtgatgtacccttgcactggaatcatccgtctaccatttcttgggaggggaaggt

SEQ ID NO: 25954 - DNA, 599 bp, Arabidopsis thaliana columbia
ttccatggcttatgcctttggttgactctttatttctctgttcatcagtcgatcgcgatccccagtgagaagagagaaaagcgtggaggacagatcacgcagtcctaaggcaatggagcgatctgtatctcccaaaggtagggaccaaagcctgagtccagaccgaaaagtgatagatgcaagcccaaagcgtggatcagactatgatggtagcccaaaagagaatggtaatggcaggaactctgcgagtcccattgttggaggtggtgaaagtcctgttggacttaatggtcaagacaggagcccgattgatgatgaggctgagcttagccgtccttcccctaaaggcagtgagtcaccttgatggttcacaggttaaaagctctatgtagcattctgtactgaaggatgttgtttcctttccctttctttctgcgtgatacttttcttttcgttgcgtgacaatcctggatgttactttgccttctctcttgatgactcttggtttgttttccgcaacttcaaactctgcgatgtacttttcattgtttagtaagaacatgcatttatgaaatctcgcttgtggatcgttagtaaga

SEQ ID NO: 25955 - DNA, 320 bp, Arabidopsis thaliana columbia
acaatcattagcttcttattgcttgctttcggttcagacaaagcttcatcaactttcacaagtacctccttctctatcttcaattcaaccttctcggaaaccatcttttcaaactccagtttctctattgtaagctctttcagctgatgctcaaatccaccatttgttggtgctaatgactctatctcatggagcaaggcatcatcaactcatttaggagtgtgctcatcatgccgtagctatatatgagcaatgctccttcagaatgagaagaatctacacgtcaaaacagaagaatttcattcattataggattaaca

SEQ ID NO: 25956 - DNA, 1735 bp, Arabidopsis thaliana
accctcctgatcacacaaacatttatgagttgctccatgagttatgacatcaaacgaaggtttttaactatgccacaaaagtagatctagtctgactatgtttagtggttctaatcgagctagacattatgtgtgtgagatttgatgtcacatgtacaaagacaaatggcagattgaccaaactttagaatcaaagatcaggagcaagatggcaaaacttacagaaatgaaatcgaaggctctggtatcttcttttttcgaaccattcattgttgaggttggagcctgattaccaaaatttggctggaatatatcagggagtgcggactgattccctccacttgtacccatagaaagaacatttccgctaccctgagcgttcagattgccgaactgctggaagttggacatattaccaaggtactgctgctgctgagctaacaagcttgccatggcagcgtaattcaaaggttgggatgcaaaagctggattcatcatcatcccttgaggaaaattgaatggcataacacctccaggaagcattgtgttttgaataaacccaggattttgtgagccaagaatgcctccaacaggattttccggtgcttggtggctggtggtgctcggcattgcaaataaatcctgtggaagagtgcttgaagacgagcctttctgatttgaattgttttcgtcaatggagaaacttcccatcaaatcattaatgttttttgcatcttttggctctgcttcaagttttgcagttgacccaaacatatcaaatagatcaggcacatgattaccaccaacagcagcggacttttccccgacagtcattccagagaagaggtcatctgcactttctttttcttcattcggatgaaatgagacatctgcaaaggggtcgtcatcagttttcttctcgctgctactcagtccaatgtcagagctatccccaaaccaatcatcatccatcaatggacctgctgtcgccactgtactgccagtatctatagcattcagattgttcaaagtatcgtctgaatcaccggtgtcaatcaagtcaggtaaatcaacagcagcctctcgcttcacagtattatcagagctgctcatcaacccacttgactgtccaccatttagaaggctcagaacctacacaacatcggtatctcgagttaaccaacaaattagcataatgccaaaaaagagttttgtgaatggttataacaagcagaagcttaccttgttcgccttttctcgaagggaagattgtggagactctgcgcaccgctgtatggcatccaagttttcactaaaataggtatgtacaattgaaaaattctcatcttcctttcttcctcaaaatggcctcaaggacacataaagctttcatccgaacctgccaaacagaaaaacacagttactttcaaagtacaaaagtgggaagattaacgctacagaagaaacaagccagggaaaagaaaatacagatgatataatcaagaaaaaagtacattagtagcatcaaacagtttcacaaggaggtgactaggaaataatcataaacatacctgccacattggagaatggagcttcccgtcaagagcaatgcttaaagcaacagcgtccatttttgcagcctctaaaatgaaaacatgaagagcatcacgagttggctgcaggcgtacaccaccagatgtaacaatggtttccagcagctttcctcacgagtttt

SEQ ID NO: 25957 - DNA, 997 bp, Arabidopsis thaliana
gggtaggtagctttctccccagcctccgttgtctttctgagctgcaagaagaaactgaacgcctttgcgtattgcctcacagtcgttaaaagtcttacccgcagctgctaagcctgcaagagcaaaccatgtaccgtacgtgaagcaaatgccccagttcccatacctgtagattcaaagaacaatggttcatttcttgttagtttggatttccgtgaacaatttcagataaatcgtaatcgctagtgtaccatgaaccatcacgtgtttgcatgttttctaggtattccgcagctttcttgatgaaagcggtgatctctgttgtcctgtgatcagggtagagttgcttgaaaagactcaatgcttggattgcagacgatgtacattcactgtactcatgctcaatcacaatgtcggaaaacatttctgtgggattgagcaactgagacaaatacatgaagaaggttacatgaccgcaaatgttttaaaaagtatcttttggttgtttgaaaataattatggggtttggttcttacttccaaccacttgggagcaccagcaggctcccaggcagtcatacctccgtttttgctctgcaaacaagtgaaactgtcacgacctgaaaatgggtgtttctttgatgatgttggttctattctatgtctgataatgctcacctgtaaagagagcaagatattaacagaatcatgtagtctctcggggtcttgttttgggccaacaatatccggcgccaacatcgagaacagcaggcagcactatgagaccagaaaacagcaaggatgtagtactcatgccactgaagaacatgtcaatgtgtttagttttaacggctggttacctttaagccatgagctgtgcagtctgaaccttgccatccgtgatctcggtcagaaaaagccatgctccttttgaaatatgacggtacatgcttttgtaacacctgaagggtctctccaacttcaattgtttacaattt

SEQ ID NO: 25958 - DNA, 547 bp, Arabidopsis thaliana columbia
cttactggaaacgaaagtgaaagaaggaagagcgaatcagatagtaaaatcagtttttaaagattggtcactactatctaattatgaagagcacatattaggaagattatggttagtctggaaaaatacagtaagggtcactccgatttacaagacttctcagttgataacgtgctcaatcctcatcgaaggtagtaaagaagagatatttgtatcttttgtttatgcttcaaattttgccatggaaaggaaaatgctttggagtgacctcagttatcatcaggactctcctttgtttcgggataaagcttggcttatctgtggggattttaacgagattttggaaggtgatgatcactctctttacatctcaacgccacacatatcaccaggaatgcgggattttcaggaggtggtgagaaaatgtgagcttactgacttgagttaccaaggcaagaggttcacttggtgtaataaaagacaagatggaataatctgcaagaaacttgacagagttctggtgaatgagacatggactccaaaatat

SEQ ID NO: 25959 - DNA, 637 bp, Arabidopsis thaliana columbia
gattctttttcttagtggtcaggtggatgatcgacaaatccaaaagtatgagaaggaagcaaaagacaaaagtagagaaagctggtgagtgttcctgattggtcaaacctgaaatgagtgctttgctttctaactagttttgaaacttttatttccctgtatgttaggtatatggcatatataatggatacaaatgaagaagagaggcttaaggtacttcatgtgttttggtcaatgtttgttcttttgcttaaaatgcatgtatttgatgataatttgtttatggaaatcccatcaaggttattgttgaatatatgtttgctaagtgctatgaataatttgcttaatttgacagggcaaaacagttgaagttggaagggctcactttgaaacggagagcactagattcactattttagatgctccggtaagggatcaatctaaactaatcgttttccatttatttttgttttatgcggggaatctgggttgcagaatatttgttggatgagttttctgttctaattcttgtgtgcttttctggacttataggggcacaagagttacgtacccaatatgattagtggagcactcaagcggacattggtgtgctggttagcagcttataagttaattg

SEQ ID NO: 25960 - DNA, 875 bp, Arabidopsis thaliana columbia
aggaaaacgggtcttttgggtcaggaagagggaatttcaccttaaaagagttttgagaaggcataagacctctagctgctgctacataaatctgtttcatttagaaatacagtaagtaactggtactaatttatactacaacaagaacccaccaatccctaggctttgaagaacagcaagattaccttattctctaagttatagacgccctggtacccacgcatctcaaatggaataatcagtttctggaagagttcacagaatcaaatgtcaaataagtcaatctaaacaaaacagtaacagccaaaagatgaagtgactttcacctgtggcttctcacatagccaacaaaagttagtttgtccttcaagcctcacctattacataccaaaacaacagttgaggtttttgcttattatactaaagaatcatcgataacgagctgttttcaatgtcaaagaatagaacacagtaataaggaaaattgttgtaccccttgaggtaaagcatcccagttctgaagctcatcggaggtgacacatccaacaacctcaacacatcctataccaacgaaaccgtattcaaatatgttccaagcaaaatcaggtcttgcttatactataacatggaacttagactttcaaatatggagattagtaaacaacgataccaattagtcttgaaacagggtaatgttgggggaattgaatatcagtgatcccatcaacagcataaatttgttggtaaaactcttccattgctttgatagtagcttcatcaggtactttacttgcagcatgaatccataaacggcctatttacatgtttaaaaacaacatcatcttcttcttcaaagttatgcaattatcacagtg

SEQ ID NO: 25961 - DNA, 541 bp, Arabidopsis thaliana columbia
catatcaacggacaggatcatagatgttcggcggctgttatcggttaacttcgacacctgccacgtcaccaattattcgctctcccatgaggtaaataacctgagattttaacaaaagaaaaatgaggtaaaaataatctgagtgagtggaagtttctaaattgttccatgttagttacttgtttctctggttcacgattgttggttacttgttaatgtttgatggtccagaaatattcatgtttattgtggaatttcttaggatcctaaaaataaagtgagctaaaaaagtaaaggaaaatgactttttcatctgagaaataaagaaaagaatatagtgtcattgaattttgctagtctgacaattgagtttccttttctgtttttagataacagatattttaccagaattgccttattcaaaatcatcccataaagagtataaaaaaattgactgtggtaaaatagttaaatcaaattcacgttctgactcaagattggttgcagataagaggatcgcggttaaaagacacagtggatg

SEQ ID NO: 25962 - DNA, 707 bp, Arabidopsis thaliana
ccacgtcatctctaccttgaaaaattgaaattcatcatttttcttcctccttaagattttttttttttcttttctaattaacgacaacacgacgaagatgaatccttctcacggtggcgacgacaagcaacgaccggcgatgtatccccaagttgatcaatccattcctgataatccttttgcttctacaaatccttacgtcgcttcttcaccttatctatatccttctctatcctctcataatctcggacctaatctcttcccagaccacggagatgcatccaacgaccaatcaccatctgctcctcctcaggcgacggaggaggttctcatccgtgttcccggcgctattctcaaccttatcgacaaatcctacagcgttgaactcgcgtgcggtgatttcaccatcgttcgaattatccaggggcaaaacattgtagcggttctagccaatgttggaaatgagattcaatggccgttgacgaagaacgaggttgcagctaaggttgatggatctcactatttcttttcgattcatccgccaaaggagaaaggtcaaggatctgggtctgattcagatgatgaacaagggcaaaagagtaaatcgaaatcggatgatgagattcttaattacggattgaccattgcttcgaaagggcaagagaatgtattacttgtgcttgatcaggttttacgagactacagtt

SEQ ID NO: 25963 - DNA, 1351 bp, Arabidopsis thaliana
tgttggtttcaccgcttcttcaatctcctctctaacttcaacaatctcgtcgcttttttccctcattagttcgccggaatcattgagaatctcaaagtcgccagcttcaacgtagtcttcctcctcctcctcttcaagttcttcgtcgtcactttcagcttctccttcatcgtttacctctagaacaggctccgcaacgcttgatttcctcggctcgacatcaatctcaccgccggtgacattgcttggaaggtttcgttgctcatcttggctaaacaagttccaaagagagcttcgaagcctgacgtcacaagacctacgttgtggctcaaacacgccggagaatccttcgttgttcttggatgctgagaaagatttcgtacgacggagctccgggaagaatccgggtttaacccggccgtttccgtttgtatttacaccgcccactccgttgtttccggaaggcttaaagagagccttgagagccgcagcagagatggtcggaggctttttagaggaagaagaggaaccgccattgttggtctgatctaagactgagagacgttcacagagacaagaagggcaaaaaccggtgaaccgctcttctgggtgacggttgcaagaggtagagagacggtgaggctgcggaggttgtggaggcggacgaagagcagctgcggcggcggagactgggtcagtagctggattcatgacgggaaatggtggttaatcctccctctggtctcatatactatatcgtcatcactgtctggtctctggcttatagagagaaagacaacacttaaggttagagagagagattgggtagtgttgtctctgaaacttcgtcttgttccaacggtaattgaaagagaaaggagatgaacaagaaaaaaacaaaacaaaagaattattatagaaaaaccaaattagtgttttcaaataaacaaaagttttaggatatggttttagcgtgttaatgtacggttatctagaaattttgttcagatttattcatatgatataagccaaatcttatttttatgtactatatctaacataaaacatattaaacctttgtccacttcaatattttgctttttattttctttgtcagttacattttttttttgttaacatgcaaattaattggagaaatatgatatgtctaaattgaccttatgttctgtcgatttttgtctcatgtaatgctaatataaacccgttacttgttgggtcggtggcaaagtggatttttttccctgctttgtcaaaagcaattttaactaaaaaatcaaaattttcacactacttttgacaaaattttcaaaaagcaacaacacatgcttca

SEQ ID NO: 25964 - DNA, 847 bp, Arabidopsis thaliana
cactctctcgaagactcatgtccccatcccctacttctactatctccttgggtatatctgcatgttaacatgatcgtctatgaaattcttcttacaaagtctaagattcaactcaacgatctatatacagattctttacccaaacaaaaaaagaataaaacctggtggcctttgtcttcgttatgaccgagtgtacggactttgagctcgcctctgctcgttgttaactcgtctagaatctcagcatcacactcttggacccctctcgccgagttattcgactttaaaacagggttaaatcgataaacctcaatcctttaaactactctagacaaatatcaagaataaaaagaatgtacatattatatagacattgactcaccctgaaagacagttcaagcgggtttctaggagttccagggatctcctcatactccgccgcatcgagttcccggagataggctggtttaaagagcttagggagaaggtactgtctgatggctactaaaaggaagaaaagaaccggaaacatgattccggccactggaatccacgtcactccgtagcaaagcccaaagtagagtatctgaaatagcgtgaatgcagcgattgacttatgcggaactttctccacgaacgatgcatgcgctccttccaagaccctaacaacaaaaaacaatcacatgatcagtctttgaaggaaacctttaacaaaaaaacagagcattttcagagcacatacttgaatctccgggttggtgggacgaagagaagtactgttcgttcgaagaattgattgtctgggaggctatcaatggccatgtaagcaaaatatccccatagaagt

SEQ ID NO: 25965 - DNA, 1411 bp, Arabidopsis thaliana
cctgtttgattttcagttgatccggagatagatggtaaagacagccaaagaaagcatcaggaagagagaaacatcctcacaagtgtacgagaatatgcaagaagtcttcatagaaatggataaaagtccacttgtaagtagtagactcataattcaatgttccggtgaaagaaaaatcaagatttaatttagaataatcataagctcttgcttttaaaaaccaggctcagacagatccatcagtgataattgagcttcaagatctgaaagaagcagtaatgaagagcaatgatgaagaaagagagggagacgaggagagtggttttgatccagagaagcaccttgacgcttacttgcctgttcgagtcaacgagcagagagttagcaacttgttgcagtcactgcttgtggcaggtgcagtgttggctatgccggccattaagctcataccgacttccattctatggggatactttgcttacatggccatcgacagcctcccgggaaatcaattcttcgaacgcttaacgcttctcttcgttccaacaagccggagattcaagtatatgttctgaaaatgatctgttttttttttcttcaagttattattattcagatttctcttcaaagactgatcatgcattgttgttttcagggtcttggagggagcacacgcgtcgttcgtggagaaagttccttacaagtcaatggctgcgttcacactgttgcagatattctactttgggctgtgctatggggtgacgtggattccggtggctggaatcatgtttccggttcctttcttcctcttaatagctatcagacagtacattctcccgaagctctttaacccggcccatctccgagaactcgatgccgctgagtacgaggaaatccccggtactccgagaaacccgctggaactgtctttccgggttagtccatatcttagcaatatctacatttttgaggatcccggactttggactaaaccatggaggttttcttgtcatctaaggcatctacagtgacctaaaatatttgaatttgttgaatttaatgccaaaataaacttgttttacagtcgaatgactcgaagagaggcgtccaagaaggcgatgctgagattttagacgagttaacgacaagcagaggcgagcttaaagtccgtacattgaatcttaacgaagacaaaggcaaccaggttttgttttgttatgcatccttgatatgaatcttaactttgtgaaaagaattatagactcaagatcgctgttaaaaacctgcagatttatcccaaggagaaagtaaaagcaggagacggggacatgagcacgacaagggagtgagtgaatcaacaaaaagaatcagagattattctttcaagtgatgatcatgatcatgatcatac

SEQ ID NO: 25966 - DNA, 542 bp, Arabidopsis thaliana columbia
gctgtttccattcaattaggaatacgtggtatggcttcccgtggcaggctccggttccaaaggcaggacaaggcggcaattatgattcaggtgctgtacacgtttctagtgttgtgaagactacatgtttcttgttttatttttggtccatctattaattgtaatgtgattttcttctttgtcacgaattgcttttgaaatttatgactttgaatctgttctctttgtatattacagagtcattgtcgcaaattcctggcccagttgcactaccagaggctcaagaaagcagcaattacaacacaaagtgcatggagagcaaggttagcccgtaaagaactgcggaacgttaagatggtgagccttctcttcactttgtgtgtatcctcgttctcgttttaagcatagtatactatatggcaattgcaacagttcagataatgttgggttttaaatgagcttatataatggaaatatatgtccttacataacgattggctgaggttttaagttgagctggctcttttgatgcaattgctaga

SEQ ID NO: 25967 - DNA, 477 bp, Arabidopsis thaliana columbia
ttaatacaaatttgattctgatttcattgatacgtgaaactcagttaaaagttaaagttatttagaatcaactacatttagttcgtaaaattagtaattaatgttgtgtgcttgacattatgtgaacacaacttaatttactaaacccaaattagaatgaaaattgaaaaaaaaaatgacgaagatgaaaacgatagaggaggaggaggaggaggaggaggctcgcacgtcggagaagggacttggtcgtgaagcgacactgattcatatattgccacgtgtatctctattatttccacgttttctgcactctttcattctccccattttcgagccagcagcgtcactttttttttttttttttttttatttgtttagtatagagtaagtagatgaacatatataatagtgtatgtgcagaatacgtctactattaaaaatatcaacaacaaatagtaggagtagtaatttgtcacg

SEQ ID NO: 25968 - DNA, 566 bp, Arabidopsis thaliana columbia
gtcgcatttgatcgttgctttggacgagtacgcatattctgccatttccaaaatgtatatcatcatttagttagtaaggaaaaagaaattgaactacatgttacaaaaaaaactcactcatatgaacttttagaattgttgaaaaaggatgaaaataaatttatcgaatttagcgaaatcattagcatttgtgacaataaacaaaataccattttctaagttgtttcaatgcattgtaatgtttcataatataaggtttatatatcatcacctggggccaagtaaccataggtgccagccataacggttgtggttgaatctttgcctctagcttgtaacacctttgcaatgccaaagtccgcaactttaggctgatagttaacatccaacaagatgtttgtcgatttgatatcgcgatgaatgattggtggggagagatcatggtgaaggtaagccaatccttgagctactccaaccgcgatttgatgacgagtacgccactcaagatgaacaaagcctttgtgaagagcgtccataagttacattaggcatgtctcatatacaaa

SEQ ID NO: 25969 - DNA, 403 bp, Arabidopsis thaliana columbia
gaggatccctattgaagtaatgcaagacagttccaatggttcatcgtcacttttaggcgacgagctgtcttaataacttcatctggtggcctataaccagactgaaaaatatcgatatacccagtagtcatagttgtattccaagacactggagagtacggagaccaaatacgatcatatgtatccttttggtaccgtcctgttccattcaaatatcctgtatcccatctttgatagagtaccaatgagacatttcttccaaactcagttccatagatggagctgttcattggtcgaagctccaacgctgaaataaaaggagttcctttacctttgttcacaaggcaaacatatatcgtatctgactctgcaaagctgaggctctccttgatgacgttctcag

SEQ ID NO: 25970 - DNA, 515 bp, Arabidopsis thaliana columbia
  unsure (1)..(515): unsure at all n locations
nnnnnnnnnnnnnnnnnnnnnnctaaagtattgttgagcatattaatgccatgaccacgctggcgcgggaacaccgggcattgccacctgaactggcacaagagtatttacagtcttgtgaaatcgccattcagcgttgtcagcagcgactggagtatgacgaaccgggtagttctggcgatgccaatatcatggatgcgccggagatgcagccgcacgaaggcgcggcagagtacgctggagcagcatttacagcgggttattggtcatctgaacaccatgcacaccatttcgtcgatggcatggcgtcacgaccgcatcacgggatttggctgagtcgcaagttgcgggattcgaaggcgtaatgcaggctaaaccatcggataaggcattcacgccgcatccgacatcttttgcctgatgcttcgtatttacgccccaaccaccttcgccaccgcgtgggcgaaacgttgcatccttcatcgatatcgcatcttccacaccagcgacggtgc

SEQ ID NO: 25971 - DNA, 541 bp, Arabidopsis thaliana columbia
tggaggagcaccagttctatgctaacagaaagaagtgttcatttggtcaagccaagatcgattatttaggccatatcatatcacacaaggcgtttcaacagatcctactaagacagtagctatgactaagtgggtgacgcctcagtctgtgaaagaactacgaggatttttgggattaacagggctattacagaaggtctttaaaagggtatggaactctagccagacctttaactgagttgttaaagaaagacagctttgtgtggagtgagtcagcccaagaagcttttgatgcattgaagagagctatgtctactgcaccagttttagcactacccgactttggtaaagtggtcgttgtagaggctgatgcatcaggaatggtctgtgggcagttttaatgcaagacaattgaccaattgcgtggtgtagccatggtctcgcatctaaagagcagcttaaaccagtttatgatagggagttaatggcgattgtgttatcaattcacaagtggaacactatctgatgggtcgcgatttgt

SEQ ID NO: 25972 - DNA, 343 bp, Arabidopsis thaliana columbia
aaaacccttaactaccttgaagaagagggaaagcagcatcgatcaactccatcttaacaccgttcaaagcttcagcagctggaggaatatccaacatgtggaggataacaggttggtcggcaccaagcatgataccccttgcaatcataggtacaagagcatatccgatttgtcctgcataatcagaatcaatagttactttcagtagctgaggatatctaaagtcacaacttagactctatccaactatataaacaacggtttctatgtcagagttcgatccatgagataacttttactaaaattagatatgcgagcaactcgatcaatcgttggtcagcgt

SEQ ID NO: 25973 - DNA, 519 bp, Arabidopsis thaliana columbia
tcaactgtccctgtgcaaatctttcgaatccatccatcacacattcatgggccctgataattagctgtagtttattcctcttacagaattctgtgactctatcaggctgcagtatcaagactacgccctcagtgattggcccctaaaaacaatattaataaaaaacgacaataagagcgaattaggggtgatttaccccaaacgtgacaaggccaggtcctctggcgtttggtcttaaaccctcgatactatcgttctctgtaggatcagacctgtactttaaaaaaatgtcattaactcggggatattagaaatagtgattgatatgaaagcaagacagcaaaggatggattaccataataaatccattagaacaagggatccagcatccattgttatgggtctttcaatcttttcaatctgttccactgtactgattgacctcccaattccaccatgcatacatataattttgttctcgattagtgcagcaagaggaagataattaaaaagttgatt

SEQ ID NO: 25974 - DNA, 517 bp, Arabidopsis thaliana columbia
atttacccgaatatttttttcacccaggtcaaacgccatatttctgaccagatgactggccgcagctttagttgatgcataggaagtcatgtttatatttttattttctgccgccatagaagtgatggtcagaataacgccaccgccatttttttccatttctggcgcaacaagttgtgacagatggaaaaaagaaaacacattcagttcataagcacggcgaaaatccgccattggcatatcaaacggtttaggtccaccgccaccggcgttgttaaccagaatatcaactttacccagcttactgatagcaaagtctgccagtgcagagagttcctgttcggaagtaatatcacaacggcaggcaaatgcctgaccacccagttgttgaatttcgtctacaacatggttagctgcgtcggcgttaatatcactgaccaccacatgatgcgccacgtgtcagcgaatgtaatggcggattctttaccaatacctgcacccgcaccctgtgatgatg

SEQ ID NO: 25975 - DNA, 543 bp, Arabidopsis thaliana
acggtatttagtgtctgttagtttcgtagttccacactttgataaccattgctcgattttgcttttaaaactgtaatttctttcgtctattaggaaaccgagacttctgaaactttgcaaggaagcacatacagttggatggagaaccctacaaagctctcaatgattgataaggtaacatcaatatttgctatgtgattctgtgacaggctcttaattatatgtttctgtgacttcttcagcttttggtttcgtcaccaacaacattgcctctgaagatccagtatagtcctgaagatcctaactcagccaaggtgtggcttggacgctggacgcagttgcaggtttgggctcctggtccattggtggttaagaatctggtaccaaaatctcagacaaagaagcgaagttttcaagcagtcgaagcggaaaagggaaaacttaagagaggtgtcaggaaaccaaccggtgtttcaactactgcaaacagctctactagccgttcaacagctgacaacgaaaagcctaagcgaactgtgagga

SEQ ID NO: 25976 - DNA, 684 bp, Arabidopsis thaliana
cccaacattttagatcccgatttgttccaaaaataaccgcagcacataaacaatcgctaagacaagaagctttacatctttcttcatcatagttggcataactctcataatccccaaacggccaattcgtcttctctaaagtaatgaactcgtaaagattcacatctgagtttgcggtttggttctctggtctacaagtctgcatctcaaaatctggcaaacaatcaccatactcattgctcggatcctttaacacaaacctctcaggacactcacattttggcctcttgttgtttcctaaactacatatattattatacccacaagccatattcccaagtgcatcatcggggctacacatattatccggcacagcccaagcaaacacccacccactattctcctggcctcctttgggatgatagtactcagcaaaaaccccgtcgaaatgtagaacggcgcggcgatagaaaaatccggatctctatctttgacgacgaatcttgaattgttcctttgaagaacatatatttcccctgactggttgaaaactaattgaatcccggggttgtttggatcgttggtattactttcgtagtactgagagtatatgtctgattctgaggcagtctcggcgttgagagagtgaagctgaagatttccgtcatcctctagacgtaggct

SEQ ID NO: 25977 - DNA, 745 bp, Arabidopsis thaliana
acaacaatacacaagcagacattatataattgcaaatgaataatcgattagacccatttatgtactgatacgatgcgacattggccacttcaggccatgtgccccatcttcagtcaggggtacaaccgtcattccacctcctttgcttcaccaatttataagcttagcttttcaggagatctgagaagcaaagtagaccaatcaagatgggagtgatgagtttgagcaagacgatggtggtggtggtattacaggtgatgatattgttgggacaagagattggtaaagtgtcgtcgactctatacaaagttggggacttggacgcttggggcatcccaattgatgctaaagtctattccaaatggcccaaatctcactctttcaagatcggtgactccctctgtaagtcaatattctaactcttcttcttcttataatttcaaatctctctaaaatctaatcattggtttgtttttggttgctgcaaccaataaagtgttcttgtacccaccaagcgaagactcactgattcaagtgacgccctccaatttcaagagctgcaacaccaaagacccaatcttgtacatgaacgacggcaactctctcttcaacctcacccaaaacggaaccctatacttcacaagtgcaaaccccggccactgtaccaagtaccagaagctcctagtctccgtcggcacctactccgccgaagcagaggccttgtctccgtcttctgcgccgacgc

SEQ ID NO: 25978 - DNA, 525 bp, Arabidopsis thaliana
gttagctttaagtatagttctgttgttggttgatattcaagagtttcgaagggtcgtatctagagggttgtagcttcgaagatacatcgtcgtttggagtttgattaatttgcattaggaaattaaattcttatgattcgttattaatgcactcatctctccatgaacttagattctaggttgtgtgttaatagaagtttgatgtaggagaagccaatccaaagctatttttgcaaaaattgttatctagttaaggaaaagttgatagctttggaacagttctgttattgatcgagattcaacacttttgaagggtcgtatttagagggttgtaagatacatcttcttttggtgtttgcgtctatagggtattgttgaataaaggaattctcatgattcgttataaatttgcagaggttgtggaacatttcgtctgctaagttcctcaaaacatacactggccacgtgaacgcacagtattgcatttcctctgcgttctccgtcacaaatggaaagcgaatagtc

SEQ ID NO: 25979 - DNA, 612 bp, Arabidopsis thaliana
cagagtgttgaaggcaagcctgcatcacatagcccatggggaggccagagtggtcatgcctgggatgatggaatgtacaccacagtaaagcaaataattatagcccatggttctggaatagactccatacaaattgagtatgacaaaaacggtagctcggtttggtctgaaaaacgtggaggaaagggaggcaagaagtttgataaggtatgatcgagactctttatcctataaatattgtgttggtggttctcagaaattaatcactgttctcttcttgctgtttaggtcaaatttgattacccacatgagtatctgatttcagtaaatggaacctacggtagctttgacgtctggggaactatatgtgtccgatcacttactttcgagagtaaccgcagaaaatatggaccgtttggtgttgattcaggtacattctttgcattgccaaaatcaggatcgaagattattgggttccatgggaaggctggttggtatttggatgctactggtgttcacactcaaccaattcctaaagagaataatccttcgtcgaacatccttttgcactcgcatcaaagtttttctcagggtgataagcaacatgagtac

SEQ ID NO: 25980 - DNA, 419 bp, Arabidopsis thaliana columbia
  unsure (1)..(419): unsure at all n locations
tgttttcatttcaggatttgtttgtagcaggagtagacacatctgttatcactttggattggacaatggcagagctttcaagacatccaagagtaatgaagaaagtacaagccgagattcgtgaacacgtaggagacaaaggtatagtgacatacgatgatctcgaggctctagtctacatgaaaatggtgatcaaggagacttggaggttacacgcaccgagtcctattctgattccaagagaagcaatgactaacttcaagatcaagggttatgatatttaccctggaacgcgtattcatgtcaatgcttgggctattggacgtaaccctgatgtatggaaggatcctgatgagtttataccagagagatttgttgatagcaatgtggaaactaaagggacanagttttgagctgtt

SEQ ID NO: 25981 - DNA, 1204 bp, Arabidopsis thaliana columbia
cccccaaatatatgtattcaacatttacaagagataaatagtgaaagaaagagatgcaataagaagccaaagtaaatgcacacatggaaagagcagactctgctttgccattttcttctacgagtttctttgttttcacctctcaccggtttgccctttcattaatctaactgtccaagctcccggtttggctccatacatgggttctccaacaacgtatggaggcggctgacgagcatcctgcaggagtgcaactgtgcttacattgtattcatcgtcactatcataatgtcggtgagggtgaggtccaagagctttgagcaacatggctattaaaactgatagaccctgccaataaacaaaggaacaatgtgaagcgttgaaaccaaacaatttagaagcaccgtaaagtagaatctttttgctattagttaagatacctggacacagacaatagagagacctatccacttgcaaatcttgaagtttgactcgatgaacttagagaactggtggaaagcaccacttggatcctctggaaagtcctgatgaaagcttctaaaagattagaatcttgggcgtgacaatagagagccactcaagatttttcaaaagaaaagagatagagaaactatacctttttccagtcacggtttagaaagatatcggcaactacaccgccttcaaccatagttagcaagactatgaatcccatatactgaacccagtcgatgagccaataaacagatgcattatacacataaaaaaagaaacacaagaaagaattcaggaaggaatgatgaaactaccaaagaaaaacaggctaacgtagtgatgctacaattcatcaatagagttgcaggaacaacttataaaaaaaacagaagtttaccaagtaaaggcaacatccattcacggtttcagcagctatgtgcccggcacaagtgacaacacagagaatggccccgagaccaagaaatgaataaatgaacctgaagctcataagaagattggttcagaaattttcatcagcaatggcatacttcatatttcataacaatgataacttccccctcacacaaaaacaagatatgccactttccagtgccatcttacaagaatcctgaagctatctcttccatagcctaactacttctagacacctcaagcttacagaatttatgatctttccacgggaaaaaca

SEQ ID NO: 25982 - DNA, 475 bp, Arabidopsis thaliana
cgtaaaaaataaataatcaaatggaagaatcattgtaattaattttattcaatttgcaaaacctttaaagagaaacaaaaacttaaaatgtttttttaatattccttatttggcttgtaatttccatttactttgtctaggcatttattattattaaaagtcagtttttgaactgggattttaattagtcaaatatagattctctcagattaaaaactctttaaaaactttttgtcataaatcaggcaaagaagtaaaagagacttaaaactctctctctctctctcttggtcttcctcactcttaacgaaaatggactctttaacactcttcttcaccggtgcactcgtcgccgtcggtatctactggttcctctgcgttctcggtccagcagagcgtaaaggcaaacgagccgtagatctctctggtggctcaatctcccgccgagaaagtcaagacaactacaaacagtact

SEQ ID NO: 25983 - DNA, 364 bp, Arabidopsis thaliana columbia
ttctctctcatgttcagctaaaaatcctaactttgtcaaacccgtcacaacagagttccaagtgtagatatttcgttgaggcattttgtcgaacacttggcgaccatcctcgagtgacccacatttcgaataagcgtcgatgagccgattctgtataaatatttcattggagatacctgatttgatgacagaagcatggacataacggacgtagattgctgataacttggatttgatgcgtgaatcaagaagctttgcgaaatggtgaagaatcggtgaaagaagagagatcagcagcgagtttgagaaactgacttgctgttgccattccattatcgtcgtttgcagtagatcattgtacatg

SEQ ID NO: 25984 - DNA, 503 bp, Arabidopsis thaliana columbia
ccttgaggtatctgagtttatattttatatttggtggttagattacatacaaatgctgattttctttttttgttatcagcatgatacaaaatactattacaagattgaaagcggtgaatcttctcgagagttttggtttgttacaccaccacatgtacatccagatgcttcctacaagtttggtattataggttagtagtttgatctaaatgcaactgtgctttaagattcattgcagaggtagtttgtagtattgtttcaatgagagttacttgacttgtttctctagctctgtactagccaaactcagttttacttacgaattgtaggcgatatgggtcagacattcaactcgttatccacgttggaacattacatggagagtggagctcaggctgttttatttcttggagatctttcttatgctgatagatatcagtataatgacgttggtgtgagatgggatagctggggtcgttttgtggagcgtagtaccgcttatc

SEQ ID NO: 25985 - DNA, 619 bp, Arabidopsis thaliana columbia
aaaaaaaaaaaaatctagactgtatctagagagtttcactttcaaaaaataaaattaagaaaaaaaccatgtcgagattctgacaaaacgatgaacaaaaactatatttatgatcttcttcttcttcatctgggcttttttatccccaattttcttctcattgtgtttttggcttctcgatcttgacataagggagaactcccagaaagtattttacctttgggttccatccacgttgctgagctctgcagaacatcaagaatgtgtttgcgcagtaagagttgaaactcatgaacacatgccacagagcatgtccctgaggattcacaggccactgagatatcgtcttgcagaagacacggtcacagaaccagcatatgcttcccactaagatcgtagcaacataccatttcgcaatccttttggctgctgtgtcctctgtgtgaatgtagtacttgtacatccgagggatgcatagaaggcaaagtatcacgtagtgtgaccttgaaaccaattccaaaccctgaggtaagcatggactatggcaaaggcagcaccgtagaggaagagaaaagtgggcattgtacttcggtaatgcgaatctggtgagtaaaggatg

SEQ ID NO: 25986 - DNA, 1033 bp, Arabidopsis thaliana
ctcatttcactaagttattaagtcataagagtatgaagatggttggagatggctaataagtcataaaagtatgggcaagataaaccgaaattggttataatcatacattatccggtttatgagccgaaaaaacaaaccgaataaccaaataaccgggaacggttttgggtttggttaggttcaatttagtttggtaattggtattgcaataataaaaatgctttctatgtttttttaacaggtttgctacggctaatgtgggtgtgggatttgtgctggtgatatatgtcttggtaccaatatgctattggctcgatgtgtacaaggccaagaccttccccatattttcgagctcacttttttcgagccagggttcaaagtacaacatcacatccattatagactctaatttccaccttgacctcccagcctacgagcgtcaaggccctttgtatctttgcactttcttcgccattagttacggtgttggttttgccgctttaagcgctaccatcatgcatgttgctctcttccacggaaggtataataaagctcatacataacaatgtatatcaaaataagctcttatgaactatatgtatatatgtaaggatttggatcatcaatggttttttttagctcgcttctgtaatgtcttttaatggatatgtttttagggagatatgggagcagagtaaggagagttttaaagaaaagaaattggatgtacacgcgaggctaatgcaaaggtacaaacaagttccagagtggtggttttggtgcatactcgttaccaacgttggagccacaatctttgcttgtgagtattacaatgaccaacttcaattaccatggtggggtgttctattggcatgtaccgtcgccattatctttacacttcctatcggtatcatcaccgccatcaccaatcaggtaaaaaaccatatctaaattgaatacctatataatttgtctcaaattatttggagatttagtgcaaattcatattaagagtatgtttaatggttttgta

SEQ ID NO: 25987 - DNA, 561 bp, Arabidopsis thaliana
gttcttggagatgagttatcatttgaataatgatggctaacaccctttgcgtctcaggtacccggtgaacctaacatatcctatatatgctcccggtactacagggccccagaacttatatttggggcgacagagtataccaatgccattgacatgtggtccggcggttgtgtcatggcagagcttttactttggtcaagtaagtatattatacattgtagagtttcggttatgatgaaccattttattttgattgatcagttttcattattacttcgaaataacatttaatctgataacaactgttgattttctacccgtagccactgtttcccggggaaagtggcattgatcagctggtggagataatcaaggtacttaacctgatccctcgtgttccttcatctctcttctatatttaatttactagtttactcatctgtacatctaccagattcttgggacgcctacaagagaagcaatacggtgtatgaatccgaattacacagagttcaagtttcctcaaatcaaagctcacccgtggcacaaggtttgttaaat

SEQ ID NO: 25988 - DNA, 638 bp, Arabidopsis thaliana columbia
cgccagtgtgctctaaagcggagaagctcaccatctccatacgcatagtttcaaagttgaaatcggacgcgattgggttttgcatccagccgttcgcaaccagaatccacagtgcggacaggtttgaaccgagcgccaccagccaggtgacacacatatgctgaactttacccagacggatcccaaccgaagaagaacagacctacaaaggtggattcgaggaagaaggccatcagaccttcgattgccagcgggcaccgaagatatcccctacatagtgggaatagtaagaccagttagtcccgaactggaactccatggtcagaccggtagccacacccagagcgaagttgataccaaacaacttgccccagaacttggtcatatctttataaatctgtttgccggagaggacgtagaccgtttccataatggccagcaggaacgccataccgagcgtcagtggcacaaaaaggaagtggtacatcgcggtcaaggcaaactgtaagcgcgacagttcgactatatctaacatcatgactccttgctcatcgcatgaagactccgagagtgaacccgttagaaagggtcaacgcatgccccaatagagatttgtttgacactttcacatccatgtg

SEQ ID NO: 25989 - DNA, 529 bp, Arabidopsis thaliana columbia
cactaagagcatgggcgtatattgctcttgcggtctcaatggaacccctcttcttgcactcatctgcatcagcaacccaagttctctttctatcctcttcttccactccaatacctattgtgttcttaataatggcctggcatgtagcgacagatccaactctctcacatgcctcagcctcactcatccaattttctcggtcaataacaaccccttctctctggagagtctttatacccctatcaataatctttcccaccatagccgtgttatcattagcttcatctagcttcccattagcttcttctaacttagcagcggtgatccaaattgcaggctcctttgggagcttctctctcgctttgttcaacaccttctttgattcagcatatgtttcgagcctcgcaagtgccacccatagctccagatgcaaagggcagcactccacagccctgtgaagcaaaatccttgcatcctcctcattagccaactcaacaacagccttccatagtcttacagagtctggaat

SEQ ID NO: 25990 - DNA, 470 bp, Arabidopsis thaliana columbia
  unsure (1)..(470): unsure at all n locations
nnnnnnnnnnnnnnnnnnnnnnnnnnctaaaggtaacgccagtcccgaatgtcatggtttataccagcggcaaaaaaatgccgatggtggtggagggcagcggcgaatatagctggctgctgaccaccgaagaaggaacgcagtacaaaggccatgtaacggggggcaaagcgttcaatctaccgacgaagctgccggaaggttatcacacgctgacactcacccaggacgaccagcgcgcgcattgccgggtgattgtcgccccgaaacgctgttacgaaccgcaggcgttgctgaataaacaaaagctgtggggtgcctgcgttcagctttatacgctgcgatcggaaaaaaactggggtattggggattttggcgatctcaaagcgatgctggtggatgtggcaaaacgtggcgggtcgttcattggcctgaacccgattcaatcgctctatcctggaaatccggag

SEQ ID NO: 25991 - DNA, 550 bp, Arabidopsis thaliana columbia
agaggagtaacggccgcagtgtgctctaaagagatatattaatgataatcactatcaccatatcgtcacgcctgaagccatcagtctggcgttggaaaaccacgaattcaaaccgtggatccaaccggttttctgcgcgcagactggcgtactgacgggctgtgaggtgcttgtccgctgggaacatccacaaacgggaattatcccaccggatcagtttattcctctggcggagtcatccggtcttattgtcataatgacccgccaactgatgaaacagactgcggatattctgatgccggtaaaacatttgctgccggacaatttccatattggcatcaacgtctcggcgggttgttttttggcagcgggatttgaaaaagagtgtctgaacctggttaataaattaggtaacgataaaatcaagctggttctcgagctaacggaacgtaaccctattccggtaacgccagaagccagagcgatatttgacagccttcatcagcacaacattacctttgcgctggatgactttggtacgggttatgcg

SEQ ID NO: 25992 - DNA, 572 bp, Arabidopsis thaliana columbia
ccaatccacggtgtccattgtacttcttgttttttctctaattcctgctctagcttgggcttctcttcttaaacaatcccagtcaaacgcttttttttcctccttcaaaacctttttccctttttcttttaaggtaggtttctgacaactcaaaacatccccatcttgctgagagcaacaaccaggttcactactatcaacagaggattttgtgggctctttcattgactggaaacccttaatttctgagctacaatcacccggagacatatttggtgatacttgattggaatcttctagagagacttgtaccccctgtaggagcttcataaaggaagtacgatactctccttctaagtcgatctctgagcttgatcctgctctctctgtattttgaggagcatcagacaccatcgaatgttgacatgtaagtgcagaatcttcagatggaaacaggttcaggacacgacacttctcatccgtcttatcaactctacacttgagccttttcgatctgaatcaacatactcctttgaatccgtggttttgtcaactgattcatgggctgagat

SEQ ID NO: 25993 - DNA, 611 bp, Arabidopsis thaliana columbia
tgagatccctctccttactaagcaataacgtggaaattcattaaaacattagtgttattaaaacctatgtttattcttggttttttcttgggggactcttttctacttaaatctggtttatcttgcaataataccctagtcattgcatgtggctgaactgttataatcacatttcttttaaaggttgtggaagccgttctttcagtaaagatgacaaatcagcggggagagataaaataccctatcaaggtctgttaatgcttctctgtcaaagtttcaaacataaagatctgtagtgaggatgatatttttatgcttaaacgcttattcttaccgcattgtagggcattaatattctgaaagctcatggacaaagtgcaagagacagctatttgttaaatggatatgcactcaatactggtcgtgctgcccaagggatgccattacgagtgtcccagcaaagattgcttgccttgacttcaatctgcagaagacaaaaatgcagctgggtgtccaagttgttgttaatgcccacgagaacttgaaaagatccgtcaaaggtagttttcgcagttatacacttttccctgaagtccttacattcagagtgc

SEQ ID NO: 25994 - DNA, 488 bp, Arabidopsis thaliana columbia
gtctcccaagtccatgaatagtccaacaacatcacaaccgaaagatggcatccagaacagtaactcttttctctctcagggtaagggaaggaaaagagagcgtatggatcatggttccgagtctgttaaacgggaacgttctagtcgagtagatgacagtggttctggtcccctcagaacagaaagcggtttaaagtctgagattttaaaatttacagagaaaggtggtctggtggattctgaaggagttgaaaaattggtgcagctcatgctgcctgagaggaatgaaaagaaaatagacttagttggccgtgcgattcttgcaggggttgtagcagcgacaaacaggtttgattgccttagtcgttttgtccagctcaggggattacccgtgtttgatgagtggctgcaggaagttcataaagggaaagttggggatgggggcagtcccaaagacagtgataggctagtagacgatttcctcttag

SEQ ID NO: 25995 - DNA, 555 bp, Arabidopsis thaliana columbia
caatagatgtgtaatcatatatagaagggctgaaagaaaacttaacagcaaactcgaggaagtatttctcttgtctttcttgtggcacacatgtccaactatagaagggacaatcaaatttgtttgtaaacactctagttatcttcctaacaagtcgcgagtttgtgtcccgagtaaacctccatacacaagaaaaacaagcagctgttatttggaagattatataaacttatcagacctaaacttaaatcagagatcaacacaacagaaccctaagatcagacctaaacttaaatcagagatcaacacaatataaccataagatcaaaacacaacatgttcaaatgcacttaatcaaagacacgactgcaaacacacgacttttcaaatgcatctgtgacaaaacatgaatcagaaaagacaaatacttaaactacttggcctcacaaagctcattacccaacataaccataagatcaaaccacaacatgttctcgcaaacaatagatatagaatttcataccaacagatcaaatgtagcaaaaggctgcaagt

SEQ ID NO: 25996 - DNA, 554 bp, Arabidopsis thaliana columbia
ttaccttcgtcctgatcttaaacgtggtaattttactgatgatgaagatcaaatcatcatcaaactccatagcttactcggtaacaagtacgataactttttcctctctttctcttcttctaaaaaaacagagtgaaaatagaaaaacagagtcacttttttttttctccctactcttgtttctaggaaaaagatttcaactttctaggaaacagagagaaaatagaaactgggtcactttgttttcctgctctttcttcttctttgatctttcccaggaaaaaagtttcaactttctaggaaacagagtcgttcacttttttgtttcctctgtttttgttaaagctttcctctgttattgttattcatatgaatttgaaatgttttgttttgcagatggtcattgatagctggaagattaccaggaagaacagataacgaaataaagaattattggaacactcatattaagaggaagcttcttagtcacggtattgaccacaaactcatcgtcagattaacgaatccaaaacggtgtcgtctcaagttgttgt

SEQ ID NO: 25997 - DNA, 1017 bp, Arabidopsis thaliana
cagcataacttaggaagagagtttaccttctaatgcgttctctagcatccttttaacgatttccactgaagaatcttcaacaagtgtgaggaaatgcttcccgattgcttcatcaaccgaaagaccagtcagctcagcaattttcgtgttccaaccattaaccagtccatcagaatcaaccgccaatattggcaccgtagcagtctcaattaaacgaaccatctcactggtcacagcttctagttcttgtataccatcaattttgagatcatttagcttcgagtaaatgacctttgtattcacatcagtagtttcactatccttgaaagcattcctcaaaataagttgcaaggagtgtatggcatccatctcatagtccttccaaggtaaactccttgtcttgaccacttcaaggaaagccttgaacgatgaccttgggtgcattctccttgcatcatccctatcatctggatcatgcttcgcacctccccatctcacttcaccagcggtatgagaacggaaccagaaaatcatgtctttcgatgatatcctcacagctgccatcccacataccgaatccccgagagatagagccctaggaaacccggcgtcatgcaaactatcagtgctcaaacccgttgaatccatgtggtattcacacaaccatgaagctatctcctgcaggtggaactcacttggagttgttcccagtttccatatcttgtctttatacaagagagctgctccatcacatttcacaaggtccattatgttggggctttgcgacacaatacccagtggagcatcacgcatcagcatatcgcacaagagtgtctgcgtgcgcaaaatgttcttctccaccatctggttatcgagttccacctccttattgacgtgtatggcaaacacttgagctagaaactcacaggcatacctgagaggaaatggaacaaacctcggagtcgtattgtgacaaccactaaacccatagtctctttctcttttgaggatgtgtag

SEQ ID NO: 25998 - DNA, 567 bp, Arabidopsis thaliana columbia
ttttgtaccttatatatgcaaaatgcagaggatgagaggaatgaatcacatcactcgtcttcgtttgccgtgaaaatgaaagtgaaaggagcgaacttgtaaccatctccttcgtagaatttgttctgaaactcaacccagtgaagacgcagcgctgaaggaacgccttagtgtctccatcaccagcaaaactcccacggttgcgaatatgaacaccaagaccccaacgatcaggatcaacggattgttgtaactgtttcgttgttagtgccaacgagacacgaaaagattagacatgttagaccaaagatggagatagatttagggggaaaaaagagagagagagagatggatcaatgaatgcatacccccaagcgagaaggaggaccttctcatagaagactgatgacagctccgagtgggcaagactgaaacaaaagaatggatattaagccacgagtataggttatgtaattgatgtatagcttctactactcatacctgagagccgatagacgcaggtaagaagcggtgttggaacagctcgaacacaaactctatggtgtg
